United States Patent Application Publication US 2022/0090207 A1 - sequence listing, part 21

SEQ ID NO: 270094 - DNA, 174 bp, Homo sapiens; identical to SEQ ID NO: 217455
  chr17:1938562-1938736
  hypo

SEQ ID NO: 270095 - DNA, 53 bp, Homo sapiens; identical to SEQ ID NO: 217456
  chr17:1940206-1940259
  hypo

SEQ ID NO: 270096 - DNA, 175 bp, Homo sapiens
  chr17:1990505-1990680
  hypo
cagtaggctcacagtaaagacggacagcccagggaagctcggctgggtaccacagagagcagatgaagcaggcatgacccatgttctctaagacagtggaaataaatgagcaccgctgtgcaggctggctgcccaggaaagtgcggcacacaccggtcaactgtgtgctctgtgg

SEQ ID NO: 270097 - DNA, 47 bp, Homo sapiens
  chr17:2006932-2006979
  hypo
caggcagtggggaacggctggctctcgccccacgctcttcttgtgag

SEQ ID NO: 270098 - DNA, 31 bp, Homo sapiens; identical to SEQ ID NO: 217457
  chr17:2015469-2015500
  hypo

SEQ ID NO: 270099 - DNA, 64 bp, Homo sapiens
  chr17:2111757-2111821
  hypo
ggaggggtccacagcgcagaccccaccaaatctgaagtgcttactgcagcgcctgggtgttgaa

SEQ ID NO: 270100 - DNA, 50 bp, Homo sapiens
  chr17:2135566-2135616
  hypo
tagatcaataggtcaccctccggcaccacgtcaaccaatgagatgactac

SEQ ID NO: 270101 - DNA, 148 bp, Homo sapiens; identical to SEQ ID NO: 217458
  chr17:2146555-2146703
  hypo

SEQ ID NO: 270102 - DNA, 147 bp, Homo sapiens
  chr17:2181379-2181526
  hypo
ggtatgtgcatacacgtatacacttataaatgcttagaaaaaggtctggaaggacatcaatcagttaatagtgatgtctccgaaggaaagaatacaagtgactgccactttatatatacttttttttttttttttgagacaaagtct

SEQ ID NO: 270103 - DNA, 156 bp, Homo sapiens; identical to SEQ ID NO: 217459
  chr17:2182384-2182540
  hypo

SEQ ID NO: 270104 - DNA, 120 bp, Homo sapiens
  chr17:2207847-2207967
  hypo
tttaaaaactagatacgatatagttggaatcgtgtggaaggaagtacatcaggaggcatataagtccatttgggacctgtaatcccggcgactcggaacgctgagacgggcggatcgctt

SEQ ID NO: 270105 - DNA, 36 bp, Homo sapiens
  chr17:2208027-2208063
  hypo
gtctccaacagagcgagactccgcctcaaaaaaaaa

SEQ ID NO: 270106 - DNA, 76 bp, Homo sapiens
  chr17:2220983-2221059
  hypo
ggagactccatctcaaaaaaataaaaaataaagatgcacatgagatatttaagaggtaaatcgataagatttggtg

SEQ ID NO: 270107 - DNA, 157 bp, Homo sapiens
  chr17:2249956-2250113
  hypo
gcaaaccagtctggcggcagcaggggggtgggtggggttctctgtgtgctgttcccaggcccgaggatcagaacctatgtaactgccacctccgtgccagtggagggtggcgctaggagaatggactcaaaactaccactatggggccaggcatggt

SEQ ID NO: 270108 - DNA, 38 bp, Homo sapiens
  chr17:2263307-2263345
  hypo
catggagaggagcatgtggacgcttaagccaaagattt

SEQ ID NO: 270109 - DNA, 627 bp, Homo sapiens
  chr17:2278750-2279377
  hypo
agtgcaggtggagccgccctgtgttcaccccccaggtgtttatctcagtggatgatctggaacccccggagccccaggaccctgaagattccagaccaaaacctgagcaggaagcaggacccgggactccgggcaccgccgtggtggagcagcagcattccgtggagttcgactctccagactcaggactgccctcctctcgcaattactccgtggcctcgggcatccagtcaagcctagatgaggggcagagcgtgggcttcgaagaggaggacggcggtggggaggaaggctccagtgggcccggccctgcagctcacactttgagggagccccaggatcccagccaggagaagcctcaggccggagaactggaggccggagaggagcttgcggctgtgtgtgcggctgcctacactgtgcgtacatgctccccaggctgttcccagccgccccagaggccctcctgacatcccagagctggggaagcgctggtggggtggaaggcggggcgccctgactgccctggaagggagttctgagcccatttctcagcatccccacaggactcgctctggtctctgggttccgttttgctgcatttcttggggcgtcacctcctgcccc

SEQ ID NO: 270110 - DNA, 122 bp, Homo sapiens
  chr17:2289841-2289963
  hypo
aaggcggggcagggcgggggagaagtcagggagcgtgacgtccacatcgcactgatttccgagggtagggaggggaagcaggagcggcactggagctggcactgggccggacaggtggcaca

SEQ ID NO: 270111 - DNA, 128 bp, Homo sapiens
  chr17:2290294-2290422
  hypo
tgagcccccacggccggctttgccatgacagtagccgggggccccaggccggccgtgccgttgacttgctggtgcgagagggtgtgggcgatgtggctcactgccacgggctgcgggtacaagggcag

SEQ ID NO: 270112 - DNA, 393 bp, Homo sapiens
  chr17:2291779-2292172
  hypo
ctaggcagtgacacgccctcgccccatctcatctccaggactcgcctccctcctggctgctggtctgcacctgctccccgaccccctaggcgactctccactgtgcccgcctgtgacgcttctcgacgaggctccatttacatgctgctccccatcaccctgcccactcccctccagactccctgggctgaacaacccccaagcctaggaacgtgccccctgtacttgggctaaaccgatccatgagaaatggctgttgcgtcccatgacccagctcccctccacactcagtctttcccgtgctccaacccgacacttcatcaatcccaccctttcaagtctcacagacctccctgctggcagcttttcgcccaggcacgtcatgaccaatgt

SEQ ID NO: 270113 - DNA, 202 bp, Homo sapiens; identical to SEQ ID NO: 217462
  chr17:2326291-2326493
  hypo

SEQ ID NO: 270114 - DNA, 39 bp, Homo sapiens; identical to SEQ ID NO: 217463
  chr17:2326810-2326849
  hypo

SEQ ID NO: 270115 - DNA, 120 bp, Homo sapiens; identical to SEQ ID NO: 217464
  chr17:2388546-2388666
  hypo

SEQ ID NO: 270116 - DNA, 32 bp, Homo sapiens
  chr17:2529849-2529881
  hypo
ccccccccccccccccgaggcggagtcttgtt

SEQ ID NO: 270117 - DNA, 77 bp, Homo sapiens
  chr17:2539951-2540028
  hypo
caaagtgctaggtttgcagacataagccaccacgcctggcctcagggctcatatttgaaacccgaaggtatgcattt

SEQ ID NO: 270118 - DNA, 39 bp, Homo sapiens
  chr17:2590520-2590559
  hypo
ggcaggctcaggttcgagaaccaccgagctaaatgattc

SEQ ID NO: 270119 - DNA, 203 bp, Homo sapiens; identical to SEQ ID NO: 217465
  chr17:2595624-2595827
  hypo

SEQ ID NO: 270120 - DNA, 235 bp, Homo sapiens
  chr17:2599038-2599273
  hypo
aagcagaggtgcccgcttgggggcactacttgacccccagccccgtgtcctgaggcttggaggccacggtgttgggggagcacccagcatcctggaaccagacacagagcctgcgggaggaggaggaggatgggcagcccccactgagctctggccccgtcccccagccatgccaccatccagggctcagaagactggattaccagctgccagcccacacggtgggctcagcagg

SEQ ID NO: 270121 - DNA, 85 bp, Homo sapiens; identical to SEQ ID NO: 217467
  chr17:2603725-2603810
  hypo

SEQ ID NO: 270122 - DNA, 34 bp, Homo sapiens; identical to SEQ ID NO: 217468
  chr17:2616132-2616166
  hypo

SEQ ID NO: 270123 - DNA, 273 bp, Homo sapiens
  chr17:2616826-2617099
  hypo
atagtgtgtgtatatatatagtgtgtatatatataagtgtatatataaaatatatatatttataatcaatatatataaaagtgtgtatatatgtgtgtatatatacacatacatacttatgtgtgcgtgtgtatatacgtatgtgtatacacacactcgttcctcttttgttacacaaatgtgcagaaaattgtacctgctattcttcactctgattttttttttacacgctttcagtaggtgttctcattccatttacgctggataatgttg

SEQ ID NO: 270124 - DNA, 44 bp, Homo sapiens; identical to SEQ ID NO: 217470
  chr17:2684790-2684834
  hypo

SEQ ID NO: 270125 - DNA, 240 bp, Homo sapiens; identical to SEQ ID NO: 217471
  chr17:2684894-2685134
  hypo

SEQ ID NO: 270126 - DNA, 44 bp, Homo sapiens; identical to SEQ ID NO: 217472
  chr17:2685194-2685238
  hypo

SEQ ID NO: 270127 - DNA, 95 bp, Homo sapiens
  chr17:2708584-2708679
  hypo
gagctccttgaaggagcagccggaacgggaggatctgagctgggagcctccgagacactcctcttgtcctttatttcttttttgagaccgcgtct

SEQ ID NO: 270128 - DNA, 84 bp, Homo sapiens
  chr17:2767337-2767421
  hypo
ctctgtccccctcaaaaaaaaaaaacagtggcggcgggagcccccggttcctcaccgtcttgtcccgtacgtagcagcatgcca

SEQ ID NO: 270129 - DNA, 101 bp, Homo sapiens
  chr17:2799189-2799290
  hypo
gcctgctgtgccctcgaatggtgtgatgtgtctcctgggcattgcgacactggtggtctctccgtcatgctggtcacgttcctctgcgtcctgcttctgtg

SEQ ID NO: 270130 - DNA, 180 bp, Homo sapiens
  chr17:2805373-2805553
  hypo
aatccttcctcgcctcttctagcctctggcggggtcggcaagcctcagcatgcgttggcttgcagccgcatcactcctgtgtctgcctgagaacacggggcattctcactgtgtgtttcttcacattgttgccttcccttcttttttttttttttgagatggagtcttgctctgtcaccc

SEQ ID NO: 270131 - DNA, 156 bp, Homo sapiens
  chr17:2811367-2811523
  hypo
ggattacagtcgtgagccaccacgcctggcccagagtcagcattttaccgtcattttccggtgatttgtatacacagggcagcttgagaagcactgctgtgggcctctgcacatgcgttcaggcagccgagagagagaaggcgacagcaagaggaa

SEQ ID NO: 270132 - DNA, 145 bp, Homo sapiens
  chr17:2868866-2869011
  hypo
ctggggaacttgatcctgtccgtcaagtgcgaggaagcagaggggatcgagtacctccgggtcatccttaggtagggctgttgcgctgcttgaggccacttctcttccaggcagggctctcatcggtggtgtgggggctgggatg

SEQ ID NO: 270133 - DNA, 287 bp, Homo sapiens; identical to SEQ ID NO: 217474
  chr17:2908449-2908736
  hypo

SEQ ID NO: 270134 - DNA, 168 bp, Homo sapiens
  chr17:3374890-3375058
  hypo
agaggctccagtccgagttgagacgctcttccaaaggcctctcctgacccgcccacggagtgggggcagtttggtatcaacgcacagtctttcccttctaggccctcctgccaacacgacacacaactttcgccctcagtttccctcgcctccgtcaaccgtcgtcca

SEQ ID NO: 270135 - DNA, 35 bp, Homo sapiens; identical to SEQ ID NO: 217475
  chr17:3375581-3375616
  hypo

SEQ ID NO: 270136 - DNA, 86 bp, Homo sapiens
  chr17:3474665-3474751
  hypo
atgtgctcatggccgacgtcaggagctgccacagcgcccgggtcctggggggatgaggaacccggcaaggcgtggggaacctgcaa

SEQ ID NO: 270137 - DNA, 321 bp, Homo sapiens
  chr17:3486255-3486576
  hypo
agattccagtatgcaaggagatttccttcactgctcagagctttaacagattggtttaattaaaaaactaccagtcatgatcctatcacttaagaggcctccactctgcccctgtaatcaaatactccgttccgtggagtggctggagtgtctactttcaagcttgcctgccttgggcctgtggagacgccctgagcaccctcccgccccgcggtgactgactgaagggctctcatcttcacctctgcgtctctcagctccccaagtagggctatgatgtgtctgatgaattaaaaagtgagtgagcgctgagggatcttc

SEQ ID NO: 270138 - DNA, 72 bp, Homo sapiens; identical to SEQ ID NO: 217476
  chr17:3500360-3500432
  hypo

SEQ ID NO: 270139 - DNA, 121 bp, Homo sapiens
  chr17:3560847-3560968
  hypo
agggaaaggcaaggcgaggggacagattcctgagatcctcaggctgctgccgggtcgtgggacgagtcagtacctggctgggagaggcaccaggccaccagagttccgaccccacgtctcc

SEQ ID NO: 270140 - DNA, 84 bp, Homo sapiens
  chr17:3561543-3561627
  hypo
ggggcagctcctgccggcgtgaggaaacaggacggaaagccacagggagcccgggagcccagcgggagcggggcggtggggagg

SEQ ID NO: 270141 - DNA, 250 bp, Homo sapiens
  chr17:3562849-3563099
  hypo
ccccagggatgtggaggagacggggaaggccgcatcggccccgcctctgctggagctgtgaggtgtggggggtgcggggcctttgcttgctgtacatgcagatgagacgcctacccccaggaccacccaaactgttccttggctgaggcctgtcatagcccaaaggtcaccgtgtccttggagccaaggccccagtgggaggaatgagaaccgcttttgtttggaggggcagtcacgaggcgcatgaggc

SEQ ID NO: 270142 - DNA, 43 bp, Homo sapiens; identical to SEQ ID NO: 217477
  chr17:3577299-3577342
  hypo

SEQ ID NO: 270143 - DNA, 42 bp, Homo sapiens
  chr17:3585002-3585044
  hypo
tcctcccactgctgccgaggccgaatccggttctgtagagca

SEQ ID NO: 270144 - DNA, 190 bp, Homo sapiens
  chr17:3653522-3653712
  hypo
ctgtgcccacaaccacggtgctggctccctccctcagtgcctaatgtctgcatggagctatttagagcagggcaaatgggtgaggctgggcctgggaccccagaaagcaggacagaaccctaccggaacacaaccgcctggcccagagtgcccacggtgatgtcggcaaggccgtcgccactaatatcaa

SEQ ID NO: 270145 - DNA, 99 bp, Homo sapiens
  chr17:3660155-3660254
  hypo
aagagctgaggttcagggagatgatgggagttgctcagagaaaccacatgaagatgggacagaggccgggctggagcataggctcgggcctcctgcggt

SEQ ID NO: 270146 - DNA, 67 bp, Homo sapiens; identical to SEQ ID NO: 217480
  chr17:3664936-3665003
  hypo

SEQ ID NO: 270147 - DNA, 158 bp, Homo sapiens
  chr17:3711312-3711470
  hypo
atcagttgtttgggccattccgctggcccctccttcactccatgagcatagacaagagggcgggcccgggcaagctcatgcctctgctgcacctgcggcctgcctcagttcccaagctccccaaaagtgatcttctcgcctaaatgtggttctaacac

SEQ ID NO: 270148 - DNA, 609 bp, Homo sapiens; identical to SEQ ID NO: 217481
  chr17:3716185-3716794
  hypo

SEQ ID NO: 270149 - DNA, 73 bp, Homo sapiens; identical to SEQ ID NO: 217482
  chr17:3721569-3721642
  hypo

SEQ ID NO: 270150 - DNA, 213 bp, Homo sapiens
  chr17:3741553-3741766
  hypo
acagaatgaaaggcatgagccgtatcagaggcaagccgcctcaaggaatgctctcgggaccagaggtcgacaggtgtgataaagctatgacgccctcgcggtagagttgtgagagagactcacaggtatgcttgcgcccggctgtgcaggcacatgaaggtcaagccacacctggccttcacaggacttctcctcaaacagaaaccccgccca

SEQ ID NO: 270151 - DNA, 270 bp, Homo sapiens
  chr17:3755004-3755274
  hypo
tcctgagaccacacacgctctgctgtgatcatgccactcatggttttcttttttctccaccgctcctgccctacggcctttgcaggttcttcaacttccacaacagtggcattctgccagagctcaatcctgggccccttctcactccctcgactagctcatcacacgcatggcttccaactccacggccgtccacacgctgagggcccccgcgtctccatttccagttctcgcctctccctcgagctccagatgcgcatgtccagctgc

SEQ ID NO: 270152 - DNA, 111 bp, Homo sapiens
  chr17:3793345-3793456
  hypo
acagaagggaaagccgcagaggtggcggccacccaggccagacacagaaggtggtcctcccatgcctgggccgcctcactggagctgtgtttatgatcctggcgagtatct

SEQ ID NO: 270153 - DNA, 175 bp, Homo sapiens; identical to SEQ ID NO: 217483
  chr17:3844263-3844438
  hypo

SEQ ID NO: 270154 - DNA, 135 bp, Homo sapiens; identical to SEQ ID NO: 217484
  chr17:3844806-3844941
  hypo

SEQ ID NO: 270155 - DNA, 370 bp, Homo sapiens
  chr17:3850755-3851125
  hypo
gggtctccacggacggcaggcttcgcacgatggcgttcttgcgtgccatgcgccgcgtgcccagtgccaggcatgtagtgatgacagccgggaggccctcggggatggccgccaccgccagggccacggcgatcttgaagtagtagacagcgccacgcagccaggagccaccgtgggccgggtcggcgaagtggccgatgttgatgacccacacggccacgcagatcacagagatggcgtgggacagctgccgtccaaactcgtccagcttgcgctgcagcggcgtccgctcgggctcgactgccgccatctggctccggatcttgcccagctccgtgtgcaggccggtggccacggccacacccaccgc

SEQ ID NO: 270156 - DNA, 156 bp, Homo sapiens
  chr17:3860424-3860580
  hypo
cagctggtggtgtgcgccagacaccctgctaactccttgcgtgccttattctcatgatccgcaaacaagctgggaaggaggatgccattgttatgcccattttacagagtacacaacagagaggttgagtgactagttcaccgtcacacagcgggg

SEQ ID NO: 270157 - DNA, 91 bp, Homo sapiens; identical to SEQ ID NO: 217486
  chr17:3884835-3884926
  hypo

SEQ ID NO: 270158 - DNA, 558 bp, Homo sapiens
  chr17:3980237-3980795
  hypo
agggattccaaaatcgctctcatgcttgccagaaactggcccacatctaccgaaacaaagaaaataattaatatattatatagtagaaatgtcacatgcttggttatcaccacagacaagaataaagagactccagaagctgcagagggggttccacagcgaagaccacaaggccagcaagtgccgtcctaatgcattcctcctggaggaagaagcagtgcgaatttcagtacaagactcacttttaaagggatttttttttgtcttttgatgaagtagaggagcacttgtagaagtgaaattccatgcctgactaacccagctgtcagcctctccttttccttctgtttacaatgagcccgtgcattaggtgtaccaatctaacaggccaagctctaggtggcaggacccaatataagtgttttcgtcacagctgctgggaccaagtttgatggaactacattttccacgtataatttgtcagcacccgttgggtttcatataattttctgtgagtttacagaacatgaatctaattattctcggtaatcagcaatg

SEQ ID NO: 270159 - DNA, 115 bp, Homo sapiens
  chr17:3985688-3985803
  hypo
agatttgagttatccgacaattaaaaagaacgatcagcttacctaaaatacgtgcacagtgaacggaaagtgagctgcagggactgcttgtgctcctgctcggtgacattcttct

SEQ ID NO: 270160 - DNA, 31 bp, Homo sapiens; identical to SEQ ID NO: 217488
  chr17:4039291-4039322
  hypo

SEQ ID NO: 270161 - DNA, 31 bp, Homo sapiens; identical to SEQ ID NO: 217489
  chr17:4039622-4039653
  hypo

SEQ ID NO: 270162 - DNA, 104 bp, Homo sapiens
  chr17:4048008-4048112
  hypo
ggggttaaaggatgcgatttgcctgaaaccctcacacctgaatactgacagaatatggactcggaccaccagtctagtgctttttttttaaagatggaatctcg

SEQ ID NO: 270163 - DNA, 345 bp, Homo sapiens
  chr17:4048747-4049092
  hypo
ggcagttttcgttgcgctgccctgctgcgtgctgtgggagctgtcgttggatgtttgcacaagtgtgggcataaaaccttcgatgtctggagtgctttttatttttcagtgtgctctgctgtttactgagctcccgtgttctggtattcattgaccatctttatttaccactacctaccttgtgtcaggggctgtggaatccaagatgtctgcaacatgctccccaccgcccacacagtctagttgggaagcagttatgtccacgtattcgttcattcagtattttatttctcattgagatgtaattcacgtgatgtaaagtccttttaacgtatacaattcagt

SEQ ID NO: 270164 - DNA, 31 bp, Homo sapiens
  chr17:4063865-4063896
  hypo
gcgtgtgggaagttcgtgcagagttgtttct

SEQ ID NO: 270165 - DNA, 288 bp, Homo sapiens
  chr17:4074112-4074400
  hypo
cggcacaagttggcgttccctttcatgtatgccaggagcagcactggaaaacaaaagcacgcgcagggctacttcccacccggcccagcccggcagccacagacggagggcggaggacagccaagggcagaacagaccgctggcaggaaatctgttcacaaagtccccacagacatacgggggccccgaggctctggagagaactgtggacaacctgtagcatcttccaataaaggatgtggccacgagccaaagaattctagagcagctgccgtttccaagacacag

SEQ ID NO: 270166 - DNA, 85 bp, Homo sapiens; identical to SEQ ID NO: 217490
  chr17:4076474-4076559
  hypo

SEQ ID NO: 270167 - DNA, 307 bp, Homo sapiens
  chr17:4079169-4079476
  hypo
gacactggaagacccgctgtttctagtgtttctgggcgatcctatcatctgtcatgccgggccccaggaaggcggggtccttggtcagggaccgtaacctcctccagccctacagaggcataaagactgatgaacacgaggccgattccctacgactttgggacccagctccgcctccttggctgcttcccccacatccaatctgttcctggcaccatcatacccaccgctccttagccctcagttcacactcactgccacggcctccgctcggtctcgtcactggtgagcccgccccacacctgtg

SEQ ID NO: 270168 - DNA, 41 bp, Homo sapiens
  chr17:4090911-4090952
  hypo
agaaggaacaacagcgggtagacaatgtgggcccaagggag

SEQ ID NO: 270169 - DNA, 144 bp, Homo sapiens
  chr17:4137079-4137223
  hypo
cagagtacgggctccgtatggcagggactgtgttataatcatctcagtgttcctggcactgcgcatggaaaacagtaccttctcaactgacaaaccttctgaacaaagatataattcacacaatcacttcggcaagtccagtca

SEQ ID NO: 270170 - DNA, 240 bp, Homo sapiens
  chr17:4144869-4145109
  hypo
tgagcttctaacagaagctgtatgactccagagttcaacctcaaccatcatgatgcactctccaactagttccaagactgttttgctttgatcatctcaagagaaacggacctttgccctctgaattcctagacaggtaagtcaattcctgcttgattagcaatgctatcaccatgactcccgcactctttgctgaagataagcagtgaacgagagacacaaatcttgcctcgggcccgg

SEQ ID NO: 270171 - DNA, 206 bp, Homo sapiens
  chr17:4151786-4151992
  hypo
tcagagaagtacgtgtaaagtcattaggataggttaaatcactcggaacagtgtctggtttagtaaggcttaccgctgctgctactcctctgcctacttattcttcatcaagtgaccagttttcagccgtggttttttctttgtccccttccaactttcatttgaaaagcaagcctagaaatttaattagccgggcatggtggcgc

SEQ ID NO: 270172 - DNA, 45 bp, Homo sapiens; identical to SEQ ID NO: 217491
  chr17:4161526-4161571
  hypo

SEQ ID NO: 270173 - DNA, 141 bp, Homo sapiens; identical to SEQ ID NO: 217492
  chr17:4215641-4215782
  hypo

SEQ ID NO: 270174 - DNA, 142 bp, Homo sapiens
  chr17:4236551-4236693
  hypo
actgaaatgaccttcgttcacatcaaaagtaatgtaaagaatgtgtgtatctcagccatcattttaaaagaagagaagaaaaaaacttacgggcgaagctgttccctaaacagctaaaatatgtaaaatgtaaaagacgggc

SEQ ID NO: 270175 - DNA, 120 bp, Homo sapiens
  chr17:4250033-4250153
  hypo
ttacattttcaatagaagtcaagaaaggaagacagaggaaacttaaactctgtgattcattcaaaatatatttgctgagtatctatatatgcccagtattgtgttatgtgctagtgatat

SEQ ID NO: 270176 - DNA, 36 bp, Homo sapiens; identical to SEQ ID NO: 217494
  chr17:4273440-4273476
  hypo

SEQ ID NO: 270177 - DNA, 37 bp, Homo sapiens
  chr17:4289153-4289190
  hypo
gggattacaggtgtgagacaccgcgcctggccattca

SEQ ID NO: 270178 - DNA, 377 bp, Homo sapiens; identical to SEQ ID NO: 217495
  chr17:4392108-4392485
  hypo

SEQ ID NO: 270179 - DNA, 288 bp, Homo sapiens
  chr17:4436331-4436619
  hypo
gggcatgtggatcccgctctacctgcaccgcgcccaagttgtgcagaagacagcagagacgtgcaacagcccgccctgtggggccaaggacaggtggggccccgcggggtgggcccagggctggtgagggacctcggacaggagagcccctcagccttagccctgagccgcctcaactcgtgcgccaccatcctctgtccccacagcctcatctttggggccatcacctgctttacgggatttctgggcgtggtcacgggggcaggagccacgcgctggtgccgcctg

SEQ ID NO: 270180 - DNA, 256 bp, Homo sapiens; identical to SEQ ID NO: 91895
  chr17:4446257-4446513
  hypo

SEQ ID NO: 270181 - DNA, 87 bp, Homo sapiens; identical to SEQ ID NO: 217496
  chr17:4461986-4462073
  hypo

SEQ ID NO: 270182 - DNA, 561 bp, Homo sapiens; identical to SEQ ID NO: 217497
  chr17:4500076-4500637
  hypo

SEQ ID NO: 270183 - DNA, 122 bp, Homo sapiens
  chr17:4643851-4643973
  hypo
tgtgtctggataccgggatgagttccttgatttcactgcccttctcttcggctggttccgaaagtttgtggcagagcgtggagctgtagggactagccttgagggccgctgccggcagctgg

SEQ ID NO: 270184 - DNA, 36 bp, Homo sapiens
  chr17:4649705-4649741
  hypo
cctgacctcaggtgatccgcccgcatcggaaaagga

SEQ ID NO: 270185 - DNA, 264 bp, Homo sapiens
  chr17:4685680-4685944
  hypo
atacattttaacaacccgactggagcagatttcgataatgcgtgggggctggcgctgagcgtcgtcacccacaggtggggagattgggccttacctccccttccacaccacatccagatgctgcgctcggtcttctcctcggcgttcggggtgcttggtgccatctactgcctctcggtgtctggagctgggctccgaaatggacccagatgcttaatgaacggcgagtggggctaccacttcgaagacaccgcgtaaggttta

SEQ ID NO: 270186 - DNA, 541 bp, Homo sapiens; identical to SEQ ID NO: 217498
  chr17:4795536-4796077
  hypo

SEQ ID NO: 270187 - DNA, 157 bp, Homo sapiens; identical to SEQ ID NO: 217502
  chr17:4916076-4916233
  hypo

SEQ ID NO: 270188 - DNA, 31 bp, Homo sapiens
  chr17:4928167-4928198
  hypo
ctgtctcttccttcagggtgcgcagcccgat

SEQ ID NO: 270189 - DNA, 35 bp, Homo sapiens
  chr17:5168548-5168583
  hypo
ggcaattaagaatatctggccgggcaaagtagctc

SEQ ID NO: 270190 - DNA, 247 bp, Homo sapiens; identical to SEQ ID NO: 217504
  chr17:5269054-5269301
  hypo

SEQ ID NO: 270191 - DNA, 164 bp, Homo sapiens; identical to SEQ ID NO: 217505
  chr17:5392214-5392378
  hypo

SEQ ID NO: 270192 - DNA, 171 bp, Homo sapiens; identical to SEQ ID NO: 217506
  chr17:5405104-5405275
  hypo

SEQ ID NO: 270193 - DNA, 163 bp, Homo sapiens
  chr17:5465216-5465379
  hypo
agccagcagaggcaaactcccggttccccgagaaacactctgaaggcagggtgggtgactccacccaccaccgcctctcctagccatgcaggccatgtctgctagagcttccagcgcagtggtcctaattctgtctgaatccggctgaggggtgcagcctcct

SEQ ID NO: 270194 - DNA, 499 bp, Homo sapiens
  chr17:6023533-6024032
  hypo
ccctgcccacttccctctcccgagcagccccccggggaccggcagccctggcagggccagcccccgactctgcatctctcctgtcctcactctagagtggccggactttgtcaacagctacgcctcgtggtggtcctcgcacgtcctggactggctcaagtacgggaagcggctgctggtggtgcactacgaggagctgcggcgcagcctggtgcccacgttacgggagatggtggccttcctcaacgtgtctgtgagcgaggagcggctgctctgcgtggagaacaacaaggagggcagcttccggcggcgcggccggcgctcccacgaccctgagcccttcaccccggagatgaaagacttgatcaatggctacatccggacggtggaccaagccctgcgtgaccacaactggacggggctgcccagggagtatgtgcccagatgataggcctggcccacgccgccgcccccgctgagtgacgcaatcgcaccacgg

SEQ ID NO: 270195 - DNA, 138 bp, Homo sapiens
  chr17:6419897-6420035
  hypo
aacaaagaaagaaagaaatacttgaagaaatcatgaaaagaaggcttcacagtagtgaaagagcacagccaggtatggcatgaccaacaaacacctccacaacaaaaacctactcagaaacgtcgcttgaaatttcag

SEQ ID NO: 270196 - DNA, 174 bp, Homo sapiens
  chr17:6456918-6457092
  hypo
tctgccttttctctccgtgggtgatctactggccagattttaaagggaacatctcacaggtcatggtgcagacccctcattcacaggccgggtgccacagcctccactcctggccttcagcagccctttgttcctgtgtcaccccccgccgccccaccccgccagagtgaaggc

SEQ ID NO: 270197 - DNA, 42 bp, Homo sapiens; identical to SEQ ID NO: 217509
  chr17:6470126-6470168
  hypo

SEQ ID NO: 270198 - DNA, 718 bp, Homo sapiens
  chr17:6474307-6475025
  hypo
gatgcatgccagtccgaggccccagcccggaatggggagcccactacgtgcccctccagaggctacaccacgatcaacatggagagaaagagcccaggcccccaggccctgcccagattgtcctcgcaaagacccagccaccctgttggccccgcgtctgtttcaaatcccatgcctgggatttctttttgacattaaagtaaatgttggccagagagccacctacaagggtgacgaaggctgccggcttctcattggagggctgggaggagactctgcaggtctctgaggactgccaagactccttcatcacactgagcagatataaaatccattaccaagggctaataaatgcggggaggccggcagaggacatgcccgccttgctgggagggcacacactcaggccaagaacagcaggctctccaggcacagccactcgccctccgatatttgcccctcctgcacgcacctctctcggagtcccattgttctccattcaatcatttgggcaccaattctgtttctctttgactataaaagcccatgcctgcagacctctctacacatttattgtgcggctggaatttatgacggattggatttcagaggagggattgattaaatacagatggagcacttgacaagggcctgggggtcccggtagactcccccatttagaaacagaataaagattagaaagcgtgagcaagggcaa

SEQ ID NO: 270199 - DNA, 37 bp, Homo sapiens
  chr17:6755547-6755584
  hypo
atttttttttttttttttttcgagttggagtctcgat

SEQ ID NO: 270200 - DNA, 37 bp, Homo sapiens
  chr17:6755824-6755861
  hypo
ttacgccaccatgcccggcccagaatttttttttaat

SEQ ID NO: 270201 - DNA, 92 bp, Homo sapiens
  chr17:6899902-6899994
  hypo
gttaatgggacccacgtgggcgatgctgctccagcatcagctccaggcgctgcgggccctcgtcctccacccgactccgggcgtctgagacc

SEQ ID NO: 270202 - DNA, 39 bp, Homo sapiens
  chr17:7048539-7048578
  hypo
gacaagaactccagtcgttagatctgtgaaaggaaaata

SEQ ID NO: 270203 - DNA, 159 bp, Homo sapiens
  chr17:7076077-7076236
  hypo
cttggttgtgtgttcgttgtatctgctacctgtctatgaacactgcttctgtttgctgtaatgaatgcaaaggacaccagtgagtttcattcgaagttgttgaagcactcaacaaattcgggtggttctgccgggggcagtggctcacgcctgtaatcc

SEQ ID NO: 270204 - DNA, 64 bp, Homo sapiens; identical to SEQ ID NO: 217510
  chr17:7077090-7077154
  hypo

SEQ ID NO: 270205 - DNA, 34 bp, Homo sapiens
  chr17:7116701-7116735
  hypo
agccaccgcacccggcacctcctctccttttctt

SEQ ID NO: 270206 - DNA, 211 bp, Homo sapiens
  chr17:7121867-7122078
  hypo
gcctggaagaggtcgctatgcagcactgtgaggagtgggggtgcccaccgcagcagtgggggtgccaggagccagagggctgacctgggagctagtgagatgcaaggagaattgggacagggaagatgccaacacaggaagatgaacacactgtcacttcatctccccagactgtgcccttcaccccagcccctacggaaagatttgggga

SEQ ID NO: 270207 - DNA, 37 bp, Homo sapiens
  chr17:7136109-7136146
  hypo
caaaaaagcagaggttgggccgggcgcggtggctcac

SEQ ID NO: 270208 - DNA, 72 bp, Homo sapiens
  chr17:7187872-7187944
  hypo
agctggagcgtgagcggccactgtccctgctccagctcctgggcagccgtacccaccggcagcccctgatca

SEQ ID NO: 270209 - DNA, 114 bp, Homo sapiens; identical to SEQ ID NO: 217513
  chr17:7188331-7188445
  hypo

SEQ ID NO: 270210 - DNA, 56 bp, Homo sapiens
  chr17:7192899-7192955
  hypo
ctgctgccgtctccgctggaagtaggggcggtttcgtgggcgctggggctcaggcc

SEQ ID NO: 270211 - DNA, 572 bp, Homo sapiens; identical to SEQ ID NO: 217514
  chr17:7224753-7225325
  hypo

SEQ ID NO: 270212 - DNA, 302 bp, Homo sapiens
  chr17:7227167-7227469
  hypo
gcgacagttgtggcggagggcggtgcggcccccgttagtgatgactgcgttactgccgtgcagctgatggaagcgcaggtcagagcccccggcccctgaggacggagagcttggagacacctggttgttcccctcagggagtggttcaggaactggagccacctctgtaaaagtggacatcacccatcaggtctctaggtgtctctcagacctcccaaggccaccctaacccccagccccagcccagcccggccctcacccacgtcgtccacaatggtggcctgggccgcctggccatagag

SEQ ID NO: 270213 - DNA, 170 bp, Homo sapiens
  chr17:7285130-7285300
  hypo
cctttgtgtcttagccgtgtggggcagtgtatctaggtgtttggaggcagtgaactgccatgtcccatggatgtgacacgtatgtacaaggaacatctcatggaaggacacagatgagcctgggcgttttgtggccgcatgctgaaatgtctcagcgttaagacgacata

SEQ ID NO: 270214 - DNA, 51 bp, Homo sapiens
  chr17:7292301-7292352
  hypo
ttccacctgagtagccggtccagagctgactgctggcgcatcctggagcat

SEQ ID NO: 270215 - DNA, 43 bp, Homo sapiens
  chr17:7318437-7318480
  hypo
gctggtggaccaggacgtgcagcctgcccggtatggggtggga

SEQ ID NO: 270216 - DNA, 33 bp, Homo sapiens
  chr17:7318916-7318949
  hypo
ctacgacatgctcatcggcgtcaaccagggaga

SEQ ID NO: 270217 - DNA, 323 bp, Homo sapiens
  chr17:7320351-7320674
  hypo
tgcacataggcctgaagccacgcgtgcgtgacaactaccgcgccaacaaggtggccttctggctggagctcgtgccccacctgcacaacctgcacacggagctcttcaccaccaccacgcgcctgcctccctacgccacgcgctggccgcctcgtccccccgctggcgccccgggcacacgccggcccccgccgcctgccaccctgcctcccgagcccgagcccgagcccggcccaagggcctatgaccgcttccccggggactcacgggactactccacggagctgagcgtcaccgtggccgtgggtgcctccctcctcttc

SEQ ID NO: 270218 - DNA, 160 bp, Homo sapiens; identical to SEQ ID NO: 217518
  chr17:7367404-7367564
  hypo

SEQ ID NO: 270219 - DNA, 524 bp, Homo sapiens
  chr17:7368875-7369399
  hypo
tcccacctcagctaaccacagtgctgggattactgcagctagcctagtttcaggataactttctaggccccaagccccacccactgccgcccttgttcctatgaccgctgagtgccagcctccagccgctcccccgccagcctggatcactcacctgcgctcccccgtgtgccacacttcatgcttcgtgcggtactccgccagagcaaacactttctcacaatagcggcaggggtacttcctccgccacgagtgtacattgctgtgtctcttcagactggacagggtcacgtaggaacgctcgcaggccgcgcacacatacagcacgtggccgcccaccaccttcaccacgtgctcggggccccctcggaagcccactggtggaggcagggctgaggcgtccacccctgcaggaccaccagggccagcgcccccagctcccagccctgtagacccccgcgtgctggcccctcgtcggcactgggcctcatgggtctgcagccgtttgggatggatgaagcttt

SEQ ID NO: 270220 - DNA, 35 bp, Homo sapiens
  chr17:7384627-7384662
  hypo
aacaagagtggaaacttcgtcgcaaacaaaaaaag

SEQ ID NO: 270221 - DNA, 284 bp, Homo sapiens
  chr17:7419623-7419907
  hypo
tggacaatgcccacctatggcggtgcaagagaaccttactcagtctaccgattaaaatgccgacctcttcaagaaacactctcactgacacacccagaaagaatgtttttccagctctctgggcgttccttaactcagtcaagttgacgcgtaccattaaccaccactgtgtgcccaggcatagttttctcatttatcccgtttgagtttccctgagatttttgattctgtaaaattgccttttagcgtatttgggaagtttttagactttttttttttttttt

SEQ ID NO: 270222 - DNA, 253 bp, Homo sapiens
  chr17:7460247-7460500
  hypo
gcagtaagagagtggcgaagggtttgccaggagagtgggggacaagctacagggctgggagggtgagttggggtttgggtgggatgggatgcctgcgtcgctgaggaaattggaaattgaggcgagggcaggcagaggcctggactcggcctgttgtccccaccccaggtgcactttgatgaggggaaggctgtctacctgaagctggacttgctggtggatggtgtgctggccctgcgctgcctggaggaat

SEQ ID NO: 270223 - DNA, 64 bp, Homo sapiens
  chr17:7466807-7466871
  hypo
tcaaaaagcacctcgctgacattccactggaagctttgggggcgccaccggggccggcggcggg

SEQ ID NO: 270224 - DNA, 101 bp, Homo sapiens; identical to SEQ ID NO: 217522
  chr17:7480063-7480164
  hypo

SEQ ID NO: 270225 - DNA, 85 bp, Homo sapiens
  chr17:7486579-7486664
  hypo
ctctgcttcactgtcccgggcccagcagttgccggcgcactcatgctccgaggcctgagccaaccggaggcgagacaagcacagg

SEQ ID NO: 270226 - DNA, 654 bp, Homo sapiens
  chr17:7491925-7492579
  hypo
tctgggcagacagggtagagcgtgccacccacccagccctggctacccagcccgctgggcgcagcaggcatggaagccgaccccgggatggagagcccgcggccctgttggggcacgctcgggagcgggcttgcgtgctgcacggctgttttcctcttggggagtcaggccaggaaagggcagaatgagctcggcctctccttgccctgggggctgggagaggaagctgggtcacacacaggccagaagcaggggggaaacggggcatctaactaggacacagtcgcatccaggggtcagtcacctgaccctacagggcccaccaccttcagactgagatggaaacgccctctgggagaaccctgatccgccccaccctacacaggccccggaggtactgggcctgcgcccgccacaccttggccgcgagtggcctctgcttgggtgggctcccgtcctccggcatccgcccccaccaaggctccagaagaggggcgcatgggcctccgtcttcggcccgcttcccaggcactcacccatagctgccaggcaggtaggctgtcgagtagctggggggtctgtacccaaagcctctgctcggttgggtggtcgcgtaccccggcccccagagcgggccgccgctggccaggttgc

SEQ ID NO: 270227 - DNA, 46 bp, Homo sapiens
  chr17:7493027-7493073
  hypo
tgccctcccctcaacgtgaagcgtcgatcctgaaaatggaaaggtc

SEQ ID NO: 270228 - DNA, 141 bp, Homo sapiens
  chr17:7493109-7493250
  hypo
cttaaaaagtgtattttatccccaagcccagagcttaaaccggagcctttgcttccaacctgttcggcacactttggggagagtcgaatgcaaaatccgctgtctggtgccccggcactgaagaggtgttctgaggcctac

SEQ ID NO: 270229 - DNA, 273 bp, Homo sapiens
  chr17:7493323-7493596
  hypo
ccataaacccctttgtggtctccggagttccgacagctgccaggcgcggataggccagacctctcccacctgggctcagcgtttgtggcaggcgggccagacctgggaacagcttttaaagactgactccgcccctgtccctcccataagactgcacctccttaagggcgccaacatcctcagcccgtaggtaaacccaggtgtcctgtttgtcccagcccccaacaccctcagggtgccacgccccccgccccccccacccaagacctgatg

SEQ ID NO: 270230 - DNA, 540 bp, Homo sapiens
  chr17:7493626-7494166
  hypo
cccctccctgaagcacaggcaatttaaagccaattctttccacaatgggatcaaacacagggggatgaagtgccctcagggcccgagttgtgctgagaggagcttgggagcatcccggaccaccaccccaacccctttcctggtgcctgttgctcctcaaatcccagaactgcccctggggcaagaaaggccgaggagggagaccatttttgtttcctgagtcattccagcaggtgcttgggccgtgattcaacccctttcccaagtgagaaaacttaagccctcccaactccagtccctaaacctatatttctccactgctattgaattatggcaagttttagcttcagtcgtccaagtcatgaggggggagccaggaaacccaggacaactccccaagttaagaggtctgtgatgcgcatgccggagaaaaagcctggagccagaacagaacaccaccaagaaggccggaccccgggctccagaggctgctgtgagggaaccctgctccccactctgcccaacggcccagcccaagcc

SEQ ID NO: 270231 - DNA, 97 bp, Homo sapiens
  chr17:7496712-7496809
  hypo
tgtctcaccataggcaggaccgcctgtcctccggccacggccacggcccccatagctgcccccataggttcgagtcgcatggagggaggaggaggag

SEQ ID NO: 270232 - DNA, 41 bp, Homo sapiens; identical to SEQ ID NO: 217525
  chr17:7536911-7536952
  hypo

SEQ ID NO: 270233 - DNA, 206 bp, Homo sapiens
  chr17:7662608-7662814
  hypo
tcctccaggactcagcgtcctgcgtttccattaaaccaacttgtttccttccctgttggctggttctcacttcccaggatgtgccctgtcttccctgaaaagttctctttttcctccctccatcccatcagattcagcagcagtggatgctgtacatgattcggctggaccgcatgatggaggatgccctgcgcctgaatgtgaag

SEQ ID NO: 270234 - DNA, 197 bp, Homo sapiens; identical to SEQ ID NO: 217534
  chr17:7690145-7690342
  hypo

SEQ ID NO: 270235 - DNA, 139 bp, Homo sapiens
  chr17:7702407-7702546
  hypo
ggcttctgtccagatccagtcgcatatcatagaccaggcccgggtggagcaggtgcctgagtcatcggacagcctcttcgcctacctcattgaacgcgtgcagaacaacctgcacatcgtgctctgcctcagccccatg

SEQ ID NO: 270236 - DNA, 176 bp, Homo sapiens
  chr17:7710676-7710852
  hypo
aggcctgggggagtgcggatgcacagacccaggtggaaggaggggatgcctggaggtgagggggttggtgggttggtgggcgactcccacagcctgactgtctccccacagctgtatgggcggctatatcgggtggtggagcccaagcgaatccgaatgaacgctgccttggctca

SEQ ID NO: 270237 - DNA, 63 bp, Homo sapiens
  chr17:7727216-7727279
  hypo
cgcgtggccttctgcgtgacctccttcatcatcaccaaccttggctcccgcttcatcgagccg

SEQ ID NO: 270238 - DNA, 95 bp, Homo sapiens; identical to SEQ ID NO: 217535
  chr17:7769321-7769416
  hypo

SEQ ID NO: 270239 - DNA, 35 bp, Homo sapiens; identical to SEQ ID NO: 217536
  chr17:7769716-7769751
  hypo

SEQ ID NO: 270240 - DNA, 42 bp, Homo sapiens
  chr17:7797154-7797196
  hypo
cgagtgcctgatggacgcaagaagcttcggggaaagaaaatg

SEQ ID NO: 270241 - DNA, 184 bp, Homo sapiens; identical to SEQ ID NO: 217537
  chr17:7798625-7798809
  hypo

SEQ ID NO: 270242 - DNA, 101 bp, Homo sapiens; identical to SEQ ID NO: 217538
  chr17:7800249-7800350
  hypo

SEQ ID NO: 270243 - DNA, 212 bp, Homo sapiens; identical to SEQ ID NO: 217539
  chr17:7806524-7806736
  hypo

SEQ ID NO: 270244 - DNA, 125 bp, Homo sapiens; identical to SEQ ID NO: 217540
  chr17:7807180-7807305
  hypo

SEQ ID NO: 270245 - DNA, 478 bp, Homo sapiens
  chr17:7809785-7810263
  hypo
tcctcagtcatcctcgcgcctccctcactgccctataccccttctgtggctcccctaaccctcctcccactcccatgctccttagggcctatgtgtctttgttcatgcgccatctgtgtgagcctggggcagacggctctgaaacctttgccgatggggtccctcgggagggactgagtcgccagcaggtgttgacccgcattggagtcatgtctctcgtcaaaaagaaggtatcagtcttcctgtcacccaaagaatcaagctggctgcctagtctctgtccttcctctgcctctgtccctgagttgtaagcttgcgctggtgtgagacggaggagactggagcttcctgtctgtaagcgcctggagctgacacctaaccctcccaccctgccaccccaggtgcaggagtttgagcacatcaatgggcgttggtcaatgccggaactgatgcctgaccccagcgccgattctaagcg

SEQ ID NO: 270246 - DNA, 49 bp, Homo sapiens; identical to SEQ ID NO: 217542
  chr17:7811072-7811121
  hypo

SEQ ID NO: 270247 - DNA, 126 bp, Homo sapiens
  chr17:7812554-7812680
  hypo
acgcccgcttcgccgaggccgagtgcctggccgagagccaccagcacctctccaaggagtcgctggcggggaacaagccggccaacgccgtcctgcacaagggtaagggccgcggcggccccgcgc

SEQ ID NO: 270248 - DNA, 79 bp, Homo sapiens; identical to SEQ ID NO: 217543
  chr17:7813720-7813799
  hypo

SEQ ID NO: 270249 - DNA, 120 bp, Homo sapiens; identical to SEQ ID NO: 217544
  chr17:7892730-7892850
  hypo

SEQ ID NO: 270250 - DNA, 235 bp, Homo sapiens
  chr17:7951707-7951942
  hypo
ccctgggcacctatccggatgagcacttcacagaggaggcccctcggcggagcatcgccaccttccagagccgcctggcccagatctcgaggggcatccaggagcggaaccagggcctggtgctgccctacacctacctagaccctcccctcatcgagaacagcgtctccatctaaatcccaggggaacacaggcccagatgacatccctttgaccacatcgctctaggataact

SEQ ID NO: 270251 - DNA, 291 bp, Homo sapiens
  chr17:8012302-8012593
  hypo
aagcccctctctggacggcagctacctgccatttcagaagggaccccaaactcaattcataccctcaagaattccctatgctagggtgtgaaaacacctgaaatccccaggcgccatgagcgcagggaccacaatgtcccaggccaggagaccctggtgggactgctggtcccgccccgcacctcgcacctctcaatggccgcccagatcttcaggccgtcgtctcggtagtggtagttggggatagccaggacgccgcgggcccgcaggctgtccggaaggcagaaattg

SEQ ID NO: 270252 - DNA, 213 bp, Homo sapiens
  chr17:8064842-8065055
  hypo
ctgggggtgagaggcgaggatcagtaagacaaactatgataccccattcacccacctgtcctccttcctgtccccacccttaccttgaggtttttccaccagtatttgcgcttgagcttggctgcgcttgtttcaaactgggaggcccccgcctggagtgcatctgcacggtcgtccagctccgacagcttctggtctcgctccaggaccttg

SEQ ID NO: 270253 - DNA, 40 bp, Homo sapiens
  chr17:8074475-8074515
  hypo
aaagaaaatggtggtgctgccgggcgcagtgcctcacgcc

SEQ ID NO: 270254 - DNA, 540 bp, Homo sapiens
  chr17:8104407-8104947
  hypo
ccagcctgggcaacagagcaagattccgtcttgagaaaaagcaaaaaccttgcctttatctcgtttgaattcttgccctcgagaaaacagaggagagaggttgctgcagagttgcaactccggagtttcccggatagctgcaggcttacccgcaggtaacagtagaagtaggagtcagcgttaaggctgtgggaaaataggtgtccttcattattgccggtgggagtgtaaactgtccaccacttagaggggcatttttggtgatatctatagaccgtttacctgcgtgtacccagcattaccacgtctttctctagatgctggtactctccattgccatgtctttcttcagatgtcccctagaggacaactagagaccatcacaaaggtgcacaggaggcactcaaaagacactggccacagtgcaaagcattggaaataatctgcatgtgcatccagtagaagagctttaaaaaaaaccctagggatatccttattaaaaattataggctgaaaggccgggcgcggtggctcacgcct

SEQ ID NO: 270255 - DNA, 472 bp, Homo sapiens; identical to SEQ ID NO: 217546
  chr17:8138410-8138882
  hypo

SEQ ID NO: 270256 - DNA, 458 bp, Homo sapiens
  chr17:8197551-8198009
  hypo
tcaatacattcaatcgtgtccatcagatgggtgtgtatagggcagatcagaagactccgaagcctaccagcactttcctgatgcctttccctgcttgcagtggggcagcactctgccacctatgcccttgggaaagaacagctcctatcctacaacgaggatctgccctgaaggtcccaggcaagagccctcttcttaccatgtagatggggctccccaagtaggctcccatgaccccagccatggccccagctgctgcgctgcgggcaggactgtgggtgccttcggctgtgtgcaggtagcccccagcctcagccagcccataggtgcccagtcggatgccattcatcaggaactggtacaagagggcgggggccaggcctttctgcagggcagcaaggccatccaccttgccgatggtgatgaaggcatggaagacatttcggtagtgccgctgg

SEQ ID NO: 270257 - DNA, 38 bp, Homo sapiens
  chr17:8276463-8276501
  hypo
cctctctccgtctccgtctccgtctccgtctccacggt

SEQ ID NO: 270258 - DNA, 436 bp, Homo sapiens
  chr17:8295898-8296334
  hypo
acgtggggaacacgcgccgcgcgcatggagtcagctccagcctctctgtcgagcggaagcccctgcgggggtcggggaagcccaaggccctctctgtgcccaggtcctcccctctgcctgcccgcgtgcccctcggagcttggtggcaccagggctgccgtgggcctcctgtcccaccccaggccacggctagcccggcggcctccctgaggtgcggctcacgcctgcttcctcaccagcagcacccagggcaggatggcggccaccacggccaccacagcgatgagcgtgatgagcagcagggcccgcgatcggcagcagaaggcgcgggcggagcggggcgccagggaggcctccgagagctctgccaggctgcggcggggcagcacgctgtcctgctcccccaggggcatcccgtggcggctgatgacaaaga

SEQ ID NO: 270259 - DNA, 258 bp, Homo sapiens; identical to SEQ ID NO: 217549
  chr17:8311456-8311714
  hypo

SEQ ID NO: 270260 - DNA, 103 bp, Homo sapiens
  chr17:8319005-8319108
  hypo
gctgggattacaggcgtgagacacctattttccatttttaatgtgccttgcccattttacattttttattgtggtaaatagatggagtctcgcactgttgccc

SEQ ID NO: 270261 - DNA, 83 bp, Homo sapiens; identical to SEQ ID NO: 217550
  chr17:8325971-8326054
  hypo

SEQ ID NO: 270262 - DNA, 88 bp, Homo sapiens
  chr17:8365198-8365286
  hypo
ataaatggataggtcggacaggtgcctgtgcgtgtggaagccctgaagaacagtcacgaggagggaaggataacactgtctgttcagg

SEQ ID NO: 270263 - DNA, 142 bp, Homo sapiens
  chr17:8371939-8372081
  hypo
cacattgaagaacgcgtaaactgggggtctgtgtgaatgcatcagattctgagcactgtttgcttagaacaacagaaacattttatagttttaaaactgtaagtaactgaaaacgatgtgaatcaaaaccctaagagacttc

SEQ ID NO: 270264 - DNA, 82 bp, Homo sapiens
  chr17:8380284-8380366
  hypo
atgcgttggcacgcgtcgcttcttcttctgcttcctccagctggcgtttaagctgcttcatccgagcgttggccttctccat

SEQ ID NO: 270265 - DNA, 208 bp, Homo sapiens
  chr17:8383607-8383815
  hypo
gctgctagctcggcgttcagtgtgtccacctagagaggagagaggagtttagtcacttgtgcctgaggggtggcacagccctccctgggtgacgggctcctgcatgggccacctgtagagtggtcttgcggaagcggtcgttgagcagctccatgttgctctgctcctcttccagctcctcctccagctgtgcgatccgagcttccag

SEQ ID NO: 270266 - DNA, 473 bp, Homo sapiens
  chr17:8384350-8384823
  hypo
aagtgaaggcctgcagtgcccgttggcgcaccccacggctcccccctgcggtgtgcagggctcagcaggactggcacgggtgcagtgcccgttagtgcacaccacggctcccacctgcggtgtgcagggctcggcaggactggcacggggtaccatggctgaggcagcccaggcccagcgagggaggagcaaaccacccgctgatgccaggtgtgtggacacctccagccttctcagcagtgcgcgtgcctgagggcgaagaacccacccccggccgtgggagactcacttgccagaggcgctgttggtgatctcgtccgccagctcatctctctcctgctcggcgtgtcggcgggctcgctcagatgaggcaagttcctaagcagtggagactgcgttaagctctggctgtgaatagtttcctcacctgtggaatctgacagtgcctggagctacagcgaccttgctcctgt

SEQ ID NO: 270267 - DNA, 66 bp, Homo sapiens
  chr17:8409685-8409751
  hypo
gagctcatcaatctgcgcctgcagctctgcgatctggtcctgcaggtcggtcgtctccccgtcgag

SEQ ID NO: 270268 - DNA, 379 bp, Homo sapiens
  chr17:8430760-8431139
  hypo
ctgtgctctgcgctcgctttctcccgttgtggggtcccatgtccccaactcatgctgagactgggcagcctggcaccacggcctatcagctgtaccttgggacactatgagcgatactagacttatgttaaggaaagccaaggaaataaacatttatcgggtttctctgttgttctgtaattacagcagcagctgctgcagatgcagccacggcaatggcaactctacaacaccacacattcaggcactccccatgtgccacgcattcaggttcacgttgcctcagttgatactcacagtaaccctgagaactaaatgttgctgtccgcacttgtcctcaggaactcaaactgcagtacccaagcgctgcttctcctcg

SEQ ID NO: 270269 - DNA, 158 bp, Homo sapiens; identical to SEQ ID NO: 217553
  chr17:8438422-8438580
  hypo

SEQ ID NO: 270270 - DNA, 104 bp, Homo sapiens
  chr17:8458246-8458350
  hypo
ggtgacagagcgagactccatctcaaagcaaaataaaagcaaatatggtatggttatatcttacttataaaaatatatataaggagaatcgcttgaacccggga

SEQ ID NO: 270271 - DNA, 57 bp, Homo sapiens
  chr17:8471465-8471522
  hypo
caactctcgtctctcgtgggtggctttcaagtggcacgcagccgaacttgggttcag

SEQ ID NO: 270272 - DNA, 386 bp, Homo sapiens
  chr17:8638483-8638869
  hypo
tggaagaggttcagcgtggccatcttaatggtgccaagcaggagggtcttcttggctgcggtgttctggatgtgcgcccagcgagattcctggagagtggataaggacggggcatgagcacagcatgtggtgtgtgtgtgtttgtgtgtatgtgtgtgtgtgtatgctcagggcccgcactcacccagtgcctgggagcccccggcccgccccgggcccctcacccagaagatgacattgctgcgggcacggtcaaagcgcatctgcagccttgccagctcattgttttgctgcaggatctcatcatccttttcctccatgtagcgcgccagccgggccttggcgcgctcaatcttctcctggccttcctgcgcagactgcatgag

SEQ ID NO: 270273 - DNA, 126 bp, Homo sapiens; identical to SEQ ID NO: 217554
  chr17:8700777-8700903
  hypo

SEQ ID NO: 270274 - DNA, 227 bp, Homo sapiens; identical to SEQ ID NO: 217555
  chr17:8731954-8732181
  hypo

SEQ ID NO: 270275 - DNA, 156 bp, Homo sapiens
  chr17:8738595-8738751
  hypo
cttcctgtgcagagcgcctgcgtgacaggcctcccccagagccgcctgcagggcgtgggagaccacgtggcgcatgcaggtctctggtgtctgctgcgcctgggccgcctcgatctccagtagcagagcactgcacacagacgcagacaccagctc

SEQ ID NO: 270276 - DNA, 38 bp, Homo sapiens
  chr17:8789813-8789851
  hypo
gcagcaccggtctggcggcaaagcggcagtagtagagt

SEQ ID NO: 270277 - DNA, 88 bp, Homo sapiens
  chr17:8814770-8814858
  hypo
tggatgcggtcctccgtgcatgtcgtggcccctggctgcatcctgggtcatcgcctgcatgggggacagacgccggtcagcttgtcga

SEQ ID NO: 270278 - DNA, 102 bp, Homo sapiens
  chr17:8932900-8933002
  hypo
tgaggtttgacttgcgtagcacaacttagtgagctcagtattgcattcctgtctccttactccaaaaatggatttctattgtaaactaagaagtagatttta

SEQ ID NO: 270279 - DNA, 214 bp, Homo sapiens
  chr17:8977464-8977678
  hypo
gaaggcagtggtgccggctctcgcgaaccagtgcgggagggaagcctgacaggggcgaggtggcttcctgcaagacggcgtgtaagctcagcaactgcatttttctgaggaattagggatgggacgcggccagcccgctctggttggagcttggtgctgtgactcattctcatcaagggtcactgagcgtctctctgcgcgtggccttgggctg

SEQ ID NO: 270280 - DNA, 44 bp, Homo sapiens
  chr17:9041943-9041987
  hypo
ggtgtgctgacagccgcgtgccgggtaccgcgatgaggcagggg

SEQ ID NO: 270281 - DNA, 147 bp, Homo sapiens; identical to SEQ ID NO: 217556
  chr17:9054227-9054374
  hypo

SEQ ID NO: 270282 - DNA, 37 bp, Homo sapiens
  chr17:9065578-9065615
  hypo
acaacaaagtgccacgggctgggggctgaaacgctag

SEQ ID NO: 270283 - DNA, 180 bp, Homo sapiens
  chr17:9065675-9065855
  hypo
gttgctctggaggcccttctgcgtggcttgcagatggccgccctctggcaacgtcctcacgggatctctcctccgtgcacatgcgtccctgcgtctctctgtgtcctcatctcctcttcctacaacgacacagtcatactggcatagggcccactctgagggccttgttttaagactctg

SEQ ID NO: 270284 - DNA, 456 bp, Homo sapiens
  chr17:9065915-9066371
  hypo
ggagaaccttagccatgtattgttacgtgcccaataaatgcttacgggtacaaacaggaggagccgaggaggagctcctggagcacaagtctgcctgcctggctctgctagtggagaagggaggagttgaggggtggggtttcttttgacgctcttgggtgcctgtcctccccgcgcccctgcggctgacacctctctctgtctccccctgcagcctgtaactgcaacctgcatgcccggcgctgccgcttcaacatggagctctacaagctttcggggcgcaagagcggaggtgtctgcctcaactgtcgccacaacaccgccggccgccactgccattactgcaaggagggctactaccgcgacatgggcaagcccatcacccaccggaaggcctgcaaaggtgggctacacgtggcggggcggggggctggggagacccggggaacatcagtc

SEQ ID NO: 270285 - DNA, 117 bp, Homo sapiens
  chr17:9066671-9066788
  hypo
ataccagagggctgcgagtcatgttcgccaggcttaccgttgggacaaaggactctctttcaccaaatgcacgcagactcacttctttggatatgtgcgcaccgcccctcactcccc

SEQ ID NO: 270286 - DNA, 33 bp, Homo sapiens
  chr17:9122496-9122529
  hypo
tgatggtgctgatggcgccgttgacttgagtgt

SEQ ID NO: 270287 - DNA, 275 bp, Homo sapiens
  chr17:9124886-9125161
  hypo
gtctgcatcatactgcggggatttgacccgagtccacgtggctcaaagggaagctctctgggcatcagacaagggctgggagctccccggtgcatttccagtgttccgccaggctgtagcggggccgggagtctgcgctgtaaacggctcaccactcattcccatgcaccggaagttccgctgcccagacccatggagcagacagtcctgggggccacctgcagagattgcttgtcacctgtgacctcaggctcccttcccgggaagggtgtgtc

SEQ ID NO: 270288 - DNA, 204 bp, Homo sapiens; identical to SEQ ID NO: 217558
  chr17:9127008-9127212
  hypo

SEQ ID NO: 270289 - DNA, 191 bp, Homo sapiens; identical to SEQ ID NO: 217559
  chr17:9150998-9151189
  hypo

SEQ ID NO: 270290 - DNA, 77 bp, Homo sapiens
  chr17:9153811-9153888
  hypo
agagcaggttttgcgtaccaaaagggtgttgggcttgcatctgtcattggcaggtgtcactgctggtggtctcttta

SEQ ID NO: 270291 - DNA, 210 bp, Homo sapiens
  chr17:9154766-9154976
  hypo
taacagagaaggggcgccctactacaaagtaagcactcaagaaaggtttgctcactgaagagtccttgagctgccaaggccccacgagagaggtgggtagcagaggaggagaggtccatgaaaatgcttcagaaagtaacagggagagccacgtgtgcagggtcacatggttgcacagccatcaggactgctgaacgccacggtagtctg

SEQ ID NO: 270292 - DNA, 215 bp, Homo sapiens; identical to SEQ ID NO: 217560
  chr17:9233914-9234129
  hypo

SEQ ID NO: 270293 - DNA, 193 bp, Homo sapiens
  chr17:9264056-9264249
  hypo
aatacgggctgtttcgagcgtgaatcaaagtgtcaaagaacatttggaggctgctcggtagacatgcactctctcaaggacaactgagatgcatgcctgactgagtcacggctgagcacccagcgctcagcagtcagctccagagctgcagaaagtaacccagtgagacccgcggtgccggctacaggtccct

SEQ ID NO: 270294 - DNA, 31 bp, Homo sapiens; identical to SEQ ID NO: 217561
  chr17:9393283-9393314
  hypo

SEQ ID NO: 270295 - DNA, 164 bp, Homo sapiens
  chr17:9474685-9474849
  hypo
gtgattccaatctgcggtaaagtccgggcgggaacccttggcctggggcaatagacaacctcattacactatcaagcacacaggtgcctgaagtactagtttagaaaaagtaattgggtcggggggtggctgaggcaggagaatcgctggaacccgggaggcag

SEQ ID NO: 270296 - DNA, 38 bp, Homo sapiens
  chr17:9576953-9576991
  hypo
cctcaccgacttctacgaaagaacgcaggaatgatatg

SEQ ID NO: 270297 - DNA, 225 bp, Homo sapiens; identical to SEQ ID NO: 217563
  chr17:9631365-9631590
  hypo

SEQ ID NO: 270298 - DNA, 329 bp, Homo sapiens
  chr17:9674879-9675208
  hypo
ggtgcggacgtacacggcggccttggggatggggttggccataaacacctcttgcttcttcctccgcacggtgcgcatcacctcctccgccacctctactgggtgcacgccgtaggtcagcttcctgaaaaagactgaaaggccccagttgggggcgggggttatgacctccgtggggacccggctggtcagagccctgcacatgcacaaaggctgaggggcgggaagcgtgggctgtccccggagtcacaggttccaggccccctccgccacccgcggaccgcggcgaccagcgggagacactccactctctgcgcttccttctgcgt

SEQ ID NO: 270299 - DNA, 45 bp, Homo sapiens
  chr17:9719665-9719710
  hypo
cgtgcacgcgtatgcgtgtgtctgtgtgtgtgcgtgtgtgtctgt

SEQ ID NO: 270300 - DNA, 104 bp, Homo sapiens
  chr17:9719770-9719874
  hypo
gtgtgtgcgtccgtgtgcgtgtctgtgtgtgtgcatgtgtctgtgtgtgcctgtctgtgtgtgcgtgtctgtgtctctgtgtgcacgtgcgtgtgtctgtgtgt

SEQ ID NO: 270301 - DNA, 472 bp, Homo sapiens
  chr17:9807968-9808440
  hypo
atctcggagcaccacgctctcagagccagtggcccgcatcccccgctccacccacagatccactccctctgcagcagctgcagcaggggacccccagcccggagcgaccccggcaccgcccagccagaaggggagaggggagactgaccatgacgatctccagcacttcattcttgctgatggtcccgttaccgtccacgtcgtagagggagaaggcccactccagcttctggttggtcttgcccgcggtggtcatgtgcagggcgatgacgtactccttgaagtccagggtgccgtcgaggttggaatcgaagctgcggaacacatgctgggcgtaggccttggggtcggtgtcggggaagaacttggcgtagatgctctggaactgctgctgggtgatgcggccggtgggacagtccttcaggaaggactggtaccaggagcacagctcctcctccgagaacttggtgtt

SEQ ID NO: 270302 - DNA, 136 bp, Homo sapiens
  chr17:9810183-9810319
  hypo
tgcactttccttagcggagcgcagtgctcgaggggacacactcagaaccccagccttgccaccgtggatggagagttgtctctttttgccctggggtgagaatgatgaagaataaaccccacggtctccaggcagg

SEQ ID NO: 270303 - DNA, 99 bp, Homo sapiens; identical to SEQ ID NO: 217564
  chr17:9893605-9893704
  hypo

SEQ ID NO: 270304 - DNA, 174 bp, Homo sapiens
  chr17:10212815-10212989
  hypo
gcagaggcggccaccgtgctcaccttgagctggccctggaccgtgcgcagatgcttctgggtctctgccatctggcggttggagtggcccagctgaatctccatctcattaaggtctccctccatcttcttctttagcctcagggcgtcgttccggctgcggatttcagcatcc

SEQ ID NO: 270305 - DNA, 184 bp, Homo sapiens
  chr17:10216484-10216668
  hypo
ccagctcctctgtgcgctgaatggcgtccgtctcgtatttggtcctccactgggcaacctcactgttggccttggacagcgccctctgcagctcggccttggcttcctgctcctcctcatactgttcccgcagcaggtcacagtcgtggcgggaggactgcagggcgtgcgccatggcgttctt

SEQ ID NO: 270306 - DNA, 64 bp, Homo sapiens
  chr17:10561724-10561788
  hypo
gtctgcgtgggaccggggaggcagggctgcggtctcagggcaaaggcacgtgtatgaaacatcc

SEQ ID NO: 270307 - DNA, 169 bp, Homo sapiens
  chr17:11774905-11775074
  hypo
aaatggtaggttggaggactcgcttctgaaaacgtgaggtgggcagatgccgtgcagaacttcaaacagcaggaaaggacgttatgtggagacattttacttataacggctttcatttcctaccttggcttcttcacaaagaaataccggcagagcctcctggacagaa

SEQ ID NO: 270308 - DNA, 62 bp, Homo sapiens
  chr17:12018835-12018897
  hypo
ggaggtagaggtgacgggccggagaaagatggaagactaccaggctgcggaggagactgctt

SEQ ID NO: 270309 - DNA, 134 bp, Homo sapiens
  chr17:12032509-12032643
  hypo
caactaacacaagtcgtgaaaggagatcctccgcagctgagtaattctgaggaaagggaattctccccgagtttcatcaactttgtcaacttgtggtgagtacctgatttatgaatggtcgaacacgcatggcg

SEQ ID NO: 270310 - DNA, 203 bp, Homo sapiens; identical to SEQ ID NO: 217567
  chr17:12517842-12518045
  hypo

SEQ ID NO: 270311 - DNA, 44 bp, Homo sapiens; identical to SEQ ID NO: 217568
  chr17:12744163-12744207
  hypo

SEQ ID NO: 270312 - DNA, 254 bp, Homo sapiens
  chr17:12890248-12890502
  hypo
tgttttgtcccatacgttcaggtctctgagccagtgtagaatccatcatggtttgatgtggcccgtctgggactgtgatattggcatagctttttttttttttttttgtgacgttcatgttttgtcgtgttgattcctttctccgaatcctatcattgtgttcttgcagctgtgtgacatgagtggcgcagttttggatacgtgtgagggggattttcagggtaagctggccccggcctcgcccctccaccccg

SEQ ID NO: 270313 - DNA, 242 bp, Homo sapiens; identical to SEQ ID NO: 217571
  chr17:12905698-12905940
  hypo

SEQ ID NO: 270314 - DNA, 283 bp, Homo sapiens
  chr17:13950031-13950314
  hypo
cacaacaggcctgacgcaggatctacttcgtatactcagagcagtgttgacacaccaccatctcagacccgctagccatctagttcatgttgacaacccgagacccacagactgcttcccggcaccataagagatcttgcccactggagctagagtggggaagattgggaaggaggccaatttgagatgacctggagtctccagcaccgtacctttgtcctttttccagccatataaaaccctgctactaaaagtgtggtccacggaccgggagacttgatat

SEQ ID NO: 270315 - DNA, 44 bp, Homo sapiens; identical to SEQ ID NO: 217574
  chr17:14236462-14236506
  hypo

SEQ ID NO: 270316 - DNA, 38 bp, Homo sapiens
  chr17:14674674-14674712
  hypo
gcgcccggcctcatttccactttcgattcctggccata

SEQ ID NO: 270317 - DNA, 80 bp, Homo sapiens
  chr17:14739356-14739436
  hypo
ccgtgcccagccccgggtgttcttaagtggttgctgtcaggtacatctaccacgcagatgcaggtcgtctgctacagcga

SEQ ID NO: 270318 - DNA, 89 bp, Homo sapiens; identical to SEQ ID NO: 217575
  chr17:15411143-15411232
  hypo

SEQ ID NO: 270319 - DNA, 153 bp, Homo sapiens
  chr17:15500064-15500217
  hypo
gaagcaaagactcatcgagcccatcaagtcagattctagaaggacttcccgtggcctagcacctccgaagagcaggctcaccaacagctcatgtgcccacagcacagagcgccctgaatacaggtggttgagggagcccgcaatccagaagac

SEQ ID NO: 270320 - DNA, 87 bp, Homo sapiens
  chr17:15608019-15608106
  hypo
caggagtttcatgcggaacagacctccagcatatggggtcccttcagggccctcgatggtgacctggaggtcggtgaggtcctcctc

SEQ ID NO: 270321 - DNA, 45 bp, Homo sapiens
  chr17:15843704-15843749
  hypo
caagtccttggatgtcggagagaagtagaacgttgaggtacagta

SEQ ID NO: 270322 - DNA, 31 bp, Homo sapiens
  chr17:15870826-15870857
  hypo
gagccaccgcgcccagccaaagggacagatt

SEQ ID NO: 270323 - DNA, 186 bp, Homo sapiens
  chr17:15873031-15873217
  hypo
caccctggcccaagccgacgttgtctcgagtcaactaccgaaatagtttcctagctgatctctctgcttttcttctggctcccctaaaattcagtctccgtactctggccaggtgacctttatacaacagaaatcagtaccatcccctgcttaaaagtcttccatgggtcccggtgcctatgaact

SEQ ID NO: 270324 - DNA, 55 bp, Homo sapiens
  chr17:15952212-15952267
  hypo
ttctcatgcacaaccggaacctggggtggggagatgggctcgtagggctccgaag

SEQ ID NO: 270325 - DNA, 211 bp, Homo sapiens; identical to SEQ ID NO: 217576
  chr17:15952498-15952709
  hypo

SEQ ID NO: 270326 - DNA, 120 bp, Homo sapiens
  chr17:16149817-16149937
  hypo
ccgtctcaaaaaaaaaaagtaaatacttaaagaagccagtttgaagattcaagaaaaatgcatcttagtctgcttgggctcccttaacaaaataccgtagacagtgtggcttaaacaata

SEQ ID NO: 270327 - DNA, 390 bp, Homo sapiens
  chr17:16282251-16282641
  hypo
ttgtaggtgaattcccgtttttgaagtggggtttcggctccctaatctgcacttttttttttcctaccagtttggagaaacagctgggaagaactggatttgcaggtattgctggagccagagcgaagcccggccactgtcaccatgggctccagcctcgcctctctgggcctggtggtgagcggcttcagcaacaggtttccggtccccgcagagggtcccactctgaactcccgatttacagactgttctcgggccgtgatgaggattaagacaatgcaactaagagcactctgactacagaagcatgatttaaagctccacaaccctgcaataaccacgaagaaaaataaaaagcggctagtccgccaggcacggtggttcatgcct

SEQ ID NO: 270328 - DNA, 40 bp, Homo sapiens
  chr17:16305047-16305087
  hypo
ataattttggccaagcgtggccgggcgtggtggctcacgc

SEQ ID NO: 270329 - DNA, 209 bp, Homo sapiens
  chr17:16369823-16370032
  hypo
catgataggtctaaacggtaccacctctaggaactgtgcctgtggacagttcctcatcaggatgtctgggaacaccagcaggtgcacctgagtcactgctggtggggagtgacgctcggagagtgtggctggcctgacaccgagtcactctcggctccctttccgagctgccggacccagcacacagcagcacacggcatttcaaagaa

SEQ ID NO: 270330 - DNA, 121 bp, Homo sapiens; identical to SEQ ID NO: 217582
  chr17:16385291-16385412
  hypo

SEQ ID NO: 270331 - DNA, 273 bp, Homo sapiens; identical to SEQ ID NO: 217583
  chr17:16391199-16391472
  hypo

SEQ ID NO: 270332 - DNA, 172 bp, Homo sapiens
  chr17:16399904-16400076
  hypo
ctcatccctcaaggcggctcgctgtaaacacagcactgagaagtggcccaggttaaaaatggtcagggtcttgcaatcttggcatacacagcaagatgtgtgagagtgcaagggacccacggaggatcatctcttccaatagtgagcacttcatgctcgacaaatgagcgca

SEQ ID NO: 270333 - DNA, 200 bp, Homo sapiens
  chr17:16434315-16434515
  hypo
attttattactccttcgagctgccatttctatgatgtacataagaggaatccccggagcacagaaaatgatgagaaagtttaagccaagttcaacatgaaaatgattggcttattttcctttaaacctcatggcacccaagacgcagcttcatgcgcaccttgttattgttgctcacaaacccaccggtcactctgcttc

SEQ ID NO: 270334 - DNA, 237 bp, Homo sapiens
  chr17:16923461-16923698
  hypo
tgatgagccacctccgctctgacctcacctcctcccagctccctgactccttcggcggggggcctggccagcttgttcggccactctgggctccaggctcttcaactggaaagagatgcttgtggagttcctcatggcaagtctgggcaagccagcctgacggccagcctgcgactccttgtccagaactctgtcaactccaccagtgcctgtcacggaaaccgcatggccaccagc

SEQ ID NO: 270335 - DNA, 197 bp, Homo sapiens
  chr17:16927737-16927934
  hypo
ccctttttatgagggcacgggtcatgctggataagggctcacactactgacgtcagtttaacttgatgacctctgtaaagagcccatctccacatagagagagataattattgctcctgttgctgtggctactgatgccatttgggggattcgtggcaagaaggatgaactgagagcgtccgcgacattgggatcca

SEQ ID NO: 270336 - DNA, 44 bp, Homo sapiens
  chr17:16929738-16929782
  hypo
cctgggccacagaacgaggctccgtctcaaaaaaaaaaaaagaa

SEQ ID NO: 270337 - DNA, 200 bp, Homo sapiens
  chr17:16960605-16960805
  hypo
atgaggcagtgtcacggggcggtgcaggggtggctcagctgctcggaggtacacgccttctttcttccctttttgtctgacctgaagatcatctgactgccaagaaagaggcaagttaatccttaaacattgttggaaggagggctgtggggcatgggagctgaaggctggagaccccagggagacgcggtgccttccca

SEQ ID NO: 270338 - DNA, 294 bp, Homo sapiens
  chr17:16994699-16994993
  hypo
taggcttcagagacagatgccgcttgctccgtgcagcatccctccctgcccggattggtgtgaacagggcagttgtcagcgagcagtgagcgaccaagagagacactcctcaaggctcagcccagcagatgctctcgtgcgtattaggtgctgggtgactgggggctgaatggaatgtgttgtccagggtcatgcggctggttgtcccagaaccatggctggacagccgacccttttccagtgcccttttcactacatcacatcccttgcggtcctcccggccctgcttaaaga

SEQ ID NO: 270339 - DNA, 119 bp, Homo sapiens
  chr17:17012232-17012351
  hypo
agccaccagtggcagcactccgcccacctgtatgctagcactgcctcttctccagtgcaacttctcccgccggctgtggtgcgcagatttctgaaagcgctcaaacaggctgaagggcc

SEQ ID NO: 270340 - DNA, 226 bp, Homo sapiens
  chr17:17031180-17031406
  hypo
tccagggccacatggcaaggcgtccaggagccagtgctgggtcccgggggcgctctctgcgggggtgtgctctcccctagagtcctcccctggagagaggcaggtttgcatttctgagcacctggagccgagctggaggagcacttctgtctcccacaatcttaatccagaaccatatgatcaagaatgtcaagggcctctgaagaaccctcgtggtacagtcgag

SEQ ID NO: 270341 - DNA, 465 bp, Homo sapiens
  chr17:17045701-17046166
  hypo
tgcagggcctctagcgcgggggcagagggtaggggcaagcgcaggcctgatgggagggagggccgtggaggggtgcaggcagagctcgggtcagctgagcacgtgtctagacaacctcggtgctgtgcaagcctgaggggaatcaggcccgggccaggccgggcatgggaggagtcggctcactgccacctcacagctcacctcactgccacctcagggcctcgtgtcctctcttgcaggaggtcccaggtgattgaaaagtttgaggccttggacattgagaaggcagagcacatggagaccaatgcagtggggccctcaccatccagcgacacacgccagggccgcagcgagaagagggcgttccctaggaagcgggtgagctcctggggctgggcagcacctcaggggtggctcgggggcgggtcagcatgcaccccatgcgccaagtcccctccacacagg

SEQ ID NO: 270342 - DNA, 785 bp, Homo sapiens
  chr17:17062274-17063059
  hypo
cggctctccacacacgagctgacctctctgctcgagaaggaggtaatagcctgggaccagatccccaccctgctcccagcagcctttccagagcatcagctgtgcccagctgtggcctgaggggttcatctagacagtcctacccgcgagggacttgcagacccctaggggagacagacgcatagatgagtcctcatagttgaggcagacctgagagctgtgggagcgtgccagtgcatgcagggcagggaaaggggccttccaggcacagaggaattcttccgatggtgggggcccctgccattgagaggcaagcggcgttgcagggcctagatggtttcctcgttctgactcccgatggcaggaggggcgcgagcagggcaaggcttttgcattacgcagccctggcttggacaggtcaaagctgtaggcagagaccagccccaggtgctcttacagtggcttggggacggccgatcagatctgaagccaggggcatccagcaggagatgacagctgggtcctaggtcatgaggatatgaagcagaagacagtggtgaggcagggtaggctgtggatgaaggctgccctgtgactgtcactcctccacgaggccttcagtgcacctaggtacatagatgaacaagctggcccccgaactataaaataagatgttctttcatggaaatgtatgcagaaatccagtctgcagaacttcagtggtagattgacatgtctgggcagggagtctcgtagctggggaggtgtagcgttacagtttttgt

SEQ ID NO: 270343 - DNA, 484 bp, Homo sapiens
  chr17:17067430-17067914
  hypo
ggccgcctccccatcgggtgcctggcagaggctccatagagtcaaccaagaccttcaaagtgagcttgaagcccagtgccagcgccaggagctgattacacaccagattcagaccctgaagcgtagctatggggaggccaaggacacgatccggcaccacgaggctgagatccggagccttcaggcacggctcagcaatgcggccgctgagctagccatcaaggagcaggcgctggccaagctcaagggcgacctgaagcgggagcagggccgggtccgcgagcagctggaggagcggcaacacagcgaggcggcgctgagcagccagctgagggctagcgagcagaagctcaagagtgctgaggccctgctgctggagaagacgcaggagctacggggcctggagacacagcaggcgctgcagcgggaccggcagaaggaggtccagaggctgcaggagcgcattgccgacctcagccagcaa

SEQ ID NO: 270344 - DNA, 351 bp, Homo sapiens; identical to SEQ ID NO: 217587
  chr17:17080460-17080811
  hypo

SEQ ID NO: 270345 - DNA, 200 bp, Homo sapiens
  chr17:17083737-17083937
  hypo
tgtgacactggtgccgcctccaagagatgatgctgcctgctcttgttccccagccaggaagcagtacatctttagtgtgctgtccagagccagccatgcacaggagggcgggcggaggtgggagcggcaccgcgtgtgtttgggattggttgtgtgtctcatgtctgctctctcctctgacagtccgtaattgagcaggt

SEQ ID NO: 270346 - DNA, 239 bp, Homo sapiens
  chr17:17104698-17104937
  hypo
aacttcagatgtcatcggagctatctgtatatgacacacacattataaacaaataacctggaacatttcacagtgtacgacacctgttctacctgggaatgcaaaccctgagctgcaaataagaacacagacgtgggagacaccacggcctgaagctgctctcctcttccccgctctcctctcctccggtcccgtgatgggttacgctgagccagcaatgtgcacgcactaactccaca

SEQ ID NO: 270347 - DNA, 401 bp, Homo sapiens
  chr17:17105843-17106244
  hypo
catgaaagcaccccgtggcaggtcgtgactgaagttattttggcaaaggagcaagaaaaaggtctggcccgaaataactgacccgaagtaacagaaatttccctttcctaaccttctttagttcaatttagtattctaatagacgagactttagtttaacgatttttttctagtgccgaggtctccctccctcagaacgcacagcagcccgcagggagggctcagccccattcttggttaggtttggctttcgctggaggtgccgcaagttctgtgccatgaaagcaatctccctccagctctggagacaggtggggcacagcttccgtgacttttctttggtgggaaaaaggtatactttgtagggttaaactgttcccagatgcgctcaaattcttcca

SEQ ID NO: 270348 - DNA, 238 bp, Homo sapiens
  chr17:17120250-17120488
  hypo
cccccagtggagaccgtgtggtgcacagcggttctgtgctgggcagtcggtgcaccttggcatccccacctgacgccaggcaccaggccaatactgccctgcgccgcacacctaaggaaaagatgttctcacccgaagtacttcaaaagctgactggacgaggtccacgtctctgcttttccagatcacctggttccccatgagaacgtgccaggccagcatgcggaaagaaggggca

SEQ ID NO: 270349 - DNA, 127 bp, Homo sapiens
  chr17:17123825-17123952
  hypo
aagggaagggtgcacgtcagaagcaaatccaggatgcgaagccaggtctgtctgatgccaaagggcaagccctgagcccgaaaccccatactgcgcatgcccagcacacctgcgtttccagctctca

SEQ ID NO: 270350 - DNA, 260 bp, Homo sapiens
  chr17:17124507-17124767
  hypo
aaggagcaaagaccgtcgaccaggccaagcacttggctatcacaaaatcgggacgagaagcctttaatcagccagttctctctacagacagcccacctgtgaattttccccacctagctggggaacagattctttcacatggcggtcaaggcaaacgagacaggaaatcacaacaatcacaacaatcacaccgagatcggagggtgagcttcccgaaggctcgttctgggctgattcagagccgcgtttccctccctcag

SEQ ID NO: 270351 - DNA, 98 bp, Homo sapiens
  chr17:17142228-17142326
  hypo
cttgctgttggacagcgcaaacttaatttctgaggaggtagtaagttacagggtgattttattttattttattttagagacggagtcttgctatgtct

SEQ ID NO: 270352 - DNA, 59 bp, Homo sapiens
  chr17:17223897-17223956
  hypo
gatcacgtttcccacgttggaaatcctgtgtgaggtgtgtgaggcgtccaggtgggtgg

SEQ ID NO: 270353 - DNA, 243 bp, Homo sapiens
  chr17:17224332-17224575
  hypo
tggaggcagcttgtcggggacattctgcttcgaagggagcagctggaatgtgggggtcaaggctgtgtgtgtatatatctaaggcgggaggtgccagcacacgtttgaatgaggagtcatggaggaggatagcaagcgggcattcgggaggtgccagcacgtgtttgaatgaggagtcatggagaaggatagcaagcgggcattcgggaggtgccagcatgcgtttgaatgaggttcatggag

SEQ ID NO: 270354 - DNA, 206 bp, Homo sapiens
  chr17:17250660-17250866
  hypo
accaggaacccggcgactgaggtgcttccaggtggggacaagcccctcttggtctcagccacagcaccccttattccagctgccctgcccaacctgctcaccccacatgaccttctgtgtattcagcaaacactcactaggtgacagcggccaccaggctctgtgctgggggacgatactggccctggcctcgaccagcttagagg

SEQ ID NO: 270355 - DNA, 311 bp, Homo sapiens; identical to SEQ ID NO: 217590
  chr17:17251122-17251433
  hypo

SEQ ID NO: 270356 - DNA, 101 bp, Homo sapiens
  chr17:17255033-17255134
  hypo
gcacttgggcagcccgccccggcggagggcaaccccttaatgagccttagcaggtggcatgtgggccagcgtgtcccagcacgagacgttcttgtgctggg

SEQ ID NO: 270357 - DNA, 124 bp, Homo sapiens
  chr17:17280606-17280730
  hypo
ttccccagcagcctgaacatcggagccactgatcttccagataaataggggcagacaaaggcgagtgagcagtgagctccagagaaaccagttgtgtccggccgcaaaaataatgtccctggct

SEQ ID NO: 270358 - DNA, 36 bp, Homo sapiens
  chr17:17303348-17303384
  hypo
ctcagatgtgcctgccgctgacgaccattcccactc

SEQ ID NO: 270359 - DNA, 183 bp, Homo sapiens
  chr17:17325164-17325347
  hypo
ctgcctgccctggaacgcctgggtcctggggtagatgtttgttctgtgatgaccgatattgccagacagttttcctacatggtcgtaccagttcatgtggaagtgttttaactgatgagcagccatcgtattctctgttccctgcaccccagtgctgctctttgtcatcgccattgggcctct

SEQ ID NO: 270360 - DNA, 77 bp, Homo sapiens; identical to SEQ ID NO: 217591
  chr17:17330586-17330663
  hypo

SEQ ID NO: 270361 - DNA, 247 bp, Homo sapiens
  chr17:17344148-17344395
  hypo
tgcagagagaacaccgtgttttggtttcaggcctttggccagggcggtgagagaggggtgtgtgtgtgtgtgtttagtgatggtagtggggtgatatttattttcatttctccatcataaaggaattgaagtcctatagcatgtcagcaatgtcaatgtttcagggtgaaataaacaagtaaaaggtgttagcgttcagatgagctctagcagcctgtgacgttaggaaaatcgccaactcctgggg

SEQ ID NO: 270362 - DNA, 52 bp, Homo sapiens; identical to SEQ ID NO: 217593
  chr17:17402429-17402481
  hypo

SEQ ID NO: 270363 - DNA, 36 bp, Homo sapiens
  chr17:17431920-17431956
  hypo
aatgtctgagtgagacgtccccggggcagcagggag

SEQ ID NO: 270364 - DNA, 132 bp, Homo sapiens; identical to SEQ ID NO: 217594
  chr17:17447945-17448077
  hypo

SEQ ID NO: 270365 - DNA, 163 bp, Homo sapiens
  chr17:17488195-17488358
  hypo
gaggtgccatgggacgccaggaggattaaatgagaaagtgcaaggaaagcactcagcgcagtgcctggcggggggcatggctagacagacgctggctgtgacaactgtgtcatcgagtcctggtgacaaccctgcgaggcatgcccactcttcagattaagaa

SEQ ID NO: 270366 - DNA, 92 bp, Homo sapiens
  chr17:17590235-17590327
  hypo
caagcctgtggtccaggcttcgcacccttgaagtctaggggccaggtgaacaatgagcatccggtttctttcttttttttgagatggagtct

SEQ ID NO: 270367 - DNA, 31 bp, Homo sapiens
  chr17:17590447-17590478
  hypo
caccacgcccggctagttgagcaacctcttt

SEQ ID NO: 270368 - DNA, 130 bp, Homo sapiens
  chr17:17602525-17602655
  hypo
cttcagtgctttttgcgctccctgccagggccctcaagacatctgtcggcaacatccttgactttggaatgctggaggcactgccccaggggacgcctggagccaagcacagcaccgctgcctcaggccc

SEQ ID NO: 270369 - DNA, 111 bp, Homo sapiens
  chr17:17614485-17614596
  hypo
gcatgcaggtggggcgactgaggccctggaagaactctggtcacgtcctggctgggggttgtccctcctcgacagaaacacacaggccctggctgccgcagcacccctgga

SEQ ID NO: 270370 - DNA, 296 bp, Homo sapiens
  chr17:17615237-17615533
  hypo
tgatggctgtcacgcggtgtccggccctgatgaccagatatgtgttttcaagagaagctggaatttggatttttatgtgaactctcctgattctcaaatgctggctccgttaacaaaaggcacagtgtggtttaaaccacacatgtccgcaggcagaggaccaccagtttctaatgtctgcgctgtggggcgcttgggtttttgcatttggttcttttacattccttattttattggaaacagcccaaatagtcactgagctgcaactctgtgctaggtgccggggctctatcagc

SEQ ID NO: 270371 - DNA, 92 bp, Homo sapiens; identical to SEQ ID NO: 217595
  chr17:17618837-17618929
  hypo

SEQ ID NO: 270372 - DNA, 240 bp, Homo sapiens; identical to SEQ ID NO: 217596
  chr17:17637949-17638189
  hypo

SEQ ID NO: 270373 - DNA, 35 bp, Homo sapiens
  chr17:17697718-17697753
  hypo
gcggctactcagccgagcccgcaggcacaccgctg

SEQ ID NO: 270374 - DNA, 66 bp, Homo sapiens
  chr17:17717225-17717291
  hypo
tgcaccgcggggccgcccgcctctctcggcccccacacccgccaccggcccgggagcagctgtcca

SEQ ID NO: 270375 - DNA, 102 bp, Homo sapiens
  chr17:17717880-17717982
  hypo
ggaaggctgagcccgggaccaggcaggaggaacctgccgtgcactcactcagactcctgcagcacccggggcaggtgctccaccagcgggcacagccgctca

SEQ ID NO: 270376 - DNA, 87 bp, Homo sapiens
  chr17:17748668-17748755
  hypo
cgctggagctggagcggggcagttctgggagtgggtatgaaaaacagttttgctgggggctccccaggagggcgcctatttcagctt

SEQ ID NO: 270377 - DNA, 182 bp, Homo sapiens
  chr17:17881580-17881762
  hypo
tggctcaggaccaggcggaccctcactgcttcaatgtcccgtctgtggaatgggatggctgtcatccctgtctcgagcattgggtggggggacaaggtgagacagcacgtgcacagtgcctggctcacacagcaagccaggcacagtaagtgaaggcagaggcagtacgagggcagtgagag

SEQ ID NO: 270378 - DNA, 108 bp, Homo sapiens
  chr17:17908138-17908246
  hypo
aacaaagacccctccgcattgcagcctgcagttgccgcttctcaggtgacgtgaggaggctgcaactcagcactaagtagtgaaaatgaaaagcgccgctgtctgaaa

SEQ ID NO: 270379 - DNA, 265 bp, Homo sapiens
  chr17:17910221-17910486
  hypo
cagccagaatttccgagctcgccttgggcccttaaagtctgtctcccgccgtctgagagcatcagggacgcgccgggcctgctcctcccgggcctttgcttaactcggggctgcacgatggctcagtgccgggacctggagaatcaccaccacgagaagctcctggagatctctatcagcaccctggagaagattgtcgagggcgacctggacgaggacctgcctaacgacctgcgcgcggtaggcggggcgggctgctcggagc

SEQ ID NO: 270380 - DNA, 260 bp, Homo sapiens; identical to SEQ ID NO: 217600
  chr17:18024622-18024882
  hypo

SEQ ID NO: 270381 - DNA, 174 bp, Homo sapiens
  chr17:18026591-18026765
  hypo
cctggccccggcggcggatgccccgcgctgtgtgggctgcagcgttgcgggagcggggcgcagggcgtctaggggtgaggggcaaggatgcctgggtcctccttaccctggaatacgtgagtggctgaattattcagggtctgcggctgctggcaagcacgtgggcagatgggt

SEQ ID NO: 270382 - DNA, 158 bp, Homo sapiens
  chr17:18083364-18083522
  hypo
aagagaacaacatacgcaggggccctgaggtgcgcattacttgtagcaggatctgagactgaagaggccggcaaagatggtttcgatagggcttctgggctacattaagaatttaggatttctgggccaggcgcagtggctcatgactgtaatcccgg

SEQ ID NO: 270383 - DNA, 188 bp, Homo sapiens; identical to SEQ ID NO: 217601
  chr17:18139366-18139554
  hypo

SEQ ID NO: 270384 - DNA, 98 bp, Homo sapiens
  chr17:18144920-18145018
  hypo
gtccacgtcttctcggtgcctggcctgcggccccaggtgcactattcctgcatccggaaggaggacatcagcggcatcgcttcgtgcgtctttacgcg

SEQ ID NO: 270385 - DNA, 453 bp, Homo sapiens
  chr17:18149873-18150326
  hypo
cctggcctcgggctcgcggggctgccaggcacacctccagcttcccagggaagaggctctcgaacttcttttgcaggctgaaggtgaaggtgagccagcccatattggaggcttcacggccctgccagaagtacacgatgcactggaagtcctcctctggctgcttctcctctgcctcagcggttgcttcctcgccttctttgccctcggccttctcctccttgtcttccttcttttcctcctcctcgtactccacaggcacccagtacctgccgggttggaaggttgtgagcaggggctcgagcccccagcaccaggggagggacttggggaagggagtgctgaggtggtacctgcagaggaagacgtagcagtcctgcgtgtagaagtggccaaactcctcttccggcagccgcgcaaacttcttgccctccagcacgaaaccctccatgc

SEQ ID NO: 270386 - DNA, 41 bp, Homo sapiens
  chr17:18163101-18163142
  hypo
tcatttgtaaaatactttctaaggttgtcaccatgagcaaa

SEQ ID NO: 270387 - DNA, 189 bp, Homo sapiens
  chr17:18163172-18163361
  hypo
atacagcaggcgctcagtgagtggcaggttattattccgttttgttttgttttgtgcgccaggttattattcccacttagtgtcagcacccctgtgctcgtacccccctacaaagggaggctccagaagagaagcatccgtcttggtccttgctgttcaagggggctcgccctggctgacacatagcag

SEQ ID NO: 270388 - DNA, 77 bp, Homo sapiens
  chr17:18167537-18167614
  hypo
cgggtgcctgatccggcccagcatggcctcggaggagctgctgctcgaggtgcagcacgaacgcctggagctcactg

SEQ ID NO: 270389 - DNA, 61 bp, Homo sapiens
  chr17:18267503-18267564
  hypo
aagaatgataaaaaccggggccacatgtcaggaccacctgaggctgcgtcataaatttttt

SEQ ID NO: 270390 - DNA, 38 bp, Homo sapiens
  chr17:18278353-18278391
  hypo
aagattattttaattttttacatcgactaaatttaaca

SEQ ID NO: 270391 - DNA, 139 bp, Homo sapiens
  chr17:18399916-18400055
  hypo
aaagccttccttggccgtctccaaacccaggagggtcttcagtcccttgggcgaggatgctgtggcccacactcgctttgacaccctgcgttcccagaggccacatctgtactggccaaactcacgtgagacaggtggc

SEQ ID NO: 270392 - DNA, 79 bp, Homo sapiens
  chr17:18527462-18527541
  hypo
cctgtcacaaatctgggaaacgataatatgggacattccacgatctaagaaaagggtccggccgggcgcggtggctcac

SEQ ID NO: 270393 - DNA, 217 bp, Homo sapiens
  chr17:18677636-18677853
  hypo
ttccctgtcacatacgtcagtttagaaggttgttacactctctttacttttcacagactccaggtaactacttggtttcatacgacaataaacaatatggtgtttggtagaaaaatacagttagatggaagggataagttccagcgtttggttgcacggtaggatgactacaattaacaataatgtatagccgggcgcagtgactcatgcctgtaat

SEQ ID NO: 270394 - DNA, 34 bp, Homo sapiens
  chr17:18760368-18760402
  hypo
gggcgcgatggctcacgcctgtaaccccaggact

SEQ ID NO: 270395 - DNA, 196 bp, Homo sapiens
  chr17:18853337-18853533
  hypo
caaggggtgtggtacggatgacttctcagctaggacggtcttcatgtttcttggggtgagtgaataggtgatcccgttgggtcaggtggggtgggaatgtgggtgtgactgggcttcgggtggcgtttcttctcccgcagacatggctgggcttgtttggtacttctccctccatgtcctccgctgccaccctcct

SEQ ID NO: 270396 - DNA, 622 bp, Homo sapiens
  chr17:18854648-18855270
  hypo
gccttcaatggctgcgtaatggcggatggccatttccttgactaggatgagacattgcctactctgcgtggctgctgtgagcgtgaaatgggatcatgtgcggaacagccacgcatggtccgtgaaatgggatcatgtgcagaacagccacgcatggtccttggtgtgtgacagatattgggtccctctgtggtcccaggcagacattgcccggggtgggggccgaatgcatggtcaagttgaggggcctgggactgtttcacgggtctagaaaaagaaagcagaaacgctggaagcaggactttattgtccgacatggggctgcctctgagcctgggctgtgttggctggacgtgagccataatgcaggtgtccccctcccaagccctgctcagtccactcacagcccgatggccaagggaggacatggctgcccgccacggcagtatcttcagaggtgaggcggttgtccctacgctctatgcttcttatacaaattagatataggtgaagccacccattaagcaacccagcctttctgggactatttgggctgcctccgggtccactaaatgcggttcattttccccaagccccctccgagttcaaggaggctccttcc

SEQ ID NO: 270397 - DNA, 64 bp, Homo sapiens
  chr17:18855509-18855573
  hypo
aggacagccatggccgccaactccaccagcgacctccacactcccgggacgcagctgagcgtgg

SEQ ID NO: 270398 - DNA, 169 bp, Homo sapiens
  chr17:18885752-18885921
  hypo
tcctgggacacccccggcacaggacagcagatgggtggagggatgccggggctggcccaagaggggtgccctggaaaagtctttggaccctctgggacctcagtttcctcataagtaagagaggacgtcaagggcgagtcagggcaggggaggacggccgggtggtgct

SEQ ID NO: 270399 - DNA, 94 bp, Homo sapiens
  chr17:18895396-18895490
  hypo
tcctggtgcccaaacacctccggcatgtctgtccaggggtgtccatatgcacaagccctccagcgccccgcccgatgagcacctcctcccatgc

SEQ ID NO: 270400 - DNA, 190 bp, Homo sapiens; identical to SEQ ID NO: 217603
  chr17:18918297-18918487
  hypo

SEQ ID NO: 270401 - DNA, 88 bp, Homo sapiens
  chr17:19203399-19203487
  hypo
acctagctgccccatggttccgtggtgggcaggtctatgcaaatctacccccaatgtccggagaagcggaggggccaaggaaggaggc

SEQ ID NO: 270402 - DNA, 325 bp, Homo sapiens
  chr17:19211655-19211980
  hypo
ggattacaggcataagccgccatgcccggcacaattagaacattttaaaatgacccgttaaccatgaaattgaattctgtagttgtccatctgtcgacctgtgcatgcacctgtctgtgcatgcatgtaagcctccacccaacaggtgtttgtcagccaggggtgagtgctacaagggagaggtgcagaggtgcagagtctgacacagcatcaggatggaggggaaggaccaggtccgggaagccgagctctgactacaaaagaggaggtgggtgcgctgagggaacagcctgcacggagacccgggaggaggacagggcaagga

SEQ ID NO: 270403 - DNA, 102 bp, Homo sapiens; identical to SEQ ID NO: 217606
  chr17:19233948-19234050
  hypo

SEQ ID NO: 270404 - DNA, 49 bp, Homo sapiens
  chr17:19234671-19234720
  hypo
gtgaagcatcccgtcgtggcaatcacattcctaccggcctggctcagca

SEQ ID NO: 270405 - DNA, 120 bp, Homo sapiens; identical to SEQ ID NO: 217608
  chr17:19513141-19513261
  hypo

SEQ ID NO: 270406 - DNA, 268 bp, Homo sapiens
  chr17:19606607-19606875
  hypo
tcacaggccttcatgtcccccgcatctgaggcgttcatttgggctagacagtcttgtaggaagggcagtgtggaaaatgcttccactccagtggttctcagagtgggcggcacgctggcgcagcagcattagcatcacgtgggaacttgttagaaacagattctcagaccctgcctccgacctgctgaaccaaagcctgctggtgaggcccagcaatctgtgaccagccctccaaggggattccagcgcaggctacagcctaagaacc

SEQ ID NO: 270407 - DNA, 90 bp, Homo sapiens
  chr17:19616225-19616315
  hypo
gccaggaggggcagccgaaacacccaaacacccaggcctcaggatgagggaacttaaattcagagtaacgtggttcgtaagaaaaaaagg

SEQ ID NO: 270408 - DNA, 401 bp, Homo sapiens
  chr17:19617063-19617464
  hypo
ggcatcttcagggtttccctcggcggcccgggtttcccagcaagccccacctccccagccggagcccagcgcacctggacacgtccgggtcctgccggaagagcagcaggatgtgctgggtgttgaggaagagcgcccagcaagggaggcagcagaggagcaggaccagcgcgccccgctgcaggatcacgcccacgtgcttcttgttggggctgccgaagctctgcaaaacagcccgccccgcgtcagccgtttccactgcccgggacattcctaaatcccgcgcggggagcgggctgtcagcggcgccagcggtgtgtggcggacccggcggcctctggtgaccacagcctggcgcccgcagcctgtaatggcacagcggccttcctgagcctgggcct

SEQ ID NO: 270409 - DNA, 77 bp, Homo sapiens; identical to SEQ ID NO: 217610
  chr17:19618657-19618734
  hypo

SEQ ID NO: 270410 - DNA, 148 bp, Homo sapiens
  chr17:19623343-19623491
  hypo
ggagcgatctccccgcgcaccacaggcatctcagtatagagtgacctccccacgcaccacgggcatctcagcatagagtgacctccccatgcaccacgggtatctcagcatggagcgacctccccgtgcaccacgggcatctcagcat

SEQ ID NO: 270411 - DNA, 65 bp, Homo sapiens; identical to SEQ ID NO: 217611
  chr17:19641468-19641533
  hypo

SEQ ID NO: 270412 - DNA, 58 bp, Homo sapiens
  chr17:19642884-19642942
  hypo
gcctcctccaggctgcgcacgcacacgatgggcagcacaggcccgaagatctcctctt

SEQ ID NO: 270413 - DNA, 37 bp, Homo sapiens
  chr17:19643641-19643678
  hypo
cacgcacctatgtagcgagtggcggcatccccggtgc

SEQ ID NO: 270414 - DNA, 174 bp, Homo sapiens
  chr17:19644760-19644934
  hypo
cgtgctccctgatcacgcccttgtcctgcacagccaggtgtcactgctactcgggcccccctacatctctggggccacagatgtgggatatggaggtggtcagagccctggctagggtcaggaggtgcagatacgggttctgccccagaccccgagcagcggtggcccttctcc

SEQ ID NO: 270415 - DNA, 374 bp, Homo sapiens
  chr17:19646480-19646854
  hypo
cctggcttggctccacgctgggggacggtgctcccccagcttcccttcccacagggccatgcacctgcagcgatggcgcccaccatgggctggatggtgaggttgaaggggtagttccaggtgccaatgacgaggaccacgcccagtggctccgagtggatgtagagctcgtcctgctgagtctggggcgtcttctccacgggctcatccgcggcccactcagggagcttctggatcatgtactcgatctcctctaggacgtacaccacctcctcatagtaggcgttccattcattctgcagcgacagagccggagtgagcttccagggccagggcccgcctgcagctggggcgagtggggagccccactgctc

SEQ ID NO: 270416 - DNA, 36 bp, Homo sapiens
  chr17:19647412-19647448
  hypo
gaaaagtgcagtagcaggcccggcgctgtggctcat

SEQ ID NO: 270417 - DNA, 88 bp, Homo sapiens
  chr17:19650045-19650133
  hypo
gtgcgtgtgtgtgtgggcgtgcacgctctaacatgcaagaaaggactagaacggtagcccccgacacgatgagacaactgatgggggt

SEQ ID NO: 270418 - DNA, 44 bp, Homo sapiens
  chr17:19686487-19686531
  hypo
gtactagaatgctcacgcctgtaatcctagcactttgggaggca

SEQ ID NO: 270419 - DNA, 104 bp, Homo sapiens; identical to SEQ ID NO: 217612
  chr17:19687003-19687107
  hypo

SEQ ID NO: 270420 - DNA, 120 bp, Homo sapiens
  chr17:19736607-19736727
  hypo
gtcaatagaaactgtcgtgagggggccaaatgttgaacttaacaaagactttaaagcagttattataaacaaattttttttttttgagacagagtctcgctctgtcgcccatttttaaaa

SEQ ID NO: 270421 - DNA, 75 bp, Homo sapiens
  chr17:19769837-19769912
  hypo
taaataagaaaagtagcattacttcatccgataagcaacaaagtcagcccacttttaacacgccccttgggcaac

SEQ ID NO: 270422 - DNA, 210 bp, Homo sapiens
  chr17:19771618-19771828
  hypo
gaaaaccagagttcacgctgccaaactgccagccttcggacgcctctcggggtttactcgcttaggatccctagagggacggtgacaggcgggattctgcaccttttgggggtcccttgactgcgagaagctggtgacagctcagggccctcttcgcagagaatcgtttctgcacaccgactcagaatcgcacacgttttcaaggttctc

SEQ ID NO: 270423 - DNA, 71 bp, Homo sapiens
  chr17:19772163-19772234
  hypo
cacacgctcaaaacgtagggccttgagtttctgcttctgctactgtgcacgcttacgttatcctgtcctta

SEQ ID NO: 270424 - DNA, 45 bp, Homo sapiens
  chr17:19773273-19773318
  hypo
gctgggattacaggcgtgagccactgcgcccggccacatgaaggt

SEQ ID NO: 270425 - DNA, 89 bp, Homo sapiens; identical to SEQ ID NO: 217614
  chr17:19842322-19842411
  hypo

SEQ ID NO: 270426 - DNA, 93 bp, Homo sapiens
  chr17:19861688-19861781
  hypo
tgtgctcttattcgcgaccaagttgttgaatgaaaactttcagcctctaaccaaaatttcaccaaatgctccattcgccgaagttccatgaat

SEQ ID NO: 270427 - DNA, 154 bp, Homo sapiens
  chr17:19890247-19890401
  hypo
cgcccagccccagtccatttttaaataaggaaaggaatgtgagctggggccgtagcatgcctgggcatgtagtaaaatcagaaagaaggaaaaggagaagaaaggcggggggtggtacttggaattagagaataagaagcggatcagcctgttt

SEQ ID NO: 270428 - DNA, 120 bp, Homo sapiens
  chr17:19902538-19902658
  hypo
gagcgagactccgtctccaaaaaaaaaagagaaatatgggagtcatcagtctaccgatggtatttaaagccatgaggcaggaggagtttatgaggggagcaagtataggtagagaggccg

SEQ ID NO: 270429 - DNA, 100 bp, Homo sapiens
  chr17:19989101-19989201
  hypo
aatggcggactcccgctgcatgtgcgagtggatggatattccctgttcagtggaggggatatccaccacgactctgggtacccacggcgggatgcagatg

SEQ ID NO: 270430 - DNA, 172 bp, Homo sapiens; identical to SEQ ID NO: 217615
  chr17:20013842-20014014
  hypo

SEQ ID NO: 270431 - DNA, 120 bp, Homo sapiens
  chr17:20065370-20065490
  hypo
ttgctgggattacaggcatgagccaccgtgccctgctctcatttctgtcacttctgccctcagacttcgggcaaataattttttatttttttatatatatattttttagacagagtctcg

SEQ ID NO: 270432 - DNA, 34 bp, Homo sapiens
  chr17:20065730-20065764
  hypo
ttacagacgtgagccaccgcgcccggcccaggca

SEQ ID NO: 270433 - DNA, 83 bp, Homo sapiens; identical to SEQ ID NO: 217617
  chr17:20087136-20087219
  hypo

SEQ ID NO: 270434 - DNA, 377 bp, Homo sapiens
  chr17:20107950-20108327
  hypo
aaaaggactctgaacgctgaggggactgatgctttgggcccaaatgtcgatggaacatcagtctccccaggtgacacggaacctatgataagagctcttgaggagaagaacaagaactttcagaaagagctttccgatctagaggaagaaaaccgggtcctgaaggagaaactgatctatcttgagcactccccaaattcagaaggggcagcaagtcacactggcgacagcagctgcccaacatccataactcaagagtcaagcttcggaagcccaactggaaatcagatgtccagtgacattgatgagtataaaaaaaacatacatggaaatgcattacggacatcaggctcctcaagtagcgatgttaccaaagc

SEQ ID NO: 270435 - DNA, 78 bp, Homo sapiens
  chr17:20141015-20141093
  hypo
gcaaaataggaagccatctgcgtgatgtcacattccgaagaagtcagaaggttcggcgagttggagctttactcttgt

SEQ ID NO: 270436 - DNA, 42 bp, Homo sapiens
  chr17:20163532-20163574
  hypo
ttggcccgggaatacggtggttccaagcgcaatgctctactg

SEQ ID NO: 270437 - DNA, 76 bp, Homo sapiens; identical to SEQ ID NO: 217618
  chr17:20170298-20170374
  hypo

SEQ ID NO: 270438 - DNA, 137 bp, Homo sapiens
  chr17:20190317-20190454
  hypo
aggccatcggctgccgtcagcagcctcccctgcctcccctgggctctgctgatgagggtgcaacacactgcatagctcatagcctctgtacgtggtctgcaagggaacagtaatttaaatgacatggctttggccgg

SEQ ID NO: 270439 - DNA, 33 bp, Homo sapiens
  chr17:20220061-20220094
  hypo
tgccagtggcgcgatttcagctcactcaggagt

SEQ ID NO: 270440 - DNA, 82 bp, Homo sapiens
  chr17:20467688-20467770
  hypo
catctcaaaaaaaaaaaaaaaaagagtttagcggacctgcagccgtgcttggagtttgcagacgctgcgtcactgtcaccac

SEQ ID NO: 270441 - DNA, 153 bp, Homo sapiens
  chr17:20805561-20805714
  hypo
cggcccccagtaaacgcggattcctgctcgtggccttctacgcccattactggagcagcagccatcagcgtagacgacgacgaagtctcccatgtaggaaaacgtgtctctgctaactggaggcgccggcttcaccctcggcttcatgtgctt

SEQ ID NO: 270442 - DNA, 43 bp, Homo sapiens
  chr17:20817539-20817582
  hypo
agcccagcaatgaaccgagtcagtgacattacagacttcatga

SEQ ID NO: 270443 - DNA, 42 bp, Homo sapiens
  chr17:20817882-20817924
  hypo
aaaaaaaaatgtgactctttcgaaaaaaaaaagagcagatat

SEQ ID NO: 270444 - DNA, 187 bp, Homo sapiens
  chr17:20841354-20841541
  hypo
gcccagtgcgggtctcgcttcctgacgcaggtgcgccttgggctcccacaggaagcggtcacatccagactcaccaggcctgagatgttggaagatggagaagcctttgccacaggaaaaatcctccatgaacacaatgaaacttggcctgcacctgggacatccttctccacggctagtctacaat

SEQ ID NO: 270445 - DNA, 251 bp, Homo sapiens
  chr17:20903659-20903910
  hypo
agtgccagggccgccgccgcctcctgtgagcagctcttcagcagcaggcatcaggtaactgcttagaacggcaatgccacagtggaataagggggactaacttggatacgaaagtttagaataatgcccaccaaaaatccatgtgactccatctctcttcccagttctaatgttctcagaacagcagccacccctgaatgcaagtggagacaggaaggggactaggggttggccggcgggaggggaggcag

SEQ ID NO: 270446 - DNA, 133 bp, Homo sapiens; identical to SEQ ID NO: 217619
  chr17:20905669-20905802
  hypo

SEQ ID NO: 270447 - DNA, 439 bp, Homo sapiens
  chr17:20908044-20908483
  hypo
agggagcatttgtggcaccacgtggagcggcctttcctagtggagctgcgggcagccaatagtggagctgcgggcagccaagcgggaagcaggtcagtggcgggggatccgctgggcgccctacaaggcagacaggagcccacccccagctcttggccagaggccctggacacccacaccgctaagcaccacttacttgttgtcattgttgagactgtccgtgggctgctggtactgtccattcatcctgctctctttgctgtaacagacaacggcaggattcagcatcattaaaatcatcaggcccagagacacaaggctctcgtgaaaccaacacttatccaagcttgaccatgcagatgctgcaccgaggtgcactttatgcttcaggcagaaatctccccatgtttcgtgaggacactgacgctcaagctgtgga

SEQ ID NO: 270448 - DNA, 195 bp, Homo sapiens; identical to SEQ ID NO: 217620
  chr17:20914087-20914282
  hypo

SEQ ID NO: 270449 - DNA, 185 bp, Homo sapiens; identical to SEQ ID NO: 217621
  chr17:20919060-20919245
  hypo

SEQ ID NO: 270450 - DNA, 130 bp, Homo sapiens
  chr17:20920703-20920833
  hypo
ctgaggcggcagccgtgaacgccttgctctgaacgctgccatgctctgatgccggggacagaagtggacaggaacgccacacgtgcagcccacaggaacagccaacgtgcagcgcgtagctcatgaggac

SEQ ID NO: 270451 - DNA, 94 bp, Homo sapiens
  chr17:20950574-20950668
  hypo
agaatcccacagtgtagtgtgcttagtagcaatattgccagcaacattagcgggatgttataggaatataaaactgcagcgataaaggaaagtc

SEQ ID NO: 270452 - DNA, 43 bp, Homo sapiens
  chr17:21100034-21100077
  hypo
aatattggcctggccaggcacggcagctcacgcctgtaatccc

SEQ ID NO: 270453 - DNA, 365 bp, Homo sapiens
  chr17:21103996-21104361
  hypo
ggcccatgtacctgaagctccgaatgtgcctgacaggaactagcttcctttcatggctaacgagaagcacagccctcagtgtgcacagacgcgaaggtcccgtccgcccagcctgtcctggcaggcacacctggctgcggtgcagaggagagtcatggggagctgagccacctggccattggccgtaatatgggagtgacgagtgaagacattcataacaagccaccccagaacctcagcccagcatgaaggtaactccctccagcctccttcaaagatgggagcaattccaagtgaaggatggtggaaatcggactgtcgggaaacttcaaggaaaaagaacaggcaatcgtagttcttcctac

SEQ ID NO: 270454 - DNA, 41 bp, Homo sapiens
  chr17:21128221-21128262
  hypo
cactgcactccagcctgggcgacagagtgagactgtctcca

SEQ ID NO: 270455 - DNA, 83 bp, Homo sapiens; identical to SEQ ID NO: 217622
  chr17:21160808-21160891
  hypo

SEQ ID NO: 270456 - DNA, 87 bp, Homo sapiens
  chr17:21204236-21204323
  hypo
ctggacatcaacatgcgcacggtcgactgtttctacactgtcaccttctacggggcactattcagagaggtgcgtccttgcatgatg

SEQ ID NO: 270457 - DNA, 47 bp, Homo sapiens; identical to SEQ ID NO: 217623
  chr17:21221775-21221822
  hypo

SEQ ID NO: 270458 - DNA, 181 bp, Homo sapiens; identical to SEQ ID NO: 217624
  chr17:21793592-21793773
  hypo

SEQ ID NO: 270459 - DNA, 215 bp, Homo sapiens
  chr17:21832214-21832429
  hypo
cccatgggctgctctctcaccggtgggtcgtggttgcggagagtagaacccggaaaattcaggggttgcctgggggtaggtgttaccgtgccactgccctatgtctttgtgcgtttgtgtgtgtgcgtaggtctctctcttatttctctctctctcctctctcgctcttttgctctgtgtccgtctgtgtgtgcgtgtgtgtgtctgttgggaca

SEQ ID NO: 270460 - DNA, 211 bp, Homo sapiens
  chr17:25336166-25336377
  hypo
ttcttgtagctgagcggaaatgcccacagcatctgcatctggcacgtgcctgggggcctgcagccgcaacaacctcaaccggagatactgatggtgtggaaaggcagagacactgatggtgcgaaaaggaaaaggcgtctgggagggcctgtgagctggagggcagccatcggggaggtggaggagaaccctgaggcgggtttctccacat

SEQ ID NO: 270461 - DNA, 130 bp, Homo sapiens
  chr17:25485413-25485543
  hypo
aggcgagagtacatcgctgacgacgtccacagagtcctccttcccctccatgcctcatggacttgtcgccaggcaacggtgactttcactgtgaggagagccatggctcacggctcgcgcctggtgccct

SEQ ID NO: 270462 - DNA, 120 bp, Homo sapiens
  chr17:25619836-25619956
  hypo
gggcgatgttttattaaacatttcgctatttgaagaattaatacactcatgcaaagaaaagatgaagtaaacatgccctacagtgttatcatttgagatctcttaaaagcggctatgcag

SEQ ID NO: 270463 - DNA, 429 bp, Homo sapiens
  chr17:25620256-25620685
  hypo
aaaaaaagcggctatgcaacactctactctgtcccatgaatatctgccacatatttgaattcccagtcttatacgccccaggcctttgcaatgtttagggtccacacgagaagccattaaaatgcaaatacgtcatctgtgaccgggaaccaagctggcatctagcagatactgacacatttatcagtctgatgtgtggacaactaggtgcctcccagaggccttcaggtaaggtggaggaagggccaattctgagctgacacagtgggatccatcttggccaggacagtgggatccatcttggccaggacaaaggcagtccagagaggccccgcggcgcggtgcggcgcgatcacgcccgagtctccttctcgttcccctcggcccttcctaaaacctgctggctcaggtctgaacaatcgcagctgg

SEQ ID NO: 270464 - DNA, 201 bp, Homo sapiens
  chr17:25676853-25677054
  hypo
gttggggcctagcccgagggctgtcacacccccgcctggtgtgcgcatgctaggggcagtgctgacacgctccactggtttcagatcaactttggagaatttggcgatagctagttaaagccgaagatgtgcatgcactgtgatctagcaaccatatgcctcgcaaaacaggccgggcgcggtgactcatgcctgtaatcc

SEQ ID NO: 270465 - DNA, 72 bp, Homo sapiens
  chr17:25680101-25680173
  hypo
aggaaccacatgacagaggacggttctaggtccgccaagtagcaggacttcgttctaaggtggcactactca

SEQ ID NO: 270466 - DNA, 118 bp, Homo sapiens
  chr17:25748141-25748259
  hypo
gcccggtcagagcccgggaggtgaaggtaagagcctgatccatgggggggctggtccagggacggggggactcggcgagtggtcagtgaggcagagaaagcagcgggcctgggcggta

SEQ ID NO: 270467 - DNA, 127 bp, Homo sapiens
  chr17:25829641-25829768
  hypo
tcaggagccctcctcgggggcaggcactggtttttcatctttctgtgcttgctcacacttgagcgtcagcacattccagaacctacctcaaccgtaatcacggcacagatgtcgtttgacttcagtt

SEQ ID NO: 270468 - DNA, 166 bp, Homo sapiens
  chr17:25842424-25842590
  hypo
taaggacatgtttctcagaacgtatttctgtcgttacacgccgcatgactgtagtttgagaagacacattttcttctaaacaacttaatgactttttcggtgtggctgggagtctcagtaggctctactgaggtgtggtttgaacggccactttgcctctcatata

SEQ ID NO: 270469 - DNA, 594 bp, Homo sapiens
  chr17:25878807-25879401
  hypo
tgcctccagcaccacggtccaggccgctgtcacctcctgcagaatctctgcagtggcacctcgccccttgcattccattttccacccagcagccagggtgctcacctagaaaggtgacttggatcccatcctttttcagtgcttcctgtttccttcaggataaacgccagatgccttccttgatctggcctctctcgcctctgtttgctcaccttctcctttgctcggtagactctaacctttgcacttgctccccacttccctggagtgctctgcccatgactcatcccttgaatatttttctggtgttgagtgttgtcaccgcctccaggcagtcgtccctggtgatgtgatctaaagatcatcccctgcccatcattctcgcctgcgcacctgagtttattttctcaatgacactgaccactttctggagtgacctaaccgatttgttgtctgtggtctgtctgctccccctgggatgcgagcaccatgagacacggccttgctgtttgggtttgtttgccacaaaatccccattgagtgtcgggcccaatatggcagttgcttggttgcgacagatataaaaataaatac

SEQ ID NO: 270470 - DNA, 173 bp, Homo sapiens; identical to SEQ ID NO: 217628
  chr17:25904461-25904634
  hypo

SEQ ID NO: 270471 - DNA, 281 bp, Homo sapiens
  chr17:25907595-25907876
  hypo
cacggtgctgagatcgatgttttcaattcccatcccaccactttcttagctctctggccttgggcagtgtctgtggcctccctgagtcacagtgacctccactgtacactggggagaagaacagatattgcgggagggaggagggaggcagggcttgtgcaatacaggtgcgtcagtcccttctcacaggctgtaaagaaatacctgaaactggattggttatttatttatttatgagacggcctggagtgcagtggcgcgatcttggctcactgcaacct

SEQ ID NO: 270472 - DNA, 44 bp, Homo sapiens
  chr17:25928310-25928354
  hypo
ggtacctgcaattccgctcctccctcctgcgttggccgttctgt

SEQ ID NO: 270473 - DNA, 60 bp, Homo sapiens; identical to SEQ ID NO: 217630
  chr17:25931232-25931292
  hypo

SEQ ID NO: 270474 - DNA, 289 bp, Homo sapiens
  chr17:25931553-25931842
  hypo
gcctattgccatgctatccacgcggcctttcccctagccaggtgtgagtcagagtaagtacctttgtctcagatctctcccgggagtccccgctagctgagagcagagcggtgttcctcaaggtctccttgacaaaccttgtttactcttaggctcgatgaccagccgaaagcagatgtgttggaagctcacgaagcggaggtgagggtgacacacacgtgtccacagatggccccccctcttttttcccttccccatctcagaatgcgcagggggcttgagggtgagt

SEQ ID NO: 270475 - DNA, 34 bp, Homo sapiens; identical to SEQ ID NO: 217632
  chr17:25933867-25933901
  hypo

SEQ ID NO: 270476 - DNA, 228 bp, Homo sapiens; identical to SEQ ID NO: 217633
  chr17:25934804-25935032
  hypo

SEQ ID NO: 270477 - DNA, 322 bp, Homo sapiens
  chr17:25936170-25936492
  hypo
ggcacctccgtcatcgttgcacatcttcactcctcctgatgtgtcctccagggcatgggatatcttcatgccaagggcatcgtacacaaagatctcaaatctaagaacgtcttctatgacaacggcaaggtggtcatcacagacttcgggctgtttgggatctcaggcgtggtccgagagggacggtgagttggtcttgagtgtctgggtgggttgtgggtgctggatggggaagagcagggctgaggtctgggcactttcactgtttgttgctgagctgcagccctccctgcagggaagcccaggtcgctttggtcctgcc

SEQ ID NO: 270478 - DNA, 97 bp, Homo sapiens; identical to SEQ ID NO: 217634
  chr17:25948172-25948269
  hypo

SEQ ID NO: 270479 - DNA, 110 bp, Homo sapiens
  chr17:25970770-25970880
  hypo
tccctgtctctgtccgctgggcacccagagctggggacctgggggtcaccctggattcttcactccctcttctttacgtctctccaaggcacgaacgtgtctccctcctg

SEQ ID NO: 270480 - DNA, 118 bp, Homo sapiens
  chr17:25971187-25971305
  hypo
gctgtccctggtcccggaagcaccctctgccagcctgcctcgagcacatgcctaattgcccttccatgctctgcctaagtgccgctcctctgggagtcctccccgcctggaatattgt

SEQ ID NO: 270481 - DNA, 80 bp, Homo sapiens; identical to SEQ ID NO: 217635
  chr17:26263499-26263579
  hypo

SEQ ID NO: 270482 - DNA, 39 bp, Homo sapiens
  chr17:26530852-26530891
  hypo
gcgcccggccctgttgatctttctcgtcgccccagtgcc

SEQ ID NO: 270483 - DNA, 121 bp, Homo sapiens
  chr17:26594094-26594215
  hypo
cactctcaggaaaacgaaacctaactaacgccgcccttgccccaccccgactccgcccctacatcacctagtgtccatataagcgtgctgcaactacaacacagtgcgacttccctggccc

SEQ ID NO: 270484 - DNA, 327 bp, Homo sapiens
  chr17:26851581-26851908
  hypo
cactgcccccacacagcccccgcattgcgtcaccagggcccgagcaagtccagggccactgcccagccggccccggccctgggcccttcaggctctcaccctcagacaagtatcctggctttggctttgaggaggccgcagcaagcagccctgggcgattcctcaagggcagccacgcgcccttccacccgtacaagcggcctttccatgaggacgtcttcccagaggccgagaccaccctggccctcaaaggacactcctttaagaccccagggccgctggaggccttcgaggagatcccagtggacgtggcggaggccgaggcct

SEQ ID NO: 270485 - DNA, 77 bp, Homo sapiens
  chr17:26862778-26862855
  hypo
aaaccactctcagctctggagagactgcaaagggctccgtgttctattctatactcgattgtgagtgaccagtagtc

SEQ ID NO: 270486 - DNA, 101 bp, Homo sapiens; identical to SEQ ID NO: 217636
  chr17:26864424-26864525
  hypo

SEQ ID NO: 270487 - DNA, 135 bp, Homo sapiens; identical to SEQ ID NO: 217639
  chr17:26959955-26960090
  hypo

SEQ ID NO: 270488 - DNA, 238 bp, Homo sapiens; identical to SEQ ID NO: 217640
  chr17:26960859-26961097
  hypo

SEQ ID NO: 270489 - DNA, 175 bp, Homo sapiens
  chr17:26961702-26961877
  hypo
agctccaagtaagcagtgcccggcgcatgggtgtgttgccatagagacgacgggaacgctggatgtagatttcaatgtttttgcgttccaaagaggcatagagctcctcaattttgcgggcaggcaacaactccccatgctgcttccgaagggcggccactttagcatccagtag

SEQ ID NO: 270490 - DNA, 191 bp, Homo sapiens; identical to SEQ ID NO: 217642
  chr17:26962146-26962337
  hypo

SEQ ID NO: 270491 - DNA, 129 bp, Homo sapiens; identical to SEQ ID NO: 217643
  chr17:27011597-27011726
  hypo

SEQ ID NO: 270492 - DNA, 64 bp, Homo sapiens
  chr17:27028074-27028138
  hypo
caccaccccacagtcggcccaggcccagccccagccctcttccagctcccggcaacggcagcag

SEQ ID NO: 270493 - DNA, 300 bp, Homo sapiens
  chr17:27056852-27057152
  hypo
cgcgacaggccagaagtgagatttaaggccaagacttgaggaatgaggaccagtagtctgcaggtgaagggagaacttttcaggcaaaggaaatagcgtatgtgaaatgtctcacatgggaaaacagagcattcaagaaaccgagaaagactagtaatagttggaatgtagtgggcaaggtagagaatggtataaaatgtaattgtcgagggcggggactagattatggcctgataacctgagataaaaggttcatttgccacaaacggttttgttttgtttttgtttttgtttttgaga

SEQ ID NO: 270494 - DNA, 176 bp, Homo sapiens
  chr17:27074939-27075115
  hypo
ggagtgggccactacgtcatctacaggtgaggctctgatgtgagggctggcaccacctctcccttggcaggcactaattgcagccttcccaccagggccacctgaatacctgcagcttcaatgtcattccctgccctaatcgctgccccatgaagctgagccgccgtgatctacct

SEQ ID NO: 270495 - DNA, 128 bp, Homo sapiens
  chr17:27075316-27075444
  hypo
gtgagaataagtgtggtgcccgcatgatgcggcggctgctggcccagcatgccacctctgagtgccccaagcgcactcagccctgcacctactgcactaaggagttcgtctttgacaccatccaggtg

SEQ ID NO: 270496 - DNA, 263 bp, Homo sapiens
  chr17:27085331-27085594
  hypo
tgggatcgggggctcggttgccaggggctcggtgggccttgctcagcatggccaggctctgttctcggaagcaggcctgttggaaatccccacttaggtaatccactgtttgcatcaagctgttctggcttgccactggaccgcccccggtccctgctcggtagtgggccccgggagctgccgcacagtcgaggggtgcacctgtgggctgcccaccgtggaacggcatggcaaggtcctgagaccccgagctgtcgctattg

SEQ ID NO: 270497 - DNA, 35 bp, Homo sapiens
  chr17:27086030-27086065
  hypo
ggacgctgtgggtcgacacccgggtgcttgcattg

SEQ ID NO: 270498 - DNA, 35 bp, Homo sapiens; identical to SEQ ID NO: 217645
  chr17:27138132-27138167
  hypo

SEQ ID NO: 270499 - DNA, 96 bp, Homo sapiens
  chr17:27171310-27171406
  hypo
gcccaagatacaacgtaagggggaaaaagagaagaaaaaaagacaagttgagtgctcaatgaggaatgttaaaaaaatttaaataggccaggtgca

SEQ ID NO: 270500 - DNA, 38 bp, Homo sapiens
  chr17:27179810-27179848
  hypo
tcatgcctgtaaactcgcacttggggaggccaaggcag

SEQ ID NO: 270501 - DNA, 101 bp, Homo sapiens
  chr17:27181277-27181378
  hypo
gatttagaggctacaaaggatgaagagggctcaaggcctcaaacagagcaaggtaaatgagtttctccggctgctagagcggtctaggagaccttaggtgg

SEQ ID NO: 270502 - DNA, 206 bp, Homo sapiens; identical to SEQ ID NO: 217646
  chr17:27207673-27207879
  hypo

SEQ ID NO: 270503 - DNA, 492 bp, Homo sapiens
  chr17:27228011-27228503
  hypo
gtgggctgcatagcaggtgacgccagtggcctcaagctggttggcgagctcccgggcaaacagtacattagccagcttagtgtcagcatatgcccgcagctcctgccgccagcccaccactgggcggtccaggcgtttgaagtcaagacgtccccgacagtgggcagctgaggctaccaccaccacgcggctaggggcacatgccttcaggcaaggcagcagcagatgtgtcagcagaaagggaccgatatggttcacccgaagcagcaggttaaacgcctcacgggtccggccacaggaactgatacctggggcagaggctaaatgtgagcggctgctccagaaggagctctgcagccttggcatccctatctatgagatgggagaagggggcatccttcccatgtgtccactggccccagcagggcccccgctggagggggcagttgcccctggccacccgccaccccacccccacgcagggcctgctgc

SEQ ID NO: 270504 - DNA, 65 bp, Homo sapiens
  chr17:27393154-27393219
  hypo
gcctgcgcatcacccgctgccatgagttatttcagcgctgatgtttgtctcgagctgattattcc

SEQ ID NO: 270505 - DNA, 532 bp, Homo sapiens; identical to SEQ ID NO: 217647
  chr17:27406521-27407053
  hypo

SEQ ID NO: 270506 - DNA, 69 bp, Homo sapiens; identical to SEQ ID NO: 217648
  chr17:27407262-27407331
  hypo

SEQ ID NO: 270507 - DNA, 66 bp, Homo sapiens; identical to SEQ ID NO: 217649
  chr17:27407717-27407783
  hypo

SEQ ID NO: 270508 - DNA, 165 bp, Homo sapiens; identical to SEQ ID NO: 217650
  chr17:27411026-27411191
  hypo

SEQ ID NO: 270509 - DNA, 465 bp, Homo sapiens
  chr17:27411533-27411998
  hypo
atggttggaattaaacctcacgtcaaatacaatttatgtccgggctcatgtgctattagttaacggggagccgaatcacgggggaacaaacaaacggagacagaacggcgggggatattaattgtgtgtgacaaccaggctccagcggccctctatcactgttacacactattacatttatcattagctctcactgagtcctgtgcgctgccaccagcccatcctggccaggggagggggtccatcaggcgagagagagtgggggaagaaacccaatgccatgctaaaaaaaaaagacctctaaaaaacaaccctgtcgaacttgatggaggatcagcccgctctgcctgaaggcctgcgcatctgcatccgctgtccagctcccacccagaaagcgggaaaagagagggctggatttcctgggcttcctgccacctgacagtaccagcacaagcgcccgctggg

SEQ ID NO: 270510 - DNA, 156 bp, Homo sapiens
  chr17:27412341-27412497
  hypo
tctcaaataggctgcgctttcctttcggcaggagcccccccatcctgcccaccaagggtgcacgggccagccccagccttctggggagcacacctcattgcccgctccctgcctcccccgaggatagagtcagcatgttagcgttagagaccagtg

SEQ ID NO: 270511 - DNA, 193 bp, Homo sapiens
  chr17:27419314-27419507
  hypo
ctgcctcagccccccgagctctgccccgggcaccttggcccctcaccgctgtcttggctttggcgatgtcatcaatctgcaggtgcaggtcttcgatctccacctccattgctttccgtgctttcacggctgccgcacaggtgaactctgactcctccagctggacacagaccacccccgccccagggagaga

SEQ ID NO: 270512 - DNA, 36 bp, Homo sapiens
  chr17:27421183-27421219
  hypo
cctaggctcaggggccgagaacgtccaccagccagt

SEQ ID NO: 270513 - DNA, 108 bp, Homo sapiens; identical to SEQ ID NO: 217653
  chr17:27421468-27421576
  hypo

SEQ ID NO: 270514 - DNA, 80 bp, Homo sapiens
  chr17:27716046-27716126
  hypo
catacactgtatacacggattgcttaggtctgatcaacatgctccttccttggagcacagatctactatggccagcctgg

SEQ ID NO: 270515 - DNA, 149 bp, Homo sapiens
  chr17:27716186-27716335
  hypo
aggcgtgagccaccgggcccggcccagagttaatttttattcatgaaactcatataacaggtttatttatttcagtcgttttgttggttaaagaaccaagattttttatgactacactttgtgtacacttttaggttctctcttttttt

SEQ ID NO: 270516 - DNA, 133 bp, Homo sapiens; identical to SEQ ID NO: 217656
  chr17:27902814-27902947
  hypo

SEQ ID NO: 270517 - DNA, 199 bp, Homo sapiens; identical to SEQ ID NO: 217657
  chr17:27903154-27903353
  hypo

SEQ ID NO: 270518 - DNA, 36 bp, Homo sapiens
  chr17:27908746-27908782
  hypo
aagctctgctcacccggcttgcgtccacagaggtag

SEQ ID NO: 270519 - DNA, 347 bp, Homo sapiens
  chr17:27909036-27909383
  hypo
tgccttggcagccacgtgcagaggtgtggtgcccttctctgggtggaagaagttggcctgggcacccagggagagcaggcgcagacatgtctccaggttgcctgtccgcacgctcgagtgtagttgctaagaggagcagagtgtgcagtgaatacgcatgtgcgtgaggcgcacctccccacccacaagctgcaccctggctgcccctgggacacctagcagctccaaggaggcctgcccaaaccagactatgtcgggaggacagaggcttcccgctaggggttaatgccaattaataaacgctgccgtcagtcaccatctaccacgtgtgctgtgtgccctgctta

SEQ ID NO: 270520 - DNA, 723 bp, Homo sapiens
  chr17:27934686-27935409
  hypo
agggctgtctggctccggagggctgcctccgacgtgactggggctttatcttccactcctcctcctcctccaggtggacatcgagcagctggatccccgcggccggactcccctgcacctggccaccacgctggggcaccttgagtgtgcccgtgtgctcctggcgcacggcgcagacgtgggcagggagaatcgcagcggctggacaggtgggcagccctgctcaccccagccccacagccggggcctccccagcatcatagacctatggttggctgaagggtcctgccctgtgaccttgcctcgccctcccccagtgctccaggaggctgtgagtacccgggacctggagctggtgcagctggtgcttcggtaccgggactaccagcgggtggtgaagcggctggcgggcatccccgtgctcctggagaagctgcgcaaggtgaggcccagcctctcagcctccacgggagcccttgagcccttctccagtgcagacttagcctctctccccttcgtcctccaggcccaggacttctacgtggagatgaaatgggagttcactagctggggtaagcgggctgcagcaggtcgcttctgggctctcccactttaggtcctgcgcttgctcccctgcctggaatgtgttctcatagttcttccggcggttccctctatgccttagctcagctcagggccaccgcctcagctaggcctttccag

SEQ ID NO: 270521 - DNA, 95 bp, Homo sapiens; identical to SEQ ID NO: 217659
  chr17:27939247-27939342
  hypo

SEQ ID NO: 270522 - DNA, 259 bp, Homo sapiens
  chr17:28299360-28299619
  hypo
ccggcccaggcattttttaaatggattcctggctccttttaaaatggggatcactcacttgtgagctaggagtgctcataaatattgtgtagtcattgtttctaggcccttcaggactaaaacatataatttttagagtcaatgacccgtgaccagacatcacctgcagcctcttcaggcgtgccaccgctgccgggcctgctgtacgacccgcgggctctgggccatgcctgctcttgcgcccggctcaggaggaccc

SEQ ID NO: 270523 - DNA, 277 bp, Homo sapiens
  chr17:28715708-28715985
  hypo
catgcagccccagccgtgccccctgggagcctgtggcgggtggctcctaatcctcgctgggcctgggccagtgtctgggccaggggcgacattgccacaagcttccctgttgccctggggctaaggagtggcccggagctgattgcgggcctggggccaggctgtcaggagtgtcaggctgggaggtcaccccacgtgtggcggacactggggacttggccccaagtggcccgcgcagagcctcctcccgagcccaggaacccgggacccttagtgg

SEQ ID NO: 270524 - DNA, 35 bp, Homo sapiens
  chr17:28740014-28740049
  hypo
agctgttcctattcggccatcttggaagtgactga

SEQ ID NO: 270525 - DNA, 240 bp, Homo sapiens
  chr17:29232004-29232244
  hypo
tctttaaaagaggattagtttttaaactatattatatagagttttaaatagagcttttgttgttttcaagtcacgagagatgtctcccgatatttatggatcagtccgaagttttactacctagaaaattgtattttatacccatcaggaagcaagtagttgaaataattattccaactgcttaaagtttctgatatttttaatttagaggaatctttttgtaactaatatttcctgtta

SEQ ID NO: 270526 - DNA, 87 bp, Homo sapiens
  chr17:29234395-29234482
  hypo
acctaggagatgtaaggagagtggaaagaaaagaattatttctggaagatggggagccagttttgtgaaaaacggggaattcaggag

SEQ ID NO: 270527 - DNA, 33 bp, Homo sapiens; identical to SEQ ID NO: 217663
  chr17:29247879-29247912
  hypo

SEQ ID NO: 270528 - DNA, 133 bp, Homo sapiens
  chr17:29773385-29773518
  hypo
tgtgtgcggccgagcgtccacccttggcatctctcaaattgtggggaggcagccggccttggtactttctggctccaggaacacgccatgggccattgaacgtctgtgcgatgggtaacgtctgtgcgatgaa

SEQ ID NO: 270529 - DNA, 149 bp, Homo sapiens
  chr17:29855419-29855568
  hypo
ccaggagcggcagcgcatgtctgaccgtctggaggacaccagcctgcggctcaaagatgagatggacctgtacaagcgcatgatggacaagctgcgacagaaccgccttgagttccagaaggagcgggaggcgacgcaggaggtaggtc

SEQ ID NO: 270530 - DNA, 191 bp, Homo sapiens
  chr17:30243768-30243959
  hypo
acgatgtaactaaaacgccactctacagttaactccctctattccttagatttcattcccggggtcacctctttggcctaggtgcacacaccgcgggctccgctctaggtggggcacaggccttcgcccgccgcatgcaccctgggctgcgcagccccagccagcccgacccgggctcagcgacccctgcc

SEQ ID NO: 270531 - DNA, 36 bp, Homo sapiens
  chr17:30301485-30301521
  hypo
cagcgagccgagatcgcacaactgcactccagcctt

SEQ ID NO: 270532 - DNA, 120 bp, Homo sapiens
  chr17:30333041-30333161
  hypo
gcatgagctatcgcgcccggccaagtatttttgtttaaattactttttggttgtcacttatctcaataaatattaacatatgtttacgaaacctttctttttcttttttttttttttttt

SEQ ID NO: 270533 - DNA, 308 bp, Homo sapiens
  chr17:30347557-30347865
  hypo
aaatctggagtcctcgcttattccctggcagcccctacctaatagggtggtgaattaattatcaaacatgcgacagtttagcgaaaacggcaacattttggaataaatgactgtaacgcgcgtcctgcctgccaccctaactggcgcccattttgcaggtcagttgctctcccctgaaggaagagtattctcggatttcacctcagaggaggaagaattcaggctgccagaactggactagcacttctgaagatcccaaggccaggtcccgtgacttccttgggaagctctgccgtgcccccacccca

SEQ ID NO: 270534 - DNA, 241 bp, Homo sapiens
  chr17:30348356-30348597
  hypo
tcccccagcagccccgggggactttgattacctggggccctctgcttcttcgcagatgtcagccctgcctcaggaaccaactgaaaatttggctccattcctgaaggaattggattcagctggagagctgcccctggggccagagccgttcttggctgcacatcaggacttaaatgacaagcggactccagaagaaaggctcccagaggtggttccgcttctcaaccgggatcagaaccag

SEQ ID NO: 270535 - DNA, 149 bp, Homo sapiens; identical to SEQ ID NO: 217720
  chr17:30529221-30529370
  hypo

SEQ ID NO: 270536 - DNA, 40 bp, Homo sapiens
  chr17:30582939-30582979
  hypo
tgagccaccgcgcccagccgggttattcatattttcaagc

SEQ ID NO: 270537 - DNA, 32 bp, Homo sapiens
  chr17:30684634-30684666
  hypo
ggattacaggcgtgagccgccccacctgactt

SEQ ID NO: 270538 - DNA, 39 bp, Homo sapiens
  chr17:30710917-30710956
  hypo
caaaaaacaacaacaaaaaaacatcgactagagcagtgg

SEQ ID NO: 270539 - DNA, 154 bp, Homo sapiens; identical to SEQ ID NO: 217722
  chr17:30804369-30804523
  hypo

SEQ ID NO: 270540 - DNA, 116 bp, Homo sapiens
  chr17:30823891-30824007
  hypo
aatgggctctaaacaggccacgctccacgtcagctcaaaaaaattaagagacagaaaatgggaaccattagttcaccctcaccctctcgtgttcagacaatcggggcatgctcctc

SEQ ID NO: 270541 - DNA, 199 bp, Homo sapiens; identical to SEQ ID NO: 217724
  chr17:30844875-30845074
  hypo

SEQ ID NO: 270542 - DNA, 396 bp, Homo sapiens
  chr17:30954269-30954665
  hypo
ggattgagggagggccgagggagtgagtaggctagcgcacaccagcacaggcggtgccagacgtcagctgactgtatccattgaggttaccatggaaaccccttcctttgggacactgccatgagggtagggtgctttagaaatggtgatggggcacagaccggcgggcggatggatttcagcagggttcaccctgtacgcattacaaggacaatccatcttccaaacgaaatgatatctttctagcaagtcacgtcaaatagagcaataaagcatgaagtctggcataattacagtccatttacctttacaaaacagtcacatcggttcagataattgtctcttttctctcccctgcttgctttgtattctccacagaacgaaaggaggtatttg

SEQ ID NO: 270543 - DNA, 253 bp, Homo sapiens
  chr17:31047963-31048216
  hypo
tgtgctgatgcactattgtacggggaggactcccttattctcagtgaactaggcctctctgacgagtctattctcacctgtgaagaaacttctcgtatgtctggcggaaggcaaatcctgcccgacgcactctcacattttccagtagtccaagatattctacttggtgccggcagcgttcatcatcaaatatctgtggagatttcttgtcattgggtttgatgcaacgaacgtaatatggttcctaaagaaa

SEQ ID NO: 270544 - DNA, 45 bp, Homo sapiens
  chr17:31099652-31099697
  hypo
gcatgtggtgcgtgcgtgcgtgcgtgcatgcgtgacatgttacgg

SEQ ID NO: 270545 - DNA, 165 bp, Homo sapiens
  chr17:31214020-31214185
  hypo
taaagccctggtttacgtccctcctggcacaactcttcccatttccccattccgtgtgaagagtgccatcccatggagccttgattgttacctgccaatttgtatatgttatttgcattaaaacttctgattcacggaggagccaagatggccgaataggaacag

SEQ ID NO: 270546 - DNA, 42 bp, Homo sapiens
  chr17:32520158-32520200
  hypo
cttatgacaagagattactgcgctttaatcctaaagagctct

SEQ ID NO: 270547 - DNA, 274 bp, Homo sapiens; identical to SEQ ID NO: 217727
  chr17:33344314-33344588
  hypo

SEQ ID NO: 270548 - DNA, 165 bp, Homo sapiens
  chr17:33348605-33348770
  hypo
ctcccggcacatttcggtagagatgtcatggaggctgagatagtccctcaagtccttcaccttcatcttcatgagctcctctcgctgaaaggctgtagctcgaaaccgttggcagagaaggcagaggcggggcccattccctacttggctcgaacaggtcatgca

SEQ ID NO: 270549 - DNA, 66 bp, Homo sapiens; identical to SEQ ID NO: 217728
  chr17:33351140-33351206
  hypo

SEQ ID NO: 270550 - DNA, 34 bp, Homo sapiens
  chr17:33354438-33354472
  hypo
taggtttattaagaagtgttcggagccaggcgca

SEQ ID NO: 270551 - DNA, 98 bp, Homo sapiens; identical to SEQ ID NO: 217729
  chr17:33568807-33568905
  hypo

SEQ ID NO: 270552 - DNA, 77 bp, Homo sapiens
  chr17:33578345-33578422
  hypo
ctagctctaggctcattccccgcctgacctcatggtttctcatgcaacacaaacattactaatttggggtttttttt

SEQ ID NO: 270553 - DNA, 34 bp, Homo sapiens
  chr17:33898171-33898205
  hypo
tgcgaaccactgcgcctgacctagttttcctctt

SEQ ID NO: 270554 - DNA, 44 bp, Homo sapiens
  chr17:33917231-33917275
  hypo
cggctgtaacttctaatgaagacgtcagtttttgccatcctgta

SEQ ID NO: 270555 - DNA, 76 bp, Homo sapiens
  chr17:33924082-33924158
  hypo
aaggacccctgggcgcccccgctccggggccactgaggcagcagtagcgacctccggaagcggagactgtccccac

SEQ ID NO: 270556 - DNA, 112 bp, Homo sapiens
  chr17:35039667-35039779
  hypo
ggaatactaaataaactttacgagcccgttgtaagttttttgatgcatggggagcggaaaatgaaaactaatgatataaaaattacacagcgtgctgagtattattatactg

SEQ ID NO: 270557 - DNA, 172 bp, Homo sapiens
  chr17:35045439-35045611
  hypo
cggtggttgcactacggatgtccctggaaggccctcttgattctgaggttctgtcttattagctgcacctccctccacccccggccaaccgcaaagaaaaggaaaagtcctttcctcctcctcaggtggctcgtggtggattacttagcgcttgacacggcgtgtctctgtg

SEQ ID NO: 270558 - DNA, 117 bp, Homo sapiens
  chr17:35099227-35099344
  hypo
ttctacctggagtcaggacacgtgagggttttcgttaatgttttcttgtgaaaaatttcaaacattaaaagccggagagagcatttaatgaaccccgagtacccactactcagttgc

SEQ ID NO: 270559 - DNA, 208 bp, Homo sapiens; identical to SEQ ID NO: 217731
  chr17:35336168-35336376
  hypo

SEQ ID NO: 270560 - DNA, 35 bp, Homo sapiens; identical to SEQ ID NO: 217732
  chr17:35414066-35414101
  hypo

SEQ ID NO: 270561 - DNA, 164 bp, Homo sapiens
  chr17:35488971-35489135
  hypo
gatacactgatctctcggtcactcagctttctgctctgctgagtccatattactaataacacctccgccacggccagtttacctcatgaaggcaggagcacatcattacaaaataaactcataactttgacattctagcaaatacacgccgtttgttattttta

SEQ ID NO: 270562 - DNA, 140 bp, Homo sapiens
  chr17:35501215-35501355
  hypo
gtttagttgtttttccacagcgaggcacagagtcacccagtgcctgtctggctctcgcttgccccggcgctgtctctatcgtaacctctttaagttatgtgaaagttacaatgctgcccgccccacagtgagagctaagt

SEQ ID NO: 270563 - DNA, 171 bp, Homo sapiens
  chr17:35545258-35545429
  hypo
atccaagtaatagccagactcgtttgtcaggaagaggcggatgggaattgcttttccagttggcgtcaggcgaatgttgattttcagttctgcctggaggacgcgcaatttccacaggcgacttccataccgcattaccatgctccgcacggattcctcaatctgacacag

SEQ ID NO: 270564 - DNA, 38 bp, Homo sapiens; identical to SEQ ID NO: 217733
  chr17:35802039-35802077
  hypo

SEQ ID NO: 270565 - DNA, 31 bp, Homo sapiens; identical to SEQ ID NO: 217734
  chr17:35845347-35845378
  hypo

SEQ ID NO: 270566 - DNA, 182 bp, Homo sapiens
  chr17:35872841-35873023
  hypo
gcaactgatagactacgagcgccagctctttgggaagtcgacagttaaaatggtacagacaccttatggcatagttcccgacgtctatgagaaggagtcccgacacctgatgccttactgggggatttagtgccactgaagcctgcgtcagcagcccgagcggggccggcatctgctccccg

SEQ ID NO: 270567 - DNA, 82 bp, Homo sapiens
  chr17:36076477-36076559
  hypo
attgaaggcatgagccactgcgcccggcctcaagtgttgtgtttttaatcctgtttttcccgtaagccctgtggttcttatc

SEQ ID NO: 270568 - DNA, 42 bp, Homo sapiens
  chr17:36818503-36818545
  hypo
gcaggagtctgagcccgtttgggaacacgcttgtccatccct

SEQ ID NO: 270569 - DNA, 110 bp, Homo sapiens
  chr17:36864035-36864145
  hypo
gccctctacatccccgaggtgcaatttgccaacgtgctcaccatggagcccatcgtgctgcagtacgtgcctcatgatcgcttcaacaaggtcagcggccccccgccgtg

SEQ ID NO: 270570 - DNA, 928 bp, Homo sapiens
  chr17:36875865-36876793
  hypo
ctgggggcaggagggacacccgagggaggagggacggagagaccggcgtgggctggaacccctgggggatacgggagaagggccagaggagcctggagtggtcgggtcgactgaacccaggttccctctggccgcaggtcccccatcagcagcctccccgcactcttcgaccagacagcctctgcaccctgtgggggcggccagttagacccggcggccccagggacgactaacatggagcagcttctggagaagcagggcgacggggaggccggcgtcaacagtgaggaggggtggcgccggtcgggacgcctgccctagggccctaacagtcacctttctccccgaggtccccaagcttctttaaggttccgcccttaggccccgccccagccttgactctcggccaccccgggcctcacctcccatccctgccaggccacacgaccggccctggtccctcagcgccccacctttggccttcgtggcctccgggccccgaccttaccaaaccgcaacttccgcccttctctcctgacccgtgtggcctcgaccccagcctcaggctccgccccaggtcttcacacctgtggctccccaagtcccgcctctcttctcagagctcacctgtgtccctccttaggatggcgccgccttttcaagggctgagcactggctcccctccaggccccgcccccggtcccctggccccgcctccgccccctcgcccctccctcaggttcctcgctctctccgcagtcgtggagatgctgaaggcgctgcacgcgctgcagaaggagaaccagcggctgcaagagcagatcctgagcctgacggccaaaaaggagcggctgcagattctcaacgtgcagctctctgtgcccttccctgccctgcctgctgccctgcctgccgccaacggccctgt

SEQ ID NO: 270571 - DNA, 61 bp, Homo sapiens; identical to SEQ ID NO: 217741
  chr17:36927315-36927376
  hypo

SEQ ID NO: 270572 - DNA, 42 bp, Homo sapiens; identical to SEQ ID NO: 217742
  chr17:36967822-36967864
  hypo

SEQ ID NO: 270573 - DNA, 39 bp, Homo sapiens
  chr17:37000766-37000805
  hypo
ggcatgcagcgttgcgatccggaatcactgcaacctctg

SEQ ID NO: 270574 - DNA, 87 bp, Homo sapiens
  chr17:37011083-37011170
  hypo
aaatataaatagtatcgcttctcggccttttggccaagatcaagtgtaaaatataaatagtggccgggccttgtggctcacgcttgt

SEQ ID NO: 270575 - DNA, 120 bp, Homo sapiens
  chr17:37012074-37012194
  hypo
cacggccgatatctatctatctatctctatctatctctctctctctctctatctctatagagatatatatctatagagatagatagagatatatctatctctatgtatttatctatatta

SEQ ID NO: 270576 - DNA, 195 bp, Homo sapiens; identical to SEQ ID NO: 217743
  chr17:37074888-37075083
  hypo

SEQ ID NO: 270577 - DNA, 151 bp, Homo sapiens
  chr17:37084534-37084685
  hypo
acaaaaataaaaaataaaataaaaataaataaatacataaactttaggtcctctgtttattctgtcaaatgaaagtgttaggccaaggtcgcattatctctttggaaactacatcgagaacagaattcccatggaacgaactcttaatagt

SEQ ID NO: 270578 - DNA, 31 bp, Homo sapiens
  chr17:37111337-37111368
  hypo
taaaagtagtataaaagtctcggctgcgcgc

SEQ ID NO: 270579 - DNA, 150 bp, Homo sapiens
  chr17:37171929-37172079
  hypo
ttctgtgtgggccccgcacagcgtccaagcatgttacaaccaatgctctttcagttctgctgtccagggctggtcgagtgccaactagctcagtggagggtcagagtgggagcccctgccctctcggcacccagattcttgtccagcatc

SEQ ID NO: 270580 - DNA, 35 bp, Homo sapiens
  chr17:37276419-37276454
  hypo
ttgagatggagtttcgctcatgtaacacaggctgg

SEQ ID NO: 270581 - DNA, 81 bp, Homo sapiens
  chr17:37313706-37313787
  hypo
ccttggtctggcaccgcacagggaacatggggggtacttagaaaatgctgattgggccaggcgcagtggctcacgccttta

SEQ ID NO: 270582 - DNA, 39 bp, Homo sapiens; identical to SEQ ID NO: 217744
  chr17:37445220-37445259
  hypo

SEQ ID NO: 270583 - DNA, 34 bp, Homo sapiens; identical to SEQ ID NO: 217745
  chr17:37452478-37452512
  hypo

SEQ ID NO: 270584 - DNA, 31 bp, Homo sapiens; identical to SEQ ID NO: 217746
  chr17:37455741-37455772
  hypo

SEQ ID NO: 270585 - DNA, 85 bp, Homo sapiens; identical to SEQ ID NO: 217747
  chr17:37483846-37483931
  hypo

SEQ ID NO: 270586 - DNA, 161 bp, Homo sapiens
  chr17:37583067-37583228
  hypo
tgagccaccgcgcccggcagtctatctctctttatcttttcttgtatcaagggcaaacagaaaataatgtccattaccatagttctttaatttagaaaacttcactttttttttgatcagtaactcactacgttgcccaggctggagtaccatgactattt

SEQ ID NO: 270587 - DNA, 180 bp, Homo sapiens
  chr17:37583288-37583468
  hypo
caaacctcccaagtagctaggactacaggcataaactaccaggcccatccttctacactttttaaacaatgagtaagctgattatctcaggtcagatcgtttatatctcttcttatgagttgctcatttacttatttattcaaaagtactttttttctttttttgagatggagtctcgct

SEQ ID NO: 270588 - DNA, 39 bp, Homo sapiens; identical to SEQ ID NO: 217748
  chr17:37694844-37694883
  hypo

SEQ ID NO: 270589 - DNA, 33 bp, Homo sapiens; identical to SEQ ID NO: 217749
  chr17:37701201-37701234
  hypo

SEQ ID NO: 270590 - DNA, 220 bp, Homo sapiens; identical to SEQ ID NO: 217754
  chr17:37819039-37819259
  hypo

SEQ ID NO: 270591 - DNA, 133 bp, Homo sapiens
  chr17:37879780-37879913
  hypo
ctcaccccagctggtggagccgctgacacctagcggagcgatgcccaaccaggcgcagatgcggatcctgaaagagacggagctgaggaaggtgaaggtgcttggatctggcgcttttggcacagtctacaag

SEQ ID NO: 270592 - DNA, 171 bp, Homo sapiens
  chr17:37880946-37881117
  hypo
cccataccctctcagcgtacccttgtccccaggaagcatacgtgatggctggtgtgggctccccatatgtctcccgccttctgggcatctgcctgacatccacggtgcagctggtgacacagcttatgccctatggctgcctcttagaccatgtccgggaaaaccgcggac

SEQ ID NO: 270593 - DNA, 44 bp, Homo sapiens
  chr17:37887589-37887633
  hypo
agtgctgggattacaggcgtgagccaccacgcccggtgctgatg

SEQ ID NO: 270594 - DNA, 84 bp, Homo sapiens
  chr17:38075339-38075423
  hypo
acctaaggagtgggtaggagatcctggtatgtattctaggtgagtgtgggccagacaatggtgcacaccgtggcgccctgggcc

SEQ ID NO: 270595 - DNA, 120 bp, Homo sapiens; identical to SEQ ID NO: 217758
  chr17:38105714-38105834
  hypo

SEQ ID NO: 270596 - DNA, 472 bp, Homo sapiens
  chr17:38179105-38179577
  hypo
aggagccaggggcccgggatctggggctcctacaccctgccaccccagcatggctgtccagtaaggcccgcagagggggccccagatgttgctccgcccctcaggctgaatcccagtctctggccagagctccccaaggaggcaactctgaggcgaggcattccggggaggccacctggctcacggcagcctctcagggaagcctggcagaccaggccaggtgtggggagccaggggacaggacccatgtcggcccacagccactccagcccaagtaccttaatcaggttgttgcagaaccagtagacgccgcccatgtgcagcagggtgtcaaagatgtggatggagcggctgtccacccagcccttctccagcaccttggcaaaaatgtccgtcagcacctctttgatgggccgcttggggggcagcaggttccagtagggcattgtgtccaccccggtggagggaaact

SEQ ID NO: 270597 - DNA, 32 bp, Homo sapiens
  chr17:38237911-38237943
  hypo
tgtttcctttaaaataaaggcgaggctgggtg

SEQ ID NO: 270598 - DNA, 46 bp, Homo sapiens; identical to SEQ ID NO: 217762
  chr17:38244541-38244587
  hypo

SEQ ID NO: 270599 - DNA, 504 bp, Homo sapiens; identical to SEQ ID NO: 217763
  chr17:38249240-38249744
  hypo

SEQ ID NO: 270600 - DNA, 164 bp, Homo sapiens
  chr17:38250103-38250267
  hypo
aggtgtgttgaattgaactgcgtctgcctcctcccccgggtcaggcgagagcctgacctacctgcagagacaagcaccaccgcggtgaagaggcccagctcctcctcggtaagcgccagggagttgagcttctcgctgaagtcgaacatggcactgagcaggtc

SEQ ID NO: 270601 - DNA, 124 bp, Homo sapiens; identical to SEQ ID NO: 217764
  chr17:38251853-38251977
  hypo

SEQ ID NO: 270602 - DNA, 120 bp, Homo sapiens
  chr17:38276209-38276329
  hypo
ttagacatccaactgggtatgtatactagacagttggatatatgattctggagttaggggatgagtccagaaagaaatataaattacggagctgtcagcgtagagatggtgcagaaagtc

SEQ ID NO: 270603 - DNA, 328 bp, Homo sapiens
  chr17:38334998-38335326
  hypo
gcagccatgccacccgccagaggtgctttagccctgaaaaccctggggtccctgactgttcagaggcctacacagcgcaggctgacccacccagggaggcagtgccagacaggcacaggccccaagctgccttttaggcatcagcaaagggatgcgttgtccttagcagtttggtgggggggatagtattctccttgggctggactcagaaggtgtctgggaggggagaggtggctgggccggcatcatggccctgcagcatccagggtgtccaagcgcctccagcttccacccttcggtggcaggcctcagcacccggctttttttt

SEQ ID NO: 270604 - DNA, 37 bp, Homo sapiens; identical to SEQ ID NO: 217765
  chr17:38380418-38380455
  hypo

SEQ ID NO: 270605 - DNA, 78 bp, Homo sapiens; identical to SEQ ID NO: 217768
  chr17:38511651-38511729
  hypo

SEQ ID NO: 270606 - DNA, 91 bp, Homo sapiens; identical to SEQ ID NO: 217769
  chr17:38513565-38513656
  hypo

SEQ ID NO: 270607 - DNA, 41 bp, Homo sapiens
  chr17:38638673-38638714
  hypo
cagagaagaaagagtgcattcggatagaattccaccttgtg

SEQ ID NO: 270608 - DNA, 97 bp, Homo sapiens
  chr17:38656559-38656656
  hypo
cttttaaggctctgcgtcgcccttggatgtaccaaggcagggctccatcttactcctgtattcctgaatgctgcccccttcgcggccccgcacactc

SEQ ID NO: 270609 - DNA, 321 bp, Homo sapiens; identical to SEQ ID NO: 217770
  chr17:38668670-38668991
  hypo

SEQ ID NO: 270610 - DNA, 42 bp, Homo sapiens
  chr17:38692022-38692064
  hypo
tttttttttttattttgagacggagttttgctctgttgccca

SEQ ID NO: 270611 - DNA, 224 bp, Homo sapiens
  chr17:38711764-38711988
  hypo
ccaggacttggccgcgctgtaggcccagaagggaagggtcaggaggaagaggatgtctgccaccgccaggttgagcaggtaggtatcggtcatggtcttgagcctcttgaaatagatataggtcaacacgaccagcccattgcccagtaggcccacgaaacaaatgatggagtacatgatagggaggaaccaggctttaaagttccgcacgtccttcttggagc

SEQ ID NO: 270612 - DNA, 323 bp, Homo sapiens
  chr17:38774236-38774559
  hypo
ccctccttagccgtcgtgcacaacctgtgctgtgagacgctgctgcttgcctggcactgctgttgaatcagtctccatctcctcattttgatggcagcctgggtttgttatccttcaaagatcgtctcttggaaggacaccagcctctgattacatttccgagcctgcctggaggcagctaagctaatccgacacgatttgggtggattcccttctggcctcatgttctgacacaacctctggcagcagtagggtgggaagatggacaaaataattacgccctatgagttgaaaggagaattaaaattaattccctcgtgcaa

SEQ ID NO: 270613 - DNA, 339 bp, Homo sapiens
  chr17:39657291-39657630
  hypo
tgagaaaccaaagcgtatccaggtcagagaggagagagatccgaccggaagagaagagcacagagggcccaccatcaggagagagtcaggacagggggtcctgagagcagagggactgagccttgggtccagcagcccctcctctctcctgcagggaactgccggctctctcctcctctgggtgctgaagacagagggaggggacgccaggcagatttaaggcctacggacatcagaagtgcggcgaccagaggcattagaggtggtggtaacagaggcactagaagtcgtggtaacagaggtgctacgggggctgacgcttcctgggaaacaagagac

SEQ ID NO: 270614 - DNA, 551 bp, Homo sapiens; identical to SEQ ID NO: 217772
  chr17:39658615-39659166
  hypo

SEQ ID NO: 270615 - DNA, 145 bp, Homo sapiens; identical to SEQ ID NO: 217773
  chr17:39659196-39659341
  hypo

SEQ ID NO: 270616 - DNA, 229 bp, Homo sapiens; identical to SEQ ID NO: 217774
  chr17:39659565-39659794
  hypo

SEQ ID NO: 270617 - DNA, 109 bp, Homo sapiens
  chr17:39661340-39661449
  hypo
ggggctgtagtcccgctcagggctagctgggctctgcttcaggtgccagtcacggatcttcacctccaggtcagcgttggcctcctccagggcgcgcaccttctccagg

SEQ ID NO: 270618 - DNA, 148 bp, Homo sapiens
  chr17:39671696-39671844
  hypo
ctccttcccctgtgcccaggcgcctacttggcatcctggccctcgagcaggctgcggtaagtagcgatctcctgctccagccgtgtctttatgtcaagcagcatcttgtactcctggttctgagcctccatctcgcatcggagctcac

SEQ ID NO: 270619 - DNA, 498 bp, Homo sapiens
  chr17:39672145-39672643
  hypo
ctgggactgcagctcgatctccagctcctgcatcgtgcgtctcaggtctgtgatctccgtcttgctggtctggatcatttctgtgttggaggccacctctttgttcagctcctcagtctgtaggtcatgcacaacagaagtgagccccggggcctcctcggagactcagggacctggggcaggaagggcagggcaggatataaggcccaccttgctgaagaaccaggcctcgacatcccggcggttcttctccgccatggcctcgtactgctccctcatctctgccagcacacgggtcaggtccacacccggtgctgcgtccatctccacattgacctggccggccagctggctgctgaactccttcatctcctgcaggatgggagggacccacttagagacggagagcagaagagagacctgagagtctggcgtcacacatgccaatcctggctctgcccgtaacacaccccaaccgctgttccccattgcacatga

SEQ ID NO: 270620 - DNA, 411 bp, Homo sapiens
  chr17:39673044-39673455
  hypo
ggggccagctctcacctcttcgtggttcttcttcaggtaggctagctcctcattcaggccctcgatctgcatctccaggtcagtcctggccagggtcagctcatccaggactcggcgcaagccgttgatgtcagcctcaacgccctggcgcagggccagctcattctcatacctgaggagagggaggccaaagaaggaagtgggaggggtcttggctgcctgagtcagagccaggagaaggccaagtaaagtgggcaatgcaggaagaggagagagacgggggagcgcacttgagcctgaagtcgtccgcagccagcctggcattgtcgatctccaggatgacccgggagttgtcgatggtggtggccatgatctgcaggagacagagtcggtgtctagaggactcctctc

SEQ ID NO: 270621 - DNA, 118 bp, Homo sapiens; identical to SEQ ID NO: 217776
  chr17:39676657-39676775
  hypo

SEQ ID NO: 270622 - DNA, 452 bp, Homo sapiens; identical to SEQ ID NO: 217777
  chr17:39680350-39680802
  hypo

SEQ ID NO: 270623 - DNA, 142 bp, Homo sapiens; identical to SEQ ID NO: 217778
  chr17:39681121-39681263
  hypo

SEQ ID NO: 270624 - DNA, 240 bp, Homo sapiens
  chr17:39682492-39682732
  hypo
tgggattacaggcatgagccaccgcgcccggccgattgtgtagttttttaatgcaacagaataggctacaaaatatcagaggggatttctcttagtatggtgagaattgtgtcacccatttgtgtgtgtgcatgtgcacgcacacacacacacagaggtgagaaaaagaatgcgtaagggtgcgtagtaaaatgtacttattgtcgcaatttttttttttttttgatacagggtctcgct

SEQ ID NO: 270625 - DNA, 111 bp, Homo sapiens
  chr17:39694232-39694343
  hypo
gtcaggaagctggtctgggacggtggtttatctaatccacctccaggaaaggaatcacaccggggccctcctagatctgtgttggaacgcgtcctggcagaattaggttct

SEQ ID NO: 270626 - DNA, 247 bp, Homo sapiens
  chr17:39788201-39788448
  hypo
tcagtgggcccatctgcatccggcagagacccacccagcccccatctccttgctcgggaggctttgggggcacagcgagggtcggctgtgaaaacacggagagaatgcgtgtagggtgactcgaggcacagccctggtgcgtgctgcgcggcggggttggtgatgaggtgctggctgatcccgaagatcaggagcactgactcaccagggctcccctgggttccccgctgccagaaccaaccccaat

SEQ ID NO: 270627 - DNA, 64 bp, Homo sapiens
  chr17:39803737-39803801
  hypo
gccagctgcgtgaacgcccgtaactctttacggcagaagaccaagggtgcgtctggtcctcaga

SEQ ID NO: 270628 - DNA, 157 bp, Homo sapiens
  chr17:39855666-39855823
  hypo
atgcttctactgtccgtttttgtgtgctccaatgcagatctaaaactgcgatggaatgtgcacttataaaaacaatgccactgtctttttttaaccagtgaacagattgcaatataaagtccactaaagccaggcgcggtgactcacacttgtaatc

SEQ ID NO: 270629 - DNA, 286 bp, Homo sapiens
  chr17:40318143-40318429
  hypo
ctaaaggcgatggtcgtagggcggagggaccgagagagtactcctcagcaggaactgtaggtatccacgaggggtatcccattccctagaatcctggccattcccaagtcctcagtgggggttgcggggggtggttccagggtaggtagtagagggtgacggtgtccttacccaggatggccagcaccatgttgtctcggagcacctcaagcgagccggagcagacatagtaatgtgcctgcagggcatccccacggcgcaacaggtactcgcccggagcgcagaa

SEQ ID NO: 270630 - DNA, 136 bp, Homo sapiens
  chr17:40330251-40330387
  hypo
ggaagaaaggtgcagagatacgttggggcacatcccttgcggctggttaggcgaaggcttctgaccattcacactgcccgtccggacttgctgttaccgtgattactgtccccgcggcctccttgggggccaagtc

SEQ ID NO: 270631 - DNA, 118 bp, Homo sapiens; identical to SEQ ID NO: 217782
  chr17:40337520-40337638
  hypo

SEQ ID NO: 270632 - DNA, 105 bp, Homo sapiens; identical to SEQ ID NO: 217783
  chr17:40353736-40353841
  hypo

SEQ ID NO: 270633 - DNA, 203 bp, Homo sapiens
  chr17:40362204-40362407
  hypo
agcaatggtgatgccgccaatttctgagtcactgaatctcaggaggaaggtcccatctggcttgttaatgagtaggtcatgggcctgttgcttgtttacaaaccccaaaatggccctggatcaccaaggacaaaggacagaagcagagtgtgacttacgatgccagagagaagaccttcagactctgtcggcgccttaagaaa

SEQ ID NO: 270634 - DNA, 138 bp, Homo sapiens; identical to SEQ ID NO: 217784
  chr17:40370156-40370294
  hypo

SEQ ID NO: 270635 - DNA, 662 bp, Homo sapiens; identical to SEQ ID NO: 217785
  chr17:40371745-40372407
  hypo

SEQ ID NO: 270636 - DNA, 167 bp, Homo sapiens
  chr17:40372620-40372787
  hypo
ccaaccagggaacacggacagacagacagaccgcagagggagagcatgtccagggccactggggatgcagagccaccaagattctctcaggaaagggaggccgaagggaggcggcttccctccacaccatctgtgaggagtctcattgatggcgggacagggagtaa

SEQ ID NO: 270637 - DNA, 437 bp, Homo sapiens
  chr17:40375287-40375724
  hypo
aaggtcgctgcctccgaatggaaagtgtgctttctcccaaccccaccagagctgctttccagtccccaggcccaatcctcaagttgcacaatgtgcctccaccgcgcctcaccttggatcctcaggctctcctggtactggatgatgaagtactcctgagtctgctgcagcttttttaactcattctctgtgtcctgcgtgaccagtcgcagctcctcaaacgtctggttgatctggaggtgtttctgggacatggcatcagcaaggcttccagctggagagctaccctgggaacatatggggggcagtgcaaggcagtgcgaatgggaggaagactgaggccttaatccccaggaaaagccagctcctacaaccagggtaagaccccaaaaggtaaattttgagtcgggaggaaaagcaaacgtcatcatgagaca

SEQ ID NO: 270638 - DNA, 81 bp, Homo sapiens; identical to SEQ ID NO: 217787
  chr17:40387769-40387850
  hypo

SEQ ID NO: 270639 - DNA, 33 bp, Homo sapiens
  chr17:40427609-40427642
  hypo
ttttaaccctttatccctgactagaaagaaaaa

SEQ ID NO: 270640 - DNA, 33 bp, Homo sapiens
  chr17:40427746-40427779
  hypo
gattccttataaggccctgtttcttgaagcttt

SEQ ID NO: 270641 - DNA, 208 bp, Homo sapiens
  chr17:40436565-40436773
  hypo
tgagccaccatgcccggccctttgggataattctcttaatccataaactcaaacccaccttcatgtaagtgtgcacagagcacactgtcccattcaatagagcaggggtgtaggctgggcgagaatggagatgccatgctccgcaccgcagaaaaatggtgggctagcccagcccagggaggcctcttcactccgccggtgtgtgctg

SEQ ID NO: 270642 - DNA, 147 bp, Homo sapiens; identical to SEQ ID NO: 217790
  chr17:40447592-40447739
  hypo

SEQ ID NO: 270643 - DNA, 165 bp, Homo sapiens
  chr17:40453235-40453400
  hypo
gagccctttcccctgcgccaacccctcatcgtgtgtctgtccctgtgtcccatgcagcacattcatcattgagaagcagcctcctcaggtcctgaagacccagaccaagtttgcagccaccgtacgcctgctggtgggcgggaagctgaacgtgcacatgaatcc

SEQ ID NO: 270644 - DNA, 36 bp, Homo sapiens; identical to SEQ ID NO: 217791
  chr17:40453899-40453935
  hypo

SEQ ID NO: 270645 - DNA, 418 bp, Homo sapiens
  chr17:40456105-40456523
  hypo
catcaatcttggtatcgaggaatttctaatgatagatccagacctcaccactggagaccttgccttgggtgctgggcaccaggttgatggagaagtcagtaacccagaaagacgccaagaaacactcttaggggatacggggcaggggctgctggcagggctgacctgagcgaagaccccagcccgaggtgtggacaggaccatgctcctggcctggggcccatgtggagctgggacccccctctcctttgcagcgagtgcagtggtgagatcctgaacaactgctgcgtgatggagtaccaccaagccacgggcaccctcagtgcccacttcaggaacatggtgaggacggggcccaccctcggagggcaggtctgcccagagctgagtccttgtaagcagccgccatctccctgtt

SEQ ID NO: 270646 - DNA, 159 bp, Homo sapiens
  chr17:40458359-40458518
  hypo
gaccaaggagaacctcgtgttcctggcgcagaaactgttcaacaacagcagcagccacctggaggactacagtggcctgtccgtgtcctggtcccagttcaacagggtgaggggcccagctgccagccgcccaccagggcccaccggggtctgttgctc

SEQ ID NO: 270647 - DNA, 107 bp, Homo sapiens
  chr17:40459507-40459614
  hypo
atgatgggtaaggaacgggggctgcagggtcaggggccagctgtgggcgcagagagactgtggctgtggcccagtggtgacgctcaatgctccgtgcacccagggcc

SEQ ID NO: 270648 - DNA, 45 bp, Homo sapiens
  chr17:40477851-40477896
  hypo
ttacaggcgtgagccaccgcgcccggccaatcaatttctaaatag

SEQ ID NO: 270649 - DNA, 42 bp, Homo sapiens
  chr17:40514602-40514644
  hypo
ccaccacttcgatcacttagcgtgtagctggtgccagttatt

SEQ ID NO: 270650 - DNA, 35 bp, Homo sapiens
  chr17:40533448-40533483
  hypo
aaggaatttggaaggccaggcgtgctggctcacgc

SEQ ID NO: 270651 - DNA, 32 bp, Homo sapiens
  chr17:40548836-40548868
  hypo
cgcctcggcctcccaaacgtcaatatcttatt

SEQ ID NO: 270652 - DNA, 42 bp, Homo sapiens
  chr17:40609955-40609997
  hypo
agacattaattatttgggtgcgtatgtgtgaattaattcttt

SEQ ID NO: 270653 - DNA, 76 bp, Homo sapiens; identical to SEQ ID NO: 217794
  chr17:40616719-40616795
  hypo

SEQ ID NO: 270654 - DNA, 285 bp, Homo sapiens
  chr17:40689405-40689690
  hypo
ctgcccgcaggtaccgctattaccagaatgtgtgcacgcaaagctactctttcgtgtggtgggactgggcccgctgggagcgagagatagactggatggcgctgaatggcatcaacctggcactggcctggagcggccaggaggccatctggcagcgggtgcgtgcccactgtcccttccccaccctcctctatggcgggagccaccgtaggtgttttcacccgccccccagcatgggcgcagtgtctctctctagaagtgctttcagcgtgcacagtggcttgg

SEQ ID NO: 270655 - DNA, 196 bp, Homo sapiens
  chr17:40695505-40695701
  hypo
gaggctactgctccggagtgtgtacaactgctccggggaggcctgcaggggccacaatcgtagcccgctggtcaggcggccgtccctacagatgaataccagcatctggtacaaccgatctgatgtgtttgaggcctggcggctgctgctcacatctgctccctccctggccaccagccccgccttccgctacgac

SEQ ID NO: 270656 - DNA, 610 bp, Homo sapiens
  chr17:40699094-40699704
  hypo
ccgctgcccgggaacgcgtgaccgagggccgtgtggatgtgctgggtgagcctcctggaagcatatgggctcctaggagccttctccgccctgcgttgaaaccaacatgtccccaggcccctggagcatgaggggacaggccgtgctgagggtgatgctgaggcgggctggttgggcctctgtccccgcagtgtgtgacacaggcctgggcctgctggggccgctgggggaggacgctgtggcctctgtactggatgtgaatgtagtaggtactgtgcgggtgctgcaggacttcctgccagacatgaagcggccgggttcgggacgcgtgttggtgactgggagcatgggaggattgatgggtgagtggcagggaccgggcccggagctccagattctttgtgtgcagagctgagccttgaaggcaggctccttagggggtggggtgcaatcagcttggaggggcactgcctgccgggggatgaccccctggccgctgcgcctcaggaacctcatcttcccacccaagggctgcctttcaatgacgtttattgcgccagcaagttcgcgctcgaaggcttatgcgagagtctggcggttctgctgctgc

SEQ ID NO: 270657 - DNA, 783 bp, Homo sapiens
  chr17:40705245-40706028
  hypo
agggactcaaaatccgtggccgctgcccgggaacgcgtgactgagggccgcgtggacgtgctgggtgagcctcctggaagcatatgggctcctaggagccttctccgccctgcgttgaaaccaacatgttcccaggcccagggagcacgaggggacaggccgtgctgagggtgatgctgaggcgggctggtcgggcctcttgtctccgcagtgtgtaacgcaggcctgggcctgctggggccgctggaggcgctgggggaggacgccgtggcctctgtgctggacgtgaatgtagtagggactgtgcggatgctgcaggccttcctgccagacatgaagaggcgcggttcgggacgcgtgttggtgaccgggagcgtgggaggattgatgggtgagtggtagggagtggcctcggcagctccagattctttgtgtgcggagctgagccttgaaggcaggttccgcggggggggtggagtggggtgccgtcagcttggaggggcaccgtctgcccggggatgaccccctggccgctgcgcctcaggaacctcgtctccccacctaagggctgcctttcaatgacgtttattgcgccagcaagttcgcgctcgaaggcttatgcgagagtctggcggttctgctgctgccctttggggtccagtgagtcaacacccccgttccccgaaccctcttaactctgacctagagacgccgagcaccctgtcctgcgggagccgctctggggcgatctccctggccctctctgcccggctcacattagct

SEQ ID NO: 270658 - DNA, 42 bp, Homo sapiens
  chr17:40711057-40711099
  hypo
tttttttttttctcctgcctcggcctcttgagaagctgggat

SEQ ID NO: 270659 - DNA, 33 bp, Homo sapiens
  chr17:40743622-40743655
  hypo
gcaggggttactaataggcgttagccactgcgc

SEQ ID NO: 270660 - DNA, 103 bp, Homo sapiens
  chr17:40801990-40802093
  hypo
aacaaaaacaactacagaaacatcccattttgttctatttcacaactaaaatatgaatttagtacaactcccttcacataaagagcgtcggctctttgccatc

SEQ ID NO: 270661 - DNA, 40 bp, Homo sapiens; identical to SEQ ID NO: 217796
  chr17:40804385-40804425
  hypo

SEQ ID NO: 270662 - DNA, 104 bp, Homo sapiens
  chr17:40820751-40820855
  hypo
ggcgtgagccaccgcggccggcttctctccttcatttctatgtgccagttatacttggttctttctgctcttctaacatttttttttgttgttgttgttgttgt

SEQ ID NO: 270663 - DNA, 108 bp, Homo sapiens; identical to SEQ ID NO: 217797
  chr17:40847766-40847874
  hypo

SEQ ID NO: 270664 - DNA, 33 bp, Homo sapiens
  chr17:40856548-40856581
  hypo
gagcaagactccgtctcaaaaaaagaaaaaaaa

SEQ ID NO: 270665 - DNA, 55 bp, Homo sapiens
  chr17:40897648-40897703
  hypo
ttcttctttttttgccggggggcgaggctggacggagtctcgctttgttacttac

SEQ ID NO: 270666 - DNA, 95 bp, Homo sapiens
  chr17:40929522-40929617
  hypo
ctccgtctcagaaaataaaaataataacaataaaaaaaattataaataactttcttcattcagcatctgctatagatgccgaatgagaaacaagg

SEQ ID NO: 270667 - DNA, 35 bp, Homo sapiens
  chr17:40939517-40939552
  hypo
cagcccttccttttccgccacgccagctactcatc

SEQ ID NO: 270668 - DNA, 131 bp, Homo sapiens
  chr17:40951142-40951273
  hypo
gtcgccacagagacgattgaagacgccctgcttcacttggcccagcagaatgagcaagcagtgagggaggcttcggggcggctgggccgcttcagggagccccagatcgtgggtgcggctgcagggccggg

SEQ ID NO: 270669 - DNA, 73 bp, Homo sapiens
  chr17:40975574-40975647
  hypo
aagctctcagaagtccacaatgtcagaatgctttatgtttccaaggagaaaacagggagccagatgaagtgac

SEQ ID NO: 270670 - DNA, 119 bp, Homo sapiens
  chr17:41131474-41131593
  hypo
gaagctgaggagatgcggaatactccgtgtggggacattaggaaaggggtagattcctgggaagccaggccctcggacggcagggccactacctgaacacaatgcggtgatcctcaata

SEQ ID NO: 270671 - DNA, 38 bp, Homo sapiens
  chr17:41152508-41152546
  hypo
ttttgagacggagtcgcccaggttggagtgcagtggcg

SEQ ID NO: 270672 - DNA, 43 bp, Homo sapiens
  chr17:41177996-41178039
  hypo
tgagaactacactgcgagctttgagatcgacaagcgccgcatt

SEQ ID NO: 270673 - DNA, 161 bp, Homo sapiens
  chr17:41188391-41188552
  hypo
aaatggatctgctgcgccagcaaacaactgtccattgtgtcctgatgagggacgagcagggaaaaccaatcacttatgatgcaaatgagccgacggctgcagcctcctcacattcactgagtgcttctcttctgcccagagcccggcgccgccccagttgg

SEQ ID NO: 270674 - DNA, 84 bp, Homo sapiens
  chr17:41278616-41278700
  hypo
cccttcgtgttctgagggaccgagtgggcgaaaagcgccggagagttggagagtctgtggttcagaatgcgaggtgacaacgtg

SEQ ID NO: 270675 - DNA, 155 bp, Homo sapiens
  chr17:41290192-41290347
  hypo
ctccatctcaaaaggaaaaaaaagcaaaagagaaaaaacccaaacaaacaaaacccctgaacttccctgcgggcacattttctctggcagcctttttcaatgagagctatgttttctccgatactatatggcctgcggaccgctcagctttcatt

SEQ ID NO: 270676 - DNA, 37 bp, Homo sapiens
  chr17:41320359-41320396
  hypo
ataaggtaaattgggctgggcgtggtggctcacgcct

SEQ ID NO: 270677 - DNA, 36 bp, Homo sapiens
  chr17:41320636-41320672
  hypo
caagagcgaagctccgtctcaaaaataaataaaata

SEQ ID NO: 270678 - DNA, 147 bp, Homo sapiens; identical to SEQ ID NO: 217799
  chr17:41389669-41389816
  hypo

SEQ ID NO: 270679 - DNA, 43 bp, Homo sapiens; identical to SEQ ID NO: 217800
  chr17:41399427-41399470
  hypo

SEQ ID NO: 270680 - DNA, 33 bp, Homo sapiens
  chr17:41444581-41444614
  hypo
aaataaaggtcgggcgcggtggctcaggcctgt

SEQ ID NO: 270681 - DNA, 235 bp, Homo sapiens
  chr17:41456127-41456362
  hypo
aagacagtgaccaagcgaaatgggcgtgggcgtcacgaggtgtctgcggaaggaagttggaggagagtggtccgagctcttttgaggaaagccattactgtgaagagcggagcttcagcggtctggctgggtcggaggcgaaagcggagcccatgagccccctctcccccactggggggggacttcccggggccgcagagagaagtccgactgcgactgcgagatcgcgccctga

SEQ ID NO: 270682 - DNA, 42 bp, Homo sapiens; identical to SEQ ID NO: 217801
  chr17:41570142-41570184
  hypo

SEQ ID NO: 270683 - DNA, 136 bp, Homo sapiens
  chr17:41610027-41610163
  hypo
ccccagtctcttacctgagtcgtaggcgaagtccgtctgttcctgtttgatcaccacccccgcccctgggtacctgtgcccattgaccccaccctggtccacggctggctggcccgcctgttcatacaggggatca

SEQ ID NO: 270684 - DNA, 120 bp, Homo sapiens
  chr17:41672277-41672397
  hypo
actccgtctcaaaaaaaaaaaaaagaaactaaatgaataaagaatggatactgcataggcagagcggcggcatgagttgcttgactgagtatgcttattgttccggtttttttttttttt

SEQ ID NO: 270685 - DNA, 41 bp, Homo sapiens; identical to SEQ ID NO: 217802
  chr17:41692630-41692671
  hypo

SEQ ID NO: 270686 - DNA, 41 bp, Homo sapiens; identical to SEQ ID NO: 217804
  chr17:41895347-41895388
  hypo

SEQ ID NO: 270687 - DNA, 37 bp, Homo sapiens
  chr17:41915919-41915956
  hypo
gtagggatacagctttctttcgcttttgttttgagac

SEQ ID NO: 270688 - DNA, 57 bp, Homo sapiens; identical to SEQ ID NO: 217805
  chr17:42019594-42019651
  hypo

SEQ ID NO: 270689 - DNA, 324 bp, Homo sapiens
  chr17:42097491-42097815
  hypo
gtcaccagggagtccggcgcattcataaccagcaatgtttgtaagcatctagattactggggagagaaatattatcccagatggtgaatggaattaatggccacccccaagtgtgtctccccgtccaagcaggtattgccacctgtaggattcgcatacctagagggccccccagggaacaggaagagttctcctataattgtatcgctgtaatgtgtaattgaagtaacaaaggtgctgtgttttgtttgggcaagggcaaaaatagactgtttggttaaaagaagtccaggttggatttcaagtgttatcccgggccaggcg

SEQ ID NO: 270690 - DNA, 124 bp, Homo sapiens
  chr17:42098921-42099045
  hypo
ttaaccatttgtttcgttgccactggggcatcctagtagtgagaccgtttgctactgaccaagtttttctacaagtgacaaatccctctggcctcctcctgaagagcttcgaggacggctacca

SEQ ID NO: 270691 - DNA, 96 bp, Homo sapiens
  chr17:42100159-42100255
  hypo
catgctttttctttcggattctgtttgtgacaccaaaaatgttctgtgtgagagacgcatgaggggagaagaaaaggtgcacacacaaaatacctt

SEQ ID NO: 270692 - DNA, 453 bp, Homo sapiens
  chr17:42109843-42110296
  hypo
attaactccaaaggcgtgtgcgtggtggtggcgagataatcaggtgctgggtatagaggtgtgtgtgtgtgtgtatatttggggagaaaggagaacaccccaaaacaaagccgaggagacactgcaaaactactgcccatactgcatcatagatgtaagctctctgcaccacgctcttccatggttcaatatgctttcaatctaggtggcaatttctgccattctcactagtctcccgtgttccagcctcattctggcaaacaaaagtgagcagtacacatgccatcactttggaaagtcccactgcattaggaacccgtgagtgttaagcctcgggccttcttccagctccgctaccacaggcaggtggggcactctagacaagtcacttggcctcagtggaactcactctctactctgaaaaatagttttgaaaattatcaaggccaggtg

SEQ ID NO: 270693 - DNA, 73 bp, Homo sapiens
  chr17:42142812-42142885
  hypo
aaaaaaaaaaaaaaagatgccataaaaaattactcctccaaaaaaaaattccaataaacccacctgtggctca

SEQ ID NO: 270694 - DNA, 92 bp, Homo sapiens
  chr17:42222374-42222466
  hypo
cgcccggccctagattgtttaagtctttaacgaaatcccatttcttctcattccttagtcctttcccagccgtagcaaaaacaaacaaaaaa

SEQ ID NO: 270695 - DNA, 91 bp, Homo sapiens
  chr17:42249458-42249549
  hypo
ccatcgctacagcccgaggctacacagactgtgctcgacacctgatccggcagggagctgagctggatgcccgtgtcgggggtcgcgctgc

SEQ ID NO: 270696 - DNA, 355 bp, Homo sapiens; identical to SEQ ID NO: 217808
  chr17:42254322-42254677
  hypo

SEQ ID NO: 270697 - DNA, 117 bp, Homo sapiens; identical to SEQ ID NO: 217809
  chr17:42289050-42289167
  hypo

SEQ ID NO: 270698 - DNA, 216 bp, Homo sapiens
  chr17:42292484-42292700
  hypo
acttcacaggtggacgtggcagtaacagcactggactgggactctggggcactaaatcctgctctagcatcaatagttgtgtcacccgggacacttaaccctcctgcacctcagttccttgcccacaaaactgggataaccttttcctagggttacctttataaagacattgcaagtatcaaatgagaccatgacgggaaacgtcatagagggtga

SEQ ID NO: 270699 - DNA, 120 bp, Homo sapiens
  chr17:42301914-42302034
  hypo
gccactgcgcccggcctgtcccttgttatttttttattgctgtgtaagtcagagatagtaaagtacacatactttaagtatacaacttttttttttgagacggagctttgctcttgtcac

SEQ ID NO: 270700 - DNA, 418 bp, Homo sapiens
  chr17:42328460-42328878
  hypo
ctagttctgagacgcgcccctcgcatgctcccagctcttgtgccccaggcccaggcagccactcacacactgaagctccacgttcctgaagatgagcggcagcaggacgcgccgcagcggcacagtgaggatgaggacgaagggcagggccagggaggccggcgtggacttcaccacccacagcactgccaggcagatgatctggatgcccgtgaataagtgcatgcgccaggtcttcacctgcaggcggaggctggggtcagtgcctatcacaccccagcaccctctaccaccccaggctgggcagccagaaaagggtcctgtacccgcttgacgtagggcacatctgggtgatacttgggtggcttgaacagaagcaagatgcggtcaaagagctggatgccgctgagcgacgtga

SEQ ID NO: 270701 - DNA, 256 bp, Homo sapiens
  chr17:42334640-42334896
  hypo
tgagccctcgcacccggccactgtctcagtcttatacacaacctcccgtgtgcattaacatccccataggcccccaccttgatcagcttggagaaagtctcatagatgaagatgagggaaatgaggaaggagaagatctcctgggtatagcgggagatgaagcggaccaggaagctaccctcgaaggccaccaccaacaccaccagcaggatgagccagaagccgatccacacgcggcccacgatgtactctagac

SEQ ID NO: 270702 - DNA, 124 bp, Homo sapiens
  chr17:42335363-42335487
  hypo
gccgaaggtgatggcgggtgacagtgcagcaaagtagatgaagatgacggcagccaggacctgggggctgaatgcatctgtgatgtcactcaggtaataggggtagcggcgccggatatcacgc

SEQ ID NO: 270703 - DNA, 128 bp, Homo sapiens
  chr17:42338004-42338132
  hypo
ttggtgaagactctacgcagctctaggaggctccagaaggtgaggtgagagaggtgcgggcggccccaggccccattctcccccaggttctcctccagttgcacccagcgcgccgcctccatccatct

SEQ ID NO: 270704 - DNA, 130 bp, Homo sapiens
  chr17:42395460-42395590
  hypo
cagggaaggaccccacgccctccatgctgggcctctgcggctccctggcctccattcccagctgcaagtccctggcgagcttcaaatccaacgagtgcctggtgagcgacagtcccgagggcagcccagc

SEQ ID NO: 270705 - DNA, 45 bp, Homo sapiens
  chr17:42401272-42401317
  hypo
actgggattacaggcgtgagccaccgcacccggcccactgtgaga

SEQ ID NO: 270706 - DNA, 198 bp, Homo sapiens
  chr17:42427016-42427214
  hypo
tttctctgtgttccacaggccgtggcatgcggggatggccatcactgctgcccacggggcttccactgcagtgcagacgggcgatcctgcttccaaagatcaggtgcagctggggtgtgggtgcagggcaggcagacgggcagcatgtggagtctggaacccaggagcccagctggcgggggcagccctgattcctgc

SEQ ID NO: 270707 - DNA, 388 bp, Homo sapiens; identical to SEQ ID NO: 217815
  chr17:42427764-42428152
  hypo

SEQ ID NO: 270708 - DNA, 180 bp, Homo sapiens
  chr17:42590362-42590542
  hypo
cgtgagccaccgcgcccagccgattattcaattcttaaattgcaaaatttctctctctctctctctctcttcctctctgtatatataagtttatgttttgggttttttgtttttgtttttgtttttgtttttgttttctgaaccatttgaaagtaagttgcagaccgggcacggtggctc

SEQ ID NO: 270709 - DNA, 95 bp, Homo sapiens
  chr17:42706595-42706690
  hypo
gcctgattcctaggcgacaaccatttaccttctggctgtcccatattctgagagcgacttccactcaataaaaccttgcactcatactccaagcc

SEQ ID NO: 270710 - DNA, 36 bp, Homo sapiens
  chr17:42787252-42787288
  hypo
tctagttggccgggcgcggctgctcacgcctgtaat

SEQ ID NO: 270711 - DNA, 95 bp, Homo sapiens
  chr17:42787528-42787623
  hypo
agactccgtctcaaaaaaaagaaaaaaaaaataccgtctacttttacttctggattgttaacagatatgccatcggcttgttgccttttaaacag

SEQ ID NO: 270712 - DNA, 159 bp, Homo sapiens; identical to SEQ ID NO: 217819
  chr17:42942200-42942359
  hypo

SEQ ID NO: 270713 - DNA, 63 bp, Homo sapiens; identical to SEQ ID NO: 217820
  chr17:42981556-42981619
  hypo

SEQ ID NO: 270714 - DNA, 207 bp, Homo sapiens; identical to SEQ ID NO: 217821
  chr17:42992858-42993065
  hypo

SEQ ID NO: 270715 - DNA, 309 bp, Homo sapiens; identical to SEQ ID NO: 217823
  chr17:43121047-43121356
  hypo

SEQ ID NO: 270716 - DNA, 139 bp, Homo sapiens; identical to SEQ ID NO: 217824
  chr17:43121666-43121805
  hypo

SEQ ID NO: 270717 - DNA, 85 bp, Homo sapiens; identical to SEQ ID NO: 217825
  chr17:43124006-43124091
  hypo

SEQ ID NO: 270718 - DNA, 33 bp, Homo sapiens; identical to SEQ ID NO: 217826
  chr17:43173433-43173466
  hypo

SEQ ID NO: 270719 - DNA, 185 bp, Homo sapiens; identical to SEQ ID NO: 217827
  chr17:43179707-43179892
  hypo

SEQ ID NO: 270720 - DNA, 258 bp, Homo sapiens; identical to SEQ ID NO: 217828
  chr17:43180325-43180583
  hypo

SEQ ID NO: 270721 - DNA, 88 bp, Homo sapiens; identical to SEQ ID NO: 217829
  chr17:43181005-43181093
  hypo

SEQ ID NO: 270722 - DNA, 47 bp, Homo sapiens
  chr17:43193914-43193961
  hypo
gccacagaggtggcacgagcagtgcggggaggcggactcccaccaga

SEQ ID NO: 270723 - DNA, 53 bp, Homo sapiens; identical to SEQ ID NO: 217830
  chr17:43196206-43196259
  hypo

SEQ ID NO: 270724 - DNA, 223 bp, Homo sapiens
  chr17:43208547-43208770
  hypo
caggtggaatgagtcgaggtaacaagaaggcaaaactggcaatcaggacccctgaattctgccccaagttctacacggggtccctggcagccttgtccttctgttccggagttccacacctagcctctccatcactgactattctaccaatggcaggtccaacgcagcacttcagtggcgcggtcctttccacgtcagacaacattctcgcacacaccctctc

SEQ ID NO: 270725 - DNA, 98 bp, Homo sapiens; identical to SEQ ID NO: 217831
  chr17:43211171-43211269
  hypo

SEQ ID NO: 270726 - DNA, 31 bp, Homo sapiens
  chr17:43234070-43234101
  hypo
aaagagaatgttgccaggtacggtggctcac

SEQ ID NO: 270727 - DNA, 91 bp, Homo sapiens
  chr17:43246546-43246637
  hypo
gggggctgctcagcggaggctgtgctggcccggaagaaacaccgtcggcggccatcgaagcgcaaaaggcactggcgaccctacctggagc

SEQ ID NO: 270728 - DNA, 436 bp, Homo sapiens; identical to SEQ ID NO: 217832
  chr17:43246869-43247305
  hypo

SEQ ID NO: 270729 - DNA, 32 bp, Homo sapiens
  chr17:43296203-43296235
  hypo
tacaggcgtgagccaccgcgcccggcctctcg

SEQ ID NO: 270730 - DNA, 252 bp, Homo sapiens
  chr17:43321183-43321435
  hypo
acttcctggagctgctgatgcgcttcctgcccacagagtatgagcgcagcctcatcacccgctttgagcgggagcagcggccaatggaggagctgtcagaggaggaccgcttcatgctatgcttcagccgcatcccgcgcctgccggagcgcatgaccacactcaccttcctgggcaacttcccggacacagcccagctgctcatgccggtgtgggcggagcgggcagggcggtgtgacttgggaggggatg

SEQ ID NO: 270731 - DNA, 162 bp, Homo sapiens
  chr17:43347689-43347851
  hypo
ggtgccttgctctggacctgcgcccacctgcctcctctgtccacctctgtcttctgccccccgggtcagccagcgtggggctcttcctaccttgctgtagtgcccggttcaccttccctcccagctccgctgcagacacgcggtggatgggctctttcctca

SEQ ID NO: 270732 - DNA, 99 bp, Homo sapiens; identical to SEQ ID NO: 217836
  chr17:44799504-44799603
  hypo

SEQ ID NO: 270733 - DNA, 571 bp, Homo sapiens; identical to SEQ ID NO: 217837
  chr17:44845576-44846147
  hypo

SEQ ID NO: 270734 - DNA, 40 bp, Homo sapiens
  chr17:45022235-45022275
  hypo
gattactggcataagccaccgcagccggccttaattttta

SEQ ID NO: 270735 - DNA, 77 bp, Homo sapiens
  chr17:45253201-45253278
  hypo
aatcgattatctgttaagttttttaatcaactataagtagtatgacatgtggattaaagtaccgactctgaagctag

SEQ ID NO: 270736 - DNA, 37 bp, Homo sapiens
  chr17:45590572-45590609
  hypo
gtgcacgacctaggcggggcgtggcggcttacacctg

SEQ ID NO: 270737 - DNA, 81 bp, Homo sapiens; identical to SEQ ID NO: 217838
  chr17:45599273-45599354
  hypo

SEQ ID NO: 270738 - DNA, 148 bp, Homo sapiens
  chr17:45689891-45690039
  hypo
cgttagaagaagcccgtcgtcggtttaaggaccacgtggaaggaaaacagattctctccgctgatctgaggagtcctgtaggttttcatcataaattcccttgacttataggtaacatcattttgtgaagcatggaactttttttttt

SEQ ID NO: 270739 - DNA, 228 bp, Homo sapiens; identical to SEQ ID NO: 217839
  chr17:45885682-45885910
  hypo

SEQ ID NO: 270740 - DNA, 54 bp, Homo sapiens
  chr17:45886228-45886282
  hypo
cctctggtctggccggagtctcgtgtcggtggaaggcagcgaccgtttcagctc

SEQ ID NO: 270741 - DNA, 103 bp, Homo sapiens
  chr17:45891076-45891179
  hypo
gacaggtctttgccgatgttgttgcgcagaatgttccacaggctcacgtcagccccaggcccgctggccgccggcaggcagcgacggcggggtggccccatgg

SEQ ID NO: 270742 - DNA, 389 bp, Homo sapiens
  chr17:45894355-45894744
  hypo
agcacagaggatgcggccgctcaggcagggcgacagagacaactgacatcccagtggaagatgacagccaccctggcagaggcatgggcatggaggaacagagacaatcttgatacagtttggacatgggtaaggggtggggaggaaaccaggcgatgcatggctctccaggaaactgcagcgatgtaggaggaataggacccatcctggggaagtgatgggatcgggggcctgagcaggaccctgtgtgtacccctggatcttacctggtgtgtggggataacaggggctgaggggattcggtgcagggactccaggctctggaggagcctgtgtagttcctggagcttcccctgacactcagagagctctgcggggaaaaagaacaa

SEQ ID NO: 270743 - DNA, 81 bp, Homo sapiens
  chr17:45943943-45944024
  hypo
tggggattggctgccggaccggagtagccagacagccaccgtgaacaaaggctctgggatcgcatccgcggcctgatggga

SEQ ID NO: 270744 - DNA, 151 bp, Homo sapiens
  chr17:45944324-45944475
  hypo
agactcctgctcatcggacacgccacgctgggaatctgagaatctgtggtgggaatgggccgggctggcaggaacaaaggatgaaagcgaggttgtgcggccggctgggacgtacacacccatcgctgacgtacttcggcggctgatgacc

SEQ ID NO: 270745 - DNA, 113 bp, Homo sapiens
  chr17:45970935-45971048
  hypo
tcacaccctgtcctccgccccgtgtgcgcacactttttttttttcacctctgcggtcttcatgatggggcctccaggataggagaagcatagctaccccgtttttctcccaga

SEQ ID NO: 270746 - DNA, 135 bp, Homo sapiens
  chr17:46006392-46006527
  hypo
gtggtctctcagagcgatccacactgggaccaaggtaggaccttgccctcctgaccctcggcaaacccaagccacatgcccaaaaggggccgcggccacatatacctcatgacactggcacgagcccccagagca

SEQ ID NO: 270747 - DNA, 37 bp, Homo sapiens
  chr17:46017956-46017993
  hypo
tttaaaactagaagaggtggcgggcgcggtggctcac

SEQ ID NO: 270748 - DNA, 37 bp, Homo sapiens
  chr17:46018233-46018270
  hypo
gacagagctagtctccgtctcaaacaaaacaaaacaa

SEQ ID NO: 270749 - DNA, 128 bp, Homo sapiens
  chr17:46080799-46080927
  hypo
gggaggagcaggcgcgggggtgggtgtgcttggattcgctcatgggagctgagccagccccagcagggaagaagggtcgctttggcattcattctcctgcagttaccaggcctcgccgcctgccgggc

SEQ ID NO: 270750 - DNA, 33 bp, Homo sapiens; identical to SEQ ID NO: 217842
  chr17:46123911-46123944
  hypo

SEQ ID NO: 270751 - DNA, 152 bp, Homo sapiens; identical to SEQ ID NO: 217845
  chr17:46152422-46152574
  hypo

SEQ ID NO: 270752 - DNA, 152 bp, Homo sapiens; identical to SEQ ID NO: 217846
  chr17:46152814-46152966
  hypo

SEQ ID NO: 270753 - DNA, 44 bp, Homo sapiens
  chr17:46170653-46170697
  hypo
aaaaaaaaaaagacacagaagacaggtctcgaaaaaaatttaca

SEQ ID NO: 270754 - DNA, 57 bp, Homo sapiens
  chr17:46176826-46176883
  hypo
caccacagggaaaaccgtaaacgacttcaggtcctccactcccgtgaagcttcatta

SEQ ID NO: 270755 - DNA, 78 bp, Homo sapiens
  chr17:46177140-46177218
  hypo
tgcgttaaaccaacacgtctaaatgtaacaccaatttatgaaaaaccctcatttgaaactttgaaaaagaggtaaaat

SEQ ID NO: 270756 - DNA, 37 bp, Homo sapiens
  chr17:46223566-46223603
  hypo
aggagaggccggagacggtggctcacgcctgtaatcc

SEQ ID NO: 270757 - DNA, 120 bp, Homo sapiens
  chr17:46235537-46235657
  hypo
tcaaaaaaaaaaaaaaaaaaaaatgcgataaatagctctctttctgtgatcattcttgcccaaaggcaagactaaaagattctcctctgggccggttgcgctggctcacgcctgtaatcc

SEQ ID NO: 270758 - DNA, 31 bp, Homo sapiens
  chr17:46409045-46409076
  hypo
gcgaaactccgtctcaaggaaaaaaaaaaaa

SEQ ID NO: 270759 - DNA, 238 bp, Homo sapiens
  chr17:46607012-46607250
  hypo
cccgaccttcctctcgctcgcgcttcttctgcttcattcgtcggttctggaaccaaatcttgacctgtgtttcattgagctccagggtggcggcaatctccaccctccgggcccggctcaggtacttgttgaaatggaactccttttccagttctgtcagctgccttgtggtgaagttggtgcggaggccactgggcgagcccaggcctggctctgacaccttcgctaggggcggggc

SEQ ID NO: 270760 - DNA, 90 bp, Homo sapiens
  chr17:46983833-46983923
  hypo
attccctctttaaaaacaaaaaacaaaaaacaaaaaaactctaaagccagactcttttttttgagacggagtctcactcttttacccagg

SEQ ID NO: 270761 - DNA, 34 bp, Homo sapiens
  chr17:46993884-46993918
  hypo
ttacaggcgtgagccaccgcgcccagccagaata

SEQ ID NO: 270762 - DNA, 210 bp, Homo sapiens
  chr17:47092596-47092806
  hypo
agtgctgggattataggcgtgaaccactttgcccggccgtgaccgtatggcttttaagctttctggagagaggctggcatctccaccgggggcgagtgctaaaccagcatctccagagaggcggggccgggccagagatggtcttcctgccccccacctttccctcggtcggagcttagtagccttcccgacccccgggggaagattccg

SEQ ID NO: 270763 - DNA, 199 bp, Homo sapiens
  chr17:47170365-47170564
  hypo
tggaaagagagatgcggaatgtggtagagaggtaatattcaagttagtcggcctccttgtttttctttgtctcccccttgcacctgctctgccctgattttactgctgaggacacctggaccaaacagaggaaaggtgaattggtctctctctgtcctggagccgggatacaagcttcttctcccgcccttggaaatca

SEQ ID NO: 270764 - DNA, 159 bp, Homo sapiens
  chr17:47170916-47171075
  hypo
tgcgcgtgcgcgtgcggattctaaccgcactgcattgtggttatgaatatgatctgtaacttatccatttttggggaaacccttttgctcatagtaaatggtccatttactatggtccattttgtaaatattcatatgtgtgcttaaaaagaatgtata

SEQ ID NO: 270765 - DNA, 180 bp, Homo sapiens
  chr17:47177621-47177801
  hypo
actccgtctcaaaaaaaaaaaaaaaaaaaaaaaagaggtagactcaacgggcaatcccagccttttgtacttagctgtttcttccctccccctccccaccagtaggtgtgtggaattgcttccatcttagcagccatcatgaatgaggttgaaagctcaccctaggaataagagtgggga

SEQ ID NO: 270766 - DNA, 39 bp, Homo sapiens; identical to SEQ ID NO: 217856
  chr17:47442684-47442723
  hypo

SEQ ID NO: 270767 - DNA, 95 bp, Homo sapiens; identical to SEQ ID NO: 217857
  chr17:47583840-47583935
  hypo

SEQ ID NO: 270768 - DNA, 445 bp, Homo sapiens
  chr17:47629443-47629888
  hypo
gagaaagtcctgctcggggctgtgagcacatccatgggcaggtgttctgtgctcggcctggaggttgggcgtgcctgtgtgcttggtcctcaatgccagtaaacgtgctccgtgtagacactctgcggagggcctaagagggtgtgaggtgtaggcgtgtgcactgcccgtgcagcacgcgtgcatgagtcaggatgtgtactcccgggcagagggacaagcactcgcctgaggtggggagcctgggcacggtcttggcccgatgacatcgtgctgagtgatctcgggtgccctgtgcgcagggagggagtcagaaggctgtgtgagcctctccagcaacatgggtctgtgttctgagccccaaggaaagccccaggcgccctgcatgcccactgcaggcctctgtctacccttgatccctcaccctggcgccccgacaactggg

SEQ ID NO: 270769 - DNA, 96 bp, Homo sapiens
  chr17:47657458-47657554
  hypo
gagcatccatgtcccggagaggggtccctcaacagtcagcctcacctgtcagaccggggttctcccggatctggatggcgccgccctctcagcagc

SEQ ID NO: 270770 - DNA, 181 bp, Homo sapiens
  chr17:47657769-47657950
  hypo
ggaagaatttctctgatggccgcaggacatttgcttgagacccaagtggcagggatccaaccgcccttggcgctgatgtttgctgagggctcagggcttccctctccagccccggttccaagctgtctgatcccccacgaggaaacttgagcaaacaccctgggctcggtgctggaggagg

SEQ ID NO: 270771 - DNA, 34 bp, Homo sapiens
  chr17:47851979-47852013
  hypo
aaagtgctgggattacaggcgtgagccaccgtgc

SEQ ID NO: 270772 - DNA, 92 bp, Homo sapiens; identical to SEQ ID NO: 217858
  chr17:47895284-47895376
  hypo

SEQ ID NO: 270773 - DNA, 162 bp, Homo sapiens; identical to SEQ ID NO: 217859
  chr17:47911774-47911936
  hypo

SEQ ID NO: 270774 - DNA, 63 bp, Homo sapiens; identical to SEQ ID NO: 217860
  chr17:47998383-47998446
  hypo

SEQ ID NO: 270775 - DNA, 42 bp, Homo sapiens; identical to SEQ ID NO: 217862
  chr17:48139110-48139152
  hypo

SEQ ID NO: 270776 - DNA, 113 bp, Homo sapiens
  chr17:48183244-48183357
  hypo
acaggttcactgacgccctggtcaccatccggaaccggcacaacgacgtggtgcccaccatggcacaaggcgtgcttgagtacaaggacacctacggcgatgaccccgtctcc

SEQ ID NO: 270777 - DNA, 140 bp, Homo sapiens; identical to SEQ ID NO: 217863
  chr17:48243308-48243448
  hypo

SEQ ID NO: 270778 - DNA, 79 bp, Homo sapiens
  chr17:48258096-48258175
  hypo
cctcctcgtgtggacgctgggcttgacggcagcctcgcattctttcccacgcggcccacgctcacgcctgctccacaca

SEQ ID NO: 270779 - DNA, 219 bp, Homo sapiens
  chr17:48258578-48258797
  hypo
ggctgtatttagggcggctgtgatgtcagcggaaaggagggtttgagttgggaatgtggcacaatggcccctttgtccccctcccctcctgtcctgtacacactgaaaccacacaccggccccacaccacgtgatgcaggctcagagctgcccatggggcactgccacacaaggctgcccccgctgcagccctgacccacagtgcgtgtgtccacatac

SEQ ID NO: 270780 - DNA, 196 bp, Homo sapiens
  chr17:48263246-48263442
  hypo
ctgctggtccatgtaggccacgctgttcttgcagtggtaggtgatgttctgggaggcctcggtggacatcaggcgcaggaaggtcagctggatggccacatcggcagggtcggagccctggccgccatactcgaactgcaggggaggggagagagggaagagtgagccgctatgcgggaacctctagtcctgcctg

SEQ ID NO: 270781 - DNA, 33 bp, Homo sapiens; identical to SEQ ID NO: 217864
  chr17:48268219-48268252
  hypo

SEQ ID NO: 270782 - DNA, 159 bp, Homo sapiens
  chr17:48530415-48530574
  hypo
atgggcaggcatggctgtaacgttgaggcagttgcaccgggtcctctgctcctggctcgggtgttcatccgccacgtgatccacttgatctctttgtacttcagcttctttacctgtggaatgggagttcatgatactcacctgcatttttttaaacat

SEQ ID NO: 270783 - DNA, 46 bp, Homo sapiens
  chr17:48539230-48539276
  hypo
cagacacaaacctggcgtgagtgtgcagggacgggggcatgtgtgt

SEQ ID NO: 270784 - DNA, 40 bp, Homo sapiens; identical to SEQ ID NO: 217865
  chr17:48555662-48555702
  hypo

SEQ ID NO: 270785 - DNA, 325 bp, Homo sapiens; identical to SEQ ID NO: 217866
  chr17:48565118-48565443
  hypo

SEQ ID NO: 270786 - DNA, 40 bp, Homo sapiens
  chr17:48589712-48589752
  hypo
ccccccagcaagttttctgtgttatcgtgccactcacgtg

SEQ ID NO: 270787 - DNA, 234 bp, Homo sapiens
  chr17:48612074-48612308
  hypo
tgggcccccaacaaaacctgccaaggcatgttttcaaagcgtggggctgctttgaactgagcccagcactggcggggctggggtggaaggagcgtggaatcgggtgcgagaggacagtctccttcagattcctgcttctggcagcctggggaccagttggggcacgggctgggatggagggtggagccgaaaggtgtttggtgggtgggggacagttcacgggtgaagtggagg

SEQ ID NO: 270788 - DNA, 603 bp, Homo sapiens
  chr17:48613866-48614469
  hypo
gccctccacctccggcgggggcgagggccacccacctccaagtctccagccatgacgacctccgcactccggcgccaggtgaagaacatcgtgcacaactactccgaggcagaaatcaaggtgcgcgaggccaccagcaatgacccctggggcccccctagttcgctcatgtccgagatcgctgacctgaccttcaacacagtggccttcaccgaagtcatgggcatgctgtggcggcggctcaatgacagcggcaagaactggcggcacgtgtacaaggctctaacattgctggactacctgctcaagacgggctccgagcgggtggcccaccagtgccgcgagaacctctacaccatccagacactcaaggacttccagtacatcgaccgcgacggcaaggaccagggcgtcaacgtgcgcgagaaggtcaagcaggtgatggccctgctcaaggatgaggagcggctgcggcaggagcgaacccacgccctcaagaccaaggagcgcatggcactggagggcatcggcattggcagtgggcagctgggcttcagccgccgctacggcgaggactacagccgctcccggggctccccgtcc

SEQ ID NO: 270789 - DNA, 75 bp, Homo sapiens
  chr17:48620600-48620675
  hypo
ccctctcccttgcttcgccaaggctagcgagaaactcagtcttagccacacaggaggaatcggaccccttctggg

SEQ ID NO: 270790 - DNA, 512 bp, Homo sapiens
  chr17:48653005-48653517
  hypo
cggttcctgtccaacgccagcaccctggctagcttctctgagcccggcagctgctatgaggagctgctcaagtacctggtgtacatccttcgtaaggcagcccgcaggctggctcaggtctctcgggcagcaggtgtgcgggttgggctgctcagcagcccagcacccctcgggggccaggagacccagcccagcagcagctgctctcgctcccaccgccgcctatccgtccaccacctggtgcaccaccaccaccaccatcaccaccactaccacctgggcaatgggacgctcagggccccccgggccagcccggagatccaggacagggatgccaatgggtcccgccggctcatgctgccaccaccctcgacgcctgccctctccggggccccccctggtggcgcagagtctgtgcacagcttctaccatgccgactgccacttagagccagtccgctgccaggcgccccctcccaggtccccatctgaggcatccggcaggactgtggg

SEQ ID NO: 270791 - DNA, 324 bp, Homo sapiens
  chr17:48687014-48687338
  hypo
gtgcctccctgccccgtgaccctgaccagctagccacattgcttgtcttcctcaagtgccctgtgcccccagcttcgggctggacattcagagccagccacccaatgggctcagcgcaccccacccataggcagagtgaggtgggagctgaggggaagccgcccctgaggggccctgcccagcgcacctggtccggccagtgaccaatgtcgtgtttcgttcttttagatctaatgctggacgatgtaattgcttccggcagctcagccagcgctgcgtcaggtactgcgtctggggtgtgggctcatgcgtgtggggacatgc

SEQ ID NO: 270792 - DNA, 156 bp, Homo sapiens; identical to SEQ ID NO: 217869
  chr17:48763550-48763706
  hypo

SEQ ID NO: 270793 - DNA, 208 bp, Homo sapiens
  chr17:48764876-48765084
  hypo
cctgccttctccactcccagcgtgggccagaggcagctcgtgtgcctggcccgagccctgctccgcaagagccgcatcctggttttagacgaggccacagctgccatcgacctggagactgacaacctcatccaggctaccatccgcacccagtttgatacctgcactgtcctgaccatcgcacaccggcttaacactatcatggact

SEQ ID NO: 270794 - DNA, 231 bp, Homo sapiens; identical to SEQ ID NO: 217870
  chr17:48776791-48777022
  hypo

SEQ ID NO: 270795 - DNA, 140 bp, Homo sapiens; identical to SEQ ID NO: 217871
  chr17:48844995-48845135
  hypo

SEQ ID NO: 270796 - DNA, 105 bp, Homo sapiens; identical to SEQ ID NO: 217872
  chr17:48881298-48881403
  hypo

SEQ ID NO: 270797 - DNA, 37 bp, Homo sapiens
  chr17:48890603-48890640
  hypo
gtcaacaacccagtccgaaggtcgcagaagatttcct

SEQ ID NO: 270798 - DNA, 201 bp, Homo sapiens
  chr17:48911127-48911328
  hypo
agcagctggaacacgggctgatgaaattacggggaattcaaagcagccggcgtcgcccgctgtctggcttcattacggggactggcctcgaagggaagtttattccaataatttagaggattaggatctgacacccttcattagcgatttgacataagcagaaaagacagatcctgcagaatggccgcacaacgggaaggg

SEQ ID NO: 270799 - DNA, 191 bp, Homo sapiens
  chr17:48921801-48921992
  hypo
tgctccattgtctagccagccgctccgtagtctgatgtcaccccccggacagtggggctggagagcagggatggggtgaaccctgactagagtccacagcatcggtgattgccttaggccgtggggaactccctccgtccccttgtcctattgtaaaacagcagcatgcttgcgcacgtcctatgtgccag

SEQ ID NO: 270800 - DNA, 505 bp, Homo sapiens
  chr17:48970596-48971101
  hypo
caaccttattaatgcgctcctgcaaaagccaggctcctcctcacaggctctgctgctgttcggagcaggcccgggctgctgtgtacctcacagctccccgacagagtgctgcacaatgacgaccttcggtggggcagacattcgcctccatcaggcgcctaattatgcaaaccctgaacatgagactgaagaggagactggcctgcccagggacgattgatgaggctggctggtttcatcttccccattgtgtaggccagaggcttcatgatgggagcggctcagctgcgggatctcggttgctttgttgcaggcgctggggcaacgaagggtgaactgggttaataaaatgtgctggtgactcactcctaggaaagaacctgtgatggatcattaagctgtctcggaacttatttcaggcccacacccgcaagatgaacgctctcaatttgtttattaggtctccaacaataggccactgttctccttccccacaactcagtta

SEQ ID NO: 270801 - DNA, 82 bp, Homo sapiens
  chr17:48971131-48971213
  hypo
cctactgaaaatctgtctgtgtgccgagcacgcgctccccatccctctaccaaatgcctggctggcgcgtcatccctggctt

SEQ ID NO: 270802 - DNA, 146 bp, Homo sapiens
  chr17:48995485-48995631
  hypo
cacccttacagaaccggttcgaagccaaacaatggcacgtcacagtccagctgagccggaggcctcagcagggtaagtacaagtgaggctgtggccaagaggggcataggtgccagggactcagaggcgggcgcgcgcaagtgcca

SEQ ID NO: 270803 - DNA, 32 bp, Homo sapiens
  chr17:49047591-49047623
  hypo
ccaagggccgggtgcggtggctcgggcttgta

SEQ ID NO: 270804 - DNA, 36 bp, Homo sapiens; identical to SEQ ID NO: 217876
  chr17:49129052-49129088
  hypo

SEQ ID NO: 270805 - DNA, 32 bp, Homo sapiens
  chr17:49194752-49194784
  hypo
tataaaagactcttggtctccgcattaaagac

SEQ ID NO: 270806 - DNA, 180 bp, Homo sapiens
  chr17:49229459-49229639
  hypo
cgggaagctgagtcacgagaatcgcttgaacccggatggcggagtttgcaatgaaccgacatcgtgcaactgcgctccggcctgggcgccaaagcgatactcggtctcaaaaagaaaaaaaagaaaacaggagaataatgaaattttacttatttattttatttattttttatttttttg

SEQ ID NO: 270807 - DNA, 163 bp, Homo sapiens; identical to SEQ ID NO: 217878
  chr17:49281027-49281190
  hypo

SEQ ID NO: 270808 - DNA, 46 bp, Homo sapiens
  chr17:49354211-49354257
  hypo
gagcgtggagcttccgtgccttctcagggcacgccacctcctcagc

SEQ ID NO: 270809 - DNA, 78 bp, Homo sapiens; identical to SEQ ID NO: 217879
  chr17:52832078-52832156
  hypo

SEQ ID NO: 270810 - DNA, 43 bp, Homo sapiens
  chr17:52865183-52865226
  hypo
aagccttttatggatttgcacgcaccagcgcacctgttaaaaa

SEQ ID NO: 270811 - DNA, 36 bp, Homo sapiens; identical to SEQ ID NO: 217880
  chr17:53314420-53314456
  hypo

SEQ ID NO: 270812 - DNA, 36 bp, Homo sapiens
  chr17:53398066-53398102
  hypo
gccaagcgctcccgcgacgcccggaggctgaaagag

SEQ ID NO: 270813 - DNA, 76 bp, Homo sapiens; identical to SEQ ID NO: 217881
  chr17:53409743-53409819
  hypo

SEQ ID NO: 270814 - DNA, 100 bp, Homo sapiens
  chr17:53410259-53410359
  hypo
tgccagcacttgggaggagccgcacgatcagtgttttctgaagttgtatgcatgctcactcgaggccttcttcccttatcagtcaagtgttcctagaaga

SEQ ID NO: 270815 - DNA, 43 bp, Homo sapiens
  chr17:53479131-53479174
  hypo
acctagaaaatgttttctgccggccgggcacggtggctcatgc

SEQ ID NO: 270816 - DNA, 80 bp, Homo sapiens
  chr17:53550719-53550799
  hypo
ctgcttgtttggatcgacacctccaccagatgggtcgacgcctttcccactagctccgaaaaggctactgcggtcatttc

SEQ ID NO: 270817 - DNA, 37 bp, Homo sapiens
  chr17:53579056-53579093
  hypo
tcccatgaaatacatacattcggggaggagccaagat

SEQ ID NO: 270818 - DNA, 185 bp, Homo sapiens
  chr17:53852162-53852347
  hypo
ttacttcgataacccgggtggccaaattccgtcctggctcattaactgggccgccaaggtgagatcccaggaggtggggcggggggagggatgggggagtgtgtttgacaaatgttgacttagcccgcggggctgtcaggctgaagagacacattgtctcaggcgtaatgaggctcttttatgaa

SEQ ID NO: 270819 - DNA, 271 bp, Homo sapiens; identical to SEQ ID NO: 217885
  chr17:54976882-54977153
  hypo

SEQ ID NO: 270820 - DNA, 138 bp, Homo sapiens
  chr17:55037155-55037293
  hypo
tgcctagctaagcgcggatgtgctaaatcaaggctgaaagaaagcctggccctgcccttaggcatcagggattttccaagtttgattctcctgtcatcagaagcatcccgggaaggatgctcgttacactgcagattc

SEQ ID NO: 270821 - DNA, 35 bp, Homo sapiens
  chr17:55161300-55161335
  hypo
tttttggccgggcgcggtggctcacgcctgtaatc

SEQ ID NO: 270822 - DNA, 87 bp, Homo sapiens
  chr17:55184791-55184878
  hypo
ttcccaaggaactagcgccaagttgggctcgctgattaacattagtgtgcctctttttctttgtttaaaaaaattattattattttg

SEQ ID NO: 270823 - DNA, 459 bp, Homo sapiens
  chr17:55363924-55364383
  hypo
ctgttggtaattgtgcttctcggaggtgaccacgtcattggtatccgggctccataaacaaggggctgccttaccagtgacctttcccgcctaaaaccgaaggccccaaggtcgcttgtctgatggagaatgtatttcccggctcactgtgagcctcgacttaatttgttcctttcctaaggcaaaatgaccttccagtaaacccacaccccctcccccgcttattattatttatttatttttctggtgaacaaacagaattaggaaaggtgtgttcttccaggagagagcgggcagtgtgggaggagatggcagtctggctcattaaaatgccgaggtaggtttaagctgattgccaagtgcgggtcctgcaggtcagagtgtgatgcccagaaacaaagcaaggcctagggagaggctggcctggaggcaactggctcgcgccgcagagagttttga

SEQ ID NO: 270824 - DNA, 62 bp, Homo sapiens
  chr17:55368497-55368559
  hypo
tttgcaggttgtgtcgtttcagcgggtaactggtatgtgtgtgcatgcgtgcaaaagaaaac

SEQ ID NO: 270825 - DNA, 58 bp, Homo sapiens; identical to SEQ ID NO: 217887
  chr17:55378749-55378807
  hypo

SEQ ID NO: 270826 - DNA, 66 bp, Homo sapiens; identical to SEQ ID NO: 217888
  chr17:55379076-55379142
  hypo

SEQ ID NO: 270827 - DNA, 34 bp, Homo sapiens; identical to SEQ ID NO: 217889
  chr17:55426663-55426697
  hypo

SEQ ID NO: 270828 - DNA, 44 bp, Homo sapiens; identical to SEQ ID NO: 217890
  chr17:55519664-55519708
  hypo

SEQ ID NO: 270829 - DNA, 124 bp, Homo sapiens
  chr17:55536230-55536354
  hypo
ctgtccctgctccgcggttgctgggcacctggcgagagcgttgggttgtttgctttgggtaactatggcagatccttttaattgccaccaaataacttcagctcaacctcgtcagtggttgttt

SEQ ID NO: 270830 - DNA, 67 bp, Homo sapiens
  chr17:55605295-55605362
  hypo
agtgaggcatgaatagcccacgattccttttctcaaagggattagcgccagcccccaagctcatttg

SEQ ID NO: 270831 - DNA, 32 bp, Homo sapiens
  chr17:55615595-55615627
  hypo
gctgggccaggggtcgccgcaagccctgggtg

SEQ ID NO: 270832 - DNA, 144 bp, Homo sapiens
  chr17:55643992-55644136
  hypo
ctttctgggatgaacgtggttttattcactcagtaactgagagattgaggatttggctcatctcaggaagctcaaggcagagctgagaaaagaactcaacgaagctgggcttgcccgagagactgccaccgatctggttggggc

SEQ ID NO: 270833 - DNA, 474 bp, Homo sapiens
  chr17:55644492-55644966
  hypo
accatttttgtttccgtttaaaacattgctatcaaccagttggaatataggcccggagtatcgcagggagtaatctaattagtatgaagtcaattcagtcgctccttttgtatctcgtgattaaataagtggggaaaatggcttgaaaattaggtgctagaacgacccaattacatttctgtagctttttgtattcaatttcataaacaattttgctcttcgctggttaatcagtgaatgcctttttccagtttgaaaagcacttttgaaattataatgcaattaaattgtgtgtggatgttctggcatagcgagtgtgaaagccaggggcttggcaggccgccatgttgtaccttgactgtaatgagtccctgggctggcagcttgcgagtgtcattcataatattgtccatgctgggttactgtaaagtgcagctgccttaaccggcagttaaccggcgactgccagtctct

SEQ ID NO: 270834 - DNA, 91 bp, Homo sapiens
  chr17:55647400-55647491
  hypo
aggaaattatgggacgctcatatgatggatgattacacatccattaaaatggtgtttacagagagtttttaaatgacgtggaaatgccgat

SEQ ID NO: 270835 - DNA, 151 bp, Homo sapiens
  chr17:55664889-55665040
  hypo
cctgagatcactccccgccccccacccaactccccccagccccaaaggtggctgcagaggcgcaggtgtgagctggctcactaagtcgctttccccctcctgattaagcgtgtgggggaataaagaagacccgtgtcgactcacgccgatc

SEQ ID NO: 270836 - DNA, 182 bp, Homo sapiens; identical to SEQ ID NO: 217892
  chr17:55752305-55752487
  hypo

SEQ ID NO: 270837 - DNA, 382 bp, Homo sapiens; identical to SEQ ID NO: 217893
  chr17:55753392-55753774
  hypo

SEQ ID NO: 270838 - DNA, 70 bp, Homo sapiens; identical to SEQ ID NO: 217894
  chr17:55828323-55828393
  hypo

SEQ ID NO: 270839 - DNA, 269 bp, Homo sapiens; identical to SEQ ID NO: 217895
  chr17:55917219-55917488
  hypo

SEQ ID NO: 270840 - DNA, 136 bp, Homo sapiens
  chr17:56009116-56009252
  hypo
gtctcaataagacacagtcccgaatccagggaggatccggctgaaaagcctcctctggattgcagaggactcccgtgaaaccacgagcctctttctcctttgcaaaaatcaaatcgtattctcccacctccaaacc

SEQ ID NO: 270841 - DNA, 69 bp, Homo sapiens
  chr17:56031531-56031600
  hypo
tggctcaggtgctgcgggatcacccagggaaggctcattcctctcgctacaagacgctgactgcggatc

SEQ ID NO: 270842 - DNA, 39 bp, Homo sapiens
  chr17:56037720-56037759
  hypo
ggaaacttgccacctcgaactcctgggctcaagagattc

SEQ ID NO: 270843 - DNA, 77 bp, Homo sapiens
  chr17:56389453-56389530
  hypo
ccaagttgctattgccgggcacccaggtgatctcagcagatgtggctgtcaaccgatggacccgcagctggctgggc

SEQ ID NO: 270844 - DNA, 309 bp, Homo sapiens
  chr17:56435237-56435546
  hypo
gcagatgctggaggcgtcaactgggccaggggctggctcagggagggccctggggcactgtgggttagagagccgccccgaaggggctgctgagttggatctggtgacttgctgatcaggagaaggtggctctggctggggctgtgtccgaggaataggaggcctggactgggggactccggtttctgggccaggcttcctgccatgccactggaaccgctttttgtagtggtggtgccggtggcggtggtagtggacatggctggaaacctgggtttcccctgtgggcaccaccgagtccaaggaacg

SEQ ID NO: 270845 - DNA, 108 bp, Homo sapiens
  chr17:56439850-56439958
  hypo
cccacccacacacacgcacacgttcaccgccgccaaagaccccacactgctcaccggcctgctgtggcgggggcggcaccggatgcgcagcaccgaagccaggatgat

SEQ ID NO: 270846 - DNA, 32 bp, Homo sapiens
  chr17:56471128-56471160
  hypo
tggagggccgggcgcggtggctcacgcctgta

SEQ ID NO: 270847 - DNA, 32 bp, Homo sapiens; identical to SEQ ID NO: 217899
  chr17:56471400-56471432
  hypo

SEQ ID NO: 270848 - DNA, 150 bp, Homo sapiens; identical to SEQ ID NO: 217900
  chr17:56569817-56569967
  hypo

SEQ ID NO: 270849 - DNA, 180 bp, Homo sapiens
  chr17:56742973-56743153
  hypo
aaaaaacccacaactcattgcgtttacctcactaaagttcctaagcattaaatgatagcaaggtacagctttaaacagtaagcaacggtaacaaccctgcaaccccaaagcattcttaagaaccaaaagaaacaatgaaaaaaaaaaataaggctgggcgcggtggctcacgcctataat

SEQ ID NO: 270850 - DNA, 41 bp, Homo sapiens
  chr17:57007398-57007439
  hypo
catactaccctgaacgtgcctgatctcgcctgaaaatttac

SEQ ID NO: 270851 - DNA, 209 bp, Homo sapiens; identical to SEQ ID NO: 217901
  chr17:57185658-57185867
  hypo

SEQ ID NO: 270852 - DNA, 39 bp, Homo sapiens; identical to SEQ ID NO: 217902
  chr17:57244237-57244276
  hypo

SEQ ID NO: 270853 - DNA, 149 bp, Homo sapiens
  chr17:57297042-57297191
  hypo
ccgcgcccggctgaatcaggattttaaatattcactctgcttttctagtcctgtgggagatatggtcttctccgtaaaatttctccctcagtcctgggtgatttatttcttttgcattgaagtgtgtggcttttcgtgtgttagcagtt

SEQ ID NO: 270854 - DNA, 78 bp, Homo sapiens
  chr17:57465465-57465543
  hypo
tagtgaaaacagtccggtgggccagatcgagctttgtggctctgttaattccgccctcttctccgcccccacaccatc

SEQ ID NO: 270855 - DNA, 180 bp, Homo sapiens; identical to SEQ ID NO: 217904
  chr17:57476111-57476291
  hypo

SEQ ID NO: 270856 - DNA, 76 bp, Homo sapiens; identical to SEQ ID NO: 217905
  chr17:57591255-57591331
  hypo

SEQ ID NO: 270857 - DNA, 58 bp, Homo sapiens
  chr17:57743551-57743609
  hypo
gtcctttacagacgcggttacttgagatgaaccttatgcatgcgcctcaagtatgtgt

SEQ ID NO: 270858 - DNA, 159 bp, Homo sapiens; identical to SEQ ID NO: 217906
  chr17:57787136-57787295
  hypo

SEQ ID NO: 270859 - DNA, 38 bp, Homo sapiens
  chr17:57787535-57787573
  hypo
agacagagccagactccgtctcaaaaaaaaaagaaaca

SEQ ID NO: 270860 - DNA, 40 bp, Homo sapiens
  chr17:57788142-57788182
  hypo
gagaactggccaggcgccgtggctcacgcctgtaatccca

SEQ ID NO: 270861 - DNA, 31 bp, Homo sapiens; identical to SEQ ID NO: 217907
  chr17:57832470-57832501
  hypo

SEQ ID NO: 270862 - DNA, 41 bp, Homo sapiens
  chr17:57879949-57879990
  hypo
ttcatttttttatgtcgcccaggctgtagtgcagtggcacg

SEQ ID NO: 270863 - DNA, 104 bp, Homo sapiens
  chr17:57902282-57902386
  hypo
taatcccagcactttgggaggccgaggcagatggattggttgaattctcaggaatttgagtccagcctggtctcgaacatggcgagacccaaagtcaggtgata

SEQ ID NO: 270864 - DNA, 39 bp, Homo sapiens
  chr17:57932454-57932493
  hypo
tgtaaatgtttgttaccagacgtaaaagagtctgttctg

SEQ ID NO: 270865 - DNA, 77 bp, Homo sapiens; identical to SEQ ID NO: 217908
  chr17:57937325-57937402
  hypo

SEQ ID NO: 270866 - DNA, 42 bp, Homo sapiens
  chr17:57938218-57938260
  hypo
attacaggtgtgagccaccacgcccagcctgaactttcaaaa

SEQ ID NO: 270867 - DNA, 61 bp, Homo sapiens
  chr17:57948191-57948252
  hypo
gtccattcagtgcccggagcaactaactcagcaaataatcactgagcgtttaccgttccag

SEQ ID NO: 270868 - DNA, 103 bp, Homo sapiens
  chr17:58471329-58471432
  hypo
ccaccgcgccccaccaatatttcgtgtttttctactcacctttcctggcaaaccagatcagcagcgtggcattagtcacagcgctgccctttccagttcactg

SEQ ID NO: 270869 - DNA, 104 bp, Homo sapiens
  chr17:58497635-58497739
  hypo
tgagccaccgcacccggcagaattatgttgttttaaaacttagcattatataatgtttttaatgatgttatttaatccttatgagtagatttttaaaaaagact

SEQ ID NO: 270870 - DNA, 59 bp, Homo sapiens; identical to SEQ ID NO: 217909
  chr17:58512811-58512870
  hypo

SEQ ID NO: 270871 - DNA, 33 bp, Homo sapiens
  chr17:58559518-58559551
  hypo
ggtgtgagccaccgcgtccggccgggttactac

SEQ ID NO: 270872 - DNA, 36 bp, Homo sapiens; identical to SEQ ID NO: 217910
  chr17:58590466-58590502
  hypo

SEQ ID NO: 270873 - DNA, 44 bp, Homo sapiens
  chr17:58628050-58628094
  hypo
tattaatatctttaatttttcgtattattaaattttttcgaccg

SEQ ID NO: 270874 - DNA, 77 bp, Homo sapiens; identical to SEQ ID NO: 217912
  chr17:58690758-58690835
  hypo

SEQ ID NO: 270875 - DNA, 141 bp, Homo sapiens
  chr17:59161859-59162000
  hypo
tgccagggtcatcccgtccagtctctgatcgaaggggagtttccacagtgattgatgctgcctcaggtagaaaaccacctctgaaatatttattgggcagtcctgtgcatttttaactaattttctcgcacaatgtagagg

SEQ ID NO: 270876 - DNA, 258 bp, Homo sapiens; identical to SEQ ID NO: 217919
  chr17:59239010-59239268
  hypo

SEQ ID NO: 270877 - DNA, 159 bp, Homo sapiens
  chr17:59278997-59279156
  hypo
gagggtaccatgacccccttcgtgaagtacgttccacgttcaatctgaaaaatccatgggcttttaaaaaagccttttctgtactttccagtgagggagaaaggtaagggaaaggaaactaactttttttttttttttttgagacagggtctcgctctg

SEQ ID NO: 270878 - DNA, 41 bp, Homo sapiens; identical to SEQ ID NO: 217920
  chr17:59395455-59395496
  hypo

SEQ ID NO: 270879 - DNA, 123 bp, Homo sapiens
  chr17:59415328-59415451
  hypo
ttctgacttaggaactgcagcgtcccttctgtgttgtgagcaactcaaagttaggtcgaatgtcacgcttaatgttgtatctcagtgactaaccctgggcccggcttatgttatgttaggtgc

SEQ ID NO: 270880 - DNA, 361 bp, Homo sapiens
  chr17:59430810-59431171
  hypo
cacactttgaacagcgaaggtattgagtgcaaaatggggttctccagtctaagttctgccccgcacttcacttccctgccctgatttcctcaaccgtgaaacggggaatagtaatcgttgccttgtcttcctctctaggggtgttgtgaggattcatggagcaaatggctgtgaaagcaccttgtaaagggtagagcagtgtgcggcgtgagggattattatcattgttaagacgtctacgcctcgttgctcaccctgtgtgatcctgcagcttctcaacttttccctcctttctccctggtttccacgcctgggctgctgagtcaggcggaccggccaaggctggcgagggctgaacaga

SEQ ID NO: 270881 - DNA, 44 bp, Homo sapiens
  chr17:59431396-59431440
  hypo
tcaccaggccaccccgctggttctacttccgcacccacctctgg

SEQ ID NO: 270882 - DNA, 162 bp, Homo sapiens; identical to SEQ ID NO: 217921
  chr17:59434280-59434442
  hypo

SEQ ID NO: 270883 - DNA, 70 bp, Homo sapiens
  chr17:59445737-59445807
  hypo
gagggcttcgggctgcggcacatgtcctccatggagcacacggaggagggcctccgggagcgacttgccg

SEQ ID NO: 270884 - DNA, 599 bp, Homo sapiens
  chr17:59520971-59521570
  hypo
aggcctggtggccacgtgggcgcgagcttgggcctcggccccaccctcacccgcttccccctcgttgattgggccccttccccttccggaatccaagatggtggggggggggcgggcttccagggcaatcggagcttcaattggtggaatgcaggccctttgagctgaaggacagcctcagtagccactcagggagctcatgctggtgatggtggtgggcgctcagccaccttacctcacacttaagcagccgaggtgacctcaggaatcggtctcccgcaggctggcgagagccacagtgagaacgaggaaactccagacggcctccgggcaggccccttaccagcctggggcgtcttcctcgataatggaactgagaatcagtccctacctgcccggcaagaagacgggaaaaacctccaactaccttggaggaaatcaataggattacgaggttaatgccagagcaggctgagtgacagttaccaaataaatgatcttgggaggacatggctgaggttaaacgaggcccaataaataaaggagcgtgttcaaaggagaaacttcagaaaatgcaaggacgccggaggcgggggtgg

SEQ ID NO: 270885 - DNA, 36 bp, Homo sapiens
  chr17:60006119-60006155
  hypo
tttaaaaataaagtcagagccgggcgtggtgtctca

SEQ ID NO: 270886 - DNA, 180 bp, Homo sapiens; identical to SEQ ID NO: 217922
  chr17:60014065-60014245
  hypo

SEQ ID NO: 270887 - DNA, 32 bp, Homo sapiens; identical to SEQ ID NO: 217923
  chr17:60084915-60084947
  hypo

SEQ ID NO: 270888 - DNA, 80 bp, Homo sapiens
  chr17:60218566-60218646
  hypo
gtgttgttccacaccgcctcacgttgtctgttggcgcgctctgctctcgcggttcgaacgatacaagagccttgcagaca

SEQ ID NO: 270889 - DNA, 39 bp, Homo sapiens
  chr17:60517095-60517134
  hypo
aagtatgtgctgtctctctccttacgaatgttttttttt

SEQ ID NO: 270890 - DNA, 167 bp, Homo sapiens; identical to SEQ ID NO: 217924
  chr17:60525979-60526146
  hypo

SEQ ID NO: 270891 - DNA, 38 bp, Homo sapiens; identical to SEQ ID NO: 217925
  chr17:60564359-60564397
  hypo

SEQ ID NO: 270892 - DNA, 87 bp, Homo sapiens; identical to SEQ ID NO: 217926
  chr17:60564888-60564975
  hypo

SEQ ID NO: 270893 - DNA, 36 bp, Homo sapiens; identical to SEQ ID NO: 217927
  chr17:60565575-60565611
  hypo

SEQ ID NO: 270894 - DNA, 35 bp, Homo sapiens
  chr17:60669601-60669636
  hypo
gagccactgcgcccggccagaactacattcttaaa

SEQ ID NO: 270895 - DNA, 44 bp, Homo sapiens
  chr17:60691187-60691231
  hypo
aagaaatagatatttcaggccgggcctggtggttcacgcctgta

SEQ ID NO: 270896 - DNA, 259 bp, Homo sapiens
  chr17:60744592-60744851
  hypo
ccgtggtctggggcggagctggagctgagcaccaggcttcccgaactggctcaggcttccgagggagcagagggaggtaggaggttctgagcagggccccgggagccacggtgtgagcttctctctccgggggtgctggcgccctgccctccccacagaccagccggacaaccccagtgaggagaactgtggagtgatccgcactgagtcctcgggcggctggcagaaccgtgactgcagcatcgcgctgccctatgtg

SEQ ID NO: 270897 - DNA, 318 bp, Homo sapiens
  chr17:60747507-60747825
  hypo
catatctctctgcacgaggcatattctaggcaggttctgctttcccggtctcatcacttaagtcctgtcatttcgaaggcaggcgccccgtcgtgtccccaaagcatccacatttcccaagctcccttccggtccttgaggcccctcgggtctcagcagccactaaaatccgcttgtctggggcggcagcctcaggtcttagctcattggctaacaagagatgattgacaggtcctgagccagagagcgagcccaccgggctctcagtccgcccagctttgccgggtctccaggagcaggtgtggctggaccactgga

SEQ ID NO: 270898 - DNA, 149 bp, Homo sapiens
  chr17:60747905-60748054
  hypo
gggtggtttggtgaagtcctgttttctcttgccaagaccaagtaagggcttgtttgcctcagctgccctcggatcccaacccctagaaggtgaacctgaaaggcatggaaatcggggcaagggagggcctgggacgggtggatttctca

SEQ ID NO: 270899 - DNA, 119 bp, Homo sapiens
  chr17:60748865-60748984
  hypo
cctgtggtggggaccgggattgatctgggagagtttggagaggaggtgactgggaggcctcgcctgtgttgacgtcaacccagtgggttggttcccagactgggcggctcagtccctga

SEQ ID NO: 270900 - DNA, 41 bp, Homo sapiens
  chr17:60750844-60750885
  hypo
aataatgtaaaaggacgcctttccttttttttttttttttt

SEQ ID NO: 270901 - DNA, 150 bp, Homo sapiens; identical to SEQ ID NO: 217928
  chr17:60753744-60753894
  hypo

SEQ ID NO: 270902 - DNA, 270 bp, Homo sapiens
  chr17:60754617-60754887
  hypo
cctctccttcagggtacagccgtgggggctgcgtggcgctggccactggcagcgccatggggctgtgggaggtgaagaactgtacctcgttccgggcccgctacatctgccggcagagcctgggcactccagtgacgccggagctgccggggccagatcccacgcccagcctcactggctcctgtccccagggctgggcctcggacaccaaactccggtattgctataaggtagggcagcctgttggccgggtagggggcagggggagga

SEQ ID NO: 270903 - DNA, 74 bp, Homo sapiens
  chr17:60755990-60756064
  hypo
ctcaacaagatcttcgggtactgagccgggctgaggcgtgttaggagggcacccgcacacgtgtaggagcaggc

SEQ ID NO: 270904 - DNA, 252 bp, Homo sapiens
  chr17:60757611-60757863
  hypo
cagtgggtggccatgcagtgcgacacacagctggactggatctgcaagatccccagaggttggccggagtggcgctgggggacgcgggatggagcgaagggtggcggggccaggaattccagggagggtctcctttcctcacaacgtctttgtccttgttcccctaggtacggacgtgcgggagcccgacgacagccctcaaggtgagcaccccccagcccatcccgctacccatcgcgtgggagagggcgt

SEQ ID NO: 270905 - DNA, 49 bp, Homo sapiens; identical to SEQ ID NO: 217930
  chr17:60758441-60758490
  hypo

SEQ ID NO: 270906 - DNA, 103 bp, Homo sapiens
  chr17:60759235-60759338
  hypo
caccaggcaaacctcggcctgtcggcaaggacaagaagtgcgtgtacatgacagccagccgaggtgagggcaaggtgggggcagagtgcgcagtcagctgtgc

SEQ ID NO: 270907 - DNA, 217 bp, Homo sapiens; identical to SEQ ID NO: 217931
  chr17:60766571-60766788
  hypo

SEQ ID NO: 270908 - DNA, 180 bp, Homo sapiens
  chr17:60766818-60766998
  hypo
cttgtgcctgggaacggggtgagggaagcagagcccagcctgaaccctgaccccttccctgtagacccctccctgagcccgtccccagcagcgctgccccccgccccgggcactgagctctcctacctcaacggcaccttccggctgcttcagaagccgctgcgctggcacgatgccctc

SEQ ID NO: 270909 - DNA, 308 bp, Homo sapiens
  chr17:60767028-60767336
  hypo
gcctacgtgcccgacccctacacccaggccttcctcacgcaggctgcccgagggctgcgcacgccgctctggattgggctggctggcgaggaggtgggctcccgacacttttgccctgggccccagccttgcccgggttcccctccctgccccttcctgcccccgccttatccgcaccctatcctgactattcccttcctcccaccccatggccccccatgcccagggctctcggcggtactcctgggtctcagaggagccgctgaactacgtgggctggcaggacggggagccgcagcagccggggg

SEQ ID NO: 270910 - DNA, 165 bp, Homo sapiens
  chr17:60793413-60793578
  hypo
tcctctctttccttccgctgttaaacatctcttcttcagaaaggccttctctggttcagagagcaagtcggagtcccacagctgttcccgcagcggcctgcatggtccttgttttgacctccacctgcaggaattgctggcttcagtcttcgctgctggtcggta

SEQ ID NO: 270911 - DNA, 221 bp, Homo sapiens
  chr17:60858152-60858373
  hypo
ttggaaagatgagaagggcccgtgatgtgttgctttctagaagcttgcggcttaccatgtcctgcgccaattaatcattttcatcatcttctatggggaaatcggggctcctgtcccctctctgtgaaggttcgtggggacaaaattccttccgtgcctctgtcaatcacagcaagctcctctgggccagcagcggtctcgccggtgcctgggaaggaggg

SEQ ID NO: 270912 - DNA, 34 bp, Homo sapiens; identical to SEQ ID NO: 217936
  chr17:61000668-61000702
  hypo

SEQ ID NO: 270913 - DNA, 104 bp, Homo sapiens
  chr17:61050279-61050383
  hypo
agcccaatgtcttccgagtgaagaaggttttgcttactcctccaggtgggcttgggcatgatgttctctatctattctccccttgcacttggtgtatatagtag

SEQ ID NO: 270914 - DNA, 120 bp, Homo sapiens
  chr17:61382595-61382715
  hypo
tgggttacacagttccgtggaaaaaacatgttttcccaggctgggtagcgtactcactcactgcctaccttggctgggggtgactcctctgccccgtgtggctctcaggtgggccgcctt

SEQ ID NO: 270915 - DNA, 184 bp, Homo sapiens
  chr17:61498925-61499109
  hypo
ccaccagcagaatcggacctgggcagtgtcatctgtggacaccgtcctcagtcccacgtctccaggcaacctgcctcagcctgagtccttcagtccaccatcatccatcagcaacattgccttttataacaaaaccaacaatgcacagaatggccatttgctggaggacgattattacagcccc

SEQ ID NO: 270916 - DNA, 393 bp, Homo sapiens
  chr17:61514950-61515343
  hypo
agcgcacagcaccccgagatgcgcacagcccccgcggatgcacacagccccccaagatgcgcacaggccccccgagatgtacacacccctcaagatgcgcacagccgcccccggagataagcacggtccccccagatatgcacagccccccccgaaatgcgcacagccgcccctgctagatgcgcgcaacaccccccccgggttgcgcacagccccctccagatgcgcacagccaccccgctagatgggcacagcccccccgagatgcacacagcacccccagatgcgagcagcccccctgagatgcgcatgtcccccccacggatgcgcacagcccctagagactgcgcctgagatgcggcgcggctcctcccacggcggccccgccaccct

SEQ ID NO: 270917 - DNA, 75 bp, Homo sapiens
  chr17:61521531-61521606
  hypo
acgcgctttcaccactgcgccgggccaattgttattattttttttatggaagacggggcccgtgaaggccagagg

SEQ ID NO: 270918 - DNA, 210 bp, Homo sapiens
  chr17:61527570-61527780
  hypo
gagggtcagggaaggcgtattgggtcatgacagaattatcgagccagaagatgctcaggtgttaacccggcagagatagtcagggaggaggcaggagtgtccctggttagaggagcaaggatgatgcaagggaaggctgtagggggctaacctgcaaccctcggggctcccaggcttattttcatgaggatttgccggagccagagtaat

SEQ ID NO: 270919 - DNA, 114 bp, Homo sapiens
  chr17:61601564-61601678
  hypo
ttctgcgaactcttcggctactcccgagtggaggtgatgcagcaaccctgcacctgcgacttcctcacaggccccaacacaccaagcagcgccgtgtcccgcctagcgcaggcc

SEQ ID NO: 270920 - DNA, 405 bp, Homo sapiens
  chr17:61607516-61607921
  hypo
ttcattctcaacttcgaggacctggcccagctcctggccaagtgcagcagccgcagcttgtcccagcgcctgttgtcccagagcttcctgggctccggtgaggcagagtgagggtggtggtgggagggacgcatgagggtcccctggccgtggctgctctgactcctggccctggtttcagagggctctcatggcaggccaggcggaccagggccaggcacaggcaggggcaagtacaggaccatcagccagatcccacagttcacgctcaacttcgtggagttcaacttggagaagcaccgctccagctccaccacggagattgagatcatcgcgccccataaggtggtggagcggacacagaacgtcactgagaaggtcacccaggtgcgggcctgcagagca

SEQ ID NO: 270921 - DNA, 89 bp, Homo sapiens
  chr17:61611415-61611504
  hypo
tcagcgatcaggacgaatcacggcgtggggcctgcagctatacctgcagtcccctcactgtggtggatctcatcgtggacatcatgttc

SEQ ID NO: 270922 - DNA, 103 bp, Homo sapiens; identical to SEQ ID NO: 217940
  chr17:61637142-61637245
  hypo

SEQ ID NO: 270923 - DNA, 42 bp, Homo sapiens
  chr17:61677497-61677539
  hypo
gggattacaggcgtgagccaccgcgcccggctgtcctgcttc

SEQ ID NO: 270924 - DNA, 147 bp, Homo sapiens; identical to SEQ ID NO: 217941
  chr17:61817226-61817373
  hypo

SEQ ID NO: 270925 - DNA, 92 bp, Homo sapiens; identical to SEQ ID NO: 217942
  chr17:61864835-61864927
  hypo

SEQ ID NO: 270926 - DNA, 41 bp, Homo sapiens
  chr17:61892318-61892359
  hypo
attcataggcgtgagccaccgccctgcattcttaagagaat

SEQ ID NO: 270927 - DNA, 78 bp, Homo sapiens
  chr17:61925862-61925940
  hypo
ataagaagtgggctttgggccgggcgcagtggctcatgcctgtaatcccaagacggatcacctgaggtcaggagtttg

SEQ ID NO: 270928 - DNA, 148 bp, Homo sapiens; identical to SEQ ID NO: 217944
  chr17:62010938-62011086
  hypo

SEQ ID NO: 270929 - DNA, 231 bp, Homo sapiens
  chr17:62022680-62022911
  hypo
ccatccaggttcccggcaggggtggtgggtcacactcaccacctgcaggagggagaggtagcccagacccacgttgtcgtagttgaccttgacattgagccagcggacctggcctgtgtgcatgaggctctcgcactcagacttgttgttgacctcggagatgtcgaacctctcagaggtggtggtgttgatgcagtagtagaacttgccggcaaacaggttgacacccat

SEQ ID NO: 270930 - DNA, 344 bp, Homo sapiens
  chr17:62050024-62050368
  hypo
ctccaagtcacttcgtggcttccgttcgggctcctcaatctccatctgcttattccgctgcagccgggcctcctcctccaccgcccgctgttctatggctgccagtgactcccgggtgaaggggcgcaagcactcagggcccagaggcaccagggtgcacagagatggtctggccatcctcgcatcctgggctcagagaccagaagggtggtgggtggcctggggagctgcagtgcgcagccccggggtgctgggcggccgcccctccctgggcgggccgtccactcctcacctcctgcttgcccagtggccgagccggggaggtgggcgtgcagactctatca

SEQ ID NO: 270931 - DNA, 193 bp, Homo sapiens
  chr17:62067099-62067292
  hypo
gctcatctcatactcgaatctccacacttattcccagaagcactcctgaggtacgcgctggcttacactcacacagtcgctggctcactctcacagtcactcgagtgcacactcacggacgcacccacacaaaagctgtgctcccacaggctcagtcatgtgcaaatcacccttcatacgttcacgcagatgc

SEQ ID NO: 270932 - DNA, 115 bp, Homo sapiens
  chr17:62131680-62131795
  hypo
agcggatcacgttcgggtgctcatccgattctcgcaacagctggacctcacggtctgcgaagctaaaacactcggggaggatcctcttcacggccacgtcgcggttgtcaaacat

SEQ ID NO: 270933 - DNA, 37 bp, Homo sapiens; identical to SEQ ID NO: 217945
  chr17:62209843-62209880
  hypo

SEQ ID NO: 270934 - DNA, 165 bp, Homo sapiens
  chr17:62236399-62236564
  hypo
agcacagctttccagaaacacgtccaccctctgatcggccagagtttatgaacttgaaactgggctacgagggctgcatgaatagcagtgaatgtggacgcatacgtggcaagcacctcagggaccggcctggttgccacccccggtgcccaagaccccctttgc

SEQ ID NO: 270935 - DNA, 40 bp, Homo sapiens
  chr17:62659472-62659512
  hypo
ctattcttgacaaataatcgtacagaagatgttctttgct

SEQ ID NO: 270936 - DNA, 34 bp, Homo sapiens
  chr17:62659957-62659991
  hypo
taaaaataccacagataggccgggcacagtggct

SEQ ID NO: 270937 - DNA, 66 bp, Homo sapiens
  chr17:62773360-62773426
  hypo
tggctgtcagcagctggcagctgccccagcaaaatccagttcccctttccctagtctcaaaacctg

SEQ ID NO: 270938 - DNA, 575 bp, Homo sapiens
  chr17:62782499-62783074
  hypo
ctggccatgactgcccagggcgtgggctgccctgaacaactgcaccgccccttggcacggcacaaagcagatgttcaatacattcctgcccatagagcgaagcctgctgccctgcgtgcttgggccaggctgtgggtgtggcgaagggtagggctgggaggcagctggctgggtgtcccgcatacctgattgtggtgtcaaactcagaggggaagatgatgtcgtggtgctggcagatctggcagatgaagctgcgctgggtgcacaggtcgcagtggtagacatgctgggaggcaaattcaatcagggccttgaggaatccttcatatacctcatctgcgatctgcggagggtaagtaggaatccttcatacaccccgtctgcgatctgcggagggctggtaaactgaggccccaggcctttcaagcagctgcactgagtcgccatggcaccctgcctagagaacttctacccccagtttccatgcgggcaagaaaagaaaacctccctgaatcaggctgagtagtggcagcatccagcccgtgggtactgaggtcactcggggcttatgggat

SEQ ID NO: 270939 - DNA, 284 bp, Homo sapiens
  chr17:62783322-62783606
  hypo
agtctttctagagttctgggcggggtaggcatgacactctcacctgccggaggtcagcaacacggaacctatgcggagactccaagagataattccggtggttgagccttcaaacaaaacacaagcgattctttagaaaagtttcgaagacccaggccagcccgtgttgtttattttcattcccctggcgctgctcaccaggcagacacctcccgcctgggcggggcagggcctaggagcacaattcagcctgcttgggacccggtcttcaaggtaactaacta

SEQ ID NO: 270940 - DNA, 37 bp, Homo sapiens
  chr17:62831163-62831200
  hypo
aaaactgcaatcagccgggcacggcagctcacgcctg

SEQ ID NO: 270941 - DNA, 320 bp, Homo sapiens
  chr17:62935835-62936155
  hypo
aacaaacaaaacaaaacaaaacaaatagtagatctggtcaagcccctcagagctgttacataaaccaactactgagggtaaagacctttggaaggaccatttaaaacacctggggcttcatcgggctggatttgctcggagctacaggtggaatcaagagttctctataatcatcacttgcacagcgtagttttcagggaaatattttcctatttgacaggtgaaacagtatttttcacctgcctgtaggcagttttgagacaatatagtacttttccagaagtgcttccctgaatgactgcgcacgattatgatgacat

SEQ ID NO: 270942 - DNA, 86 bp, Homo sapiens
  chr17:63056651-63056737
  hypo
aacctaaaataaaagttaaaaaaacccacaacaacaaaaaaggaatagccaaaaggtgtccaaatgtccatcgatgaacgaatgga

SEQ ID NO: 270943 - DNA, 99 bp, Homo sapiens
  chr17:63069466-63069565
  hypo
cttgggactcagacaggctgcgggcactcagcgactgacccatggactgcgctttctgttatgtaaaacaagcccaacgctgcattgttcagacatatg

SEQ ID NO: 270944 - DNA, 242 bp, Homo sapiens
  chr17:63152519-63152761
  hypo
gatttgggcgaggtcgcccatcctgccatggcttccttgttcctcctgcacaggtgaattccagctgctgtagaaacaacacagggagaagccctggtcctgcaacaacagcaccgataaaaaaaaattatttaacttcttggacggcaggcgtcccagggcttcctcgggacaaaggtggctgatgcgggaggctgagcagcctgccaggctgtcaacgtagaccgcgtggtacagatgct

SEQ ID NO: 270945 - DNA, 31 bp, Homo sapiens
  chr17:63459276-63459307
  hypo
ccaccgcgccgggcactactagctcttctta

SEQ ID NO: 270946 - DNA, 85 bp, Homo sapiens
  chr17:63497915-63498000
  hypo
acttttatatgatttactcacgttcactcttaggaatgtctcttaagaaaataactagaagtggctgggcgcggtggctcactcc

SEQ ID NO: 270947 - DNA, 350 bp, Homo sapiens; identical to SEQ ID NO: 217948
  chr17:63534022-63534372
  hypo

SEQ ID NO: 270948 - DNA, 744 bp, Homo sapiens
  chr17:64671926-64672670
  hypo
ataatagcccctagcgatgccagttctggttcctccgcggggtcccacgccagctgacccagcagtacctgtaacgtgtcccacccttgccagggtttgtgtgcctgcatggttttagaggttccaagtcagagcccctaaaccccttgccttattgctagacagcttgaccgcccccggaacatcacgtgggaagggcgctcggtaaatcctgttctggaggcaatctgtcactccaccagtttcccaatcaacatttgccgaggagttctggctcccggtgcagaactgacttgtggcgacgtgagggaactggcagcttcttagacccaagttctccctcgcagcatcgtcagaagaggcccaaagtagagacgcaaacaaaccctgagaacagcgtgttcttcccagtaacgtgaccgggaaaatgtgagccagaggaaacttgagagctccgtggtgcggctgagctggtggggtgagggttttttccctttttctatctggtccagcccatcggccacttgagatgctcctgaactgagtaaccaagctgttcggagggtactttctcagcaggacaagccctgagctctggaaaaacgcagctagaataacgaggaagcagaggggcctctcccacaccaggcttgccccgacaggtcagcttgcttgtggcccagcgctactgcgcacatgttcctttaagatccctatttccgaggcagccgtggcataattaaa

SEQ ID NO: 270949 - DNA, 386 bp, Homo sapiens
  chr17:64716161-64716547
  hypo
acagacgagccgtgcgtgctcatcccagtggccgaagaaagtaacaaacaagtagagaaatacaggattggtaatgagaagagagggagggagtatgcaccacagaaaccggtgcagggacaatgtcagaaggagtagggagcctcggggctaaagcatcctttgagcagagatagaagggagtcccgtgcctatctgggtcagaggaagtgcccaactgcaaaggccctcaggcggcagcgtgcttggcgtgtcccagcagatgaagtattgagccagagaacagcggacattttatttactctaactgtgctacccaggaggctgtcatgcccattaagtagcatcattttaacctgttgccccgttaccgagtagaagataat

SEQ ID NO: 270950 - DNA, 485 bp, Homo sapiens
  chr17:64751155-64751640
  hypo
tttctagacccagtcgctccacagtcaccttcccgatttctgccaggatcagctagccttaccgaagagctaaaaagagattcatcccaaacaagagcttccttggaagcattccatgaagacttgaaacggtgctgcctcccaccacctgacccagtattgtcagtgcctcctctgaggatcgcagaaaatcgcaccccacgcccccccagtgcacattccagacttggagaagcgcggcatggggtggcggtggggagaacacctttctgccagatcaaaagcccagcactttattcagagttttatttatggctccttcagaaggttagtccagtcacgcctccttaataaccgcctcatcacacatgattcaggtgtcctggggccacttcacgctcctggcttcctggcccaaagcccaggagaccgctgaaccccactgcctggcattatttgcgggcgagacaccactggtgaagtgt

SEQ ID NO: 270951 - DNA, 73 bp, Homo sapiens; identical to SEQ ID NO: 217954
  chr17:64752172-64752245
  hypo

SEQ ID NO: 270952 - DNA, 221 bp, Homo sapiens
  chr17:64953396-64953617
  hypo
cttctccatgccttcgttaccttttggtaaaatgaggtcgataacagtatctatctcaaagtattttggaaaaaatcaaataagttaatgtatggccaagcacgtcgaatagagcatgatacacacaaagagctcagtaaccatcagctattagcatttttgtgtgaatgttttccctgggcttactgactctgcatgataaccaacgcaatgaggccagt

SEQ ID NO: 270953 - DNA, 142 bp, Homo sapiens
  chr17:65027610-65027752
  hypo
cagaaatcagaccaccgaagctcactcccttcctctccatctctccctctctccaagactctggcagtggcctatgatcctgaagacagctctgcagccaactggtgctttggcctttgcgctgtcccggggccagcttccc

SEQ ID NO: 270954 - DNA, 273 bp, Homo sapiens
  chr17:65040725-65040998
  hypo
gagacgcagccgccggaccctgcccagggcacccacgcctcggcgaccaccatgtcccagaccaaaatgctgaaggtccgcgtgaccctcttctgcatcctggcaggcatcgtgctggccatgacagccgtggtaaccgaccactgggctgtgctgagcccccacatggagcaccacaacactacctgcgaggcggcccacttcggcctctggcggatttgtaccaagcgcatccccatggacgacagcaagacctgcgggcccatcaccctg

SEQ ID NO: 270955 - DNA, 37 bp, Homo sapiens; identical to SEQ ID NO: 217955
  chr17:65109642-65109679
  hypo

SEQ ID NO: 270956 - DNA, 91 bp, Homo sapiens
  chr17:65297543-65297634
  hypo
aaagaatttcagtaaggcagtggttaaccaagactagggctgctgagagatgggaataggacacccggccactggacgtgattggatggag

SEQ ID NO: 270957 - DNA, 40 bp, Homo sapiens
  chr17:65298392-65298432
  hypo
gattagaggcgtgagtcactgtgcccgacccacctttata

SEQ ID NO: 270958 - DNA, 42 bp, Homo sapiens
  chr17:65314671-65314713
  hypo
gctatttttattattcataccgaataatccctttttatttgt

SEQ ID NO: 270959 - DNA, 41 bp, Homo sapiens; identical to SEQ ID NO: 204758
  chr17:65352419-65352460
  hypo

SEQ ID NO: 270960 - DNA, 54 bp, Homo sapiens
  chr17:65363327-65363381
  hypo
cattcataccatgctggtccctagaaaatagcttgagatcttaaaaaagcttag

SEQ ID NO: 270961 - DNA, 44 bp, Homo sapiens
  chr17:65573104-65573148
  hypo
agccaggtctcgcccggatgcagtggctcatggctgtaatccca

SEQ ID NO: 270962 - DNA, 271 bp, Homo sapiens
  chr17:65668882-65669153
  hypo
tgttattgacactccagaaacgcacctgctctcgcacgtgagtcgctaatgagtatctgaggctagcatttgcatgggttgaaggtgccagggatgcctttctctgaacacctttgtttttttaagaatctattcacagttaaggggaaaaaaatgttcgaaagcgagccatgagcacattattgaattctggtttccagccgacagctgtgttgtgcttcgtgtaatagggtacatttactgatgcctcgatgctgttcttttgatttcc

SEQ ID NO: 270963 - DNA, 37 bp, Homo sapiens; identical to SEQ ID NO: 217957
  chr17:65711559-65711596
  hypo

SEQ ID NO: 270964 - DNA, 96 bp, Homo sapiens
  chr17:65712196-65712292
  hypo
atggtgccctcatcacctctcacctggtaactacaataactgcgatagacttctagggaatctccctgttggtgccccaggcgcacttgctactga

SEQ ID NO: 270965 - DNA, 201 bp, Homo sapiens
  chr17:66384596-66384797
  hypo
aactacggctttagcggaagctctcttagccatatacaagaaggggaagggcctgctctgcctctgagctgggagacccctacctctgctccgaatgaggatcgatccttcagagatgaactggggcaattatgaggtgaccagaatggcaaaaaggacttgaaacaatcttatttgaaaaacagctaaggccggacgcag

SEQ ID NO: 270966 - DNA, 218 bp, Homo sapiens
  chr17:66416571-66416789
  hypo
taccaaattgcctgccgctgtcaagccgcataacagaccaatttttattccacgaggaggagtacctggaaattaggcaagtttgcttccaaatttcatttttaccctctttacaaacacacgctttagtttagtcttggagtttagttttggagttagccttgcatatcccttctgtatcctgtccctcctccacgccgacccgagagcagctgagc

SEQ ID NO: 270967 - DNA, 326 bp, Homo sapiens
  chr17:66420416-66420742
  hypo
aaaagctcacgctgcgaccgacccgcagagccgatgtgggaaatcacaaaacaacagccccagccctgcatgcagggccccaccgcagctttgttttctaagccaaatgtgctcactagagggttccacggatctgcgggagaaagaagccagacctgcactccatccttttacaattggaagctcaatggacacaaaacaatgatcaggagaagtttccataacaaagcctaatggacattgtttcagtgcccaagtggcagctcctctctggctctaggagctgatgctccaagtcttggcccaaacactacttccggccgggt

SEQ ID NO: 270968 - DNA, 32 bp, Homo sapiens; identical to SEQ ID NO: 217961
  chr17:66421685-66421717
  hypo

SEQ ID NO: 270969 - DNA, 107 bp, Homo sapiens
  chr17:66426284-66426391
  hypo
aaggctcttctggtcgactagggagtaatgcacaggcaacgatgggactgggctgcaggccccacacgcacccaggaatctccacacccaagcgtcattagccacac

SEQ ID NO: 270970 - DNA, 40 bp, Homo sapiens
  chr17:66430634-66430674
  hypo
gccagcggtccctgcgggacttctgcggggactttaaaat

SEQ ID NO: 270971 - DNA, 450 bp, Homo sapiens
  chr17:66440110-66440560
  hypo
aatagtgttaaatcccgagaattcagtaaggtttaatatcctagcatatcgtcgaagtagagagatttctttgtcatgtaataaaacatattctttatggttcagattgtctttttgctggccatgcagacacgccaagttgaaacctgcttctaattatcacgcctactctgtactgaacgaaccacaaaaaacaattaggggtaaacacttttcaacagcagatgcttgaaatcttttacatgtctaccttacgtgccttgacacatttgctgatatgggtcccagacaaagggtgttgttattcttggactgcaatgaagggcacacagcccccctgcaggacacacagcctgacataatttgaatctgccgccattaagacaaagcttcgagataaacctcactaagactcaaaaagcaaacactgcttcacgttcgcaatttgga

SEQ ID NO: 270972 - DNA, 230 bp, Homo sapiens
  chr17:66446928-66447158
  hypo
gcctttcttgaagtgatacacgttcatctgccgtggttttgtgtgactgactaccaccaccaggctgctggagaagaggcgctccacgatgtagacgtccgggatttcatctgggaggaaaagcagccgggaggttacatggattgatcacttccaagaaggattccagcctccatgacactgggcccggcgcaggccaggttccaaaggttctccgggtcttgccggcc

SEQ ID NO: 270973 - DNA, 32 bp, Homo sapiens
  chr17:66461887-66461919
  hypo
gcatgagccatcgcgcccggcctgtctcagct

SEQ ID NO: 270974 - DNA, 308 bp, Homo sapiens; identical to SEQ ID NO: 217965
  chr17:66538786-66539094
  hypo

SEQ ID NO: 270975 - DNA, 507 bp, Homo sapiens
  chr17:66539462-66539969
  hypo
aggagtgggtgcattctcctcgctctcagatcaggaaactagagcaactgccccaagcagcatggcgggaagcgtgttctttgtaaattgttcttttcgttacattcgttaaaaggccttgtgtttttcaatctggggggttgcatgggacattttgagttcaaagacaccacgatgaggcacgaagaagatagaaagccagaaggaagaaatgccagggagttcccaccttgagggtctgtctagccacccctcccagaggattggtccttataggcaatgccatctccatggggccagaccctacctgtccagatggaaagctgcgatctcagcattgtgtctctgaaagtcaatgaagtagaagaagtccactggtgtctcctcatctcgctgctgtctggaaggaaggaaggaatcacgccctggactcagacttcagctgggagcctgagaagagagctgatgagcatgaccagcgagaaaggaaaacgggcttttatgctt

SEQ ID NO: 270976 - DNA, 79 bp, Homo sapiens; identical to SEQ ID NO: 217968
  chr17:66913061-66913140
  hypo

SEQ ID NO: 270977 - DNA, 127 bp, Homo sapiens
  chr17:67081066-67081193
  hypo
ggagatagcatattgactctcggttctttattagtgaattcatcatcagtgctacagtctccctgcattctgacacaaaggaatcgcaggtcccgtctgtaccttgcgatggcgagcctcgcgtccg

SEQ ID NO: 270978 - DNA, 209 bp, Homo sapiens
  chr17:67468376-67468585
  hypo
tccctgttacaaggccgcacatgtacccccgaatctaaaaaaaaagtttaacattaacaataataaattacaaataaatatgcatcgttataagcaagatttgtagtgcagtaggtccttgaataatgccatttcattcaacattgttttattatagtgttgatgagaaaacaaaatcggttcccaaccagggccgctgtcagtgtgga

SEQ ID NO: 270979 - DNA, 31 bp, Homo sapiens
  chr17:68197136-68197167
  hypo
gagccaccgcgcccagcctagtcaaataact

SEQ ID NO: 270980 - DNA, 174 bp, Homo sapiens; identical to SEQ ID NO: 217970
  chr17:70220136-70220310
  hypo

SEQ ID NO: 270981 - DNA, 93 bp, Homo sapiens; identical to SEQ ID NO: 217972
  chr17:70380740-70380833
  hypo

SEQ ID NO: 270982 - DNA, 148 bp, Homo sapiens
  chr17:70409455-70409603
  hypo
caacccaaggtgcacgcacctgagggcccacgattctttgcacagggtgacgcctgctccctttgatgcttgccggatgtgttcccaatgggcaaaaaccagacctcaataaaacccggcattatcaagaggccggtggtttgtgatt

SEQ ID NO: 270983 - DNA, 342 bp, Homo sapiens
  chr17:70441816-70442158
  hypo
gcagaggtgggtggcgatggggccggcggacacacggcctcgtgcttttcatgcgatgacacacctgactggccaggcacacctggacgtcggggcaggccaagctttccaacagtcactcactgttccttgagtggagaggcctggcagccacgctcctcacagacaggggggtttttctccttcttggtaggccacgcctcccccgggcacatactgcctctgtccgagggtttcgtccaagccctgggctctgaccacaaaaagcgcccttttctttggcgggctcacctcagacgtgaggtaccagagagccaaaccgtctgctaaaaggacatcccc

SEQ ID NO: 270984 - DNA, 64 bp, Homo sapiens
  chr17:70507522-70507586
  hypo
actgcaaagagaaacgaaagccttgaaaaccaaagcactgttatttccgcgtgtatcttccagg

SEQ ID NO: 270985 - DNA, 582 bp, Homo sapiens
  chr17:70657362-70657944
  hypo
gttctctgaccatggcgccccctggagttgtgcagtgggacactcctgcttgagcgcagattgctgctcagcctggggtgtagttctggggttcgaggtgcacgctctcaggagaggtagtggagagagtcatgggtttctctgagaattggcaagcgaagggacggcaacctgcagccttgctctccaggctatattccctggccggttgattatgaaaggagaatggcatatccctgacaagccctgcttcaccccggctttcagatcctcccatgtgcgatgagcgtgtgtgttcttgtgtggcaggcccttacatactgttttgattgttatcatcttgccgtgaaaggcctgattgttcaggcctggagatgacatcaccggcttcccactagggcagcctgtcgaggtgtttgatgagcctgcaggtgggaaggggctgggtactccccgcagggctgcccggccctacctgctcagaggagctggcttagcacgcaagggatcttcccccaccctcttggtgcagttctcggaaacttcttggtgcaggctggcgagatgagatgacccatccat

SEQ ID NO: 270986 - DNA, 85 bp, Homo sapiens
  chr17:70705003-70705088
  hypo
ctcacaactcataacgcatgaactttgcctttggctctgttttctgagaaacctaggcaaagccttttttcttttcttttttttt

SEQ ID NO: 270987 - DNA, 720 bp, Homo sapiens
  chr17:70712101-70712821
  hypo
ttgggattacagacgtgagccaccgtgcccggccaaaatgtaccatcttgatcaatttttaagtgcacagacaggtcatggtaagtgtgaaaaaatacctaactcccgccctcgttctcctcgcaccctccctgacccaccccaaaaaggcccaagggagcccccctgcattcccaacctgcaggcatgaggtcatacaagcggggtgttgggcagaggcccctggcagatggcagggtagggcccccagcactccattctggacagaatgaaaacctgacgacctatctgatggaattacacggaagaaaggaaattcgtcttttaagaacaagcgggaggcggatgactgaagtcccaaagaatgctgtggttgaacctttttttttttgttgtttgttttctggcacagtctgtctctatgactgagctgagtaacgtgtttcccgtgacaaaggcccctttcttacgacagtttaatagctccaatacgggggacagccctgactctcccatgggccagcgtctgaaggcggccacagaaaaagggagggaaagccgccgctcttctccaagttggtccagactgaactgagagagtataaggaaaaaaaaaatcggaaactttaacccactcctgaaataaaaaatagaagttaccaaagggatggggaacacacatgcagaggcacagagaagaatatggatgaaaaagtggcc

SEQ ID NO: 270988 - DNA, 352 bp, Homo sapiens
  chr17:70713693-70714045
  hypo
tccctgtgtggccacggggcactgtcctctccgcatgtgtcatccctccttgttttataagggtacccagtcatgttggacttaggcccaccctaatccagtacgagctgatcttaactaattacatctgcaaagatcctaccgccaaataaggttacagtcacaggtcctggggattaagacttccatacctttctggggtgcatgacttcagcatcgctccttattctggaacttacaggacaggtcactcttgctctgtagctctccctcggagtgaccctgcacatcggctgtctaggaggtgaggctggagaagtgagtcatgaccgcaaggccaccagatcacctc

SEQ ID NO: 270989 - DNA, 33 bp, Homo sapiens
  chr17:70785406-70785439
  hypo
cgtgatccgcccgcctaggcctcccaaaggctt

SEQ ID NO: 270990 - DNA, 120 bp, Homo sapiens
  chr17:70948870-70948990
  hypo
tccttatagccctgcaaggtcggcaaagtgcgagcgtgatccttcttagggcaaacacgtgaccaacgcaagctgttcttgactttccacagcagccccgacagtctgctctgctgccca

SEQ ID NO: 270991 - DNA, 34 bp, Homo sapiens
  chr17:71026284-71026318
  hypo
tctgacaggaggcggagctcagaagataaagctc

SEQ ID NO: 270992 - DNA, 46 bp, Homo sapiens
  chr17:71126821-71126867
  hypo
gaacaaataccacacgacgcaccgcttatatcgaggcatccaaagc

SEQ ID NO: 270993 - DNA, 42 bp, Homo sapiens
  chr17:71190856-71190898
  hypo
cctcccaaagtgatgggattacaggcgcgagagccaccgcgc

SEQ ID NO: 270994 - DNA, 252 bp, Homo sapiens
  chr17:71201620-71201872
  hypo
tgaagctgtttattacgctcacataccaagtcctctctcttcatgggtggggactgggaattcatttgcagaaagaaggtgcatttccagtcacccagaaccgggcgctgcagctgctttatgatctgcgttacctcaacattgttctgacagccaagggtgacgaggtgaagagtggccggagcaagccagactccaggtgtcgtatcctctagggagctatgtcaaggcggtctcttccaaaagcaaata

SEQ ID NO: 270995 - DNA, 210 bp, Homo sapiens
  chr17:71202331-71202541
  hypo
tccatttgacctggacgttttcacgccacacctcaacagcaaccttcatcgcctggtgcagcgaacttctgtgagtcaaatcaaaaacatgcttagtgcgaacgaagcgatacaggctcaaataacaaaattaacctgctcaagcacgtaatactccaggatgcagcatagggaggggaataagacacaaatagccgagtgtagttataa

SEQ ID NO: 270996 - DNA, 149 bp, Homo sapiens; identical to SEQ ID NO: 217977
  chr17:71202870-71203019
  hypo

SEQ ID NO: 270997 - DNA, 209 bp, Homo sapiens; identical to SEQ ID NO: 217978
  chr17:71269220-71269429
  hypo

SEQ ID NO: 270998 - DNA, 87 bp, Homo sapiens; identical to SEQ ID NO: 217979
  chr17:71272524-71272611
  hypo

SEQ ID NO: 270999 - DNA, 86 bp, Homo sapiens
  chr17:71276454-71276540
  hypo
ggcccgtatcacagcggtgcagagcggcgtgtgcccagtaaacgggcgcacagccctatccacatgggggacgtggagggagatgc

SEQ ID NO: 271000 - DNA, 166 bp, Homo sapiens; identical to SEQ ID NO: 217980
  chr17:71280549-71280715
  hypo

SEQ ID NO: 271001 - DNA, 527 bp, Homo sapiens
  chr17:71281745-71282272
  hypo
gctgcgggctgagccggggctgggggccgctgctgcccacccctcatcctccagagcatgggaggggagggagggcaagtctgggccagccttgccttcctgccttgccaggggaggggccgccacggcgtacgggggagcctgggtgatggtgccagcggcgccctcatcgccatggtaaccaccctccccctcctcggggtcccactcctccttgtccatgatgctgaggacgtcacccagcatggagggccccaggtcgatgtggaaggacatgatggactccgcatgcttcagcccgtacgtggccttgggcacgacaggcagatctgtcagatccccaaaggcctgctcatcgaggagggggtcaggggaatgtggacccgcggccccattccgacggggcactgcctcctccgtgcccgcctcctcatcgccgccctccccgtcattggccttcttcacggggctggatgacaggctcttgggcagcttactggtgcccttctccgcggcctccttctcat

SEQ ID NO: 271002 - DNA, 102 bp, Homo sapiens; identical to SEQ ID NO: 217983
  chr17:71312422-71312524
  hypo

SEQ ID NO: 271003 - DNA, 258 bp, Homo sapiens
  chr17:71325320-71325578
  hypo
aggactgtaggcgtgagccgctgcgcccagtcccccgtcaaagacttcttaccttctacaacacactagaaaatcccaccctttgtggtagaagcgctcagcaaacctctttggatccaatttcactcactctttatgggcgttaagaaaagagtatatgagacgtgcatatgatgggccctgggtaaaagagggtaaggggtcatggggacagcagcaccggaaggcacagggaagcactgccgtgggcctgctggt

SEQ ID NO: 271004 - DNA, 154 bp, Homo sapiens
  chr17:71326305-71326459
  hypo
cagctctcactaccccgggtccttacccacaatctggtgaatggtctcttcctgaaactcctgaaatgggcctgtgttgagtgcgccattgctttccagcttgactgatagactcggaaaggtcggttcagctctccctcccaaagtgctggga

SEQ ID NO: 271005 - DNA, 199 bp, Homo sapiens
  chr17:71345761-71345960
  hypo
gctgtgcttgcaccacgagccttgtcctgtcctcatgggctgctttcagatgctgccctttgaggctgatggggataggaggttgtcctttaataggtataaataaggacctgggggagagggtttcccaaatggggaggaagacaggagggcatagcgataatgcgggtgctcaggcgtccttcgctaaggtgttttt

SEQ ID NO: 271006 - DNA, 204 bp, Homo sapiens; identical to SEQ ID NO: 217985
  chr17:71354224-71354428
  hypo

SEQ ID NO: 271007 - DNA, 137 bp, Homo sapiens; identical to SEQ ID NO: 217986
  chr17:71364486-71364623
  hypo

SEQ ID NO: 271008 - DNA, 196 bp, Homo sapiens
  chr17:71391356-71391552
  hypo
cctggacctggacgcggtactctgtccactcctccaggtcctcgatggtgtagtcccgctccacacggtcctgcaccacgtggctcagcgtcttgccatgcccgtctgaccggctgtacttgatcttatagcccacggactcagggttcccattgtattccatctccgggagaggctgcagcggggcaggggtggc

SEQ ID NO: 271009 - DNA, 83 bp, Homo sapiens
  chr17:71401759-71401842
  hypo
gttccaggaccgcccgcagataccaaaagccacagctgctcaagtacctgatataaaaaggtgtagtatttgcatgtaaccta

SEQ ID NO: 271010 - DNA, 90 bp, Homo sapiens
  chr17:71417096-71417186
  hypo
gaggatttggcctttttcttggtgactcagggcggtttgcatgaaggtacattaggaaggtgagtcagtgtgatgcggtgcagccgcagg

SEQ ID NO: 271011 - DNA, 241 bp, Homo sapiens
  chr17:71419536-71419777
  hypo
tctccagaatgtagcggatcagggggctgttgccatcaaagggcttggtccacgtcaggttgatggctcgcctttccacggtgctgagagtggccactgggtgctcgggcgcgtggggcagttgcctggaaaagagacacgtggtcaggcatccctatgtggtctgcaggcaggtgacgggggcgctgtggacacaggttgtgtaggccttgaccttccatgataccgcatgcttagacgt

SEQ ID NO: 271012 - DNA, 128 bp, Homo sapiens
  chr17:71420061-71420189
  hypo
gcaggtgggcactgcgagagtcgttgcctcctgctgagatcacccggcaggtgtacgtgccgatgtctcccgaccacgtctgtgagatgtgcagggagccgtttctgtccaggcggatacgaggatgg

SEQ ID NO: 271013 - DNA, 297 bp, Homo sapiens; identical to SEQ ID NO: 217987
  chr17:71431601-71431898
  hypo

SEQ ID NO: 271014 - DNA, 170 bp, Homo sapiens; identical to SEQ ID NO: 217988
  chr17:71492642-71492812
  hypo

SEQ ID NO: 271015 - DNA, 229 bp, Homo sapiens
  chr17:71507291-71507520
  hypo
agagccctttgaatcgcgcttttaaaaaccctctgttcattgctgtcatcactcgtttgttttaaaacaataacgatccagcccctgggtgattaaatcccttccatgtggggctgactcagagccagaacagtcagaggggctgggcagtgtgtgtatctgcatgcacacatgtgcatatgtgtgagcacacacacacgcgcgagcacgcacacgctctgcgcccaga

SEQ ID NO: 271016 - DNA, 35 bp, Homo sapiens
  chr17:71533240-71533275
  hypo
catgtgcgtgcgtgcgtgtgcgggcgcgcatcatg

SEQ ID NO: 271017 - DNA, 343 bp, Homo sapiens; identical to SEQ ID NO: 217989
  chr17:71548539-71548882
  hypo

SEQ ID NO: 271018 - DNA, 432 bp, Homo sapiens; identical to SEQ ID NO: 217990
  chr17:71744648-71745080
  hypo

SEQ ID NO: 271019 - DNA, 160 bp, Homo sapiens
  chr17:71772787-71772947
  hypo
attctccttgcaaagaatggcggatgcagtgagagttgccgtaaaagcgatgaaaaagtcatcggcaatccttaccacatccgtacatcggcagctcggaggcttgactgctggagcgagatgtggcccaagacgccccggtggaggctagggtcctcat

SEQ ID NO: 271020 - DNA, 144 bp, Homo sapiens
  chr17:72020385-72020529
  hypo
gtgtcactcctgactcagctccccatgccatccaaccaaattcctctgcctgacatgtaaagttcttcatgacctcgctccatgcacccttctgctcccttggggtagcatcctttctccctgccaccccgcaggctcgccctc

SEQ ID NO: 271021 - DNA, 55 bp, Homo sapiens
  chr17:72198104-72198159
  hypo
cctgcctgaaaaaggggaggcgggagctgagctcggaaggaccagtggcacttgg

SEQ ID NO: 271022 - DNA, 208 bp, Homo sapiens
  chr17:72220054-72220262
  hypo
aaacgcaggcgagacgctaaagcagccttgtggggcggacaaagctctgagcacaaggaaggggaccaaggctgctgcaatacatggccggggctgaaataagagactcagaggacagagttctggacaggccgggaggtcacagtcgagtgcggttcccagtacagtggaagagctttgagaagtgactggtgttaaaaatcctcct

SEQ ID NO: 271023 - DNA, 83 bp, Homo sapiens
  chr17:72221625-72221708
  hypo
gtaacccaggccggcgggagtattcggaacagtgggacttgaatgtgaagaagtggccaccgggtgaccgaagagctcagagg

SEQ ID NO: 271024 - DNA, 42 bp, Homo sapiens
  chr17:72243967-72244009
  hypo
ttaagtgcgtgcgtgcgtgcgtgcatgcgtgtgtgtgtgtgt

SEQ ID NO: 271025 - DNA, 512 bp, Homo sapiens
  chr17:72249017-72249529
  hypo
ctggaagagctggtcgtgaagctgggaatgggccagaatgatctgcaggaggcaggctggggaccgcgttttagaggagtctcaaggagacacgcgtggccagagagtcctgggaggaaaggcagggaagtaggacaggacctggctgcctcggagcctccttcacccttcacagccggccatcttctacccattgttctagaaacagagactacgatgacattgatgatgatgacccctttaacccccaagcctggcgcatggcggctcacagtcccccgaggggacagcttcacagcttctgcagctacagcagtggcctgggaagtcagaccagcctgcagcccccggcccagaccatctccaacgcccctgtctccgagtacatgtacggcctgcacacacacccaggctgggtagcactgcccggacagcatgttgggtggggtccacagtgccgggtgtggggaggaaggcatccaaggccacccgtggtccccactacagccaca

SEQ ID NO: 271026 - DNA, 222 bp, Homo sapiens
  chr17:72249921-72250143
  hypo
ccacgctacgagaacgtgccactaatcgggagagcctcccctccgcctacggtaattggggctctggcccttccttgttggggtaatacataaagacaaaacctcctgccaacccagtgaatcctgtccacaaaggcagaaaagaatgaaactgttctgttattgaatatgcactaaaccagaccgtcgtgggtatcccaggcagtccgctaaggagattgc

SEQ ID NO: 271027 - DNA, 336 bp, Homo sapiens
  chr17:72260300-72260636
  hypo
tgtacacatctatacgacgcgtcccatgttgggggagtggggcgaggtcatgggagctggtccactctctcctcggaccagcctccccgcaggctcactggcttggccagcacagggacccctgcagctggctgttgtcttctgtggagcgagggaaggtaacagtttagctcccacccatggtgggcagaggtcagcggaggtcagaggcatggagatggccaccgctcagctaggaaatccctgtgcctggtgctcgtgcccgtcatacagtctgctttgctgtcttctttctactttttccttctttttcttctgggacggtgactcagggtc

SEQ ID NO: 271028 - DNA, 79 bp, Homo sapiens
  chr17:72269881-72269960
  hypo
tccgtctcaaaaaaaaaaaaattccccagcttctactcccaaggagtttccattctggtggtgcgggaagatgtcttta

SEQ ID NO: 271029 - DNA, 499 bp, Homo sapiens
  chr17:72277705-72278204
  hypo
attgccctcctcagagagcaactgcaataactaaacagggtaatgcttagcatatagtcggcactcaggatttttttttaatgcggatgcagcttctggacaaattcctaggatctccccaccaccccttgcttcctgccccaaccagattgagaacctggagctgtcctggcaggacctgtggagatagggaaggggccggtggggtccctcaccccacaccctccctctgccccccagcagccggcaccatggagattgtgtacgtgtacgtcaagaagcgcagcgagttcgggaagcagtgcaatttctcggaccgccaggccgagctgaacatcgacatcatgcccaaccctgagctggccgagcagttcgtggagcggaacccagtggacacgggcatccagtgctcgatcagcatgtcggaacacgaggtgggtccctgccccaagggccctggcctgtcaggtgtggccaggcagggcggccagctggggcc

SEQ ID NO: 271030 - DNA, 34 bp, Homo sapiens; identical to SEQ ID NO: 217993
  chr17:72290214-72290248
  hypo

SEQ ID NO: 271031 - DNA, 599 bp, Homo sapiens
  chr17:72367882-72368481
  hypo
cagtggccctggcgcgccttgccaccaggaccaggaggccctcctactactaccttctggcgctcacagcctcggatatcatcatccaggtggtcatcgtgttcgcgggcttcctcctgcagggagcagtgctggcccgccaggtgccccaggctgtggtgcgcacggccaacatcctggagtttgctgccaaccacgcctcagtctggatcgccatcctgctcacggttgaccgctacactgccctgtgccaccccctgcaccatcgggccgcctcgtccccaggccggacccgccgggccattgctgctgtcctgagtgctgccctgttgaccggcatccccttctactggtggctggacatgtggagagacaccgactcacccagaacactggacgaggtcctcaagtgggctcactgtctcactgtctatttcatcccttgtggcgtgttcctggtcaccaactcggccatcatccaccggctacggaggaggggccggagtgggctgcagccccgggtgggcaagagcacagccatcctcctgggcatcaccacactgttcaccctcctgtgggcgccccgggtcttcgtcatg

SEQ ID NO: 271032 - DNA, 49 bp, Homo sapiens
  chr17:72370873-72370922
  hypo
caaatgcaggtacccggggagggagaaggtccaccggaggaccagataa

SEQ ID NO: 271033 - DNA, 150 bp, Homo sapiens
  chr17:72391682-72391832
  hypo
tctacctgtacaaacggaacacctagctatgcgtgcacatttatgacatgacccaggcagcattgtttgtaataatgacaaaggattggaggctcctacataggtgactggttccacacttgcggtgtccccatgcgatggatcacagta

SEQ ID NO: 271034 - DNA, 193 bp, Homo sapiens
  chr17:72700708-72700901
  hypo
tcctccatggtcacagtgaacgtgcggtttttctgattgtccttgatggacacccggtccctcttcacctcctgctctgacccactggttttaacaaggatcttgcagtcacgccaaatagctcctcgacaccaccacttcaagtaggtctcccagcctgatctgtaaacacactgcacggtcaaggagcccc

SEQ ID NO: 271035 - DNA, 162 bp, Homo sapiens
  chr17:72799715-72799877
  hypo
tcagaccccgagcccgaggcctaagccctccttgtttgtgagtggtgcagtcagggataaaaacccggtgtgcctcacttcccaagccacctgggctgatcctggccactgacctgtgcgtgcacatgcatttccagtcattcccctcgagaagctgagccc

SEQ ID NO: 271036 - DNA, 201 bp, Homo sapiens
  chr17:72800413-72800614
  hypo
tagccgtgatccttcgtgtggccagtgtcccagccagcggtgctggccctgcacactggctcaaaagcagcacctgtgtgcagagaagaaatagctgagtgtgcgctgtgcagtgcaccctggccctgaggagaggagccacagaaccccagagggtttacagccagcagagaggtgcgagggactcggctatgatggccc

SEQ ID NO: 271037 - DNA, 34 bp, Homo sapiens
  chr17:72808771-72808805
  hypo
ctgtgcgatttgtgcgctccgcctccacccagat

SEQ ID NO: 271038 - DNA, 269 bp, Homo sapiens; identical to SEQ ID NO: 217998
  chr17:72811189-72811458
  hypo

SEQ ID NO: 271039 - DNA, 237 bp, Homo sapiens
  chr17:72811680-72811917
  hypo
tcactcacacgctccgtggtgcggttaaaggacataacacattgccagtcctgggctccttttgcatatgacacagaagcacgcagagtcggagcctttcttctgtaagtgccatgtgctgtagggttagaactggagaggagggaggcaggtggtggacacggcacagcctcagcaggcgtgagttgagcgttcttggtttaaagatccattctcggaagtagcacagcatttgtt

SEQ ID NO: 271040 - DNA, 209 bp, Homo sapiens
  chr17:72818431-72818640
  hypo
agagtcaggctcaccgtagacttggctttagaaaatcaactcctgtttcccccagccccttcccacccccaggtctcccaccctgaggctcccggggccctgcagtgctgcggagcaggtgacagtggcctcgagagaggcttttggcagcatcaggagccggaggtggagaccagctcgggaaggtcgacagcacttgtttttttggt

SEQ ID NO: 271041 - DNA, 96 bp, Homo sapiens; identical to SEQ ID NO: 217999
  chr17:72823372-72823468
  hypo

SEQ ID NO: 271042 - DNA, 36 bp, Homo sapiens; identical to SEQ ID NO: 218000
  chr17:72823708-72823744
  hypo

SEQ ID NO: 271043 - DNA, 521 bp, Homo sapiens; identical to SEQ ID NO: 218001
  chr17:72824033-72824554
  hypo

SEQ ID NO: 271044 - DNA, 98 bp, Homo sapiens
  chr17:72827958-72828056
  hypo
ctccacgaggtgggcgcaggctgtcttggcggctgtggctgagccccgggcgtcggtgtggctcttggagccctgctccccatcgcgcatcctggcag

SEQ ID NO: 271045 - DNA, 237 bp, Homo sapiens
  chr17:72875512-72875749
  hypo
cccagcccagccctcgactaccttcaggcacatgttatcagagagcctggggaatagatggtgttccacatggcagctgatgatcgagtggccgaacgcccagtccagcacgggcagccgggccaggttaagcacccccaggctcatcatgtgaatccgacggggcttgttgtcccgggagaacatgggcagtccgatgtgctgtgacagacacgtgggtcacgccgggcagcctgg

SEQ ID NO: 271046 - DNA, 155 bp, Homo sapiens
  chr17:72940421-72940576
  hypo
cacattcacatacccgctgcatcagtcacgacacgcctgtgtactgtgagcattctatatactctgcttgcatttctcagaaaagctgtgcaaagagagaatttttgccaagtgacatcatggattttgaaattataaaataattcagggctggg

SEQ ID NO: 271047 - DNA, 43 bp, Homo sapiens
  chr17:72999880-72999923
  hypo
gctgagcaagtgccggcagcacggggccggagtgcggcacgcc

SEQ ID NO: 271048 - DNA, 120 bp, Homo sapiens
  chr17:73003500-73003620
  hypo
tgatagcggtttttcaaacttcccatgctccactcagccctctccagatttagtaatgtccatcctgaacttaagaattgctgtccaagaaaaaattagccaggcatggcggtggccgcc

SEQ ID NO: 271049 - DNA, 145 bp, Homo sapiens
  chr17:73003740-73003885
  hypo
tctcaaaaaagaattgctgtccaagctcagatactggaagcctagaaacaggactgtggatcctgatcaaagggggcacctctagggtatcttccttcgcctcacactgccaacgctacccaccccttctcgcaccagcagcctg

SEQ ID NO: 271050 - DNA, 236 bp, Homo sapiens
  chr17:73016427-73016663
  hypo
aggttccatttggcaactgccgagtggatcgcggagcccgtgcggcagaagatagccatcacggtaaccaccatccctttctttccctagaaatccctcagtggcttttaaacctttactctgtaggactccagtttttcatttgttctctgcagcataaaaacaagatcaacaggttaggagagttgatcctcacctctgagagcagccgctatcagttccggaatctggcagat

SEQ ID NO: 271051 - DNA, 266 bp, Homo sapiens
  chr17:73016884-73017150
  hypo
gggaccgaggcctgcgggctagtgcctgctggtgtaactgctcggcttcccgttgagctcccaactcctctcaccactttgaaaagcactgattgggcatctggggctaattgcagtctttttgttttcaggatagaaaacatgaatcgggaaaggctgagacaaaagagaattcattctgctgtaaagacaagcaggagggtcgacatggactgaaatcaccctctgcagctgggagggctcttctgggcgtccgggcagctgca

SEQ ID NO: 271052 - DNA, 209 bp, Homo sapiens
  chr17:73055604-73055813
  hypo
ggccccgtgaagcacgtgtacagagtcctgcagtgtcaggaagaagagctcacgcagatggtgtccacgatgtccgacggctggaaattcgaacaggtacatctcttaacagagcagcaatcccaggccccgttcaaggggtctgcagctcttcaaacaatcagtgtggatggccaattaataaccacgggagacggctacggccaggt

SEQ ID NO: 271053 - DNA, 34 bp, Homo sapiens
  chr17:73067479-73067513
  hypo
gagggtattttcaaccgtccgtctgtcagctctt

SEQ ID NO: 271054 - DNA, 405 bp, Homo sapiens
  chr17:73075227-73075632
  hypo
cccaagtgggtagcagcagccgcatacatctcagagtcttcccacatcacggggctggcaaggacaggggcttcctcgccaagtcctccccgctctgaaagacacttggtggcaggatggtgcgtgacaccctcaggcacacatccaaatgtcccggggatgatacttgctctcaaacagctgttccttatttgggggagtcctgggcccccataggtccgcaatggtggtcctgagggtcctgaaactcttttcagtatttccacgagccagatggcaagcaggcctgtgctttcaaggaggcaggttagcaaaccgaatgtcagggtgtctggtctctgcctggcctgttcctggagaaattagtgacccaggtttcagcctgtgcttcatgggggaaaacat

SEQ ID NO: 271055 - DNA, 240 bp, Homo sapiens
  chr17:73086308-73086548
  hypo
gctgggattacaggtgtgagccaccgtgtctggcagggctgaattttgaaagaccagttgactggagaaaccgctcgatgggaggggaggctggagagccgactgggcatccataccgtgtatgtgacctgggacttactgggagtgggagaggagacagggaaggccatgtctgcagtgggggtcccagagaggcgggggaagggggtcctcagaccttggtggcagagtttcttttct

SEQ ID NO: 271056 - DNA, 986 bp, Homo sapiens
  chr17:73089510-73090496
  hypo
tgccaaggccaacgcgtgggcctctggccacctcccaggggtggtgcccctctgtgacacctggtacttgggtatgaggaagggatggcttagctgcccagagaaggtggcaggtgggccaggagagacggacagcctgctgaccaccaggctccattctgtcccctccccaggcagcagccacattggcagtgaggccgtggcagcgtcggcagcagaggatgccccaggccctggagcgtgcagatggcagctgggcctgggtggtgctgctggccaccatggtgacccagggcctcaccctgggcttccccacgtgtatcggcatcttcttcactgaattgcaatgggagttccaggccagcaacagcgagacctcttggttcccctccatcctcacggctgtgctccacatggcaggtgagcggcctagggaggggccgatgagaaagtcctaggggttgcggggaagccacaacctccctggccttctgattccctctctctgaggccacaggctttgcctcctgggtgaattcctaaggtttcaccagatttcaccaggggcccctggctggaatccagctggactgggctggagccggggagagagtggggaggtgcctgggttgcaaagccaggcggagccttgcgtcctttctgtgggatccattccgacacaggcgtaggtgtgctggggcgctcagtgccaggctgggaagagcgctggggccagcccaccaagactctcctgctttccagctggctggtctctctgaacctcggttgcttcctctgcaatctgagggtgatgcccggcatcctgcccagctcccacatggaatagcagggaagaccactgtcttccctggaggtgctgggagctgggaaatgtatgcggctgtgaattattaatattttggagaccctcactagggcagggagtggcttcaggataggaaaggggacgcaaggaagacaccagg

SEQ ID NO: 271057 - DNA, 164 bp, Homo sapiens
  chr17:73090971-73091135
  hypo
ctgcctcaccctgaccccagcgttgggagcagggcagagggagggttctctgcagtcgccgtggacacagggacctgccctcagctcctgggagctctccagggagactgcagagaccccggcctcggaggggcccggtggacagcagcccgagctgatggccc

SEQ ID NO: 271058 - DNA, 275 bp, Homo sapiens
  chr17:73091165-73091440
  hypo
cgcagctgcccatctccccggctacctcctggctactccctccacttgccaccagcagcctgcctattattccaggtcctgccctcaaactgggagggaggtgaggctcggagaaagcgccaccctcctgggtgagctctgaatctgccacatggcctctggcctgcagggttggggcagggagtgggaatcccagagggctgcttctcacacaggcagagcagggttcctgggccaggggctaggaaccgggcacccggcggggaacctactcc

SEQ ID NO: 271059 - DNA, 36 bp, Homo sapiens
  chr17:73094149-73094185
  hypo
ctggtgggacgcttcggctgccgagtgaccgtgatg

SEQ ID NO: 271060 - DNA, 43 bp, Homo sapiens; identical to SEQ ID NO: 218009
  chr17:73095832-73095875
  hypo

SEQ ID NO: 271061 - DNA, 351 bp, Homo sapiens
  chr17:73096166-73096517
  hypo
cgggtgctggccaacgcgctggcctcgatgggcgtctccctgggcatcaccctctggccgctgctctcccgctaccttctggagaacctgggctggaggggtaccttccttgtcttcggcgggatctttctccactgctgcatctgcggggccatcataaggcctgtggccaccagtgtggcccctgagaccaaagaatgtcccccgccacctcccgagacacctgcacttggctgcctggctgcatgcggccggaccatccagcgccacctggccttcgacatcctgcggcacaacacaggctactgcgtgtacatactgggtgtgatgtggtccgtcctgggcttccca

SEQ ID NO: 271062 - DNA, 168 bp, Homo sapiens
  chr17:73100141-73100309
  hypo
ttcatgggtggcagcttctacgccctgcagaagaaggagcaaggcaagcaggctgtcgcggcggatgccctggagcgggatcttttcttggaagccaaagacggtcctgggaagcaacggtcccctgagatcatgtatgtaaccagcgtctaagacccagggttcatc

SEQ ID NO: 271063 - DNA, 87 bp, Homo sapiens
  chr17:73115873-73115960
  hypo
cctgggctgcttcagctcagcatgggcgagtccccagatgtagctgtattttgagctgcccttgccgagggcctgcccagccaccag

SEQ ID NO: 271064 - DNA, 289 bp, Homo sapiens
  chr17:73124803-73125092
  hypo
aacaaggagcacatcctgcacgcaggaggtgtcccactcatcatcaactgcctatccagccccaatgaggagacggtgctgtctgccatcaccacgctcatgcacctgagcccgccgggccgcagctttctcccagagctgaccgccacgcccgtggtgcagtgcatgcttcgcttctccctctcggccagcgccaggctccggaacctggcacagatcttcctggaggacttctgctccccccgccaggtggccgaggcccgcagccggcaggcgcactctgccctgg

SEQ ID NO: 271065 - DNA, 221 bp, Homo sapiens
  chr17:73131495-73131716
  hypo
cctggaggaagacccgcttcagtgtgattgcctcccttgcttcactgcttttagttccaggcagtttcattgtacatccaagccttcctctgcgtgagagcaaaggctttgctcatcagccagccagtcttgttactatctggctactttttaaggttaaaaaataaaaggcagtttctttgctttgcaggcggcaaggcaggaggcgcaggcctcttcat

SEQ ID NO: 271066 - DNA, 161 bp, Homo sapiens; identical to SEQ ID NO: 218012
  chr17:73132152-73132313
  hypo

SEQ ID NO: 271067 - DNA, 120 bp, Homo sapiens
  chr17:73135933-73136053
  hypo
cagtcagaagtactccacccacagaggagggaggtttgtttgtttccagcccataatgagataagtacaggaattgagagtaagtgttcagaaactttgatttattttttcagatggagt

SEQ ID NO: 271068 - DNA, 32 bp, Homo sapiens; identical to SEQ ID NO: 218014
  chr17:73148048-73148080
  hypo

SEQ ID NO: 271069 - DNA, 40 bp, Homo sapiens
  chr17:73151712-73151752
  hypo
ttaccacaacagcacgaagcgcaccacttgtttgtgttag

SEQ ID NO: 271070 - DNA, 120 bp, Homo sapiens; identical to SEQ ID NO: 218015
  chr17:73154765-73154885
  hypo

SEQ ID NO: 271071 - DNA, 120 bp, Homo sapiens
  chr17:73172030-73172150
  hypo
aagtcattcttttagaaagctttactgcttttcagacacagctactataatgttaaatagaacataccttgagacaaatatgcatttaaatgagttagacaaggaaatgaaatttttttt

SEQ ID NO: 271072 - DNA, 41 bp, Homo sapiens
  chr17:73179830-73179871
  hypo
aggcgtgagccaccgcgcccggcctacagtgtcttcttctg

SEQ ID NO: 271073 - DNA, 180 bp, Homo sapiens; identical to SEQ ID NO: 218016
  chr17:73209661-73209841
  hypo

SEQ ID NO: 271074 - DNA, 154 bp, Homo sapiens
  chr17:73215295-73215449
  hypo
cctggaattcggcccggcacggtggctcacaggaagtagtgggccaaatgtttgagtctctgattgattcgctaaggtttgttgttgtcgtttagagacagggtttcgctttgcggcctgggcgggagtgcagtgatgcgatcatggcacaatg

SEQ ID NO: 271075 - DNA, 258 bp, Homo sapiens
  chr17:73236162-73236420
  hypo
gaagaagtccaggtcggactgttccctctatgaacaacagaaagggtggtgagccgagggcgggtggggagggcctgccgctggaacggggcgcagccctccaaggactgcacggaagacagccccggaggcactcattgttccccgctgcagctggcacgctctggagggaaggacagctaactgcagcccaggagacatgacgctggaaagtggaggtccttggcacagtagtgctgtcaccgatcctgtgcccct

SEQ ID NO: 271076 - DNA, 151 bp, Homo sapiens; identical to SEQ ID NO: 218018
  chr17:73241507-73241658
  hypo

SEQ ID NO: 271077 - DNA, 31 bp, Homo sapiens; identical to SEQ ID NO: 218019
  chr17:73241838-73241869
  hypo

SEQ ID NO: 271078 - DNA, 38 bp, Homo sapiens
  chr17:73242142-73242180
  hypo
ctcagccatcagtgcgacaccttcgctagtgactggca

SEQ ID NO: 271079 - DNA, 182 bp, Homo sapiens; identical to SEQ ID NO: 218020
  chr17:73242494-73242676
  hypo

SEQ ID NO: 271080 - DNA, 78 bp, Homo sapiens; identical to SEQ ID NO: 218021
  chr17:73245039-73245117
  hypo

SEQ ID NO: 271081 - DNA, 214 bp, Homo sapiens
  chr17:73274193-73274407
  hypo
ggggtgggagggctccctctcgtgtgagggctgcctcaccatttttctttccttcggctggtatggcccacttgtacaggtgcttcaaggagctgtagcaagagaactgcagcccggcgtaggggaagatggcgatcaaggtgggagccaagcctttgtagaaaacctgggggccttcgctcctatacatggtccccacggcgtggcgcagcgt

SEQ ID NO: 271082 - DNA, 397 bp, Homo sapiens; identical to SEQ ID NO: 218023
  chr17:73311549-73311946
  hypo

SEQ ID NO: 271083 - DNA, 202 bp, Homo sapiens
  chr17:73465135-73465337
  hypo
cattttccaggtaaccagcccgcttttgtcggacctgttgtcagattgggctgcccatcgtgtgttcatctgctcaggtgcctgttgagcactgcactcaaccacgtgaggggctgcgggcttgcacatgctggtgagtgtggcgtctgactgccagcacgtggaaagaagtcagtgcctcgttctggggatgcagtggaca

SEQ ID NO: 271084 - DNA, 142 bp, Homo sapiens; identical to SEQ ID NO: 218025
  chr17:73498113-73498255
  hypo

SEQ ID NO: 271085 - DNA, 410 bp, Homo sapiens
  chr17:73517993-73518403
  hypo
agctgggagagtggcagagccgagaacggagtcacgggagccggtaagcggcgctggaacttcgagcagatctccttccccaacatggcttcagacagccgccacacccttctgcgcgccccagccccagagctgctcccggccaacgtggctgggcgggagacagacgctgagtcctggtgccagaagctgaaccagcgcaaggagaagctctccaggcgggaacgggagcaccacgcggaggccgcgcagttccaggaagatgtcaacgccgatcccgaggtgcagcggtgctccagctggcgggagtacaaggagctgctgcagcggcggcaggtgcagaggagccagcgccgggcccctcacctgtggggccagcccgtcaccccgctgctgagtcctggccaggc

SEQ ID NO: 271086 - DNA, 177 bp, Homo sapiens
  chr17:73532530-73532707
  hypo
gtcccacctgcctgtctccccgcctttccgggcctaactattccgtgtctctagggggtacctctccccactcaggttgcggtggctggagaggagcccacgcctggtgagcaccggaacattccaccagcaggacagggctggacccaccctcccgcctgaccatgcctggggcct

SEQ ID NO: 271087 - DNA, 99 bp, Homo sapiens
  chr17:73543234-73543333
  hypo
gagagcaaggacatcgccccgggggtcctgagagggagacgtcttgtttctttggcttcagtacttccagaggatctgtgattgcgaacagtctctgaa

SEQ ID NO: 271088 - DNA, 364 bp, Homo sapiens
  chr17:73545958-73546322
  hypo
agagcccaggagagacgggccttctcccctactccaggctaacgttgcagtctggcggcttctgcaaatctttgctctcctttcccaacccccctgtcaaaagagttcattgttctctcctcccttggcagaggtcacctgagccaggtatcagatgtgggcggggccgggtaggctggatgccgcgcttcggaggccccagtggctgccaggcagctttggtcagcctcctggtttgaatctgaggagagatagctagggtcctagaatagctggggagggctggtcttggaattccttgaccacccaggggctatgccccgtcccgccctctgtcctgagtgcagccgcgattcagggttgc

SEQ ID NO: 271089 - DNA, 50 bp, Homo sapiens
  chr17:73569825-73569875
  hypo
caccctcccaggctccggctctccttgcctctttgcgtgccccttgcccc

SEQ ID NO: 271090 - DNA, 212 bp, Homo sapiens
  chr17:73586129-73586341
  hypo
gcagcaggagggagacccgggcctccgtgggtccctgagggagctgtgggaacccgaggatgaggacgaggcggtgctggagagggacctggagctgagcctccggccgggcctggaggcgccacccttccccggtgccaagggcaggagcctcggagacggcctggaagacatggaggacctggcgcggttgcggttagcgggcgcggtgc

SEQ ID NO: 271091 - DNA, 130 bp, Homo sapiens
  chr17:73586371-73586501
  hypo
catatccaccctgccctcatctttatgaattgcgtgtagacccttattgaatccttagaaggatgggcttgaaccctcctggcaggaaggggcaggtaaggggcaacaggtgctacgtccccaggaccgc

SEQ ID NO: 271092 - DNA, 136 bp, Homo sapiens
  chr17:73590839-73590975
  hypo
ggtggccctagagacgggtgagagtcagagcagggcccgaggcacggctctatgtggctcacccacccgccatgcctacagggacgccctggccaaggcactgtattcccgcctcttccaccggcttctgaggaga

SEQ ID NO: 271093 - DNA, 436 bp, Homo sapiens
  chr17:73606094-73606530
  hypo
tattcttttcctgtcgtttctgtgaagcatccagggcttctctggtccaaagtcagtttttacatgaatgtcaggcttaagggattccagtgccaggcaggaagcataagtttggactcttcatttcgcccccgctctttcccggcctccaggaagcggtacctccggcggcgggcagctttgggacagctgaacaccatcctgctggtggcccagcccctgctccagaggcggcagagactgcaggtgcaggggcttgggtggggcggttcagggtagaagccaggctgcctgagctggccgagctggccaaatcccagcagcgttgaccctctcagcccggcctcgcacgggctgtggcttcagacacagtgctccttgaactcatcccttttccctccggccggggtaggccggggcccttgggaggtgctgt

SEQ ID NO: 271094 - DNA, 56 bp, Homo sapiens
  chr17:73607689-73607745
  hypo
gcgcttggagatcccggctgagctggccgtcatgctgaagacggcggaaagtgagt

SEQ ID NO: 271095 - DNA, 303 bp, Homo sapiens
  chr17:73607994-73608297
  hypo
caccgagtgcctgccgcctgaggttcctgcccggcccagcctgactctcccagcagacattgacctgttccctttctccagcttcgtcgccatcggctttcaggtgggcgcccaggcctaagctcttcccgctggcctcaccgctctgagttagcacctgcctgacagatgctgcgtttttttccccgctgtcagctcttgccctccttcctccccagcctttggggctgtgagtagcgctgaattgctctgaaaataaccgttgaatgtaattgtctcaccatagagcgttactggagataa

SEQ ID NO: 271096 - DNA, 78 bp, Homo sapiens
  chr17:73611623-73611701
  hypo
tgcagggcagctggccgtccagcagcagaactttatccagcagcaggcgctaatcctggtgagcgctggcagggccct

SEQ ID NO: 271097 - DNA, 1148 bp, Homo sapiens
  chr17:73612817-73613965
  hypo
gtaccagagccgcccgggccccgtgcctgtgcccgtgcagccatccaggtgggcccccacggggaggtggccagggctgtcccgctcctcggggaatcaccctatgaacttagtgacctcttgcttctcccacgaggcctcccaaagctttcctgaggaaaatcgaccccaaggacgaggctctggccaagctgggtatcaacggtgcccactcgtccccgccggtgagcaccccagcctgtctcccccagagtgtgtgctgctgcactggggagctcaaggctctctggggcgaacttggccttgtgctgtgactcagcccgtgtactttctccgtatccccccagatgctgtcccccagcccaggaaagggccccccgccagctgtggctcctcgacccaaggccccgctacagcttgggccctctagctccatcaaggaaaagcaggggccccttctggacctgtttggccagaagctgcctattgcccacacacccccacctccaccagcgccaccactgcctctgcccgaggacccagggaccctttcagcagagcgtcgttgtaaggaaccacatttctcctgcgccgtgggcttcactggggcagaggcagggttcgcacagactctcggtgcccagggctgaaggcatttctgcgtggctgaggccagctgttcgggcttctggactttggagccatacgtagctggggagtcccagcttccgcgttcccacccagggcagggcctgggcatctttggggctgtcatcgagaggctgtcacacacagggtgttgtccctgacacatacccgacagctctgtgaggaagttagtggccctggctgacatggtcatagaagacccacgagcctcacggacgccagggaaagtttagggcccaaaatggaggcaggagatggtgccatggaaggagtaaggcagctggaggttgggagagccgggcccttggaaggctcgtggggatgaaggtcttccctcccgtgcccccatcactctggctctgcagcccctcactgaggctcctcaccccctcctctctgccaggcttgacacagcccgtggaggaccagggggtctccacccagctactcgcgccctctggcagcgtgtgcttctccta

SEQ ID NO: 271098 - DNA, 993 bp, Homo sapiens
  chr17:73615717-73616710
  hypo
gcaggacccaggagactgcccgagacccaccaccttcctgtagggcgagagtggcagcgacgtgcagctgttagccgtgtcccaccgtgggctgcgactgctcaaggtgacccaaggccccggcctccgccccgaccagctgaagattctctgctcatacaggtgcgctagcccacgaccctgggctagaggtgggggcaggtggcaaggtgacctcagttcatgcccgatccctgcgcagctttgcggaggtgctgggtgtggagtgccggggcggctccaccctggagctgtcactgaagagcgagcagctggtgctgcacacagcccgggcaagggccatcgaggcgctggttgagctattcctgaatgagcttaagaaggtaagtgtggggcacgggttgagaggccgggcagacagccctcaccgatgctgcatctccctgtccgtcttccctgtgggggcaggggctgggagtttgggccaaatccctggaagtctggggtgctaggtggaggggcaggccagcagggggagcaggtgggcaggcaggacagggaggcacaggcagacttgctgctccaggccctcgcctgcttgcccacaggactccggctatgtcatcgccctgcgcagctacatcactgacaactgcagcctcctcagcttccaccgtggggacctcatcaagctgctgccggtggccaccctggagccaggtatcgccagaggccggcaggggctcacacagggagggcatccacttggcagaggctgcccgggggcagagggtccagtgggtgagccacatccctgggtgccttccaggctggcagtttggctctgccgggggccgttccggactctttcctgccgacatagtgcagccggctgccgctcccgacttttccttctccaaggagcagaggagtggctggcacaagggtcagctgtccaacggggaaccagggctggctcggtgggacagggcc

SEQ ID NO: 271099 - DNA, 38 bp, Homo sapiens
  chr17:73618512-73618550
  hypo
gcaccatcacgcaccgggaccagcgtggctgagcctag

SEQ ID NO: 271100 - DNA, 190 bp, Homo sapiens; identical to SEQ ID NO: 218035
  chr17:73635125-73635315
  hypo

SEQ ID NO: 271101 - DNA, 408 bp, Homo sapiens
  chr17:73635983-73636391
  hypo
ccaccaccagccgccgccttggccggcagcccccgaagcaagcccttggtctcactgtcctcaccggcttcctccaccctgagctgtgtcagctgggtggggactgagggccaccactaggtggaagtcaccaggggtgcaatgtgtgagacctgacaaacttgttctgcgggctgcggatgggtgcgagggtggaatctcggtgctgcgacgagtgtggggccagccgtggaggctccaggtgttctctctgccccagcagagcccggcaggagccccaacaggaagccagcgcggcatggctgccaccgacttcgtgcaggagatgcgcgccgtgggcgagaggctgctgctcaagctgcagagactgccccaggctgagcccgtggagatcgtggccttctcagt

SEQ ID NO: 271102 - DNA, 112 bp, Homo sapiens
  chr17:73638313-73638425
  hypo
ccagacagagcatcccgaggtgcctccccggggcttccccagagcctcaagaagtctgtgtttttcacatgcttccatcatcttggcctgcgtgacccgtgctctggccacc

SEQ ID NO: 271103 - DNA, 234 bp, Homo sapiens
  chr17:73639435-73639669
  hypo
agccctgggcacagacaggccgaatggccgctctagggcaggcggtgaacaactgctgagtccgcacaggattcggtccctgccctcacaggactcactcctccctgctccttggccaactggcacacaccaggcccggctgtcgggccaactccttcacaggcttcaaacccactgagattaacaaaccagacctgctctccgacagcagcctggcccgctcctttaagaggc

SEQ ID NO: 271104 - DNA, 156 bp, Homo sapiens; identical to SEQ ID NO: 218038
  chr17:73680637-73680793
  hypo

SEQ ID NO: 271105 - DNA, 443 bp, Homo sapiens
  chr17:73691884-73692327
  hypo
ctgcagccccttgacagagccgagcatgcacaccctgtctgtgccctccagggcctcgcagatgcccacggctgagcctggagcagtggtgctggtgtggcagtgcacgtgggttctctctgtcactcaggagctggagatactccaccgtcccctggggccccccagctcgctcactccctgccatcccataagcccgtccaactagctgttcctgcacagatccctccctggcagctgtgggtactctgggtgttttctgacttgggcacgcaccagggcaagtcacgctgacagctggcttctcaagtcctaagtgcggctgcctctgagaacacacccatcagacccaggcagcagccacagacccagcgctgcttccaagagactgtggacacatcgctttactggcttgaggctctgtctgcttacaagaaatgtgg

SEQ ID NO: 271106 - DNA, 35 bp, Homo sapiens
  chr17:73693126-73693161
  hypo
gattacaggtgtgagccaccgcgcccggcccctcc

SEQ ID NO: 271107 - DNA, 46 bp, Homo sapiens
  chr17:73718995-73719041
  hypo
gtaggtgtcctgagcgctgggcccagcccatcgtgatacatctaat

SEQ ID NO: 271108 - DNA, 220 bp, Homo sapiens
  chr17:73726225-73726445
  hypo
ccatgttgggacccgcgttccccgtcctacacgacgccgtgatgcgtgtcagcaggcagcctgctcagtgggcacgccccgccttgccttccccagagggacattggctggcgcccggacagcacccacctgctggtcttctccaccgagtcagccttccactatgaggctgatggcgccaacgtgctggctggcatcatgagccgcaacgatgaacggt

SEQ ID NO: 271109 - DNA, 35 bp, Homo sapiens
  chr17:73736028-73736063
  hypo
gacacgcccatgctgcgcagcgggaacctcaaggg

SEQ ID NO: 271110 - DNA, 63 bp, Homo sapiens
  chr17:73739826-73739889
  hypo
tctcggtcagccgcggggaccaggtggcccgcatccctgtcatccggcgtgtcctggacggcg

SEQ ID NO: 271111 - DNA, 71 bp, Homo sapiens
  chr17:73753020-73753091
  hypo
cagggccagccaccgcattccgggtggatggagacagccccgagagccggctgaccgtgccgggcctcagc

SEQ ID NO: 271112 - DNA, 49 bp, Homo sapiens
  chr17:73792091-73792140
  hypo
tgtgtgtgtgtgcacgggcgtgtgtgcccaggtgcggtagggagtttca

SEQ ID NO: 271113 - DNA, 36 bp, Homo sapiens; identical to SEQ ID NO: 218040
  chr17:73800544-73800580
  hypo

SEQ ID NO: 271114 - DNA, 38 bp, Homo sapiens
  chr17:73805939-73805977
  hypo
ccagcggcgccgccggtccatccgccgtcgggacggca

SEQ ID NO: 271115 - DNA, 213 bp, Homo sapiens
  chr17:73808632-73808845
  hypo
gaaaagatcctcagcgaggagcctcggtggcaaggtacaggcatccacacctcggccgcgccctccctataatcctgctcatagctgccctggggatttggctcaccaccacctactgcctgctctagccgaggccccgacctggcccgcatcccaccctacacccaccattcaaaaggcgcctctaggggcgttttccctgacacatcatgt

SEQ ID NO: 271116 - DNA, 276 bp, Homo sapiens
  chr17:73811153-73811429
  hypo
agatgactaagccagcgcactcatgctggaggaaggggagcctgcccggccttccctcagggcctgagcctgacttgcctgtgctctgccctccagatctacaagtccaccaagtgcaacgacatgcagcagtcgggcagctgtccccgaggacccttctgcgcctttgcccacgtagaacgtatgctgttcccattgccccggggcagtgccctctcccacccctccctcgcctggctagctcaggcttaggccggggatggcccctggcagtat

SEQ ID NO: 271117 - DNA, 243 bp, Homo sapiens
  chr17:73821494-73821737
  hypo
cccggaggggctccgtttgcattccttggtgctctctgagtgcagctggtgtcccgccctgttctgggcggacgcctgtgtgcgtgtgtgtgtgcctgtccagtgtatattgtgtcttagcttccattttaaaaattgttctgtacagagagagatgcagcaggggcgggagggcagagtgggcggaggggagcagccgcacccccagcaccgggtgtctgcggtaggaacaagagggctgag

SEQ ID NO: 271118 - DNA, 44 bp, Homo sapiens; identical to SEQ ID NO: 218043
  chr17:73822058-73822102
  hypo

SEQ ID NO: 271119 - DNA, 165 bp, Homo sapiens; identical to SEQ ID NO: 218044
  chr17:73830728-73830893
  hypo

SEQ ID NO: 271120 - DNA, 420 bp, Homo sapiens
  chr17:73836061-73836481
  hypo
gcagccccggctgcgcccagccccaggagggcaatacctcgtgctgggtgacctcgtgggacacaagctgctgcaggaggtggaggtgcacggtgtagctcggctgcgagcggctggccgaagtggctctctgcaatgaggcctctgtgagcagacagggcctcacactgggtgcagccagccccgcaacccagcagaccgccgcaagagctgggcatggccactggcccagtacccgacctacccgcttatggatgagttggaactggaggtggcactggcctcggtctgggtaggtctcagtgcggggttccagggggtaccactggtcctctcggcagcgcaggtcctgacaggcggggatgcccagcccgtgagcgtcagaacctcatagagtcggggcagcggaggcgacaggag

SEQ ID NO: 271121 - DNA, 315 bp, Homo sapiens
  chr17:73870804-73871119
  hypo
aaggcacggtcagcgtattccaggcagaccccaaccgtgggcgagaaggggtggggcaggggagcctccagcccatgaaaccagacggagaagctgcgtccattccactgcaggcagcaggagtgggcgttgcggcccagccggccgcggtcgtagggctcttgtggggagaagtcttcggccatgacccccatgctgacccagccctcgataatctccacctcccagtagtaggtgcctcggtccagggcaccctcgcccagcacctgctcacaatgggtgaagcgggtgggcgacaaggggtagttgatagga

SEQ ID NO: 271122 - DNA, 65 bp, Homo sapiens; identical to SEQ ID NO: 218045
  chr17:73887194-73887259
  hypo

SEQ ID NO: 271123 - DNA, 160 bp, Homo sapiens; identical to SEQ ID NO: 218046
  chr17:73890917-73891077
  hypo

SEQ ID NO: 271124 - DNA, 132 bp, Homo sapiens
  chr17:73895617-73895749
  hypo
tcagagaagtcaatcggctggtcctgcttgaagagcaggaaggcaagacggtggatgccggagcctcgggcagggaagggggggaggtagggacacgtcacctgtccttcagccacccggttacccgggatg

SEQ ID NO: 271125 - DNA, 31 bp, Homo sapiens; identical to SEQ ID NO: 218047
  chr17:73904785-73904816
  hypo

SEQ ID NO: 271126 - DNA, 110 bp, Homo sapiens; identical to SEQ ID NO: 218048
  chr17:73910328-73910438
  hypo

SEQ ID NO: 271127 - DNA, 170 bp, Homo sapiens
  chr17:73911102-73911272
  hypo
cccgttccagctccgccctttccatggccatctgctgggccgtgaccttcctttgctcctctagggcgcgctgcatggactccgccttggactgctcggcagtcacccgccagcgttcctgtagggcccagggcaggactgagagcgtggttcccgccctgaggatcacg

SEQ ID NO: 271128 - DNA, 44 bp, Homo sapiens
  chr17:73915888-73915932
  hypo
ttcgttctctctccggagccgctcctcccgttgctggtacgatg

SEQ ID NO: 271129 - DNA, 128 bp, Homo sapiens
  chr17:73923089-73923217
  hypo
gagggtggggcctggggcaacggggactccacaaaaagacaggccgggcaaggagagagggagttggagggcggccctggacctacggggcctgcctcaggcttgccggtggggcctctgactctgca

SEQ ID NO: 271130 - DNA, 371 bp, Homo sapiens
  chr17:74003302-74003673
  hypo
ccttgtagctcagccgttccttggagatggggtctgtcaaatccttctcgtagctggactcgtcctgcaggagctgggccagctcttcactgatcatcccggagaggagggcctgctggatggggatgcggcctgtcctcttggggtcgatgagccccccggtcaggtgctgcacctgcaggtgtgggagcacgctctcccggggcatccagcccttctggacggcctcgcccaccgagagcctcttcttggtgacggggtcctcgatgccggtgaaggccttctgggcgttaagcagcctctgtgtggaggtgttctcgatcaggcccctctccatcgccttgtgcacagagtagcgctcacggctgagc

SEQ ID NO: 271131 - DNA, 535 bp, Homo sapiens
  chr17:74003894-74004429
  hypo
ggagatgatagagccgatggagagtgaggagcttggcttggtctccccagctacaagcagcgcaaactcggagatgggcaggtggccgtccttgtacagatggtactcctccttagagatgcgccggcagcggagggcggcctcgatggagtactgcttcccgctcttgcggtccaggagcacagactcctccccacagggccccgaggtggtgacctcctcccagtcacactcgagctcctgcagctgcaagtactggcccctgtcgatgatgcccctcttgtaggcctcgtatggggacatgtccttccccgtctcgggttccaggatggagatcttggtggaaaggttggtctctcgcgtctgggtctcctggctgagctcctcccggctcaccttggcgtggaggtcccggagcgtccgctccttctcgtagatctggtccttctcgcggaggatggccgcctccagccgcgagagctcctggccccgctgggccgccttctgtcgctcgctctccgtcttctggctgagc

SEQ ID NO: 271132 - DNA, 500 bp, Homo sapiens
  chr17:74005166-74005666
  hypo
ctgcaccaccaccttctcctcgggcttcctcctctccagcagcaggcgcttgctctgcagctcgtacaccgcgtcctccgcggcccgcctcttctgggccgcctcccgcacctcctggcggagccgctctgcttctttctccagcaccgggtccttctcgtggcgcaccacctccttgctcaccgtcttggtctccaccttggcccgctcgcgcctccactcgtcgcgctcaccctgcaggcggatgagctgctcctgggagcgcccgtggctgttgacgagctcgttgagctgagccttcaggcggtcgatctcacgcagcacctcggggctcctctcatgcctcaccacctcctgggtcacctccttgtactccaccgtgggcttctgggcccgcaggacctccaggtcgggcagcagcttctccacctccttctccacaccgctcctcttgcccgccatctcctgcagcttggccttgagccgagtgatctcctgct

SEQ ID NO: 271133 - DNA, 102 bp, Homo sapiens
  chr17:74008701-74008803
  hypo
gcacagtagtatctgcgagcatcacctggggcctgtgggaggcaggcaggcatgcagggcccacctgcacatcagatccagcaggtccgggtggccctgaga

SEQ ID NO: 271134 - DNA, 223 bp, Homo sapiens; identical to SEQ ID NO: 218050
  chr17:74013674-74013897
  hypo

SEQ ID NO: 271135 - DNA, 36 bp, Homo sapiens
  chr17:74014165-74014201
  hypo
catcacagaccagtcggaagtcggaatctactcctt

SEQ ID NO: 271136 - DNA, 155 bp, Homo sapiens; identical to SEQ ID NO: 218051
  chr17:74019375-74019530
  hypo

SEQ ID NO: 271137 - DNA, 383 bp, Homo sapiens
  chr17:74021479-74021862
  hypo
acgagtggatcgcacgtgaggggagagccaacagggccctgaggacggagctgccccaggccaggagcgcactgctggggagcctgcctggacagtgggagctgcaggtgctgggccctgggcgcccctcctcaggtcccgcctcctgggatggctgctcccaccgggagctgcacactccaccctgggtggggctcaggtgccccagggaggacaggtcactcagcgagagtgttagctgagagtcttaaccactgtctttcccgtccgcccagacacccagcctcggtgtctgttggtgccttgatccctatcggggtaatgggcacccccactcccacaccagcctttcatccctgaggtcatctcgacaccctggaccc

SEQ ID NO: 271138 - DNA, 376 bp, Homo sapiens
  chr17:74028159-74028535
  hypo
gagcgagactccggctcaaaaaaaaaaaaaaaccaaaaaaaaatttttttaaaggcatgcatgcaaagatagcatctccccaccttgaagggcctggtgagtccttcctctcacctggccctggcttgctccttggtggattgagaggttagagatgaaacgatccctggggctgctcaaccctctgccagccatgactttgcgcggcagcttactcactccttgcgcctggagcgccacgctgatgtgggcagctggcagctcacctggcctgggacctgagcaagaggcttgatcagaccaagaacagtgagactctcggctccaagactgccagacacagctgggcatatgtgcagcccggccacagggtggc

SEQ ID NO: 271139 - DNA, 32 bp, Homo sapiens
  chr17:74040832-74040864
  hypo
ttgagatggagtttcgctcttgtctcccaggc

SEQ ID NO: 271140 - DNA, 31 bp, Homo sapiens
  chr17:74041104-74041135
  hypo
gagccaccgcgcccagcgaggaagccaagtt

SEQ ID NO: 271141 - DNA, 226 bp, Homo sapiens; identical to SEQ ID NO: 218052
  chr17:74042043-74042269
  hypo

SEQ ID NO: 271142 - DNA, 170 bp, Homo sapiens
  chr17:74046449-74046619
  hypo
gacacaggctgacctggacccgcccagagcaagaaccagggctcggctgagggtcctacctgatctggcttgagctcctcccgaaccacctggatggcgtcccgacactcgctgagcattgattcaaacaggcgctccttagtttcttcgctttcagcctaaacaagggc

SEQ ID NO: 271143 - DNA, 205 bp, Homo sapiens
  chr17:74047792-74047997
  hypo
gttgttcactaacttgggaacgaactggggctcattcatgctataaatctagtaaagcaaacacggccaccattcactcctggaaccaccagagcagcaccatccaatagaactctctgccacgggcaatgtcctctacgtgcaccgtccaatgaacacctgagcactcggaagttttattaatttatctatctttttattattt

SEQ ID NO: 271144 - DNA, 44 bp, Homo sapiens; identical to SEQ ID NO: 218053
  chr17:74049485-74049529
  hypo

SEQ ID NO: 271145 - DNA, 40 bp, Homo sapiens; identical to SEQ ID NO: 218054
  chr17:74050637-74050677
  hypo

SEQ ID NO: 271146 - DNA, 39 bp, Homo sapiens; identical to SEQ ID NO: 218055
  chr17:74050857-74050896
  hypo

SEQ ID NO: 271147 - DNA, 121 bp, Homo sapiens
  chr17:74081023-74081144
  hypo
aaagaggaccagagaagcagcgggatcctcacagagcaaggctcagccacgttcaagtgctctcgcgaccttgctcttctcctaggtaaacattacccacgtctctgagagccagctcttc

SEQ ID NO: 271148 - DNA, 71 bp, Homo sapiens
  chr17:74086417-74086488
  hypo
ggcccgtgcttgtcgttcaaggcctcggacaggtgcttaactcggaaatcatgctcgtgacctggcgagat

SEQ ID NO: 271149 - DNA, 414 bp, Homo sapiens
  chr17:74086702-74087116
  hypo
gctgctcatttccccgagcctggaggcccagggaaagcggagaaggaccaaggaggggctgaagagctgatgcttggccccaggggggttccccacctcgctgtatttggggaaagccccagtttgcctgtcctctgctgcacacactcccctttctaaagatgggaaggccgggaggcctcggccagctggggcctgccactgctggtctgagcgtgaaagggctgccccaagacaaataactttttctgagttcacacaggagacaaggacagagacagggaagggaggagggaagcctcagggagggcagagctgccatcagccagagaggaccaggccgagggctgcgaaactgtccctgtgcccgctgaagcccgagtggcatcggggacctgccgttcccaccctgct

SEQ ID NO: 271150 - DNA, 50 bp, Homo sapiens
  chr17:74094005-74094055
  hypo
agatgagcacgggcgagacgaccttactgtgccgcgtcatcaggctgcga

SEQ ID NO: 271151 - DNA, 394 bp, Homo sapiens
  chr17:74269541-74269935
  hypo
gtgccttcaggccccggctgtctctgcagcagcccactcaagggagagaagcggagggcggcaaacagaaacctgcccagccggctgcaggggttcgcctccagccattggcactgcttccccggaatcccacgccaggggtcaggaaccaccctgagccagcagcaagagcgcagcaggcagctgccaccctcacccccagagtgctggacactgacagcacgggccccagcaccccaggctagaaggcaggtctagagccagaaggcagggcacccccaatctagctgaggccaggagagagctggtggggtgagcaccggcccagctggtcccggggccaggagtctccctgtccccagtgcagtgtccagccctccgaagccccggcgcc

SEQ ID NO: 271152 - DNA, 113 bp, Homo sapiens; identical to SEQ ID NO: 218057
  chr17:74275071-74275184
  hypo

SEQ ID NO: 271153 - DNA, 509 bp, Homo sapiens
  chr17:74303710-74304219
  hypo
ctggccgtccacacgcttgagctgcttgctcaggtcctccacctggccgcccaggtccttcacttggctctccagcgctgacgaaggcgcctggcccacgcccctgcgcttctcccggggcgcccccttgggcacctccttgggcgcgggcaggtgcgggatgctgaacgagctccggacggactgcagcgagcggctgggctcgggcgacgagggctggaagtcgatccgggtattttggaggtcgaggttcttgagcatggccacgatgagcgtgtgcagggccgtgaagttgacggcgcccacctctggcgtgccgatggagaggtccgccagctcccggagggagaccgtggtcgcgggcggcatcgtggctgtcaggagctgtgcgccgccgcggggcgccggccaaccacttcccgctcactgcacgccgcgccttggggcctttcgggggccctgcgaggtcctcggggcgcccctgccccgggtccggccgagtcactgga

SEQ ID NO: 271154 - DNA, 33 bp, Homo sapiens
  chr17:74333712-74333745
  hypo
ctgtcacccaggctggaaggcgagagtgcagta

SEQ ID NO: 271155 - DNA, 168 bp, Homo sapiens
  chr17:74364507-74364675
  hypo
tggagtcagcagaacgtgtcacccaggggagccgcttaggagaccgcctctcatcagcaggcctgagcagctgtcccttggccacaccaaatcagtagagccctggttctcagtcagtggcaagtgtgtcccgcaggggcatttggcaaggtccggagacatttttgg

SEQ ID NO: 271156 - DNA, 291 bp, Homo sapiens; identical to SEQ ID NO: 218058
  chr17:74387385-74387676
  hypo

SEQ ID NO: 271157 - DNA, 120 bp, Homo sapiens
  chr17:74388648-74388768
  hypo
cttgcctggaatcattgaaccctggctaagagaaatactcgaagtgagtttttatcttatcaggtgtttttcctcataaatcattactttaagactgtattccagctgggcgcggtggtt

SEQ ID NO: 271158 - DNA, 421 bp, Homo sapiens
  chr17:74390231-74390652
  hypo
tctcaacagcatcccgcttggctgctctcaggatcgcttggctgctctcaggatccctgctctttcttttcttactcccttccttccaggacagggccagaactggggcctcagactcagattcagagtctagcatagtgcttggctcgatgcacaggcccagtaagggactgcggagtcaacaaggtggcaggcaaacgggcttgcctgttccggaaggatgcactcagcgctgcctcagtaaacatgactcagagacactaggccccgtccacgaacagaggagtgggaaaatggaatgtggtgtggccacatgctgtcatcctattttgcaggtaaaaaggaagaaactagatcattatgaatcaacacaggttggtcttaagcaaattagagatgatgtgtacgacgacatattctg

SEQ ID NO: 271159 - DNA, 151 bp, Homo sapiens; identical to SEQ ID NO: 218061
  chr17:74391568-74391719
  hypo

SEQ ID NO: 271160 - DNA, 368 bp, Homo sapiens; identical to SEQ ID NO: 218062
  chr17:74392144-74392512
  hypo

SEQ ID NO: 271161 - DNA, 39 bp, Homo sapiens
  chr17:74397333-74397372
  hypo
gcccactcacacacacgccccacacgccctaaaacaagt

SEQ ID NO: 271162 - DNA, 118 bp, Homo sapiens; identical to SEQ ID NO: 218063
  chr17:74415734-74415852
  hypo

SEQ ID NO: 271163 - DNA, 34 bp, Homo sapiens; identical to SEQ ID NO: 218064
  chr17:74427555-74427589
  hypo

SEQ ID NO: 271164 - DNA, 156 bp, Homo sapiens; identical to SEQ ID NO: 218065
  chr17:74435187-74435343
  hypo

SEQ ID NO: 271165 - DNA, 132 bp, Homo sapiens
  chr17:74472949-74473081
  hypo
gctgctgatgctgcggcggtagctgcggttcagccagttgcccaccacgccgaggccgtagtgccgcttcttccgatcaaaggcaaagtgcttcaccttggaggcgatgcgcttgccgcgccggggcccggg

SEQ ID NO: 271166 - DNA, 76 bp, Homo sapiens; identical to SEQ ID NO: 218066
  chr17:74475341-74475417
  hypo

SEQ ID NO: 271167 - DNA, 150 bp, Homo sapiens
  chr17:74529368-74529518
  hypo
acacgggtgaggacacgtgaggcgacgggtctgaaaatacattgaattttctggagaagcactgtaatgagggacaaatgtgaaaaacccaatttggacttaaacaagcatctcagactttggaggttttacaattgcaataaaaaataa

SEQ ID NO: 271168 - DNA, 194 bp, Homo sapiens; identical to SEQ ID NO: 218067
  chr17:74531809-74532003
  hypo

SEQ ID NO: 271169 - DNA, 68 bp, Homo sapiens; identical to SEQ ID NO: 218068
  chr17:74533185-74533253
  hypo

SEQ ID NO: 271170 - DNA, 93 bp, Homo sapiens; identical to SEQ ID NO: 218069
  chr17:74551787-74551880
  hypo

SEQ ID NO: 271171 - DNA, 190 bp, Homo sapiens
  chr17:74571583-74571773
  hypo
aagagcagtggagccgccagagctgggaaaaggcaggggaggctttcttcgagccttcggagggagcgtggccctgccagcaccttgattctgggcttctgggctccagaactgtgacgattcaatttctgtggatcgaagccccccaggctgtgatcatttgttccagcagccacggggaaggaacaca

SEQ ID NO: 271172 - DNA, 180 bp, Homo sapiens
  chr17:74574205-74574385
  hypo
gggaggttgtatcgcgcaatggttctgagccaggttccagacaagaggctcaaactccaggactacctcttactacctaagcggggtacttaacttcttggtgcctcattttgctcatttgtaagggccacattctagggttgctgcgaggcttccgtgagagaacgcaggtaaagtccc

SEQ ID NO: 271173 - DNA, 34 bp, Homo sapiens; identical to SEQ ID NO: 218070
  chr17:74579152-74579186
  hypo

SEQ ID NO: 271174 - DNA, 285 bp, Homo sapiens; identical to SEQ ID NO: 218071
  chr17:74621443-74621728
  hypo

SEQ ID NO: 271175 - DNA, 149 bp, Homo sapiens
  chr17:74623752-74623901
  hypo
cgcagtttggaaggcgcggcctctgctacctcttccattctgttctcagggtctgcttaccctccccttcccattgtctgggctcattgtggtcctgagggttctgggaaatgggtgttctcggccatcgaggcaaatgcacctaggcc

SEQ ID NO: 271176 - DNA, 148 bp, Homo sapiens; identical to SEQ ID NO: 218073
  chr17:74625059-74625207
  hypo

SEQ ID NO: 271177 - DNA, 180 bp, Homo sapiens
  chr17:74629609-74629789
  hypo
aaaaatcaatcaatcaatttatcatgaacaagaatcgcacaataaaagaaacaggaaaatagttatctggcaacatcctccctctctgtatatatatattttctttttttttgagactgagtctctgttgtctaggctggtggcacgttcacagctcattgcagcctcgacctcccgggc

SEQ ID NO: 271178 - DNA, 41 bp, Homo sapiens
  chr17:74638682-74638723
  hypo
agaacctgcattactttcaacgtttaggaacagtgaaatga

SEQ ID NO: 271179 - DNA, 79 bp, Homo sapiens
  chr17:74640873-74640952
  hypo
ggtgtgagccaccgtgcctggccgattgcattcgtatccactgcttagtagcacctacgagaaatcattaactctacct

SEQ ID NO: 271180 - DNA, 40 bp, Homo sapiens
  chr17:74651097-74651137
  hypo
gattacaggcgtgagccgccgcgcccggcccaacagctgt

SEQ ID NO: 271181 - DNA, 250 bp, Homo sapiens; identical to SEQ ID NO: 218074
  chr17:74667047-74667297
  hypo

SEQ ID NO: 271182 - DNA, 253 bp, Homo sapiens; identical to SEQ ID NO: 218077
  chr17:74771040-74771293
  hypo

SEQ ID NO: 271183 - DNA, 87 bp, Homo sapiens; identical to SEQ ID NO: 218078
  chr17:74771572-74771659
  hypo

SEQ ID NO: 271184 - DNA, 189 bp, Homo sapiens
  chr17:74858668-74858857
  hypo
gtggcctctgcactcgaggtggctagtgtgtgagggccagttgtccccgcgcagtgccactgttgctgatttgtacgcggtgtcagtaaatgctgttatgacattattaatgctgcacactacggcaaaggacaatggcctattgcctcgtaatgtgctgtgtgctgctgcagtcggagcacattaaat

SEQ ID NO: 271185 - DNA, 332 bp, Homo sapiens
  chr17:74908613-74908945
  hypo
tgttgtagtttattcgcagatgttcacggcagatgtcctggccactgatggagcaacaaggctggacggatgagccggtcccgctctgctcctcgggtctcggtgtttcaattaactggctcactggagtgacgtttggggcaatgtgcaggatctacatctggctttgctgctgcaagatgcttccggggtgagggaggtggcacgagggagccgtgcgctctgtgatgagactgcagcaaggtgatgtcagccagtccccgcccgcgccccgccgtgtgcggagggaagaagccaaaccctagtgcctgcccagccgctgcatcctgaga

SEQ ID NO: 271186 - DNA, 59 bp, Homo sapiens
  chr17:74928819-74928878
  hypo
tggccgtggtgtacggcaaggaggcgagcatctggaaggtgagcgcggcccctgcgcgc

SEQ ID NO: 271187 - DNA, 136 bp, Homo sapiens
  chr17:75132759-75132895
  hypo
catttccaaggaagcgtcgttcggggagcaggtttgctcttcttcaccctttcctccgacttgctggctggagggggaagacacactgtggtaatggcaaagtagcaacacagaaggggcccgtgttaggccattc

SEQ ID NO: 271188 - DNA, 37 bp, Homo sapiens; identical to SEQ ID NO: 218082
  chr17:75196310-75196347
  hypo

SEQ ID NO: 271189 - DNA, 216 bp, Homo sapiens; identical to SEQ ID NO: 218083
  chr17:75196527-75196743
  hypo

SEQ ID NO: 271190 - DNA, 1480 bp, Homo sapiens
  chr17:75206843-75208323
  hypo
ttgttaggcactatcgctcttgtccatgtttcaagaacttggggtgcagtgtgtttcgtgtgaatcgggggcatctgtagacatccacatggtaaaaacctccgttctgctttgggtattaaataaagcacagatccgagatggcaacaaactgaaaggaaggctgaagcggaggcccccactgtgaatgcaggaaagaggttccgtcagcacagggggccgaggcctcaggatggagctgcctggggagccactttgctgaagagggggccgtgccacgtggtgccgcctgctgttcttagacaggacccttgtacctcactgaatctgctgtggaaggacattctgaagtggcgtttcagtggtgaggtggcagtggtgggattaaaggggcccggctcgtagagcagccacgcgctgaagggcacagcagacagcgtgcatgggctgagaggggccgtgggcctggctctgctgcttccttaggtggagttttcagtgactgcagaactctgcacagctgcttttcattctcacgtccgcccccgcccaatctttgaaactaactttgattattccctcctgggtagctctgtcggtgctgtgtaagtttggttttcaattggttctcagcacccagggggtgaccacctcaaccccatctctactatgccaggggctcatcccgctcacccagcctcgccactgttctctcgtgtgagcctcacacggcaggcccggttccatgcccctgcttcccccttgctgggaacgctgtcctcaggctcccctgcctgctctttctttagctttcaccttctccagggccttctgttctgtccagcccagggcagtcctctgaaccactcatgtacgagctcacagtgtttggtgtttctaagacctggcctcttagagtgtgtgtgaagatggtgtatgggagatcttggacctctaggtgcaggtcacaaagaacacagagcttggtgcatgacatgtagcaggatccagcggttgaatggatggtggtgtgtgactctggggaaagagatccgtccatacgcattcagcgtttccctccccagcttcagcacctgcaccctggatcccctggagagcacgatgcgctcgcagcatgccggcctggtgctcgtggatcgtggctgcctaacgctgcctctttttcagattctcattcagattgtggatgcctcgtcagtcatcacttgggatttcgacgtgtgcaaaggggacattgtgtttaacatctatcactccaagaggtcgccacaaccacccaaaaaggactccctgggagcccacagcatcacctctccgggtgggaacaatgtgcagctcatagacaaagtctggcagctgggccgcgactacagcatggtggagtcgcctctgatctgcaaagaaggagaaagcgtgcaggtaaaatcacacacaggtcaaatcgcgcatccgtgactcc

SEQ ID NO: 271191 - DNA, 349 bp, Homo sapiens; identical to SEQ ID NO: 218087
  chr17:75209343-75209692
  hypo

SEQ ID NO: 271192 - DNA, 723 bp, Homo sapiens; identical to SEQ ID NO: 218088
  chr17:75213327-75214050
  hypo

SEQ ID NO: 271193 - DNA, 35 bp, Homo sapiens
  chr17:75300269-75300304
  hypo
agcagtggcggcagcggctgcgctgagcctggcaa

SEQ ID NO: 271194 - DNA, 114 bp, Homo sapiens
  chr17:75303152-75303266
  hypo
gttaatcatccacccggagggagagcgccagtggccttgtgtgacctttgccctttgtctctgtctttaggaggcacgcggacctccagtggccggctccggaggcttggtgac

SEQ ID NO: 271195 - DNA, 59 bp, Homo sapiens
  chr17:75304442-75304501
  hypo
ggacaaggcgcctacgggggcaagggcatgtgcccatctggagccgccacctccatgct

SEQ ID NO: 271196 - DNA, 158 bp, Homo sapiens
  chr17:75306482-75306640
  hypo
tgcctgtgcccacaacgtgacggcgtggagacttatccgtgtagatccacgaagccttggttcacttattttggcagctagcgagtgttcctctgtgtggggaggcagagtttgcccgtcccgtggcccactggtgacatcgccgaaggtcttctctg

SEQ ID NO: 271197 - DNA, 201 bp, Homo sapiens
  chr17:75354844-75355045
  hypo
ctgccaggggctcagcgtataaagatgagacccctgccctgccagacaggtgggatgatggccataccttgagttagtcaaggcaccatctggctgtgtaacaaaagctaaaacatcagaggctgagcagcactcggacccacgtcccagtccaagtgtcagtcgttatgggggcccaggacagcccggacctagttcatt

SEQ ID NO: 271198 - DNA, 146 bp, Homo sapiens
  chr17:75373025-75373171
  hypo
ttatgttccatcaccgatgagttgcacagggattcagtccttccgctgttcaggccgggtccttcaggctcagggttcccaggaatggagagggtatcagtgtcttccatggactcaaacttcccgcatcccgcctttgctccccc

SEQ ID NO: 271199 - DNA, 387 bp, Homo sapiens
  chr17:75398244-75398631
  hypo
cagaaattccaggacctgggcgtgaagaactcagaaccctcggcccgccatgtggactccctaagccaacgctcccccaaggcgtccctgcggagggtggagctctcgggccccaaggcggccgagccggtgtcccggcgcactgagctgtccattgacatctcgtccaagcaggtggagaacgccggggccatcggcccgtcccggttcgggctcaagagggccgaggtgttgggccacaagacgccagaaccggcccctcggaggacggagatcaccatcgtcaaaccccaggagtcagcccaccggaggatggagccccctgcctccaaggtccccgaggtgcccactgcccctgccaccgacgcagcccccaagagggtggag

SEQ ID NO: 271200 - DNA, 215 bp, Homo sapiens
  chr17:75411741-75411956
  hypo
ctccagtgctgccctgtgcccggcaccgaagccgagggaaggcagcattagtatgagctcccagcccaccgggctcctgtctggagctgacgtgcgaccaaggcacacgagggaagcatggcgaggtggacggtgcggaggcataaggagcaaaataaggcagatgcagtggctcagtggctcctggtggctgcgaggagcgtgggcaggacagc

SEQ ID NO: 271201 - DNA, 479 bp, Homo sapiens
  chr17:75413667-75414146
  hypo
cacatagccaaacaaaagcacgtttctaactgaagctgttggagagttcctgaggactttataccagacaagggccggtaagtggaagttcaatacgcaggagccattccttttgttcacaaatgtttgccgtcttttctgtctatatccgcattcatgtgagggcactcataggtccaccgtccagccccatgctttgtttgctaccaaaaaatttcttaagaattcctcagctgcaaatcctcctaccggagggggggttccaggaacccagccttgctcggggttggggcacctcagcacctgctgcacaggcgttggtcattaaaggtcatgtgccgtatccgtgggccctcggggtctggtggcacctgggcacacagtccagtggcggcctcctacctgccagacactgggagtggggggctcctcattcctgttccctggcggtggggggagtgccccgagctgtcacacat

SEQ ID NO: 271202 - DNA, 166 bp, Homo sapiens
  chr17:75420113-75420279
  hypo
cattttagggacaacgcaaggaggctgtcattccacccctcaccttattaatatttcatgaatcataagtgaccacttactgcgtcctgacgtactccaggcgctgggctcgaagctttatgcgcttcatgggatgtatctgcactatcgccgtagaaaacggttc

SEQ ID NO: 271203 - DNA, 278 bp, Homo sapiens; identical to SEQ ID NO: 218093
  chr17:75434081-75434359
  hypo

SEQ ID NO: 271204 - DNA, 141 bp, Homo sapiens
  chr17:75445189-75445330
  hypo
tgctggaaaatgtaaggttgcgtctgtggcccatgtgccgtttctgctggagggttggaccgagggccagccgagaaggctctggggctgctctacctgaatgctgagtgtgtgctgagcggtagagaactttgagaagtg

SEQ ID NO: 271205 - DNA, 88 bp, Homo sapiens
  chr17:75452015-75452103
  hypo
gagcagcatttcctcggggatttgaacacgatctcccccggggcaggggactgccctggaagattcccggcaccgcttcccatgcgcc

SEQ ID NO: 271206 - DNA, 59 bp, Homo sapiens
  chr17:75452368-75452427
  hypo
gcagggacgccacacgaggagcaggtgtggtgtgcgtcctcctgcgggttctccacctc

SEQ ID NO: 271207 - DNA, 147 bp, Homo sapiens; identical to SEQ ID NO: 218094
  chr17:75452754-75452901
  hypo

SEQ ID NO: 271208 - DNA, 183 bp, Homo sapiens; identical to SEQ ID NO: 218095
  chr17:75473918-75474101
  hypo

SEQ ID NO: 271209 - DNA, 313 bp, Homo sapiens
  chr17:75476524-75476837
  hypo
gcatttcctgagttcggttcttgccccgcaagtggaagggcagttgaactgaagtctcccactgcccctcctggcctggaagcctgcctcccaccttctgggcagagtgaggagtgggcgtgggccgggagggctgcctcctgtctgggagggctgctcacttgcctgtcacgggggatgagccccctgcagcctcccgtgctgtggccctggctcccacgccggctccactcccctgtggctgcccctgctgggtgcccaccggtcccagggaaaagccactcccctcccggaggactggcgggaggggccc

SEQ ID NO: 271210 - DNA, 515 bp, Homo sapiens; identical to SEQ ID NO: 218096
  chr17:75476867-75477382
  hypo

SEQ ID NO: 271211 - DNA, 105 bp, Homo sapiens; identical to SEQ ID NO: 93616
  chr17:75478248-75478353
  hypo

SEQ ID NO: 271212 - DNA, 122 bp, Homo sapiens; identical to SEQ ID NO: 218097
  chr17:75490716-75490838
  hypo

SEQ ID NO: 271213 - DNA, 73 bp, Homo sapiens
  chr17:75502859-75502932
  hypo
ccgaggctctccccgctgcaccctctgccttctgctcccagcagggcgctgcagcatcgtccggttttaacag

SEQ ID NO: 271214 - DNA, 222 bp, Homo sapiens
  chr17:75522311-75522533
  hypo
tggctcgggcgggccggcagtgctgggggacccggcgcccccgacccccccagctgctggcccgggtgctaagaccctcactgcctggagccgctggcaatagccagcggatcagagtgtggggcccgccaagaaatcgccctggcccggggagccccctgggcagccccggttcccgcccgcgcctctccctccacaactctccctcaacacctccctctc

SEQ ID NO: 271215 - DNA, 401 bp, Homo sapiens
  chr17:75523091-75523492
  hypo
atggcggcctgaaccggagtccttcttcccctcctccctctccgctgctgcaatgcccaggccccccgcaacgttcctcgtctgtaatggtgccagaggctttaaatcttgcagaagccacatctgctgcctgcaggtaaacctccctggctgagcccactgcgcacgcctccacgttctggagccagaaacaatgagaagcacaattccggcagcatctctcctcccggtcatttgcatagcacaacctctccctccaccccctcctgtctcccacgtggatcttcatgtaattaattaatatcgcgttcatcagagcttaattcatgttcttgtaatatacaaggattaaaaaaaaatcctaccaagagagcagtaataggctccggcttttctggtct

SEQ ID NO: 271216 - DNA, 76 bp, Homo sapiens
  chr17:75544177-75544253
  hypo
tcttaagcttgcttaccggtgacttgttgacctcatcttggctcaaagaagacacggccccaggtgagtgcctgga

SEQ ID NO: 271217 - DNA, 37 bp, Homo sapiens
  chr17:75548378-75548415
  hypo
taccactagaatttgtaacatcgacgagtgcaaacct

SEQ ID NO: 271218 - DNA, 41 bp, Homo sapiens
  chr17:75586408-75586449
  hypo
ctctgtgggtttttcgctctgctgattgtttccttgttttt

SEQ ID NO: 271219 - DNA, 116 bp, Homo sapiens
  chr17:75599499-75599615
  hypo
cgttgacctcacatcgcagctgcccttccctggcttcatttattcaggagagatctatggactaccgccatgaggcacgctcactctctgttcagacctgacggcggatcccgagc

SEQ ID NO: 271220 - DNA, 31 bp, Homo sapiens
  chr17:75603635-75603666
  hypo
gctggcgcaccagccgcggagaggtgagctc

SEQ ID NO: 271221 - DNA, 206 bp, Homo sapiens
  chr17:75643461-75643667
  hypo
tggagatggccgtgcggatttccgtgtgtttagtgtactttcgtgcaagctggagatggccgtgcggatttccgtgtgtttagtgtactttcgtgcaagctggagatggccgtgcggatttccgtgtgtttagtgtactttcgtgcaagctggagatggccgtgcggatttctgtgtgtttagtgtactttcgtgcaagctggaga

SEQ ID NO: 271222 - DNA, 49 bp, Homo sapiens
  chr17:75733570-75733619
  hypo
gccacgccatgccacgccatgccatgccatgccacgccatgtgggggcc

SEQ ID NO: 271223 - DNA, 289 bp, Homo sapiens
  chr17:75733962-75734251
  hypo
acaatacagagaataaaagacgcggcccgtacgcagagctgaagtggctctctgttatttgcagatggaaattggaatctctacagcatgacagacacttgagcagaaattctaagcttttatgggttgccacaggtccctttcaggaggatggcgaaggctatagtcatgagccgtctaaggtggaggtcacgagcggcaggtggctcttaataagcacttgacataccacttctcccaactgagatgtgctgtacgcgtcaaatccgaactggattttgaggattca

SEQ ID NO: 271224 - DNA, 142 bp, Homo sapiens
  chr17:75797044-75797186
  hypo
catatggtctttcagtgaggcgcgtggagcggtgatttatgactgtcaccagcccagcgctgtctccgagacattcaaggaccgcgtgggctggacactcaccttcggtggcagggccaccgagtcacactccactctcagc

SEQ ID NO: 271225 - DNA, 34 bp, Homo sapiens
  chr17:75798045-75798079
  hypo
ccggtgtgcacacacgcacgcatgcacacacatg

SEQ ID NO: 271226 - DNA, 61 bp, Homo sapiens
  chr17:75828065-75828126
  hypo
ccgatgccagcacccgcctcctgcccccgcctcgttctcaggtcttcggacccaggctgag

SEQ ID NO: 271227 - DNA, 151 bp, Homo sapiens
  chr17:75840892-75841043
  hypo
cacagagccggccccggagcataggacacccaccagcccgccttccgtgaccgctggagcctgtgtcgctgctagtcccccctagctcaggcctgcctccccatgcttctccaaaggctctctctacttgtccactcgccatttgcttgtc

SEQ ID NO: 271228 - DNA, 133 bp, Homo sapiens
  chr17:75844070-75844203
  hypo
gttcggaagcatggcgctctctgaagtccgtggctgggatgtccatggctgtgacgaccttctgaaaaccatgtggtctctgtcccactttcagcctcacagtgcacgaatgcaagcccggagtaagcgcccc

SEQ ID NO: 271229 - DNA, 309 bp, Homo sapiens
  chr17:75848773-75849082
  hypo
ctgctgctggagcacgcagccctgcagtgaccccgtcgcatatgcttgaacaatattctagagcaccatgaaagactcaggagggtaaagcactagcgcatgtgccgactgagctcccggctggtggaggcagagaggcggcagggcagagccgcggcgtgggcaggagctggggtggaggggggccctgcaccgcgggcagcctggctcctgccctggtcacacagagggagtgcctcacctccgtgcccccaagcccagagtgctgctgccaaggcgaggcgaggaggagggcgccctgtggctgac

SEQ ID NO: 271230 - DNA, 182 bp, Homo sapiens
  chr17:75875369-75875551
  hypo
gagcttttatcttcacgcagacccagtagtacctgctggtggggagaggggtagggaaggggtgggggtcgcccacccaacccaggctcacccccaatcccatgtgaaactgcgcccacccgccatggctgcacccatgggtgtcaccagtgggacaacagtgcaggcgtggccttgctgta

SEQ ID NO: 271231 - DNA, 42 bp, Homo sapiens
  chr17:75896717-75896759
  hypo
gagctgtttcataaatcatcctccggtcgtggatatgaacac

SEQ ID NO: 271232 - DNA, 182 bp, Homo sapiens; identical to SEQ ID NO: 218099
  chr17:76034963-76035145
  hypo

SEQ ID NO: 271233 - DNA, 48 bp, Homo sapiens
  chr17:76046728-76046776
  hypo
aagcgccaagtggcccgggggtttggggggactcgataagctctactg

SEQ ID NO: 271234 - DNA, 42 bp, Homo sapiens
  chr17:76076532-76076574
  hypo
aaagaaagaaaggaaaaaaggtcaaatcgaattaaggaaaag

SEQ ID NO: 271235 - DNA, 68 bp, Homo sapiens
  chr17:76089069-76089137
  hypo
tcctatggccggtacgatttaatccagaacagtgagtcaccagccagtcctcccgtagctgttcccca

SEQ ID NO: 271236 - DNA, 188 bp, Homo sapiens
  chr17:76100941-76101129
  hypo
gcaccaggagagccgacccctcccgggacccctcccggctgggcggccccacagacccgctggaacccagcagcggccgcccttttgagtacctctgtccaggactgaagacgaaccttggccgcagtccttgcgaactgttcgcaaaacagtgcgggctgcggtgggtcagcgtcacatgctaatga

SEQ ID NO: 271237 - DNA, 53 bp, Homo sapiens
  chr17:76104281-76104334
  hypo
gtgggtcaattccttcgaaaagatgggacccgcacccccgccacaggctggcc

SEQ ID NO: 271238 - DNA, 62 bp, Homo sapiens
  chr17:76106967-76107029
  hypo
ctctgaagaaatacgggaggtcctcactggagggtctggggccacacggtgggtccggagac

SEQ ID NO: 271239 - DNA, 133 bp, Homo sapiens; identical to SEQ ID NO: 218101
  chr17:76114990-76115123
  hypo

SEQ ID NO: 271240 - DNA, 309 bp, Homo sapiens
  chr17:76118506-76118815
  hypo
actcagggcctgcccgtcactgcaagcagaagaccacgcctgcccagcgccccgagttcagctcacggacagctggccctccctctagaccatggttctggtcacatggtcctaagtggacccagggccaggcctgcagggagctgggcaggccagcttggtgctccggggccactcaccttcagccgggtgcgaatattgtcctgctggaggcgggaggcccgcttctgcgtcaccttgtagtcccaggagcagaagacggtgatggcgtggatgccagaggtgctgcccacccggtagctctccccg

SEQ ID NO: 271241 - DNA, 117 bp, Homo sapiens; identical to SEQ ID NO: 218102
  chr17:76121808-76121925
  hypo

SEQ ID NO: 271242 - DNA, 189 bp, Homo sapiens; identical to SEQ ID NO: 218103
  chr17:76129456-76129645
  hypo

SEQ ID NO: 271243 - DNA, 142 bp, Homo sapiens
  chr17:76132637-76132779
  hypo
tacatatgtgtggcacgtgtttatgacatgcaagcttgtgtcagtgggcttcaatgtccataggcggcggaggaaaggaggagctcgcctgcagtcaggatcctgaaaaggccacaggcttctccaccgcagggcttgctgc

SEQ ID NO: 271244 - DNA, 320 bp, Homo sapiens
  chr17:76137870-76138190
  hypo
ggcgggaatcctctccgtccagtcttctaacctagcagcctcacgtccacagagctgccttgtgaaactcagcagagccctggcttcctgcagagccgtgttctcccagcctgcttcatggctccctggttgagccaagcttgcggatccgtggggtgaaggtacccgcaccgcctgggccttagtggtatgtacgggcctgcatcgtgagcagcgggcgggggcccaggcaggtgaggcagctggccacaagggcagggcccggcccccctcccaaggctgtgtctgatattcttgagcctgttcgagtttccttttcc

SEQ ID NO: 271245 - DNA, 240 bp, Homo sapiens; identical to SEQ ID NO: 218104
  chr17:76145402-76145642
  hypo

SEQ ID NO: 271246 - DNA, 197 bp, Homo sapiens; identical to SEQ ID NO: 218105
  chr17:76152520-76152717
  hypo

SEQ ID NO: 271247 - DNA, 95 bp, Homo sapiens; identical to SEQ ID NO: 218106
  chr17:76153510-76153605
  hypo

SEQ ID NO: 271248 - DNA, 94 bp, Homo sapiens; identical to SEQ ID NO: 218107
  chr17:76153905-76153999
  hypo

SEQ ID NO: 271249 - DNA, 273 bp, Homo sapiens
  chr17:76166933-76167206
  hypo
gagggctacagcaatgcccacgagtctaagcagatgtactgcgtgttcaaccgcaacgaggatgcctgccgctatggcagtgccatcggggtgctggccttcctggcctcggccttcttcttggtggtcgacgcgtatttcccccagatcagcaacgccactgaccgcaagtacctggtcattggtgacctgctcttctcaggtatctgcctgtggcacctccatttgatcttgggggaggcattaactctagggttccgcagctgggagggt

SEQ ID NO: 271250 - DNA, 301 bp, Homo sapiens; identical to SEQ ID NO: 218108
  chr17:76167732-76168033
  hypo

SEQ ID NO: 271251 - DNA, 44 bp, Homo sapiens
  chr17:76173533-76173577
  hypo
attatgaacatgcaaatattcgaaaacctgaaatccgaaacact

SEQ ID NO: 271252 - DNA, 199 bp, Homo sapiens
  chr17:76175395-76175594
  hypo
ccagcctgggctcactttctcgccaggagtccctcaagcacggggcagcaacaacgacgtctccacgtacgcagaggcatgggggtgctcaggggcgcacctctgaaggtcagaaacggaatggccatacccaagcggggaggagatgccagctgccgggtggtcgggaacccagagcggacactggcagcctcaactc

SEQ ID NO: 271253 - DNA, 80 bp, Homo sapiens; identical to SEQ ID NO: 218109
  chr17:76176965-76177045
  hypo

SEQ ID NO: 271254 - DNA, 454 bp, Homo sapiens
  chr17:76187064-76187518
  hypo
gtactgtcccagccgatgggttgtccgactgggagcagaggaagccttgaggacctactcacagataggaattgaaggtactagtgtgacctctccgtggccgcattgggtgtccttaagcatgtggcagtgattcagaatgctgggggttgggggggctgtgctgcaccacctgggcctcgaggggcatttcccaaacaccaggcactttataaacctccctgctcaggggcaggtgcccaggaccccttgctgcagggactactggaggcaggagaggtccgggggaggtccacggctcagtcgaccatgcctggcctttcttgctcagccatccatacccaggcccgtaaggctgcgggctgtggttggcatagggaggtgaagtgaacagaggaacgttccccatccgctgctgaatgtggaatgcggtcactattcctaaaaagcaata

SEQ ID NO: 271255 - DNA, 40 bp, Homo sapiens
  chr17:76209678-76209718
  hypo
tggaaacccaggtcgtgcagtcaacgatgtactcgccggg

SEQ ID NO: 271256 - DNA, 500 bp, Homo sapiens
  chr17:76215739-76216239
  hypo
cagcttttctgcagcgtgccatagaccatctcttagccctcgtgggtcagagtctctgttgcatattgtcttttgttgtttttcacaaccttttagaaacataaaaagcattcttagcccgtgggctggacaaaaaaaggccatgacgggctgtatggatttggcccagcaggcccttgcttgccaagccctgttttagacaaggagcagcttgtgtgcctggaaccatcatgggcacaggggaggagcagagtggatgtggaggtgtgagctggaaaccaggtcccagagcgctgagaaagacagagggtttttgcccttgcaaatagagcaactgaaatctgacaccatccagttccagaaagccctgaagtgctggtggacgctgcggggtgctccgctctagggttacagggatgaagatgcagtctggtagggggagtccactcacctgttggaagatgtgattaagaaaagtagactttcagggccgggcatgg

SEQ ID NO: 271257 - DNA, 195 bp, Homo sapiens; identical to SEQ ID NO: 218111
  chr17:76232494-76232689
  hypo

SEQ ID NO: 271258 - DNA, 90 bp, Homo sapiens
  chr17:76275064-76275154
  hypo
ggccactctctaggggcatctgccaggtaggcagaccagaaacttaccccgagttctgtgacccgctccggggagcggggcatctcatgt

SEQ ID NO: 271259 - DNA, 166 bp, Homo sapiens
  chr17:76312372-76312538
  hypo
tgccgtctctgcctccctcccggctcggagcacaaggcctgcacgctgagggcgagtgcgtggtggagcaggagcttcggggcggtgtttctcacccagccatgtctcccctgcccagaaccgggcatcaaggggagtgaactgcgggctgttttgaatttgaggg

SEQ ID NO: 271260 - DNA, 691 bp, Homo sapiens
  chr17:76395086-76395777
  hypo
aaggtgggtagggtcgtcttcacccagagcagaaatgctgcgagtgggtggggtagtgccccaggagaaggttgggtgcagttaccaggagaagggtgaatgggtgctgtgtggcaagaagagcaggcgtctgccacgctgaggacttcaggcctgagacatggccagcatgcaggacagaggttggcctggaagtcctctggctaggagtagccccagctggtgtgactgattcaggtggacggcacaggtgaaggcgaggccacgtggaggtggctcctcattgggggcaggacgccttcctgttgtgagtcaggtgccgttttctctgtccgtgttcaggccggaagaactcccgcacaatgctgctcccactcctgcggaggttcccagagcaggtccgagtctccctctttcacacgccgcacctccgtgggctgcttcggctcctcatccctgagcgcttcaacgagaccatcggcctccagcacattaaggtgtacctcttcgacaacagcgtcatcttgagcgggtgagtgcttcccaccgtcagtgcttttgccctcctgctctgcaggctggagggcagtggaataggaacagtgggaaacccgttcccctcagtcttggagaacctgcttgtaggtctggctgctgtgcacccgcggcacctccccgacactgtctctgc

SEQ ID NO: 271261 - DNA, 38 bp, Homo sapiens
  chr17:76396177-76396215
  hypo
ctgcatgggccgggcgcagtggctcacgcctgtaatcc

SEQ ID NO: 271262 - DNA, 129 bp, Homo sapiens
  chr17:76396783-76396912
  hypo
ccaaccgccaggaccgctacgtgttcctgcaggactgtgcggagattgccgacttcttcacggagctggtggacgcggtgggggatgtgtccctgcagctgcagggggacgacacggtgcaggtggtgg

SEQ ID NO: 271263 - DNA, 139 bp, Homo sapiens; identical to SEQ ID NO: 218114
  chr17:76397569-76397708
  hypo

SEQ ID NO: 271264 - DNA, 589 bp, Homo sapiens
  chr17:76404589-76405178
  hypo
accttggtggggcgcgtggaggttgaaatcacactgggggccgagggctgctgcgcgtccctgagcgaatagattggcagaagggagtggggtgggggccttggatcccttggtgccgtgtctctggccttgctccctgtagttctgttgcgctgattcggtcgtgaaggaaggtgctgccaggccgcttcacctgcatcgccttggctttgggaggtggggctgagtgggcatctgggttggatctcaggcaggtggcagttcctctgattcatggttgtcagtttcctgttgcctggccctcgctcctcgcccagtaggtgtggtgggacaaggttctgggagctggggtagaatttggactcttaacgggaagtgcctcgtgctgccgcagacacatctggatgggtgctgagctttccttcccaagcctggtcctgatcgggggtggggtacaggcaggagcagcccggccttgtcagccgttgaaagtgtggtatctgctgggttgccagtaagctcgcttcgaggtcttgagaggcagtgcaggggaggctgagtatgaaccgtgtcaagccagttcttatgt

SEQ ID NO: 271265 - DNA, 541 bp, Homo sapiens
  chr17:76425213-76425754
  hypo
gttgggggggatctgaaagccgggggccagcaggacgtctccctccagcatctccgtccggatgtattcagccaggtaggtcctgcacagccgacggtcccagtcatctgtgatgtggccgccatacatgatttcaccaaaaaggtagcggagatcgtcccagggcacctgaggaaggatgacagcgggtaggggaaagtgcccctgtgccccttctctgccatgagagggtcaggctcaggcaggcagggcgtgggaacccagccattggtgctgtgtccttctcgccctccaggtcagcctcctggccatttaccttcagggtcaccaggccccagggccacctttctttccattccgcgccaccagacgccaatgtccggcccctttggcttctctcacaaggggctgtgtggcacctccctccaccttggacagcgcttccacagccggcatgctctgcacctcccgtggggcaggtgtttctgctgtgcctcactgtgcctcagaggccacagggctgaatcggaactcgctccct

SEQ ID NO: 271266 - DNA, 146 bp, Homo sapiens
  chr17:76430187-76430333
  hypo
gttccagccctgggcgccgaacttgcgcctctctgccaccacagcgtggaagtagcacagggcgaagagcatgcacttgaactccatctccttggtgcacatctccagggtgtcctgtggggcacacgctccggtcaggtattagg

SEQ ID NO: 271267 - DNA, 181 bp, Homo sapiens
  chr17:76441610-76441791
  hypo
cacaacgtgttcaacgtctaaagacgaaccttgatcccgccccagccttgatgctggaggaagtccactggtgagaccactccggccttaaaagggaaccgcaggaggaaatccagctccactgggttcagctccttcttcatggacaggacctgggggaacatcgaggtgtacacactta

SEQ ID NO: 271268 - DNA, 244 bp, Homo sapiens
  chr17:76455088-76455332
  hypo
cttgtttttgatccgggacagcttctcttgtgcctctgccagctctgcattagcctcctccagtgcctgcctcttgggcgccacgtcgcagtagacctcgtagaagcggacgatgttgatgcaccaggagcacaggccggcggcggccgtggacttggagcggatgaactcggggtcgaacgtcgggttgccttggtagggcctagcgagggaaccagagggccggagtcgtcaccctgtcctg

SEQ ID NO: 271269 - DNA, 41 bp, Homo sapiens; identical to SEQ ID NO: 218120
  chr17:76456117-76456158
  hypo

SEQ ID NO: 271270 - DNA, 193 bp, Homo sapiens
  chr17:76457712-76457905
  hypo
gatcagttggtctgcgctctcattcttctgcttgagctcagcctcctgaatcgccaacttggctttcaaatcatccacctggggaaggagaaaccgagaaacagcaagtgtgggccgcagccgacacacgccgccctgcactgggcagacgagggctgggagccacagaggggcagaacggcagggccgtgtc

SEQ ID NO: 271271 - DNA, 141 bp, Homo sapiens
  chr17:76459428-76459569
  hypo
tgcatacacacacacgtatatgtgcacattcacatacctgcatatatacgcgtgcacacgcattcacatacctgcatatatacacgtgcatacgcattcacatacctgtatatatacacgtgcatacgcattcacatacct

SEQ ID NO: 271272 - DNA, 272 bp, Homo sapiens
  chr17:76460803-76461075
  hypo
ccgatctgtccgcacgctgcatgtcctcagccttcctgaactggccctggagccttggctgcgccggggctgattggaaaccacccctccctggcacaggattgcaggacaatgaaacaaaaaaacccaacagcccaccttggtttacaattctgatgatttgttcatcatgaattttttagcgctaatttgattttcaaaaatattacattaaaacctcacttatcgctctccctctccctctccccacggtctccctctcatgctgagcc

SEQ ID NO: 271273 - DNA, 238 bp, Homo sapiens
  chr17:76464457-76464695
  hypo
cagataccaaaggacgactgtaaaacatttcttttggccccaagatacctctaacgacccacgtgaaaaagtctccaggctccggttcatcagacagccccacccctcacactctcctaacaggatttcacatcccatgaaggatcagtcctcctgctctatgcagagcaaaaacccataccctgtaggccacgggcaccaagctgggctcttgaggccctgccgaagacgggagccc

SEQ ID NO: 271274 - DNA, 203 bp, Homo sapiens
  chr17:76482432-76482635
  hypo
atcgtttggatcaccgtgatctccggcactggcgtgatcttcttgaacccaaagcgcaacttgtccaggcacgtgggcaggtacttgtcaaagaggatcatcaggttggccttctccgactgcaccttgcgcctctcgatccagctgctcaccaccctgggggtgacaggaggcgccgatgacacagccgctgctctgggtct

SEQ ID NO: 271275 - DNA, 172 bp, Homo sapiens
  chr17:76487505-76487677
  hypo
gagtccagggcccgcgaaccttgttgtcatccatgactgtgttgagagactcgatccacatggggtctatgtctccgtcaaggatgatccacttggggccgtcatgggtgatgttggccaggtctcgcatgatggtggagaacaggcctgggggaggcgcgtggtatgaccc

SEQ ID NO: 271276 - DNA, 252 bp, Homo sapiens
  chr17:76498806-76499058
  hypo
acgcagtgagcgatcgctggcgcctgctaacgcagacattcctgctgaaagcttagatggttttccaggggaccacagttaacagcggagcccatgaacgcaaagaaactcgccccttatctcagccacgaggcgccgccgagcccccacccgcctcagacctgggctgggtagtccaggatccactgctccctcggcttctcttcgtaggtcaccacggcctctgggatttcgtgccggagggtagagcac

SEQ ID NO: 271277 - DNA, 261 bp, Homo sapiens
  chr17:76501115-76501376
  hypo
cagggcttttctcccgtcctttcccctcccctttctccctaaggatacactggtgctatatgggtaaggctgggctggaaattctataaagaggcccatcccttaagtgttttctagagagggagaggagaggagcaggggcgggctggcagctgcacagggtgctggttctccggacatcgccatctgagggcgtgtggcccacacgcgtgctgcacccttgtcctgggttccctgtgtggtgtgcgcacacactcacct

SEQ ID NO: 271278 - DNA, 90 bp, Homo sapiens
  chr17:76503568-76503658
  hypo
gctgggagtcccccgggagctgggtgcggatgtcttcggagccgatgaagatgctctccaggtggctccaggttcgctggacctcaaacc

SEQ ID NO: 271279 - DNA, 576 bp, Homo sapiens
  chr17:76522592-76523168
  hypo
cacataagagcactcgtgcacggccccaaggtcagtccggcggagaccacgtttctggacttgaaaggataactacttgagaaaagaaagcagtggggttcccagacttaccccctgatctcacccttgagcaaaaataccttattcagggacttgtaggggttggggtcgctgaaggagaacggggcctcgcgcctgaacctctccctgaactcatgttgcttgagctgcgagagaagagtgcaaagtacagagagtcacggggcggccacctgccccaagggtggccccaccctgtatgccgcagggccctgggtgagccccacgctgctccccggaaatcccgccaccctgccccaggtataatacctcgaattgctggcatttccgccgcaggatgctgacctcgttggcctggagtggtgccacggtcagcttcacctgaatggccagtttcttggtatttgcccagtgctccggcagctcctgcgggaagcaaaggcagaggagggctcctttctcatttcttttcttaaaccttctattgtgaaataattagagactggtaagaagctg

SEQ ID NO: 271280 - DNA, 465 bp, Homo sapiens
  chr17:76526203-76526668
  hypo
ggtgctcggtacaccgggtttggagaagggataatgtttgctcgcagcccggtgacacctttctgctcacgcttggtggggtagttggccttgaagcccagcctccaccccctgctaccccagaggaggcacctgacaaatgccacccactcaagtggaaggccactccctggtgctctgcacattccttgggctccccgagtacatggctggggacccacctgttggtgacgtggttgctcaggtgccgcttgaacatgaagccccagcgccggattgtgctgagcagggcctgcttgaaggggcggcagtcgcactgcagccagccgtggaacaccttggtgttctcgcacttggacacctcctcatacagcttctcgtaggagtcgatctggaaaacacggccaccggcggcctgtcatagcctgcaagcctagggggggcgtcagcacagggcctcagtcc

SEQ ID NO: 271281 - DNA, 464 bp, Homo sapiens
  chr17:76533246-76533710
  hypo
gagattccgtctcaaaaaaaaaaaaagaaaaaaagaaaaggtaaacggcgaagccttgccgagttagggcggcaacaccaaatggggaaagcaatggatgaccctgtgtacggccagaagaggccaggactgaccttgtagttcatcctgtccttggccagccgagggatgagcctggctacgttgtagatgtcgttgaccaggccctcgatcagtgccaggaagccgcgatctgagcccacctccagggtcgggttgaaggtcagcccatcctcgtccagctccatgcggatctcaaacaggggagcgatactctcctgaaagaggggtggggttggcagtggtcaacacctctgtcctccatcggatgattctcagtgccctgatcatccactccgtaccatcaatgtgtcactgccttccacttatctgggaagcttctgagagctcgtgtctcagcgcac

SEQ ID NO: 271282 - DNA, 48 bp, Homo sapiens
  chr17:76556843-76556891
  hypo
atgaggttgctagcggcgtcccgcagaatcagcggctgccccaggtta

SEQ ID NO: 271283 - DNA, 138 bp, Homo sapiens
  chr17:76563675-76563813
  hypo
cctatgcagagtgccgtgtcccgaaggtgatccaagaagaaagcggctggaatgcttggatggacacacgtgtagaaaattctgcttcctcgccggtgtggctcatgccccctctccctgaagcgctccctgactatt

SEQ ID NO: 271284 - DNA, 64 bp, Homo sapiens
  chr17:76566020-76566084
  hypo
ggtggtttgatgtgcgattagagaagcccacaaagcactagatgggtctcggggtacggggact

SEQ ID NO: 271285 - DNA, 175 bp, Homo sapiens
  chr17:76617893-76618068
  hypo
cgcctgcgctgccccggctgatggcgctggattcctcgagccacacctgtcaaagcagggctgaacctaacggctgcccaggtctagtcccttctcaaacatgccacttccgtgtcctgaagcacaggtctgcggcggacctccccaggccaggatgccccgttgttggagtcac

SEQ ID NO: 271286 - DNA, 66 bp, Homo sapiens
  chr17:76618316-76618382
  hypo
tgtgttccgtggtccgtgccacccccaggctgcacctgcctagtgcagttccgaagctcctcctgg

SEQ ID NO: 271287 - DNA, 177 bp, Homo sapiens
  chr17:76618703-76618880
  hypo
ctgctgcaaagaggcgccgggaggagctgcagggaggcccccacaggaagggagagcacgggaggtgggtctcggcacccgtcggggcatggccccttcttcccctcactggggtgccacatgcccgcccggggtctgcaggaagcgaggggtactgtcctccgattagatggtcag

SEQ ID NO: 271288 - DNA, 214 bp, Homo sapiens
  chr17:76669915-76670129
  hypo
taaaaaagtgggggcggtgcaaagactaagttacttatcttttctgactctgctcttcttaacagaagacagaaccctcctcccactttcaaggtgttacaactgaactcaaggtgcagctggagtaacaccctcctgcacaagtgtccggtcagcacccctttcccacctcgagggccccgcctgagcccagagacaccgcgaacaacaaaga

SEQ ID NO: 271289 - DNA, 286 bp, Homo sapiens
  chr17:76670692-76670978
  hypo
aggagccgtggcgacgcggccctgtgaaaacccgcagctcctccacctgcctcctcagggctgcgccctgcaccgccctggtccagggtcctgtggaggggcggggcgagacggccagacagccagccacctgctctgcctggactggcatgctggccctggcggagtggcaggagctgccctgagagtccctgagagaacggcaggaaaatgctgcgtgtcacggctcccttcatactgtaatgaggaggggcagggccagctcacacagcgcctgcaggggaag

SEQ ID NO: 271290 - DNA, 241 bp, Homo sapiens
  chr17:76673414-76673655
  hypo
gcagagtgtcaggcgatgaggggggctgggctgcggtcggacaccaggccccaggcccggccctgcctggccctgcctgctgcttctcaactcccgcttcctcacatgcaagctggagatgccccacctccacctccctgggttccggagagtcaaaaagagatcccatattcaaagagcacatctcagcgcctagccgacacactcgatggcagccgctgttaccgctgacacgcagttc

SEQ ID NO: 271291 - DNA, 436 bp, Homo sapiens
  chr17:76677378-76677814
  hypo
cagtgacccgggcacggtcctcaagcagggagtgtgcgggcccctttccctcttccctttgcctggctctcccactcacctctgaagcctcagttctggggcaacaactccaggaagcctttcctagtttcaccctagcgccccgatgcctgggactgcagctgtgggtctgaccattaaccactcactgcctctgtccatcgccccaccgccagacagtacaatcctcagagacactgccatcctgacaactccacctggatttccaaaggcaccttgactcctgtccagaacagagctgcacccgccaactagtcccatctcatctacagagggcacggcaccgcagacacttccagcacacgcctgacggcagtttcacagtcccctgatatccagccaacccatggccaagtcctagcactgttaaagtctt

SEQ ID NO: 271292 - DNA, 197 bp, Homo sapiens
  chr17:76690199-76690396
  hypo
aaagaaaatgtccagcgtaggtcctggcagacaagtaaaaggaccactggactttcaggccagtttttagcaccctgcttggatgctgaaccctaggcgggcttacgtgactgatcattaattgccaagattccaaatgacacagatctaggttatgcgagggaatttgctgtaagcaagcacgtgccctccacctg

SEQ ID NO: 271293 - DNA, 188 bp, Homo sapiens; identical to SEQ ID NO: 218124
  chr17:76722780-76722968
  hypo

SEQ ID NO: 271294 - DNA, 44 bp, Homo sapiens; identical to SEQ ID NO: 218125
  chr17:76766753-76766797
  hypo

SEQ ID NO: 271295 - DNA, 62 bp, Homo sapiens
  chr17:76801793-76801855
  hypo
cttaacctgcatgacgctagcaggcaagacgtcccacaaaaaacgctcgggactccgagctc

SEQ ID NO: 271296 - DNA, 461 bp, Homo sapiens
  chr17:76818618-76819079
  hypo
acagcggagtcagacgtgggcttcggggtcaggagccctgccctcattcatgtcccccgcaccgctcactaactgggatctgaggcactctgagctctggggcctcttctcacccggacccggggctgcctggcgcctcccacgcctacgtatccatatggtagctactcacgctggaaggttctgaaacaatacaccacatccagtctctgctcctggttctacttgcaacccactgcatctggtcctgactcactgctctggaactgccttcctcagagtcgcctaaggcctccaggcatgaggccagctgggtctgcaggccctttactaggaggctgcgcagtgcgccggtgcacccactccctccagaagagcttcccctctccccaggctctccagccccgtctccccagctgcttccccgactcctcactggcacaaagcggggctgtttccag

SEQ ID NO: 271297 - DNA, 272 bp, Homo sapiens; identical to SEQ ID NO: 218127
  chr17:76851773-76852045
  hypo

SEQ ID NO: 271298 - DNA, 206 bp, Homo sapiens
  chr17:76857916-76858122
  hypo
tcaagtgatccactgcgcccagccaaaaaattgtatcttttcaatggtcctagttattgggctaacatgaacgtggctgtcatgtataaatgtgaagagaggaccgcctctggtctgattaagacttggttgggtgtacacaccgtgagcatctgcagcgatgttctacttatgtctgtctccgagaaaagcgaggcatgagtctg

SEQ ID NO: 271299 - DNA, 239 bp, Homo sapiens
  chr17:76897064-76897303
  hypo
aggcagtgggcaagcggcaacgctgtggtgcccaggacgccggcaggcacagcgccacgtccacgggcaccgcccgttcccaccctgcaggacgccacagcatcagacgagacggcccgtgtgaagcgccgagaacagagtctggcttccgggagggctcaggaaatgccgagagctcggcagagacacccacgtggtgctggattccacgcacgaggaaccgacgggcagacgtggag

SEQ ID NO: 271300 - DNA, 145 bp, Homo sapiens
  chr17:76933825-76933970
  hypo
agaatcagataagccggagttcgcctcctaccgccagctgggtgacctgagcatgcgtgcttcatgggctccacctctccttcattatttggaaaatgggatcgtgctagtacctgtctgaaggagctcacggaacagcgtggag

SEQ ID NO: 271301 - DNA, 39 bp, Homo sapiens
  chr17:76963990-76964029
  hypo
caaggctgatgggagcggacctggcgctcctgggccttc

SEQ ID NO: 271302 - DNA, 72 bp, Homo sapiens; identical to SEQ ID NO: 218129
  chr17:76977964-76978036
  hypo

SEQ ID NO: 271303 - DNA, 211 bp, Homo sapiens
  chr17:76987616-76987827
  hypo
tgaccacagcgctcgtgctcttggagcgccttgagatagtgggacaaggcggactggaggacgcagtttccagatgggatgccctggcgggcgactcccgtgcgcatgcccagcatcctgcgcaggcgctctcgtggccaggcctctgcaaacagtcagcacagaccgggagacagaaaactacactccctcagacgctttattgtttaca

SEQ ID NO: 271304 - DNA, 736 bp, Homo sapiens
  chr17:76990983-76991719
  hypo
agagcaagactatgtctaaaataaaaaacggttttggaggcaaatgcaggaggaagcaggttcccagcgactgggctgtggaagccacactgtgggctggggcaggcgtctcttacctggcggctggatgccggcagcagcccgcagggcgttgtagttggacacccagttctcgtggtccacgctgcccttgtagcccaccaccttcacccactccgggttctcgttcaccacatcacccgtagtggtcgtccactccttgcccaggccgcccacgtacagacgctcgtccttcactgccagccattcggccttgaagcctggccaagcagagtgtccttaggccccgcacccagctcccgccgcacccctgcacctggctcccacccggccccgcacctgtccttagaccccgcacctgactcccgcccggctccacacctgcctcccctccggcccgcacctggctcccgcccagggccggccggctgccctcccctcagctcctgaaggttcagtgaccactctcaagtctcctctgatccccaactccccgctcctcaagctgtaaccccaaccttaggattatccttaaaggctagaaaagctgaaaagtgacagcactctgaaggggcacgtgtgtcccaggggagtgcgggtgctgccctcggccacacctgaggtctcaccgagcatcactctaactccagtggccggagaggggcttggtgctggg

SEQ ID NO: 271305 - DNA, 1190 bp, Homo sapiens
  chr17:76992707-76993897
  hypo
tcctggtaggcacatcctagcgtggtcttgagaacctttgaaggtgtaaaaagggcgtgttcccagaggctccgagagcagcagcggatacagccgaaaacatcttggagagattccccacgtctcccacaggcctctagcgataagctcttcctcctagaaactgctcagtgtgaagtgacagtaggctatgctcctggctaagggtaagggggccgcaggtcagagcaagagggagacgtgctccctcaccacatccctggcttctaggtgtgtgaattctttaccatgtgcctgtgtttgccagccaggccctgagctcccactccccacccacacctccataaaacctcagggtccagttacctttctccacggtgccgtcgccgtcggacagaatcacccagggcacggctttgctgccttcgatctggtagacgacccccgtccggtcatccacggagtagagtttcccattgaaaacaatcaggtcggatagctccatgcctctccccttctccgccaggtgggactccaggaccccatggtctttgtcccattccacggccaccttgtccccactgtctgacagggtcaggtagccctttttcaggtaactgaaccaggtgttttcctcttgggcccttgactctgtgtccaggtctgcgataactgcgattcgataccgaatcccagccggtgtcctttgtgggggagacagggggtaggtgtcattgtaccagttggcgggcgcctggccgagcctccagttgtgtgcattgtgggtggggggcctgccgggggccgggcggtgggagcagagcagccagaggatggcagcacccacaaagaacgtcaggatcaccttccagcgggggcggaagcgggggtccgcggccttggtcatggacgccagcacaggaaggccccccacactgatccggagggagtgcatagactcattccattccgggtgctcagacagctgcacgggcatcagcgtgacagacaggcgggacctgcacagccagggagggaggagaggagtcagcgcctccgcaagcccagtcacatcttagttccggaagctgcaggcgctggaggctgacttttccagaagaaacagtatttcactactctgtggccattcttactcccttggcttaatgaattcccgactctagattccc

SEQ ID NO: 271306 - DNA, 152 bp, Homo sapiens; identical to SEQ ID NO: 93724
  chr17:76995121-76995273
  hypo

SEQ ID NO: 271307 - DNA, 1463 bp, Homo sapiens
  chr17:76996176-76997639
  hypo
cttacctgcatttctgacatgcgtcttagacatttcaagacacgagtcctgtgcagcttttccctcaagcctacttgctcctcgtctccccttgggaagggtagtggtgacgggtggccaccgtgtccacagtggtctggttcaagctctctcaggatcctgggagatgtgcttttctgtgtgaatatacacttcgataaaaacataaggcactgccaccacgaaaaacctgactggcctcatcctccgtcttccttcctcagcattgactccgtggacaggttctgtcctcttccatggcccttcctcaccatgccatgccggctgcctccctccacccctcctgcctctccgcccctgacactcccataccccccgccatgaagttgccctgccagctgccccccaccaacatcccctgacactccctcgccacctgccatgaagtagcatccatcagatggcacactcccagcttcagcggcttcctcaggtcctggggtgaacccactctgctcccgctcagccctcacactgtaccatctcctctgcctgccggctggctacatagacctccttctgtcccctgaccacactggccctggcagagcctgcagttccccctgcctggaacagtcgggcctgctcttcgcaccagcagctcggtctctcctacggggcatcagctccctgggaagacttgcccactcgccctccctcccatgccgctccggctctcccaccgtccctgcctggctaggtgattatttctgctcctggggcagggatctggccactgtcacagccccagcacctgacgcactgccaggcagggagcagacagtctgcacgcattggctgaagggaaagagatgccaggtgagccattagccacttcttcaacagcccctctgcactctaccgggggccccaccttaggcatattatgaacccacaacctggatcaagcaccccaaagatcgagctgctcagctgccacatctgagctgcaggcccgggaagacggtgcttgccagcacagaacaacggtgcctgcatagactgctgtcagacatcgtgaggtgtcgtcgtcaccagcccctggaacccccatgttcttccctgttcaactccctcagcactccggagagccactgtcctcaccttcaccattcctgtcaaatctccggcccacttctcccaggagaccactctgtggccaacttcagcagccgaggcccctgggtggggctcacacctgccactcaggtcagtccccccagccgccgggcacctgctcttctggttcctcccttccatccacaggctgccccaagtcgcccaccttgtcaccattttacctccagaccccacactcccacagacactcaactgctgctgaataaatggcgaatctgttaatgaaggaaaacccttccctgagtccccggcacctctgtccc

SEQ ID NO: 271308 - DNA, 156 bp, Homo sapiens
  chr17:76997943-76998099
  hypo
atacccacaggcaccgcaaaccaggtcctcctcaggaactccctgtcctggcagtgccggccctcaggagccatcccaggaagcaattcgtcctaaccctcctccctccccagccccacgtgtcccacccagcttgagactcgcttcccttctccc

SEQ ID NO: 271309 - DNA, 289 bp, Homo sapiens; identical to SEQ ID NO: 218138
  chr17:76998488-76998777
  hypo

SEQ ID NO: 271310 - DNA, 194 bp, Homo sapiens; identical to SEQ ID NO: 218139
  chr17:76998994-76999188
  hypo

SEQ ID NO: 271311 - DNA, 145 bp, Homo sapiens; identical to SEQ ID NO: 218140
  chr17:76999462-76999607
  hypo

SEQ ID NO: 271312 - DNA, 154 bp, Homo sapiens
  chr17:77002125-77002279
  hypo
tcctgcctccacagacagcacgctccttaaaggtcaagctcaggatctgactgacttctgcacctgtccccgcccctagtatccagcacacggcaggcagcaggcaccgtcctgtgggacagaagcctcacacgggccatggctccattctcat

SEQ ID NO: 271313 - DNA, 525 bp, Homo sapiens
  chr17:77002641-77003166
  hypo
gtctatggtgtgggcgcacagcttcagaaccctctacggtttgcagttactgccttgtaaagaggctgtgtctgcttaatttgtatcatcgatgttacacctggaggaattttagccaaaaggcgaccttctcagttgaaaggcacattccaaatggcaccacacatctgggaaggtgtccttttccagagtgtgtgaaaataacgggatgggatcatcgccccatggacctggatcagggctgccttccacaccgcggtggcacctgcacgagcccacctgcttactgccaccttctctcctcacgctttcctccaggctcggctcccgggacacaaaggccgaatcgccaggactttcactcaacccggcaacaccctcagagccattctggggggtcccagtctcacctctgccccactcccacatggtggcatcacgcactgtcttaagtcttaagccagacttcaacgccttcttcacttcccataaaaccatcccagaggaacgcggggagcagcgtcc

SEQ ID NO: 271314 - DNA, 60 bp, Homo sapiens; identical to SEQ ID NO: 218141
  chr17:77043872-77043932
  hypo

SEQ ID NO: 271315 - DNA, 237 bp, Homo sapiens
  chr17:77044161-77044398
  hypo
gagccctagctggccggccacctcctttcctctcgccaccttccacccctgcgctgtgctgaccccaccgcctcttccccgatccctggactccgactccctggctttggcattcagtgagacgccctgcacacacagaaagccaaagcgatcggtgctcccagatcccgcagcctctggagagagctgacggcagatgaaatcaccagggcggggcacccgcgagaaccctctggg

SEQ ID NO: 271316 - DNA, 104 bp, Homo sapiens
  chr17:77069647-77069751
  hypo
ggatccactgccctcgctcactgtaagcttcccaggactgaagccccaaagaggagccctctgccttctctgtcctccccatgggtcagcgtgtcctgcttctg

SEQ ID NO: 271317 - DNA, 151 bp, Homo sapiens; identical to SEQ ID NO: 218143
  chr17:77070099-77070250
  hypo

SEQ ID NO: 271318 - DNA, 405 bp, Homo sapiens
  chr17:77073674-77074079
  hypo
ttgttaaaatgtttcgattaatcctataatagtttccattaattgctcaatgtttctgtcctcggaccagttagatattatgacaaggacaccaccaaaccaatcagcttttacttgtcttcgctggaggagctcttggcgtggaagccccgcttggaggatggctttaatgtggccctggagcccctggcgtgtcgccagccccctctgagcagccagaggccccggactttgttgtgtcatgacatgatgggcgggtacctggatgacaggtgaggacctggccttacattgatgttgcttacattgttctcctttgctggggtgggggctggaggggcgggagagagtgccatgtgtagaaagagcactgggcggggagtcaggagacgggcattggaggga

SEQ ID NO: 271319 - DNA, 404 bp, Homo sapiens
  chr17:77074636-77075040
  hypo
atcctgttctgggtcgctgggctctggctttcatgcacagagatgttacatgccccacccaccccaggtgcagacgtcccatccaaagttgccgtggagtccgcgcggcgcttttaaatgtccataaaacaatcttggaccctgtgattgatgggaaggcttgagtcagagccaaccatcaaggtagagatagaagcaggtggtgaaaccttgggcgcagctcacagggctttcaaccccgaccttcgagttccgggagactctgttctgagggactgcctacccctccaaatagagtgggaagccagagacgggactttgacacgagacttcctgcttcccctcctttctctcccttgttcattggctcacagggggtagcagtgctcggtccattagatgca

SEQ ID NO: 271320 - DNA, 383 bp, Homo sapiens
  chr17:77076344-77076727
  hypo
ggggatgagcgctcgtaccaggcagtggctgaccggctggtccagatcactcagttttttcgttttgatggctggctgatcaacatcgagaactcgctgagtgtgagtgcccagccctcacccacctccccgccccttgctgtgttgccgcccacctccacctctttcctgccttggcctcacctcgccccacgcctgggctgcaggttgcagcagtaagagccacttctcgcctcccaggcagtgccaactctgaaatcttagttacacgcagtgagacagaatctcctccgactgtttccagcaagcgtgcttggccggctcccacgtttcccgcccctgcctgtgagcacacctttccttttccgcgctctgctctgggc

SEQ ID NO: 271321 - DNA, 218 bp, Homo sapiens
  chr17:77084524-77084742
  hypo
ctagtagagcgtggcgtgtggcagaatcgcaccgccccggctccccagcccaccgccatgcagggctcgcgtgcgggaaaactaatatgccggcgtttaagcctgtgcccctctgctgggtgtaactgcgctgaaataaatgatctgacaatgtgaagcgtgcagtcgagtcctggtgtgatggggcgcgggcagcaccagcccggccctggatgctg

SEQ ID NO: 271322 - DNA, 60 bp, Homo sapiens
  chr17:77086021-77086081
  hypo
cgcgatgcagccgggcgctggcccgtccctggccctgggcgcccacggtggactgggctc

SEQ ID NO: 271323 - DNA, 56 bp, Homo sapiens
  chr17:77105065-77105121
  hypo
cacagcgtgggaaccgctgtcccgatgctcacctgggcatgcgctgcaggacctgt

SEQ ID NO: 271324 - DNA, 304 bp, Homo sapiens; identical to SEQ ID NO: 218147
  chr17:77113252-77113556
  hypo

SEQ ID NO: 271325 - DNA, 46 bp, Homo sapiens
  chr17:77121065-77121111
  hypo
tcctccgggcctggcgtggtgatggctctgtcgtcgccagttctgg

SEQ ID NO: 271326 - DNA, 681 bp, Homo sapiens
  chr17:77126790-77127471
  hypo
ggtctcacagagcccgataccgagcagtcttctgacacagtccctggaacgagtggagtgccctgtccttcagcccgggcttggtgcgggatggggcctgccatgctctaagctctggcctccctgcctggaggcgggacctggcccaagcctcaaagccgaagcacaaattcctcatcagtgaagatccagagccgccgtggtgctaggacacggtgcgcgggaatcagccccgcacctgcaaggcagcgtgctctgcgtgccctgcgtgtgccccatgtgtactgtgtgccccgtgtgtgagcatgtgtgccccatgtgtgctgtgcccccatgtacttgtgtgtaccgtgagccatgtgctgcgtgtcccgtgtgtgctgtgtgccccgtgtgtgcacatgtgcgccccgtgtgtgctgtgtgacccgtgtgcttgtgtgtaccgtgtgtgagccatgtgctgcgtgtgctgtatgctgtgtgctccgtgtgttctgtgcactgtgtgtgccctgcgtgtactgtgtgctctgtgcccatgtgtgctccgctcagtctccatgtgccctccgtgtgtattccatgtgccctccgtgtgctgtgctctgtgcacgctgggaacagcgctagagcgtctgtgcttctggacaggaaaacaagcccctcgtctaccttcac

SEQ ID NO: 271327 - DNA, 215 bp, Homo sapiens; identical to SEQ ID NO: 218150
  chr17:77127501-77127716
  hypo

SEQ ID NO: 271328 - DNA, 272 bp, Homo sapiens
  chr17:77141618-77141890
  hypo
caggccagcccagtcggctctgagagggggccccgccccaccgccctggccttccttctgggggcgcagaggcctgctgagcactggccccgcatgtggtggcagcagggaggaaatggggcattcgccgctctgtggttgtgttttttctgccaccaccacaggcaaggcgttcggcaaagtgagtgcatagttcccactcagcacctggacccactgacacgtggatccatgcggcccacacgggggctctcagccgggcgacggtgccc

SEQ ID NO: 271329 - DNA, 51 bp, Homo sapiens
  chr17:77194211-77194262
  hypo
tgctacggttgcatcgtgtggggtgggctgtcatcccggaagtgctacggt

SEQ ID NO: 271330 - DNA, 222 bp, Homo sapiens
  chr17:77200393-77200615
  hypo
cgggtacacaccagcgggtgccggggagcagggggcgtaggtggggttggggcagaatgtaagtctgaacagaggagagattactgacgtgaaagtaacttctcatgactcagggcttaatatcctggaaaggacacgcgtaccagtccagtgaacagctccttgaagcgcacacataccgacagcattcagtcaacgaggtcgacgcgctggaactacttt

SEQ ID NO: 271331 - DNA, 85 bp, Homo sapiens
  chr17:77206526-77206611
  hypo
tcaggtctcacggccgcacaatatcccatcgagtgcccgccgcatacttcacgtaactatccctttacggcggacaggtaagatg

SEQ ID NO: 271332 - DNA, 213 bp, Homo sapiens
  chr17:77224254-77224467
  hypo
agacctcactatctcgcctctcctccctggcgctatccgtgggctctccgtgttccctccggcctgtgccttggcaaagctgtccgctccggagcgggcggggtggccatgaagcctgagagagaggtgtgtgtcctgctctctgcaccgtgacgcctcccgctccctgaaaaccagggagaaattactctgcccaagcggaacacgcccgga

SEQ ID NO: 271333 - DNA, 69 bp, Homo sapiens
  chr17:77283969-77284038
  hypo
ggattgtcacattgcggcacgtcgcagacagtgagtgcggctgtgcatgggacgcgctctgccagttaa

SEQ ID NO: 271334 - DNA, 116 bp, Homo sapiens
  chr17:77294569-77294685
  hypo
gaccaagggtgcagcggtcaacaagccaacgcttcacttgatggagagggtcaggaagattctgcggccaccaggtcgccaagtccatgcttggtggaacacggcacaccaggaga

SEQ ID NO: 271335 - DNA, 60 bp, Homo sapiens
  chr17:77333541-77333601
  hypo
cccattcacaaatcggatcaagaaaatgcagttgcgccgggcacggtggctcacgcctgt

SEQ ID NO: 271336 - DNA, 92 bp, Homo sapiens
  chr17:77345898-77345990
  hypo
gaggtaggcacagccgtgatcaccaggacggaatgggttccctgagccccccggggcaggcacggccatgatcaccaggacagaatgggttc

SEQ ID NO: 271337 - DNA, 70 bp, Homo sapiens
  chr17:77346020-77346090
  hypo
cagttgggtgccctctgctccaggaggagaggctccagaaaatcacagtccacatcgtccatgccaccaa

SEQ ID NO: 271338 - DNA, 31 bp, Homo sapiens
  chr17:77385164-77385195
  hypo
gacgaagcggtgggcgcgggggggcggtgtg

SEQ ID NO: 271339 - DNA, 37 bp, Homo sapiens
  chr17:77395380-77395417
  hypo
acaaatgaggaaaccgaggcaccgggaggcaaaggtg

SEQ ID NO: 271340 - DNA, 194 bp, Homo sapiens; identical to SEQ ID NO: 218151
  chr17:77769051-77769245
  hypo

SEQ ID NO: 271341 - DNA, 622 bp, Homo sapiens
  chr17:77807459-77808081
  hypo
ctagaactctgaggccgggcgcagagctgccctgtccgttccgggggtccatctccagcggggaagggcaggagagggcgagccccgccggcaccgcgtggaaggggcctccgcccaggtctgacagccgccgcagggggaacatggttacctccgctccgggcgtcctcaccctgggggccagcctgggtctctcgcggttggcgggttggcgagaggggagcccgccccgaggccccaggtgctcagctccccgcccccccgcgggaatggcgcttccccttccgacgccctccggctacaccgtcacgtactccttgaaagtaacggtgaggcagttcgcggtgacgtcggtgataattatattcccaaagaagggcttgaactcgctcagcgactctgcaggttcgtcctgggcctcggctggaggcttctccgccgtcgtggtgggtgccgctgccgccgccaccgccaccgccgccgacgccggtgtctcgggcttcacctggagggagctgggcggctccccggcctcgctgcgcgtcttgacgcagcgcaagtctatgggttcatccaggtctgagtctagcaggatgacctcgggctgcgggagggcggcggc

SEQ ID NO: 271342 - DNA, 505 bp, Homo sapiens
  chr17:77808375-77808880
  hypo
aaaggcctccttggtcggggacagcttgcgggagccggcatcctggggctgcggatcgctaaccccggacacctcctcctccctcctcttgggcggcgcctccaccttcttctcctctgcgcccgccgcctttttaaaagtcctgtcggcaggagggtggcgctcgtcggctgcccgcttcttgtggctgggggagcgagcctccccctctgccacctcgccggacttgatcttcaccgcctgcatgccgttctccatgtatttgctcatcacgatcacgatgcgtccgttcttgttcttgttcttgactatcttcatcttgcccccaatcccgttgcccgtcacagcctctttgggggccggcatcattccgttgggggggcccttctcggagcctttgcctggagcacccgccgcaccggccaggggcttcaccgcccccaggtagcctttggcccccgcaccttgcgcccacttgtcgggcgggtggctcttggcccccagg

SEQ ID NO: 271343 - DNA, 211 bp, Homo sapiens; identical to SEQ ID NO: 218156
  chr17:77824717-77824928
  hypo

SEQ ID NO: 271344 - DNA, 621 bp, Homo sapiens
  chr17:77825382-77826003
  hypo
tgcaagcgtcggggcgtgtccacacccttgtccgacgtgtccctggcatctggcacagtgcccagcacgtacctgtcagatgaatgttgaattaataggatttgtgtgaggaccgagtgagctcacacagccagatgaagctggtccacccgtacgggctggcaagagccgttggccacattctcagacattttgtgaacccgttgttgaacccagccatgattacaaattaaatgattggcatttacaattaaattatgtaaagaacaacaataataaatgctcactactgactccttcctagtgatttcctcagattcacatgttcccgggttctttgtgtcccctgtgtgtggtggaaaacgccacgcaggggcagctgctgctgcacatctcggcccaattctgccttcagcgctgtcctaatggtagcttgaagccagctatggctggagcttttactcaacagaaattggtaaacacgacaaatcgtgacttgattttttcttttgttgattgtctatactttagaaagtgatagaaaaaaaaaaaagaaagtgatgaaaaagtgttaatcatgcagattaaacttaaaagtgtgtcctgttggctgggcacgat

SEQ ID NO: 271345 - DNA, 127 bp, Homo sapiens
  chr17:77899566-77899693
  hypo
cagctctggtcccccggccccaggtcctggacgctggctccgcgcagcagcaggcggcctccggaggacacgatgtgactggctgccgctacgtcgcactcagatgagtctgcgccggatcgacctg

SEQ ID NO: 271346 - DNA, 63 bp, Homo sapiens
  chr17:77900547-77900610
  hypo
cccttgcccgggcagggatacggcggcacagagatgggggccgatggctaggacctgaactcc

SEQ ID NO: 271347 - DNA, 193 bp, Homo sapiens; identical to SEQ ID NO: 218157
  chr17:77912319-77912512
  hypo

SEQ ID NO: 271348 - DNA, 153 bp, Homo sapiens; identical to SEQ ID NO: 218158
  chr17:77913051-77913204
  hypo

SEQ ID NO: 271349 - DNA, 142 bp, Homo sapiens
  chr17:77913691-77913833
  hypo
ggtcagctaatacactaccacgtccctgggacaaagcagatcattgtcagaggatcttgcaaacacaaacacgcacgcacgtgtgcatgcatgcatgcacgcagggacacacgcacacatcgacccattcaagccccagctg

SEQ ID NO: 271350 - DNA, 760 bp, Homo sapiens
  chr17:77914403-77915163
  hypo
aggtgcggtggctgcgcgttccactgcagcgtttcaggagctgactttcctctgggtggctgtagatctgacttctgtcacttccagactctaattttgtcattaatatgaaaaggttcctctcatgttgcccaaaagcattttccttaggtttctaccgtcccctgtccccttcacgcccagccccaccccctcccgtgcccagggcctctgaggaggtcccctcaacccctgtccggtgtcgggggcccgacctatctgcggaagccgaagccgtcctgcggcgtctttgggcccttcttgccttccctcagggacttgggggaaggcatctccaccgtgcccccgtagggacagctctccgagccgggatggtggccggtgcactccaccgcgggcatggagccgctgtcccacatgcctgacccgcacagcttacacagatcgtgcaggctgcaggggatccggggcaggaggcggaactggtacagcaaactcctcgcctgcagacagaggacggggggtgaggaggggccgggggacagcctggcagcctagggtccccatgggagtggccaaagacagcaacagcagcaacaacggcctgcacctcgggggctcaccgagtcctggactgagggctctgcctgcatctcccaccatcaccggcaccacggggccctgggtcttaggtggctgcagtgatgggacccacaaggcactcgggctgtgctcacaggtggctcgaggtgaacaaggc

SEQ ID NO: 271351 - DNA, 188 bp, Homo sapiens; identical to SEQ ID NO: 218160
  chr17:77917679-77917867
  hypo

SEQ ID NO: 271352 - DNA, 1159 bp, Homo sapiens
  chr17:77918540-77919699
  hypo
gtctgaagccagccacgtgggacgggaaggcagtcgccgtatggggggctaatgtgtggctgtgggtggggggcggcgaggcggacaggggcagcaggcagggtggccacggtggttcaggggccatggtcccaacctccccagccctggcccctgccctggtcacctggtagtgggcccagcaggcctcccagatccgcagcgcttcggcctcggggaactcccgcttgaagcacagaaggagccagcggtggcagaagagcatctgcaggccgtcctcgcccagcgagaccaggtgctggtagaagcgcacgtgcgtcagccgcagcagctcgcgcaggtacagctgggggtgaggccgtcacgcgttagttagctccggtcccatgcggcctgctgcccaggaagcccactcccactggggcccttccctgggccaccccagcctggaaaagcacacccaggggcctctacctgctgcatgtgcctgcccccccaacgctccattccgccgctggaatcggctcacacctgcctctgccagttcctcccagatctgactgttccggaggctgtggtgtggtccagggtgaggcagagtgttgtgcccgggcgtggcaggacgctggcagccgctccatggccaggaaggctccccaccctcagtgcacacttgggggctgtttcccacgtccactcctcctggtgaggtgagtggatcatccagggagcccccccacccctcttcggctacgctcacccagatctatcatcttccagagctgttttagggcaggaaggggacgtatctgagccccaggatgctcgattcctgccattaaggtcatctcccaatgatgtgggacaagatcggggctatttctggcagcactcgggcccaggccgctgacttcatcaatgccgctggaaaatcaatctccagcattcagtgagtcacccagccatgcgctgccatgagccgtcagaggcgaatggcgttggacactgtaactgcctccccaagcaatgtggacacccgacgtcacacacacccgttgatgcagagtgagcaggcttggctgggttcagccccccggcccaggtggagttagatcacagctggggggatcctggggcagagctcggggccacatgcccc

SEQ ID NO: 271353 - DNA, 697 bp, Homo sapiens; identical to SEQ ID NO: 218162
  chr17:77921127-77921824
  hypo

SEQ ID NO: 271354 - DNA, 391 bp, Homo sapiens
  chr17:77923299-77923690
  hypo
gagctaacgagccccgcagctccgaggcccgagtgcttggtttaatgactgcacttatcccaccctatcactcacgttcctgggagacccatttttgaaagaaactatgggtcacgaaacatattatcaatgctgaattgcacctcaaattgccttttcaaatgacattttcctccgcggctcggcggggtgggccgggctggccccggcggttaccttttctgctggatctcagagtactcctttcgcttctgcagccgcagcgcctcccgctcctccgacgtggactcgtggctgtaatagcgcagcaggaagggccagacctccccgcggattgacacatcaataccgccaaagaaaatggcctggaggaagcggcaaaagttgggga

SEQ ID NO: 271355 - DNA, 493 bp, Homo sapiens
  chr17:77923950-77924443
  hypo
cccttctatgcaggctgacacggtatccccccaaaccctcgagggaggtgttgtgttttgtttttttttttcaacgcagcagctttgattgctttatcggtgtgttcacagagagcctcacacaagaaaacggggccctcacgaggaggtggcccgtgggtgcgggcgggcggccaggccccggccctccttccctctcgctcgttcccggttcccggccggctctccgcggggccagctgggcggacccggacctcaccttccgcagcttgtactcctcctccacctggcccagctcattcaggtggttgagccaggcggagacgccgagcctcttgtacatgctctcctcggggtgcgtctcggaggacggcagcttggggcggcggatggagaactgcatgcatgtcttatcgggggcgacctgctggacgggaggaaaactgggcaaaggtcaggatctcagccgcgcggcttcagaggccagcagtgc

SEQ ID NO: 271356 - DNA, 346 bp, Homo sapiens
  chr17:77926415-77926761
  hypo
acaggccaactcccaggaggcgcccagagatgcttcctacctgaagaaaaggcggagggagcgcatgtggcccaggtccacgcggaacacgccgcaaatctgctccagggcgcacacccgctgcggctcgtcccagcgtggggtctgcaggaggccgttgctgtccgggaaccgcaggccggcgtcggagctggacggggggctggtggaacaggttatgtgatgatcgccacacttctccctgcccacactacccagagggggacgggggtcatgggggagtcatttaaacctacgcaccaagcttaaacacacatacaggcacggctgaatatgccctgtaaac

SEQ ID NO: 271357 - DNA, 189 bp, Homo sapiens
  chr17:77928336-77928525
  hypo
tgccgtggctgcgccgcggacgggcccagaagaccgagggctcctgacatcttcccaagtggaccctgcgggagctgcgcttcagaatcgttgctcacaacacagggcaggtctcgagtctgaggccccaccgcacccatgggtgcccccttctgtcatctgctcattgaaccgcggggctgctgtgac

SEQ ID NO: 271358 - DNA, 467 bp, Homo sapiens
  chr17:77928737-77929204
  hypo
tcgctttggcagtcacggatggagggccccctccctgctgccgtggccacagaagactggtcccctggagggccggagccgatttcaaaccaggcaagagtccaggacacaggggccaccacacacctcccccagcaacgtgcctccaggcaggagttggcttaaaccctctcgcaaccccttaggggcaaattatttgcattaattaatggattgattcattaattcaagatactgtgcttgggacctacagctggggttccataagctcaaactagagcgaaggtgatggagacctcagttcgctttcattggggtacgtctggcaggtaccccaggccctgtgtggtcatggaggacgaggtctggtgcccctcgaggccggctgctgtggggtgggggttgcatcgtgtctcttcatcttcagctcccagccctggcttggcgcagaacacacagacatttaa

SEQ ID NO: 271359 - DNA, 87 bp, Homo sapiens; identical to SEQ ID NO: 218166
  chr17:77930345-77930432
  hypo

SEQ ID NO: 271360 - DNA, 92 bp, Homo sapiens
  chr17:77937609-77937701
  hypo
ttgcatttccccgatgattaatgatattgagtaccttcatgtgcttatcgggcattcgtgtctcttctttggagacacgtcttttcaaatcc

SEQ ID NO: 271361 - DNA, 83 bp, Homo sapiens; identical to SEQ ID NO: 218167
  chr17:77946278-77946361
  hypo

SEQ ID NO: 271362 - DNA, 253 bp, Homo sapiens
  chr17:77948844-77949097
  hypo
ccgtcacctcctcgccatgccgtccccactgccagtgggcgcaacgttacttgcaaggccacaaacacccggaacaatccgccaggccgcgtcactcctcaccctccagcagggctttggatttttggacagcgagttctgtttcattttgttttgtttttccctttgcatttggtgaactccgtgtcaggaaagctagtctttgggattcaaggaagaacaaaacaaacccgatctcctgtaatctacctgg

SEQ ID NO: 271363 - DNA, 33 bp, Homo sapiens; identical to SEQ ID NO: 218168
  chr17:77951521-77951554
  hypo

SEQ ID NO: 271364 - DNA, 281 bp, Homo sapiens
  chr17:77953037-77953318
  hypo
gagcacacacgctccggggatgcacacccacgcccagagcacacgcgctccggggacgcacacccacgcccagagcacacacgctccagggatgcacacccacgccctggaccccagcagagggatcaagggctcaggcatccccagtgccgccaatcacgtggccctctcgaggtgaagctgcgacactgtgtggaaacccaggggagatgggagaggcctgaagcgggaggcgggaggaccgcatagctgcaaatgcatctgggcgtgaagacgtccct

SEQ ID NO: 271365 - DNA, 400 bp, Homo sapiens
  chr17:77953787-77954187
  hypo
acggctgtgggcaccggtgcctccccagaccctctgggcagcccatccttgcacctggaggagcagctcaccgtgccgtggagggtggccgcgaggttcatctgggcctccgagcctcccagcgcatcccactgctctgcagaaacagaataatcaccacccaggctggtggcttcccaacttttccgtgacgttcccctaggcaatttaaaaatggagtgaatactgataataatttgactaaatttaggtgttccccttaggcatctgattaaatttcatgaactctttttcaggcttgcagcccaaattccccttctctcttggcttcacggcacgggcttcttgaccaccatgtagggtcagcaaattccgcctaacaagccggagctttccttcc

SEQ ID NO: 271366 - DNA, 61 bp, Homo sapiens
  chr17:77954476-77954537
  hypo
cacatggcttggtcccgcctttcagccccccagggttcactcgaaccgcctccgcgcaccc

SEQ ID NO: 271367 - DNA, 269 bp, Homo sapiens
  chr17:77955471-77955740
  hypo
caaagaagcacctcccacaccggaggcaagggacgcgccaccctcggagcggctccctcggctcttctgtaatctcagcaagaacgtgctcactgcacataacgctgaacctgccacgggcacgaagcagacccacatccgtccctgcagcagcagcctcggcccaacctcaatcccactcctccaagggcgcgccagggaacagcaggacgcggccctccggggcttccctgtgcgcacacacacacgcacacacacacacatgcaca

SEQ ID NO: 271368 - DNA, 100 bp, Homo sapiens
  chr17:77956294-77956394
  hypo
ctgcacacaatacaccgaacctgtgtgtgcacgtgtgtacaggtaccgtgcatctctttaaacattccctgaggcttggcgtggtggtggctcaggcctg

SEQ ID NO: 271369 - DNA, 106 bp, Homo sapiens
  chr17:77975264-77975370
  hypo
cggctgccaggctgcgctgggcccggaggggtgggcgggggttcctggagcatcctcagggggcggcgggcgctctcggggtatccccgggcgccctggttggccc

SEQ ID NO: 271370 - DNA, 484 bp, Homo sapiens
  chr17:77975731-77976215
  hypo
ccccggaacaaagacgggaagggcaaagtgtgtcctgattcgtgtgccaccgctcacttcttcgcccacctccaggagtttctaatcctcctcgggcttgcctggagggttgggcagaaaaggaacggcaggaaacgcagaagggatccggaacgagcagagctttgtgagtccagggcgacacccccagggccttccgtgggagctcctgcaaggatgcttcccagcactgggtcctggcccaccaagcgcactggctctagctcattctcagagactggactcttccccgagagcctcatttctgtcctctgtgccgtgtaggaggacaggggccattacaccaacgatgaacgataacgccgttaataattcagccgctgccgctgatactcggtcgacaaggagccttttcctcctaaaggcagaaagcacttagatgccgtttattactgcctcgcacgccctgcggggtgggctggca

SEQ ID NO: 271371 - DNA, 181 bp, Homo sapiens; identical to SEQ ID NO: 218169
  chr17:77976565-77976746
  hypo

SEQ ID NO: 271372 - DNA, 305 bp, Homo sapiens; identical to SEQ ID NO: 218170
  chr17:77980905-77981210
  hypo

SEQ ID NO: 271373 - DNA, 553 bp, Homo sapiens
  chr17:77983870-77984423
  hypo
gcatcacaggtgacgcaggtgagtgcttcctgcccaggtcaggccttgggggcctcccgagagcccacgcccagaaccaggaactcacctgctgtcactttccagaaacacggagccgcggctctcggccagcgccgcgctgatgggcgagaggcagaagggcgaggagaaggtgtctgagtctgagtcaaaggagctgtctctgctcacgccctcggctgacagttccaaagagccatcctcctccccggcctcgggccgcggctcccgcccctcctcggtgacatcctgcggactgaccgtcgacaagatcccggaggggctgcaagcaggctgcgaggctggctgggcaccatccacccccaagccctgcgccagcttctcctcatcctctggcgcagggctggcgagcatgcggtctggaacactctgggccaccaccaggatgtcctcatctttgggggtcagggtaggccgcagctccgtcggggagggctggtgggaggctcctgagctccgggtgcgccggccccgagggcggggtgccttgcga

SEQ ID NO: 271374 - DNA, 384 bp, Homo sapiens
  chr17:77987119-77987503
  hypo
ataacctgggctgtgcgaccctggagcctcgcctgccctggctcacctgggtggtgctcccccagcccctgcagcccctccggcgggtgcacgcagacattgttcttggagtagatgatctctccatccaggacagagggggacccgctgccgctgccaccgggggtgagggtcaggaggtccgaggctttggaggaggccctgcgaaggaggcggcccagagacattgccgggcaagtgtttccatcctccgcatgcgtcggcccgggcagggctcgtcaagacctgcctgggggaggaagagagaggagatggtcaaggttgtggacttgcgttctgtctcacagcagtacgtgtcgcctcggcacccggtgggttctggtt

SEQ ID NO: 271375 - DNA, 31 bp, Homo sapiens; identical to SEQ ID NO: 218173
  chr17:77991173-77991204
  hypo

SEQ ID NO: 271376 - DNA, 101 bp, Homo sapiens
  chr17:78007924-78008025
  hypo
attaggaactactaacgcaatcaccaaaattgctagaggattaaataattccacagataaaaactttttttttcctttttttttttttttttgagacatag

SEQ ID NO: 271377 - DNA, 175 bp, Homo sapiens
  chr17:78022348-78022523
  hypo
gctcctcaatggtgtcgctgtctctccccccagtgatccccccaggggtgcccgatgcccaccccagggaaggagacctgccagtgttccaggaccagatccagcagcccagcaccgaggagggggccatggcagagagagtggagtccgaggggagtgacgaggaagcagaaga

SEQ ID NO: 271378 - DNA, 172 bp, Homo sapiens; identical to SEQ ID NO: 218176
  chr17:78023956-78024128
  hypo

SEQ ID NO: 271379 - DNA, 187 bp, Homo sapiens
  chr17:78024751-78024938
  hypo
ggcccagggcctgaccgccgtaggatgtgtgcggcaggtcagtgggtagctttgaatcagatgagacagtgggggctacagcacgtgctatgcaacattaccgataaagcaacgtccttgcacagagctggtcatgtaggtgaccggggacagtggcttcctcttgtgactacggagtatttcagtc

SEQ ID NO: 271380 - DNA, 225 bp, Homo sapiens
  chr17:78026928-78027153
  hypo
aatgtccaggagaacagatgcgtgagttcaggaaagacgaatctgcagatagaaagactcgtgacgggccatgcagctgaaagagaaaataaacctccgcagacatagctggtgggatttccaaataccacggcaaaagaaaaaatgctgcaggcttccaggcgggaaaacccagatggcctcttgaggccgggcctgggctacgctttcatcaaggcctccatc

SEQ ID NO: 271381 - DNA, 216 bp, Homo sapiens
  chr17:78032357-78032573
  hypo
caggacatgcgtgacgacatccgcgtgatgacacaagtggtaaagaaggccgagacggagaggatccgggcagaaatcgagaagaaaaagcaggtattctgcaaactcgacacatgtttaatgatcaccagaccgtggagcttcaaaaaggggctcagctttgcctcctgcgtgaaggcttccggccggaggggtggcggccggcctgggtggcgt

SEQ ID NO: 271382 - DNA, 146 bp, Homo sapiens
  chr17:78033081-78033227
  hypo
tagcctgcagggacctcttccggggaggactgaagtctttctaacaattctcacccccgtgggcagccggccttccgggtagctcctacatctctgcacctcgtggagtagggagtggagggaacgaagggggtgaaagctgctcc

SEQ ID NO: 271383 - DNA, 605 bp, Homo sapiens
  chr17:78041105-78041710
  hypo
cctcctcctcggcccgcagtcactagaaccccctcccaagacaagcaaaggcacctggttttctgggatcccctgcctaacttgtgtgcaattgcaagaaagcatatgcgttcacccggagtcttccttccctctcttgctccgtgggagcacaccacactcactgttctgcacctctttgctttttccatttaacagcgtgtccctagagcgcttcccaagtcaaaatataaacaccgctcgttcccgcctttctaccacatggcattccgctgggatacttctacggggaagcttcctgcccggggcatcgagggcgttcgcgtccgtctgttatggcggtgctgctgtagataaccggatccgcgaatgctaacgctcaccaggatgctatatagccttttttatattgcctatcaagcccggaatgtctgggtctagcgggtattgctaagtaggattgtgacagtcacgcccccggcagcggtgtttcaaagtcccctgacagctcagcatgttgtcacacttcaggactgtgccaatccgattgatgaagaaaatagataatcttgttttataaaacgtgcatgcgcagaatgttgagt

SEQ ID NO: 271384 - DNA, 212 bp, Homo sapiens
  chr17:78055253-78055465
  hypo
cttagtgagctccctcgtgtggggcgcagctctgtgcactggctctctgatgtctcacacgtaactggctctccccgctgcatttctacagaggatgccagcatcaagccaaatccaccgacggcgagattgaggcctataagaaatccatcatgaaggaggaagaaaagaacgagaagctggcgagcatcctgaaccggacagagacggaa

SEQ ID NO: 271385 - DNA, 151 bp, Homo sapiens
  chr17:78059764-78059915
  hypo
agccctaattttgctttttgatgaatatccggtctagggggaagaagtggggcccctggagcttgaaatcaaaaggctgagcaagctgatcgacgagcacgatggcaaggcggtccaggcccaggtgacctggctgcgcctgcagcaggag

SEQ ID NO: 271386 - DNA, 157 bp, Homo sapiens
  chr17:78061502-78061659
  hypo
aaaccggtgcagctcggaggagctggagcagaacaaccgggtgacagagaatgagttcgtgcgctcgctgaaggtccggccgtgtccacgcagtcccggggctcaggacgatggagggcgggggtacggtccttgcggtgggcgttctgcaccagga

SEQ ID NO: 271387 - DNA, 47 bp, Homo sapiens
  chr17:78073420-78073467
  hypo
cctagtgctggagcgccagcgcctggacaagcgactggctctcatcg

SEQ ID NO: 271388 - DNA, 194 bp, Homo sapiens
  chr17:78077294-78077488
  hypo
tcgcatgtgggttccggctgctcctgggaggagccaggctaatagaatgtttgccataaaatattaatgtacagagaagcgaaacaaaggtcgttggtacttgttaaccttaccagcagaataatgaaagcgaacccccatatctcatctgcacgcgacatccttgttgtgtctgtacccgaggctccaggtgc

SEQ ID NO: 271389 - DNA, 120 bp, Homo sapiens
  chr17:78078981-78079101
  hypo
acatcgacacccacgcacctcacaagggtggggtgcatgttgcaccactgtgtgctgggcccttgctgggagcggaggtgtgagcagacaatggcagcgcccctcggggagcagtgggga

SEQ ID NO: 271390 - DNA, 302 bp, Homo sapiens
  chr17:78083553-78083855
  hypo
ggtcctgactcgcccggccctggctcctctccaggcaggcgtgtgcaggcatgtgcaggtacacaggcaggcatgctgtacacacgcatgatgtcatccccagcctcatcctctcactgtctcagttttccccgtggctggcgccagggctctgggccaccctcaccttgacaggtttccctcttcccaggatcctgccatcagcagctcgggccctgccgggagctacaggccctacgacgagggtctgcggaggggggttttcatcaccaacgagaccggccagccgctgattgggaagg

SEQ ID NO: 271391 - DNA, 112 bp, Homo sapiens; identical to SEQ ID NO: 218179
  chr17:78086406-78086518
  hypo

SEQ ID NO: 271392 - DNA, 93 bp, Homo sapiens
  chr17:78122143-78122236
  hypo
ctccagagcacctgggaccacaggtgtccacgcgcagccactaaccgctttcttatctgacactttaagtgcttcttcgtacccagctcctct

SEQ ID NO: 271393 - DNA, 211 bp, Homo sapiens
  chr17:78143782-78143993
  hypo
tgcttgtccactgccgttcagttcagccagagattgggccacattcagtcctcgcttccctgggagggggaaggtaagtgcgcgcagtccatccggcgaagagcaggtcagcctacggagggctcagcctacggaggggctcagccgacacaggtctgatggggcccgagagtggtcccaggggagtgggaggggccggcatcttcctcat

SEQ ID NO: 271394 - DNA, 200 bp, Homo sapiens
  chr17:78155302-78155502
  hypo
gatggagagccaccgccacaggatcgtacgctgcatctgccccagccgcctcaccccctacctgcgccaggccaaggtgctgtgccagctggacgaggaggaggtgctgcacagcccccggctcaccaacagcgccatgcgggccggtgagcgcagctccctcttccccacctcttccagcttcccgtggcccacatggc

SEQ ID NO: 271395 - DNA, 172 bp, Homo sapiens; identical to SEQ ID NO: 218180
  chr17:78158229-78158401
  hypo

SEQ ID NO: 271396 - DNA, 40 bp, Homo sapiens
  chr17:78159115-78159155
  hypo
ctgggattacaggtgtgagcccctgcgctggccagcgctt

SEQ ID NO: 271397 - DNA, 410 bp, Homo sapiens; identical to SEQ ID NO: 218181
  chr17:78163403-78163813
  hypo

SEQ ID NO: 271398 - DNA, 200 bp, Homo sapiens; identical to SEQ ID NO: 218182
  chr17:78165107-78165307
  hypo

SEQ ID NO: 271399 - DNA, 33 bp, Homo sapiens
  chr17:78179550-78179583
  hypo
cctgggtgaccttgtcgccgacctctgggtccc

SEQ ID NO: 271400 - DNA, 84 bp, Homo sapiens
  chr17:78182032-78182116
  hypo
cagcctggctcctgacggctggagcgacctggacggcctgctcagctgtgtccgccaggccatcgccgacgagcagaagaaggt

SEQ ID NO: 271401 - DNA, 96 bp, Homo sapiens
  chr17:78188823-78188919
  hypo
gtcctcacctgtgcgcacaccagcttggctgagcagcagcggcaggctccgcaccttgtcgaaggagttgaagtggtgcacgtcctggtgcagccc

SEQ ID NO: 271402 - DNA, 257 bp, Homo sapiens
  chr17:78190741-78190998
  hypo
cagggatgggagacgtggcagaggcctgggccccggacgcagcctgtctactccctgcccaccccctcctcccgccccttgcacctcacctggggcaggccagtgaggaggctggcgcggctgggagagcagctgctgaccgaggtgaaggcattgcgaaagaggaggctgcggcgggccaaggcgtccaggtgcggggtggcgatggcgctgttgttgtacgcgccactctcaaagcctccgtcatccgctgcgtg

SEQ ID NO: 271403 - DNA, 129 bp, Homo sapiens; identical to SEQ ID NO: 218183
  chr17:78195404-78195533
  hypo

SEQ ID NO: 271404 - DNA, 83 bp, Homo sapiens
  chr17:78227883-78227966
  hypo
tgcccgggcagtcccggccaatgtcagcgcagcaaggggagggcctctgtaaccagggctgctggctgcggggctccccactg

SEQ ID NO: 271405 - DNA, 183 bp, Homo sapiens
  chr17:78256873-78257056
  hypo
tacttctaagcctcaccccccgtaaaattataaataccgctatggttatgtagttcgagattctgggtcaaagaagactatgaaactgttcaatggaaaagcagacagcaggaggcactggcagcacagggcgcctaccagggcactcggccagtcctcaccgagaagtaagtggtccctaac

SEQ ID NO: 271406 - DNA, 687 bp, Homo sapiens
  chr17:78271717-78272404
  hypo
gccttgatgacagagtgagactctgtctctaaacaatgaaaataaattttacaagttgctttatatttagatttactgttgccagatggcctgggttcaaaccccagctctgtcagtcaggaccctgcgttgactacttagccaggacccctgcttctgagatccctcccctgtcctgggagtttgttgtggggattcggtgagggcctgcaaaggagctgacgccctaggctgggggctgagggaagccctgtctcctgcgtgagttaaactctgctcagccacgcgcggtgctcctcttgctctgtgtgcacggtgcttgcttcctgttgggactccagactcccagggagatgactccctggccagctcagctcactgcgggatctttattcccttccagctggcggctgtacctggtgaacctgtgccaaagatgcatggacacaaggacgtacacctggctgggcgccctgcctgtcctgcactgctgtatggagctggccccgcggcacaaggatgcctggagacagcctgaggacacctgggccgctctggagggactctccttctcaccgttccgggaacaaatgctagatacgtaagtcgtagagttgtgcttatctacatgaatctgggaagactgactcctacattgtgcacccggagtcccggtgggctctgcag

SEQ ID NO: 271407 - DNA, 31 bp, Homo sapiens
  chr17:78280676-78280707
  hypo
ctcatgtgatgcacttcgtagctgccattct

SEQ ID NO: 271408 - DNA, 194 bp, Homo sapiens; identical to SEQ ID NO: 218186
  chr17:78326748-78326942
  hypo

SEQ ID NO: 271409 - DNA, 59 bp, Homo sapiens; identical to SEQ ID NO: 218187
  chr17:78330433-78330492
  hypo

SEQ ID NO: 271410 - DNA, 304 bp, Homo sapiens
  chr17:78337245-78337549
  hypo
gagatgttaaggacacatctcgctgacgcttctcacatcctagacaatgaaagtttaggtcgcaagcctgggacacaagtatacatgcagctaacagccggggcctctggtgggccggtgggaggggcaccgctcagccacgccctgctgtccgtctccccagaccctggacgcatttgccgcaatggcctgcacggagatgctgacaagaaacaccctgaagcccagtccccaggcgtggctacagttggtgaagaatctttccatgccgctggagctcatctgctccgatgagcacatgcaa

SEQ ID NO: 271411 - DNA, 54 bp, Homo sapiens
  chr17:78338098-78338152
  hypo
ggcttgcttgtaatcccagccgctgggcctggaccccgggtcccgcatctcttc

SEQ ID NO: 271412 - DNA, 174 bp, Homo sapiens
  chr17:78338182-78338356
  hypo
ttccttggtgggagccgagtgagtgagtgagtggcgccctcttttgacagagcccagtggagtcggattttctccaccgcactcttcgtggagcacgtgctcctaggaaccgagagccgcgtccccgagttacaggggctggtgaccgagcacgtcttcttactagacaaggtg

SEQ ID NO: 271413 - DNA, 277 bp, Homo sapiens; identical to SEQ ID NO: 218188
  chr17:78354368-78354645
  hypo

SEQ ID NO: 271414 - DNA, 58 bp, Homo sapiens
  chr17:78362264-78362322
  hypo
tgacggagaggggcgctcttagccaagggatacacagggcagcgcggcactacgctgc

SEQ ID NO: 271415 - DNA, 105 bp, Homo sapiens
  chr17:78387298-78387403
  hypo
gcggcttgtcctgctacactctggtgggaaagacaccgcagcaggggagcagggtgcgcagggtgcagtgggtgacgctcattcgctgaaaactgaccctgcttt

SEQ ID NO: 271416 - DNA, 46 bp, Homo sapiens
  chr17:78395662-78395708
  hypo
agccccctacgtgtcgggcttcctggccttccgagaggtgcccttc

SEQ ID NO: 271417 - DNA, 379 bp, Homo sapiens
  chr17:78404956-78405335
  hypo
ggccgggtctctggcgcgcctccatgccccttcaagaaggtgctatcctggtgttcctgaggagcagggcgagcctgggcctgagggaacaggtacacaggcagcagcactcagggccggggagtgctggccccacccgcctgcgctcactcgaaagctgctttggagggctgggctgcaggggcagaggctctggaaaagaggcccaggctgtgtagctgcccttccttgatggagcagactctattctagaaatttctataagaagtagactcactccaggacaagtggggctggggggagcggatgccgaggggctctgcgggcaccttgtgcctaaagtcacggggggcacaggagagagcgggaactaggtgga

SEQ ID NO: 271418 - DNA, 72 bp, Homo sapiens
  chr17:78416215-78416287
  hypo
ggacggtgtgacaccggctgcggctacactggtggcagcttctgcagtcatgcctcgcgtgctcggcgcacc

SEQ ID NO: 271419 - DNA, 136 bp, Homo sapiens
  chr17:78442642-78442778
  hypo
ggaacacgccaccccgaggaacatgcaaacggagaagatccctgcagatccaaggatgccacaacccgacgggcgctgaggaagcacgattatctaagaaaaagccactgttgaacaacaacgcgcagcacggcgc

SEQ ID NO: 271420 - DNA, 117 bp, Homo sapiens
  chr17:78475921-78476038
  hypo
gtgttcctgcaccacggctcttgcctcaaagccacccactctgcggtgacgtccgacgcagacagcgcacacacggattacgttggaactcatagccaggagcggcttgggaattct

SEQ ID NO: 271421 - DNA, 33 bp, Homo sapiens
  chr17:78517569-78517602
  hypo
gattataggcgtgagccacggtgccctgcctac

SEQ ID NO: 271422 - DNA, 155 bp, Homo sapiens
  chr17:78529319-78529474
  hypo
aaggtggacagctcacgggaagtgtcctgtctctccagggcgctgctgcctagacagactgacagacacggtagcaccaaattacaatacgcaagtataggtatcaatcatagtaattacaggtgagaatgacattattacggggagcatcttga

SEQ ID NO: 271423 - DNA, 32 bp, Homo sapiens
  chr17:78561142-78561174
  hypo
gttgccgtgtgtagcggcggttattcttgctg

SEQ ID NO: 271424 - DNA, 127 bp, Homo sapiens
  chr17:78582535-78582662
  hypo
gctgaggcccacccgcagtagctgaccgtgttggtcttgaccgtgttggtcttcagagtcctttggtgtttattgagtgcccttgggcagatgcgggaacaggtgcttctgcgcgtggttcagatgg

SEQ ID NO: 271425 - DNA, 188 bp, Homo sapiens
  chr17:78587646-78587834
  hypo
actcgggctgggccgcgtgttctggataagtggctgtggagcacgatgaagcgtctatcgcagcatcatctctgcacccagatgtggccgtgctgagtggattcctgccccagatcttgggaagaaggttggctttcctcctggtgttggtggaaggcctccccggcgacactgctgcactccactgg

SEQ ID NO: 271426 - DNA, 267 bp, Homo sapiens; identical to SEQ ID NO: 218191
  chr17:78590518-78590785
  hypo

SEQ ID NO: 271427 - DNA, 338 bp, Homo sapiens; identical to SEQ ID NO: 218192
  chr17:78598706-78599044
  hypo

SEQ ID NO: 271428 - DNA, 246 bp, Homo sapiens
  chr17:78599526-78599772
  hypo
aatgttggtgtggaccctcccgatgtggtgaagaccacgccctgtgcacgcttggaatgctggatcggtgagtatgcctccctcacgcgctgccacaaaggccgtctggccggctctggcctgggcggggctcgccaagcctgtggtctggtccaggggcccgtctccagctgtgcaaatctgaggggtttttctttctggagtcacatcacctttgagtaatttccgatgcgctcacctgtgatt

SEQ ID NO: 271429 - DNA, 586 bp, Homo sapiens
  chr17:78611008-78611594
  hypo
atgagggagagcagacgtcatgtctgtgagcaaacaaggggcccatgcccagcgtggctctgggtgtcatggcctccctgctaggtcatccggatgaagcctggggctgtggagtcagctcgtgagaaatgggatccaggtcctgagcgtgctggaactggcgagacggggtcacagcacacacctgcgtttccagccctgcccctgctgacggccaagacctcttttcccacccctgctccgcccccctctggataataagttgctgttctagttcatagaagtgacacttgtcccttttcagagaagcaggggagaggctgttttgttttatggcccgacattaaatactacaacagtaatactaaaaacaatcctgctgaagagctgcgcgtgccccactcttggggaactctgctgtggcagcagagtgcggatgagctgcatgctgagcagggagtgtcatttagcggaaatggttttgtgtgccagctaatggtagctgtgtatcagaagaggtgagaatgcaaaggtttgtcagatgtgtggaaattctgtcatcccaagggaacgtttgggaggtctt

SEQ ID NO: 271430 - DNA, 34 bp, Homo sapiens
  chr17:78617731-78617765
  hypo
cgcctgcgcactgcgtttcgtgtgcctgcgttct

SEQ ID NO: 271431 - DNA, 85 bp, Homo sapiens
  chr17:78620631-78620716
  hypo
aagtttgtcggagtcgttgcctccacgctggcatggatgggagcagagtaggaaatgcctgttttctcaacggtagcgtccatcc

SEQ ID NO: 271432 - DNA, 47 bp, Homo sapiens
  chr17:78630808-78630855
  hypo
attttaatccaatttctcagcgtttcgtcatttgaagaatagaagtc

SEQ ID NO: 271433 - DNA, 179 bp, Homo sapiens
  chr17:78637757-78637936
  hypo
ctctgcatcttccccgtgacagccgcgtgggcatttgctcttgaccctgtggtggctgagacagaaaccttggaggagtcactcacttctgttggagcaaaatgcaggcctcctccagggctgcgtctgggagggacttgggtggtggagtgtttatgacttagcgcagagggctctta

SEQ ID NO: 271434 - DNA, 409 bp, Homo sapiens
  chr17:78642231-78642640
  hypo
gcaggaggtcttcgcgccctgtcccctcagcatgcacttgttctcccagagtcggccatggccattcttccaggcttctggagaaaggacctcctcacaagcagacagcaaaataaaacaatgaccagtgtcagagaagatgacacccccgtctcccatgtttgcacgcctcagcagttctcagccgtatgcctatgcttttacaagtgaaaaccagctctttaggtcacttgcgtcacagggatctcctcttttctgtccagctacctggcagtcattattcctcattgtttattgttagaaaccttttgttcagcagagcggctgccccagggatcacaggcagagcgggtcctgctggagtttagtctcaggacagcggcttgtccgcattcgggtttgagcatga

SEQ ID NO: 271435 - DNA, 235 bp, Homo sapiens
  chr17:78649357-78649592
  hypo
cctcagacaccatgccagcacgggccttgggcgttgcctcctgcccctcaggccgcccatgactgcaacgccccactccagttcatgggctcaggcccgcggaacccggctgctctgctcaccgggctcgggcccgcagaacccggctgctctgctcaccgggctggccccagcttcactgctctcacaccagcacatccgtgaatttcagaacgtgcccctgcctgcttgtctg

SEQ ID NO: 271436 - DNA, 250 bp, Homo sapiens; identical to SEQ ID NO: 218194
  chr17:78667554-78667804
  hypo

SEQ ID NO: 271437 - DNA, 523 bp, Homo sapiens
  chr17:78668007-78668530
  hypo
cgaggcagttgccccgtgctcacgaatccctgacacagctggtgacctctccaggtgacctcttcaagcctggtcccaggggcaggcatgcccgggcatggccctcgcagatggctttgctggcctggtctggcaaccgttgaataaatactgatttcccacccaggtgaggcgcatggtagatgtttgttctgtgcattgcgttggtcggcctccacagtcgcacaatctctcagtggagtgagagtgtcttccatatgtggggccgtggtgctgaaggcttgtgcgttgagtgcctcctttcccgtgaatgtgttggttctggtgaccagggtggagcctccctgcgccccttccttccatccagcatcaggttcccagttctctgcctgccaggcaggcgtgcacatatggagtgtctgggaacctgcagctgttgatcacggctggtggtagctccgcacttaagtaaggaggagtgattttcccgaggagatgtggtattggtcggagttgctgggaa

SEQ ID NO: 271438 - DNA, 184 bp, Homo sapiens
  chr17:78691303-78691487
  hypo
tattttgcacatcacgtggcatgccaccggagacaggcgcgtgttcttccagatctagacagccataagctgcactgtagagcatgcagtcctgttgccgagtctttcagccttcagataggctccctccatcaaaacgaagcctgcagcattacagatgatacactgtcggtacacaatgtaa

SEQ ID NO: 271439 - DNA, 41 bp, Homo sapiens
  chr17:78691700-78691741
  hypo
aagaattcacgtagcggaacgtttatcgggagaaggattaa

SEQ ID NO: 271440 - DNA, 89 bp, Homo sapiens
  chr17:78745063-78745152
  hypo
tgcagctcatccagcgatcactatcctgacccctctgagataatccctccttcctcacgctctccctctgccagcgctttcctcgtcat

SEQ ID NO: 271441 - DNA, 290 bp, Homo sapiens
  chr17:78747664-78747954
  hypo
agagctccctcagacgtcgaccgcttctgattccctccagacagctcccggtggacacgcagggctatgcggcctgccctgggggctatggtgctgaatcctgacaaaggccctcttctcgggctgtcagaaaggacgaggctgagtcaggctttaatgtaaaccatcactccctgtttttctatttcttcgttgaaagaagcactgatcattgtgttcactagaaacacctcaagtttttaaaaggctcctctcctgttggtgtgactcgagggcgctgtgacatcctg

SEQ ID NO: 271442 - DNA, 208 bp, Homo sapiens; identical to SEQ ID NO: 218196
  chr17:78759715-78759923
  hypo

SEQ ID NO: 271443 - DNA, 45 bp, Homo sapiens; identical to SEQ ID NO: 218197
  chr17:78760396-78760441
  hypo

SEQ ID NO: 271444 - DNA, 53 bp, Homo sapiens; identical to SEQ ID NO: 218198
  chr17:78760830-78760883
  hypo

SEQ ID NO: 271445 - DNA, 96 bp, Homo sapiens
  chr17:78774691-78774787
  hypo
agcatattttaaaccgctaacaatccattgtcgtgaataagtgagtctctgtgtgctgctgcttccgaggctctggtagcacggctgccccgtgtg

SEQ ID NO: 271446 - DNA, 556 bp, Homo sapiens
  chr17:78775495-78776051
  hypo
gaaaatcagtaattcattaacgtctgccagtcactgctgagatgagtaacgaggcactagacgctgatttagaaatgaagaggtggaagcaaaacccgagagatcgccgagcgagggggaggtgagtgattggcggaaacgggggaccgccgccacctagcagatcacccctgcctgcccgagcacagccacctcagcgttcccgtgcgcgccacgccagggcgcacggtgctgcacgggggtccttatgcccgggcgcctctcattaaggtccccccacgggcagagggaagacgggcaccgggtccccttcgtgttcgatgtgcaccccagcaaggcctccttagctcatccggattggtaggggtggaggaggcttggttctgagatgaaattgcagacgtgcagccaagggggaatgtgagaggttcagaggccaccccagggaacctgcacacagcacggagatcttccgtttccttcacagtggtacccaaaccctggtatttgtcatcaaaacaaaggcctgcgccacagagcacggagctgtaacatc

SEQ ID NO: 271447 - DNA, 31 bp, Homo sapiens
  chr17:78782970-78783001
  hypo
gcattctgccttttcggggttttttttattt

SEQ ID NO: 271448 - DNA, 31 bp, Homo sapiens
  chr17:78783241-78783272
  hypo
tcggccacccaagtgccgggattacaggcgt

SEQ ID NO: 271449 - DNA, 115 bp, Homo sapiens; identical to SEQ ID NO: 218200
  chr17:78789606-78789721
  hypo

SEQ ID NO: 271450 - DNA, 246 bp, Homo sapiens
  chr17:78791760-78792006
  hypo
gataaatcctggcaagaaaccgcatgccacaggtgagcccggaagtgtgggggaaggtggagataaaccctcctgccaatggcagtgaaggagagtttgaggaggcgcgggccctgttggggggccaccccggcatctgccacatctgttgttggagtgtcatctgttttattttagtcgccattttgcatcagggtcagctgtgttgactcagcagagaaacaggtaccacgagtcatccagcca

SEQ ID NO: 271451 - DNA, 208 bp, Homo sapiens
  chr17:78794034-78794242
  hypo
cagcttgaaagaggcggtgtttttgcggaacagttattgacgatcttgtcagtcatttcattaaaacggttttcagcatatgtgtttctcatctgcaggtgtgggacccaagacacaagtgtgttggggctccatgtccaccccacgatgccccccgtgccccttctccgtgctgtttcctagggctgtgtcccgggcagccacccct

SEQ ID NO: 271452 - DNA, 36 bp, Homo sapiens; identical to SEQ ID NO: 218201
  chr17:78796145-78796181
  hypo

SEQ ID NO: 271453 - DNA, 186 bp, Homo sapiens
  chr17:78801932-78802118
  hypo
ggccactgtgctggcggatcacagcatcgttgtcagcgtgaggaagcttccccggtgtctgaacgagtctgatcaggcagagacgagcagggagtggcacttagcgacctgctgtagtcatgctcctgggagcatgctcctgagaccatgcgaggtctcaggaaggatgtgcgcctcatatgagaa

SEQ ID NO: 271454 - DNA, 192 bp, Homo sapiens
  chr17:78805984-78806176
  hypo
attcattgggaacccgtgatccaggggctttacaaatgggcatgtgtgagcataggcagcataggctgccgtggccccaggtgtcagggtgcaggcggctcctgtcttggaggcttccatcccccgtggaagctcgtgctggccactggagcaacattcccgcaggtgggaaggccgcgaggagtggacgag

SEQ ID NO: 271455 - DNA, 141 bp, Homo sapiens; identical to SEQ ID NO: 218202
  chr17:78811169-78811310
  hypo

SEQ ID NO: 271456 - DNA, 281 bp, Homo sapiens
  chr17:78811561-78811842
  hypo
aacagcagtgaaaccgtaaacatgccccccaccagctgccgtggcctccgcccagacccttgctgcccaggctcagccggctcctcctgtgccctgtgaagtggcctcgtgtggaagcccgtccataatgctcagtggatttcctctgttctctccgcaggcaagcctgggacctggctgttgacatctgtctgtctcagctgccgacgatcatcgaggaaggcactgcgtttcgggtgagtccctccaagggcaccctgtgcatccgcggcggcagccac

SEQ ID NO: 271457 - DNA, 401 bp, Homo sapiens
  chr17:78812101-78812502
  hypo
ttcaccacagacgcgttgtggatctcccccaggcctctgactctcagccctgtgggacagtgacccacggggggtttggtgctgaaccctggagggcgttctgcccccggccgcactgcacgggcgctggagagctgagccaccctacggcggaacctgggtttagtcgccgcacctgcaagtgagggtggccccgggccttcgcggcagctccctaggaccccctcgtggtttcttaatgagcttttgccttacgtgaggcgccaagtctgaaaatagataaataagacggaggccctgccctccagaaacccgtgaggaaagaggagcctctcacatctgtgcagaatgcaagggagcaatcggcaagagggcgcggcagacacggggaggccagggat

SEQ ID NO: 271458 - DNA, 233 bp, Homo sapiens
  chr17:78818427-78818660
  hypo
ctgcacaggagcacggattcctacgtggtgaatgttctcggctgactttttaagtcgggccacggggctctgcccgccaggctcctctgtggaggctgccgagagcgctcctggacttgggcgcacggaggcaccctgtcctgctcctggcgttcgcctgtccacatgtgtccacattcactggaacccggggcacagccgaccccggccagatgagcggagggagggttcct

SEQ ID NO: 271459 - DNA, 76 bp, Homo sapiens
  chr17:78822274-78822350
  hypo
caaaaccaagaacacgcagtgatagcagcaacgcaaccaaacaacatttgacagaagcccacgttttcccttcgtg

SEQ ID NO: 271460 - DNA, 93 bp, Homo sapiens
  chr17:78836325-78836418
  hypo
ggtgatggtcctccgaagctccgcccaccatgatgtctgctccgccccctcgtgttgctggtggtcctctggagctccgcccaccatgatgtc

SEQ ID NO: 271461 - DNA, 151 bp, Homo sapiens
  chr17:78867012-78867163
  hypo
agtgcctgtgcctgtgtgtgcgccggggcgtgtgtgccagggtgtgtgcgccagggtgcgtgtgtaccagggtgtgtgtgcgccgggtgtgtgtgtgcgccaggtgtgtgcgcgcgccaggtgtgtgtgcgccagggtgtgtgtgtgctgg

SEQ ID NO: 271462 - DNA, 38 bp, Homo sapiens
  chr17:78870124-78870162
  hypo
cccatcccatccacggccgcgccgacaccccacacagc

SEQ ID NO: 271463 - DNA, 232 bp, Homo sapiens
  chr17:78870192-78870424
  hypo
accccacggccgcagcaacaccccacacggcctcgccaacaccccacggccatgccgacaccccacacggccgcaccgacacatcccacggccgcaccgacacaccccacggccgcaccgacaccccgcatagccaccccggcaccccacggccgcgccgacaccccacacagccgcgccgacaccccacacggccgcgccgtcacaccacagctgcgggggcagcaccttt

SEQ ID NO: 271464 - DNA, 52 bp, Homo sapiens
  chr17:78871406-78871458
  hypo
acatcgctgccttacgctcaccagctatttctttgggcgctccccattggca

SEQ ID NO: 271465 - DNA, 531 bp, Homo sapiens
  chr17:78872485-78873016
  hypo
gccccgactccccccgccccggctccccccgcacctgctcacccaacccctgctcaccccgcccctgctcaccccgccgtctccgtctagtgagttttgatgatgggcttttcacttgtgttcagcttcaagctttctttctacttccattgtggttcctggggatggcggtccagccacaatgacagcagcgcatgacaggagcccaaagacccgaaacagacgcagggcatccgccaaggcagttcccaccgggcaaccctgtgggtgtgctcccagccttggccagctgctgccttgagcacctctggatagaacgagtccagagcttgcaccatgccctccagggtatggagaactgaaaggttcactacacaacaacccagacacgccagcttagcccagacacgccaacttgttaattttcattgagaaataacgttgcagctttgtgcatttggctgtccactaaaatatgccaagtgcccagaaagcgcagagttgactccgtatattcgagtataaatcaag

SEQ ID NO: 271466 - DNA, 183 bp, Homo sapiens; identical to SEQ ID NO: 218206
  chr17:78873841-78874024
  hypo

SEQ ID NO: 271467 - DNA, 136 bp, Homo sapiens
  chr17:78874423-78874559
  hypo
tctttcacaggaagcgacagcagcatcacccctcggtgctcacctggtgaccgtctgccaagggcctggtggccccgccaccctacctggcccatgctccatggggttctcggttcactctcgtccctccactcac

SEQ ID NO: 271468 - DNA, 449 bp, Homo sapiens; identical to SEQ ID NO: 218207
  chr17:78876642-78877091
  hypo

SEQ ID NO: 271469 - DNA, 109 bp, Homo sapiens; identical to SEQ ID NO: 218208
  chr17:78877957-78878066
  hypo

SEQ ID NO: 271470 - DNA, 345 bp, Homo sapiens
  chr17:78882480-78882825
  hypo
cttcctgtaacctcggctctttaaagcaacacttctgataccagggttagggtttcagaaaatgcagccgccttaggagcctcattggcagctactttccactaaaacatcttccatttctctctctcaggagtttcctttaacagtgtttacactcagatttggagagtcctgctgcacctggctgctgacccctatccagaggtctcggacgtggccatgaaagtactcaacagcatcgcctacaaggtacgtgccgggcgctccccaccgcgctccagctgctggttctcggttacgagtatgcatgccaggaactccaggtgtgcccgggtccacaccaca

SEQ ID NO: 271471 - DNA, 120 bp, Homo sapiens
  chr17:78893469-78893589
  hypo
ctgcacctccatcttccaggcgtgttcatgtgcgcactggcccaagagagtgtctgtgctgagcattcgactgttagcaaagtcgtatctgccaccaccgaaggttggcttggggagtgg

SEQ ID NO: 271472 - DNA, 197 bp, Homo sapiens
  chr17:78894343-78894540
  hypo
agtgggcagagcagagggttcgtcaccacggctccatgcggtactcccacgggcgcttccgtgcagggtggcaaggcgggagctgcacagaccccaggcggctcagcgtgacgtcccagggctcctgagtcaccggccccagcccagcagcgcctgagcctttgtgctccgtgagcgtctgagcatgtgtgggtttt

SEQ ID NO: 271473 - DNA, 459 bp, Homo sapiens
  chr17:78935153-78935612
  hypo
tcagggaagccccacgctgagcgtgccccctcccctacagccgcgtcatgacgtaccgggagcacacagcctgggtggtgaaggcctccctgcagaagcgtcccgacggccacatcgtgagtgtgaggtgaggagcgccgatatttagcagccgttctgctgtaaaaacattattttcccctccatttaaaatacgtccttggtatttaaacagctggaaggggatggcatttcgggcagtaattaactcctgccctggaactggccagaaagatcaggcgcagcccgtaggggcccaggggccacagctgctcccctgctgggggacacctgacctgcaggcgctttgggaactttcctgggctgccaactgcggagggttccggggggagttgggcagctgctctccctccacgggcaggggtggcagggtggcaggggcggcgcgtctgccaggca

SEQ ID NO: 271474 - DNA, 198 bp, Homo sapiens
  chr17:78936614-78936812
  hypo
gccagcctgtccccgtggtctagccggcctgtccccgcggtctcggcatctgcgcccatcttccatcctcaaagaagagggcagtgatgccgggaccctttctctccccacagtggctccgtcaatcagttcaccgccatctacaacagcagcggagagctcatcaacaacatcaagtactacgacggcttcatgggc

SEQ ID NO: 271475 - DNA, 202 bp, Homo sapiens
  chr17:78940079-78940281
  hypo
acgcgaattgagacggactttgacaaaacacgaaatggtaatgtgaagctaagagcagagagtgaccaacagtaaacaacacgcgcagactccgcggctggcggctgtgtctttaaggaaactgcccaccccacctcaggggggcatcggtcagagcagagctctggggggtggggggacgttgcccgggtcccccctgctg

SEQ ID NO: 271476 - DNA, 185 bp, Homo sapiens; identical to SEQ ID NO: 218210
  chr17:78968280-78968465
  hypo

SEQ ID NO: 271477 - DNA, 37 bp, Homo sapiens
  chr17:78975640-78975677
  hypo
ggcgcggtggctcacgcctgtaatcccagcactttgg

SEQ ID NO: 271478 - DNA, 37 bp, Homo sapiens
  chr17:78975917-78975954
  hypo
agaaatgcgtgggacagaatggcgggtccatcctgga

SEQ ID NO: 271479 - DNA, 230 bp, Homo sapiens
  chr17:78999625-78999855
  hypo
actgagacacgctccgcacatctttagaacataaaggccctggcagtagcttgcggcgctctttggaaaactgcttggctctcactggaaacacagccacgcctcctctgggccccggtagctctggcgttaagtcggctggagactggcttggccacggccgccatctctagccagccctggggcaactgcccccggctgcgtcccaccctgcccgcctcctagcccct

SEQ ID NO: 271480 - DNA, 51 bp, Homo sapiens
  chr17:79001013-79001064
  hypo
gggaagccatctgcgcggcgcccagcagcatggagacgtctgggtcctccc

SEQ ID NO: 271481 - DNA, 89 bp, Homo sapiens
  chr17:79001565-79001654
  hypo
ctgcccagctccagacgtgtggctgaagcggccagctcggccagttcgtcccggcgccacatgtgtccttcctccggccccagacccca

SEQ ID NO: 271482 - DNA, 237 bp, Homo sapiens
  chr17:79027341-79027578
  hypo
gagcatttgtggtgtcgacccccaggaggggtgcctgctctgggttttctcctctgtgttcggacccttcggagtcaccagggtgacctctgccagtaatgctgtttcttctctgctttcttccagaccatcatggagcagttcaaccctagcctccggaacttcatcgccatggggaagaattacgagaaggcactggcaggtggaactgcgcccgggccccgtggggtgggagct

SEQ ID NO: 271483 - DNA, 182 bp, Homo sapiens; identical to SEQ ID NO: 218214
  chr17:79042375-79042557
  hypo

SEQ ID NO: 271484 - DNA, 444 bp, Homo sapiens
  chr17:79044047-79044491
  hypo
cgtgcctggccagaggttggtcttgcaaggcaaatttgcccatgaagaaaggaacaggccctgctccaagctgtggcctgggtctgccctccacactgagcggacgtccaggcagccttcgggctgggtattgaatgtgctctgccgggcaaccttggtcacttgtggccaaaagggaggtggaaatgtggaaagaaacccctctgccccgtcagaccttaaacctccttgcggacactgggcaaaggaagaggcaaaaggtgctttggagggaggagagaggcacagggagggttgctgcagaggggttcctagtggacgcgggggcaggagaaggccctggcgtgcctgtcccgctgcagctgtgggagctgggcttggccaggtcgctcaacccgtggggagaaggtgtcgggttagctcagcccccgcagagcctcatct

SEQ ID NO: 271485 - DNA, 236 bp, Homo sapiens; identical to SEQ ID NO: 218215
  chr17:79045480-79045716
  hypo

SEQ ID NO: 271486 - DNA, 482 bp, Homo sapiens
  chr17:79046033-79046515
  hypo
cgttgggagacctgcgcaggccccacctcagtccacaacaatgttccttgattccctccggcttcctgctccttcacctcctcctgcgcagcccggcctgacccatgtaatcagggaacaggaggggctctcctcagtgtccctatgtccatgccttgtggccacctgagcacttctcagggtccagtggaaaactctcctgccctgtttgacgcccacactcgtcagtttcaccttggtgccaagagcagacgatctgctccaggccccacttgggccacagcctcacagccgtctccacgtccccacccgaacctggcatttcctgaattcctggcccctgtccgagaaggaggctaaccctcctgggagagctctggcaggtgctgacccaagtccgtggggtcttcaacctttgcagacacctgcgcccagaggccacgcctcccactctgagcacaggcgggcggacgctgtctggc

SEQ ID NO: 271487 - DNA, 54 bp, Homo sapiens
  chr17:79047314-79047368
  hypo
gctccatttgggattcggagtcaagcatttggggaccctcgggcagggtctgag

SEQ ID NO: 271488 - DNA, 454 bp, Homo sapiens
  chr17:79048172-79048626
  hypo
tgcgtgcacggatacgtgagtgctggtgtgcgtgcatggatgcgtgtgagtacgtgtgtgtatgcacaaatacatgtgagtgccagtgtgtgtgcatgcacggatacatgtgaatgcctgtgtctgtgcgtgcatggatgcgtacgagttgcctgtgtgtgtgcacgtgcacagatgtgtgagtgcctgttcgtgtgcgtgcatggatgtgtgagtgcctgtgtgtgcgtgcacggatgcgtgagtgcctgtgtgcgtgcacggatgcgttgagtgcctctgtgtctgcgtgcacggatgcgtatgagtgcctgtgtgtgtgcatgcacggatgcgtgtctgtgcgtctgtgtgcgtgcacagatgcgtgtgagtgcctgtgtgtgtgcacggatgcataagtgcctgtgtgtctgtgtgcatgtacggatgcgtgtgagtgcatgtgggtgta

SEQ ID NO: 271489 - DNA, 32 bp, Homo sapiens
  chr17:79050214-79050246
  hypo
ggcagccggtgagacgccgcagtttgctctgc

SEQ ID NO: 271490 - DNA, 155 bp, Homo sapiens
  chr17:79050944-79051099
  hypo
caactcctggtgggcgtgggtttctcttcggggtgatgaaagtgtccgggcagtcagctagctcaactggtgagcgcatgatgctgacgatgccacagttgtggactcgatccccacaccggccacagtcccaatttcttagccgggcatggcag

SEQ ID NO: 271491 - DNA, 694 bp, Homo sapiens; identical to SEQ ID NO: 218216
  chr17:79051339-79052033
  hypo

SEQ ID NO: 271492 - DNA, 34 bp, Homo sapiens
  chr17:79052330-79052364
  hypo
gtattgggtgggagccgggcgctgtgggtgcagg

SEQ ID NO: 271493 - DNA, 163 bp, Homo sapiens
  chr17:79052899-79053062
  hypo
aagcagaaccaacccgaggacagaaagatgctggccgggcatgcctggggcctgggttcctcagcctcacctgactcaggtgctgttttccttgctggggagcaggggcccagccggggtcttgaggcagccctgtccccatcagctgcgctcagacctgtcc

SEQ ID NO: 271494 - DNA, 428 bp, Homo sapiens
  chr17:79053491-79053919
  hypo
ccttctgatggcgacggctctgccggtctgttctggctcatgtgctgtgtgccctggcccgctggcactcagcttacatttgaacctcgtctttagagttaaggtcccacctgtgctgtggaccagacgtgggcctcccagtgagtggggggcatctgataggtgaggctgcttaggaagcctggcacaccctgtccctcagcagggtgggcctgggtaagtctgcccgccgcatgggagggagtgtggagagatgaagagatgagggagcccgagaacgcatggcctcacgtctcaccccaagggaggctctcaacggctgtggagccctcgctactccgtcttcaggcccctgaaggacacaggcaaccgcggacaagacttagttgctcagcggaactcactgcccctaccggtgcctctcactg

SEQ ID NO: 271495 - DNA, 140 bp, Homo sapiens
  chr17:79059745-79059885
  hypo
ctggttccatgccccggctttggccacttgcggtgaagctggtgcctgactctgctgccggggagtgcaggagctccttctctggcctctgcagttccctgggctctcggcccgtcctgccccaccgccactcctgtccg

SEQ ID NO: 271496 - DNA, 86 bp, Homo sapiens; identical to SEQ ID NO: 218217
  chr17:79060175-79060261
  hypo

SEQ ID NO: 271497 - DNA, 237 bp, Homo sapiens; identical to SEQ ID NO: 218218
  chr17:79060660-79060897
  hypo

SEQ ID NO: 271498 - DNA, 133 bp, Homo sapiens
  chr17:79061383-79061516
  hypo
tggtggagctggatcggccccaaaggagaggacgggactaggccaggggcagatgagaaggataagtgagagtctgtggaaacagccatacgggggagctgggggtccctcgggtgcccgctgctgtttgcag

SEQ ID NO: 271499 - DNA, 363 bp, Homo sapiens; identical to SEQ ID NO: 218219
  chr17:79062265-79062628
  hypo

SEQ ID NO: 271500 - DNA, 226 bp, Homo sapiens; identical to SEQ ID NO: 218220
  chr17:79062658-79062884
  hypo

SEQ ID NO: 271501 - DNA, 97 bp, Homo sapiens; identical to SEQ ID NO: 218221
  chr17:79065509-79065606
  hypo

SEQ ID NO: 271502 - DNA, 55 bp, Homo sapiens
  chr17:79067466-79067521
  hypo
ccaggatcccccctccggctgccccccatctctgggtgtgcgaggcctatagcct

SEQ ID NO: 271503 - DNA, 74 bp, Homo sapiens; identical to SEQ ID NO: 218222
  chr17:79072579-79072653
  hypo

SEQ ID NO: 271504 - DNA, 305 bp, Homo sapiens; identical to SEQ ID NO: 218223
  chr17:79072864-79073169
  hypo

SEQ ID NO: 271505 - DNA, 327 bp, Homo sapiens
  chr17:79073679-79074006
  hypo
aggcgtccttccatcgctggctgagcctttctccctttccctccacagtacatcgacgccatcagcaacaagcagggcgagctggagaattacgtgtccgacggctacaagaccgcactgacagaggagcgcaggcgcttctgcttcctggtggagaagcagtgcgccgtggccaagaactccgcggcctaccactccaaggtgaggcggctgggggctgcgctgtgccggcgctgggccttgctggcagaaatgacccaggcccctgccccagccccagccccgtgaacacaccggggcagtgtccaggctcgaactctcgtttat

SEQ ID NO: 271506 - DNA, 286 bp, Homo sapiens; identical to SEQ ID NO: 218224
  chr17:79074739-79075025
  hypo

SEQ ID NO: 271507 - DNA, 680 bp, Homo sapiens
  chr17:79077361-79078041
  hypo
aagatcccggagcgcgcggtgcagctcatgcagcaggtggccagcaacggcgccaccctccccagcgccctgtcggcctccaagtccaacctggtcatttccgaccccattccgggggccaagcccctgccggtgccccccgagctggcaccgttcgtgggggtgagtctgtggcctctggaaagcttcacgggtgtgggtgggagggcagcttgttgtcagggcggggggccgccagggtgcagagtccaggggcccctgctgagggggcggagggttctctttccccctggtcttgcccggggtgggctccagcaacagcctgctctgcctgcttccctgcagcggatgtctgcccaggagagcacacccatcatgaacggcgtcacaggcccggatggcgaggactacagcccgtgggctgaccgcaaggctgcccagcccaaatccctgtctcctccgcagtctcagagcaagctcagcgactcctactccaacacactccccgtgcgcaagagcgtgaccccaaaaaacagctatgccaccagtaagggctccgctggggtgttgggctggggtccctggacgtgcctcctcagaccctacagtcatgccacaaccctcaataggggcctgggagaccctgaggctcacaattatgtgaccgtgtgtacctacat

SEQ ID NO: 271508 - DNA, 36 bp, Homo sapiens; identical to SEQ ID NO: 218227
  chr17:79078512-79078548
  hypo

SEQ ID NO: 271509 - DNA, 530 bp, Homo sapiens
  chr17:79079546-79080076
  hypo
aatcttggtgccatccgtggcttagcgtgacactggggctgcgaggcaggagcaactgctctgcccgggctctggggccttgcagttgggtctggtggggccggcagctcccaccaggttgaggacagcccgggccaccttgcccttgaggctgagcacacagtgggagcgggctgcggtctttgtctccctggagcactgtctctgttgctccagagacagccgcgcagccatgctggggagctagagggacttgtgcatggatggtggtcggtgggggatggggagcctctgggctgagcgtggctcttacctggggcctctcttccaggcggggctggtttcccttctcctacacccgggtcttggacagcgatggcagtgacaggctgcacatgaggtgagctctgggcccaacgggagtgtaagatccccagctcgggagaggggctgtgatgacaccaggtccctgggcttggattgctcggctgggcttccggctccttgtctgctaccgcagggccatcccc

SEQ ID NO: 271510 - DNA, 537 bp, Homo sapiens; identical to SEQ ID NO: 218229
  chr17:79082610-79083147
  hypo

SEQ ID NO: 271511 - DNA, 123 bp, Homo sapiens; identical to SEQ ID NO: 218230
  chr17:79083370-79083493
  hypo

SEQ ID NO: 271512 - DNA, 49 bp, Homo sapiens; identical to SEQ ID NO: 218231
  chr17:79084399-79084448
  hypo

SEQ ID NO: 271513 - DNA, 250 bp, Homo sapiens; identical to SEQ ID NO: 218232
  chr17:79084478-79084728
  hypo

SEQ ID NO: 271514 - DNA, 163 bp, Homo sapiens; identical to SEQ ID NO: 218233
  chr17:79086357-79086520
  hypo

SEQ ID NO: 271515 - DNA, 175 bp, Homo sapiens; identical to SEQ ID NO: 218234
  chr17:79086875-79087050
  hypo

SEQ ID NO: 271516 - DNA, 516 bp, Homo sapiens
  chr17:79093914-79094430
  hypo
gccgccaggagccgcggccgctcccaccccttcctgcgggagcgcgacccccagccccgggcagaccccgggtggcggcggcccacctggtcaaagaggtagacggtgacgtcgtcgaagaaggacacggccttcttcttgcgttccaggtcctcgcagaaggtctcggacagcaggctgggcatcttgagcaggctgcgcaggttgcgcgcgctctggctctcagccaccaccacgggcaccgccggcgcctcctcttcgctgtcctcgctaggctcctggacgctgtagcagcggagctcctcgtcagactcgtcgctgtcctcactgtcctcctcctcctcctccggccggccctccaaggccgcagggaggccgggcagagccaggcggagtggggctctgggggtgcctgggccccccatccgcttttgtggggccggccctgacaacagtcctgggggcccctggaactcagagctgttgccttctgatctcagcggaaccggggtcagc

SEQ ID NO: 271517 - DNA, 126 bp, Homo sapiens
  chr17:79094705-79094831
  hypo
gcctgaggtggcctcggcctcagcctcgaggtctgagaagtaggcagagtctcggtagggattcttctcgttgaggccactgagggaggtggagagccgtgtctcgggcccggggccctcaccctc

SEQ ID NO: 271518 - DNA, 221 bp, Homo sapiens
  chr17:79097037-79097258
  hypo
gagctgctgctcccggaccgtgtacgccagcacctgctggtccgagtgctggggatagggctgcgtgcccagctcaaagagctcccagatggtcacgcccagggacctgtggggcgacagccgtgagccagggctgggcacagcctgccacagcaaggaccgcgcaggatccccggggcgccgaatggggcagctcccgccatcacgccagtgcctcagga

SEQ ID NO: 271519 - DNA, 828 bp, Homo sapiens
  chr17:79097959-79098787
  hypo
gggagtggtgggggcggttggggaagcagcagaggtgaggcagggaggggcgcccaccccggggcggaccactcccctggcggctcggccctgccccttccgagtctacaccaggtgtgaatgaacgctccgggctaggcactcaggataggggcttccaggctgcggccgtgggagatcccagcaccaccgtcagcccctctgcctggcacggcccgacctacgctcccgtgaaggcagccaacaccccacccagaccctctccccagggacaggtactcaccaaggcccccgtctcaggacagaccccccggcatgctgaagacgggccgttggccctgtacgtatgccttgaccccaccatggggtccctggggcaccctgtcagggtggtatctcccccggtgtggggtcgccacccaaccagccacttgggctgctggcgtgtggccactacaggtggctccggcagccccctgacctcactactcatggccatgatttgacatgggtgggcaggtggcactcggcctcggcccctcacggtgccaccagggccgcactcaccacacattcccgctcttggtctggtccacgacgagcaggttgctatgcacctcgtccaccagctctggcgcgatccagcgcagaggcacccacagctggtcggcagtcacgaagtagtcctcctgttggcacagggacgggtcacccctgccggcgcaggccctgcccctcatgcccagcccagcccaccccaccccactcactctgtacttgcagtgagccaggccatagtcaccaatcttcaccgtcaggtcagccgtg

SEQ ID NO: 271520 - DNA, 590 bp, Homo sapiens
  chr17:79099762-79100352
  hypo
gcgtctggggctgacggggccacgtgtccttcgccacttcttccagcatgtccccccggggtccccaggggctgggcatcctggcccaagcaggacagaaccctccctccagggtccttcgaagcagggtctgtctccctcaagccccaaagcgagggcttagcagagtgtggggttggcgcggggctgcagggtgctggctgactgcctcggggacagagaacaggccagcttgacagtacgcatctcttcgtctaaacctgcaaagtgggtgtcaaaccattgtcttcccaatttttcaaaaacgtcataaaatccctctgcatagtggttgtctgatgctgcatgagatgaacctggccggtcctcgcaagccccctgaggcaggacccgccctatgcccttccttcaggggaggggcctggcctagggcttcccggccgctggcccgcgcccgccctcacctgtgcacgaaattgttgcgatgaaggtgcaggacgccacaggccacctcacaggccatgcgctgcagggtccgggggtcgggagccatggactccgccacccggcagctccgcaggtagcccttg

SEQ ID NO: 271521 - DNA, 356 bp, Homo sapiens; identical to SEQ ID NO: 218238
  chr17:79102634-79102990
  hypo

SEQ ID NO: 271522 - DNA, 260 bp, Homo sapiens
  chr17:79104768-79105028
  hypo
gagctgagtcttccggtctccccagatcacacccaacgcccagcacctgggccccggagggaggccaccccatctccccacccagccctcacctgagcgcccaggctgcttggccatgggcaaggagacctccgtgagtggcaggacgtacacgtcgggcccgttctgtgctgccgtggccggggagccctgcgccaggtcggctgcgtactcgtccccctccgcattctcaaactcctgcgggccgggccgggcatgag

SEQ ID NO: 271523 - DNA, 197 bp, Homo sapiens; identical to SEQ ID NO: 218240
  chr17:79108114-79108311
  hypo

SEQ ID NO: 271524 - DNA, 54 bp, Homo sapiens
  chr17:79114515-79114569
  hypo
cgtggggctgtgagccgtggggccgggagaccgtggggccgtgagccgtggggc

SEQ ID NO: 271525 - DNA, 148 bp, Homo sapiens
  chr17:79133081-79133229
  hypo
cattcacagagagcgagcgagatccccaacatggggcagctgggagggcgccggcggcctgcgagtgaccggccaggtagcagtcctgggggcagtggcggggactctcgggggctgggcgtgctgccgcgcgggtaaatccaatgcg

SEQ ID NO: 271526 - DNA, 184 bp, Homo sapiens
  chr17:79135399-79135583
  hypo
agccctggagctgccgtgacggcccccgggttctctcaggaacctcctggagcgtgggtgctgccggaccccatttcagaggtgaaacagacacagagaagttatgagacctgtccatggtcacacagcagggcccggcccaggacaccagcccacgccagaactctcccgtgaggcagggtca

SEQ ID NO: 271527 - DNA, 182 bp, Homo sapiens
  chr17:79135804-79135986
  hypo
cctggagaatgtgccggaatgagagaaatgttctccctgacccatgcctgggagtgtggggcctcacacccaccccctccccgagtgccgacacccacaccctccccgagtgcccgcacccatgctggtaggtgggagccggacccgtgcccagggcccacggcctgcgtgtgaccgctccc

SEQ ID NO: 271528 - DNA, 264 bp, Homo sapiens
  chr17:79154928-79155192
  hypo
ccagcaccacgcggcgtctacgtctgctctggcccaagcagcacccccaatccgtgcgtgcaccccacgaattgactccctatccacccaggaccaggatggaggaggacttctcctcccagatgaagaagatggccttggccatgggcacgtccctatcagacaaggacattgagctgctgcccacagacatgagacaccacggtacagcatgcccccgcccggcgcggccccccgcccgtccagccccgctgtggtcaggag

SEQ ID NO: 271529 - DNA, 238 bp, Homo sapiens
  chr17:79155471-79155709
  hypo
ttcattgagtggaacgagatcaagtaatggctggcggccacggaggggtggggcccaggccacccagaccacgccgaatgcccacatggcggacccggccttcccccaccgggtccccgctggccttgcagctggcagggctgggccagaaccagctagaagcccaggaggctcagaggcccaggctcccggcccgaagtgcccttgcctacaaggtggggggcgaacggctcgtgag

SEQ ID NO: 271530 - DNA, 774 bp, Homo sapiens
  chr17:79166316-79167090
  hypo
cagccctcagggctcgggtcagtgcagagctgctctcctccagctgctgcctcagctcttccagctccgcccgctgcctgcggccagggaggagtcagcaggtgaggggtcatcgagtaaggagtcagggatgggagaggtcagcgggtgagggggcgggggggaggggtcagccagcgaggggtccctgggagagggcgtggtgcccccgggcggcacctggctgcctgctggcccagccgctccctctcctcagccacctcactgtacagccgctgccgttgctgctgcagcgcccactgctcctgctccaggtgctgctggaacctgcgggacggtcaggactggctctcgggggccgggacgggcggtcccaggacccacccaccgcaggggcacgggccgaccacaggcctgactcacagctggagagcagccctccggggccctgcccctccccctcggcagtcaaggcccctcaaagccaccgcccgggggcaggcaaggccacgaggaacttgcccatcagccaagcgcagcaattccctgagctccaggccctcgtggcactttgggaagtggctgtggagccgcgtccaggcccccttttccctcagcccgtgtgccggcctcaccctgttcagcattgccccacgggcatggagggcgggaggcaggtgcctcgtggggccttatccacctcccctgcctccggcctgagggtgccaggtgcctggctccgtgacctgagcaagctcgcgccagggcctcgtc

SEQ ID NO: 271531 - DNA, 36 bp, Homo sapiens
  chr17:79168720-79168756
  hypo
cccggcgggctttctcggtggcgctcattaattctt

SEQ ID NO: 271532 - DNA, 278 bp, Homo sapiens
  chr17:79169406-79169684
  hypo
tgacagcaggcccacggccccgccccagagcctggcagctagagaggcaggagtggaccagctcggtgccacggtgctcccccagacagccccacccaccgctgtggccctgacacaccgagacaggaatgaggactccaagtccggtcctgttctgggggctgtgccagctgagcctggcctgtgagccgggcttgggacgccgtgcagtagggagcaaagcctcaccagctcgtgctgcgcctgtgcctgggccacacgctcggtgcatctctggt

SEQ ID NO: 271533 - DNA, 434 bp, Homo sapiens
  chr17:79175938-79176372
  hypo
gaaatttctatcctcggaggtgtgagccccccagaccctgatgcctgcccacctctgtgttctaggctcaggcccccccccaccgccccaagatcggtcacctctcagcctcctcctccgtcacctccttccgcctgggcaagcccgtgctgcccccagtattgttccgggctgagtgggtggcactggagacattcttcggcagcttcccaaagccgctgctctcactgccctcacaggtggctgccttgatgatgttgctgacaggtaagaagaaaacaccctcgtctcaccgcccaggggaacagctctgcccacaggcagcaggtgcccactcccggaagtcccaggactgagcctggaagtggtgctggcaggctggcagccggggcagagggggacagcggcaggtgcgaggccggctctcccgtgcc

SEQ ID NO: 271534 - DNA, 33 bp, Homo sapiens; identical to SEQ ID NO: 218242
  chr17:79183372-79183405
  hypo

SEQ ID NO: 271535 - DNA, 340 bp, Homo sapiens
  chr17:79206046-79206386
  hypo
cgcaaagccccagcggtgacaggaaggagtgacccagaccccaaggggaggagccctcgcctcgatacctcggggacctggaatggccccggggagtaggttccccagggttgggggaccgtggctggctgaaggcatcatggcaggctggtaggtgtcaccccgcggcaggagcctccgggtactgggactctcgggcccggggcgcatggcgctggccaccacctctgcggccttctggatggtggagaggaaggcttcgcctgccgagcctgtacccgaggagagggagatgggacggccgcccagtgcggcccccacccgcgttctctgggagcag

SEQ ID NO: 271536 - DNA, 70 bp, Homo sapiens; identical to SEQ ID NO: 218243
  chr17:79216891-79216961
  hypo

SEQ ID NO: 271537 - DNA, 478 bp, Homo sapiens
  chr17:79223889-79224367
  hypo
tcagctgctcgtcccgttgagaggcatacggaagaaaggcagaataggaaaccgtgaaaagtctttttcagaaagaagaaaatcaaaagaatcaaacaggttcaggtaacagagcataggaattggaaccaacaaacatggccagactaaaaccggagacaaaaccccacatgcccgaactcctgaagtggctcagagctccgggagcccagggggcgccttttggctctgccttccgcgctgcaggtgcaaggagggcgagctgcacctggagaagccaggccgcagcgactgggacgtggctgctgcacctgccctccctcggaccggctgtcctgaggccacagggcaagatgcgcgggcaggaagcgtgtgtcttacgaacatcctgggaggtgcccgtgccagggctggcccggagctcccacacctgctcccaggggcttggcacaggaggctggagcggctgtgccctgcg

SEQ ID NO: 271538 - DNA, 67 bp, Homo sapiens
  chr17:79226308-79226375
  hypo
tcgggcagaggcggcgccatctggccctggacccctggagcctttccgcccgcgtgtctggatggag

SEQ ID NO: 271539 - DNA, 125 bp, Homo sapiens; identical to SEQ ID NO: 218245
  chr17:79230308-79230433
  hypo

SEQ ID NO: 271540 - DNA, 177 bp, Homo sapiens; identical to SEQ ID NO: 218246
  chr17:79234793-79234970
  hypo

SEQ ID NO: 271541 - DNA, 185 bp, Homo sapiens
  chr17:79253771-79253956
  hypo
acgctacaggggccgctctgccagccccccgcatgccgatggtcttttcccgtctgcgccggatttacgcctctcttttcagccggttaccatgttccaaccgggcacgaatcactcgctcttgtcattttggtggagaaggtaatgctgctggaattatggaagagcccgatccacatttacag

SEQ ID NO: 271542 - DNA, 35 bp, Homo sapiens
  chr17:79292568-79292603
  hypo
ttcccagtgccggccgggcatggtggcgggcgcct

SEQ ID NO: 271543 - DNA, 96 bp, Homo sapiens; identical to SEQ ID NO: 218247
  chr17:79294051-79294147
  hypo

SEQ ID NO: 271544 - DNA, 336 bp, Homo sapiens; identical to SEQ ID NO: 218248
  chr17:79296202-79296538
  hypo

SEQ ID NO: 271545 - DNA, 38 bp, Homo sapiens
  chr17:79505402-79505440
  hypo
tgggcgacagggcccggccacaccgtggtccgcaggct

SEQ ID NO: 271546 - DNA, 59 bp, Homo sapiens
  chr17:79523604-79523663
  hypo
agcagtgactgtggggcagtcgcagggctgacaggtgcggcagaggcagaagaggcacc

SEQ ID NO: 271547 - DNA, 254 bp, Homo sapiens
  chr17:79539642-79539896
  hypo
agcagtcgtgctctcgggcactgggactccccactgggagagcacatcaaatgcctcctctccacccatggcgcttggcctggcactcaggcgcgatctgcgacaggcagaagggtctgcgttcccctcaggttggacctgtgccctgtctatcctccaaaagcacatgaatcctcacagtctgaatgctaactcttagaatcttactcacacctctgaaaacccgactttccagaaaccgagtacttggacat

SEQ ID NO: 271548 - DNA, 435 bp, Homo sapiens
  chr17:79542407-79542842
  hypo
tgagccacagcgcccagctgacacttggtttcttaaaagcaccacttagaaaatagtccagtccgtgtgcaacgactggatgcacacagaactggcagctggcatttctcaggggccagctgtgtgcacagagccacttcgtcctcacaaacacactggtcacaggcactactgctgtccaagacaggaagggttacaaagatgagtgaacctcctaaagcaatcggcaaggacagctggacagctgtgtagagactgggccccccacactacgtgcgcaggctccccgcctcccaagtcagtgccggtgctgcagggccagggcacacgcaggcctccctcctgcctttggggaaccttgaagttgaggctcggaccccaacagccgtctcacactgagtaagactctcccacctccaccgcaagggaagatgc

SEQ ID NO: 271549 - DNA, 96 bp, Homo sapiens
  chr17:79543263-79543359
  hypo
taaatcctaaaagcacggaaagagtatgtaggtagatgcatagttctgggggaaagaattacagttggccgttgcacaacgcgggtttgaactgag

SEQ ID NO: 271550 - DNA, 138 bp, Homo sapiens
  chr17:79544179-79544317
  hypo
cagctggctccttgaaggaacgctgttcccttgctgctcctatgtcccctcagctccccacggcgctctgacccgccccaccccatcactgtgtagtcctcgccagactgcctgtccgcacagctctccagacagagg

SEQ ID NO: 271551 - DNA, 98 bp, Homo sapiens
  chr17:79597564-79597662
  hypo
attacaggtgtgagccacaacgccagctattacttactttccctaaaaaacgtttaaaaatggccagacacagtggctcacgtctgtaattgtagcac

SEQ ID NO: 271552 - DNA, 308 bp, Homo sapiens
  chr17:79609053-79609361
  hypo
ggagctgatggagcggctgctgaccctgcagagctgaagtccgcatggggggctgcagtgagagccacaaggctggcacccaaacatgcctgcctgagtcacacctgcgctgagcttaggggacccacagagccagggctggggagaaatatatctccacaagcagaggcctccttaagctctaaaatgtgattcttcacatgactcaactgtgactccggcatctgggtagggctcgcacctcccccattcccatgcccagggctgcactgttcacagactagcccagggccgcagtcaggaccagc

SEQ ID NO: 271553 - DNA, 506 bp, Homo sapiens
  chr17:79612346-79612852
  hypo
ggggctggcactgggagggctggtggtcagcgcagtgagcctggctggctacctgggcgccctctgtgagaacacctgcctgttacgtggcttctctgggggcatccttgccttcctggtgcttgaggccgtggcgggggccctggtggtggccctctggggcccgctgcaagacagcctggagcacaccctgcgtgtggccatcgcccactaccaggacgacccagacctgcgcttcctcctcgaccaagtccagctcgggctgaggtgctgcggagctgcctcctaccaggactggcagcagaacctgtgagtcttggagtgggcgagggacagggccaccacagggtcgcagaggccacacacccttgtgcgtgtacacacagtcactcacacgtacatactcattcgtgcatgcccacatgcatgcacacgtatacccacatgtacacgcatatccacactggcacgtctcgtgctcacaggtttcacgtgtgtggacacac

SEQ ID NO: 271554 - DNA, 224 bp, Homo sapiens
  chr17:79619077-79619301
  hypo
tgtggaggtgtgagcgtgtttgtgcataagagtgtcatgcccgtgtgtgcgcacacgtgtgagtggacactcctcggtgcgttgatgggagcgcggtgcctgtgtgcgcacacgagtgagtggacactcctcggtgcactgatgggagcgagatgcccgtgtgtgcgcatgtgtgagtggacactcctcggtgcattgtgccatggctgtccctgggtggcagt

SEQ ID NO: 271555 - DNA, 87 bp, Homo sapiens
  chr17:79626616-79626703
  hypo
agacttcatctcaaaaataaataaataataaaaaagaaattaaacggtgatgtggaacactctttaaattgtcgttcaccacatttt

SEQ ID NO: 271556 - DNA, 204 bp, Homo sapiens
  chr17:79634636-79634840
  hypo
gtgagccaccaagcccggccagcccgtgtagattctattgccagacccaactattgtttctcttactgattctgcttgtgctttacttgggacgggtctcacccccgtgttctttctcccagcaaagagaagaagaaagtgaactgcaagcccaagaaccaggacgaacaggagattcctttccggctccgggagattatgagg

SEQ ID NO: 271557 - DNA, 124 bp, Homo sapiens; identical to SEQ ID NO: 218255
  chr17:79635130-79635254
  hypo

SEQ ID NO: 271558 - DNA, 42 bp, Homo sapiens
  chr17:79637467-79637509
  hypo
aaaaagcaaaaaaagcgtgagtggaggcgggagggggagggg

SEQ ID NO: 271559 - DNA, 342 bp, Homo sapiens; identical to SEQ ID NO: 218256
  chr17:79648940-79649282
  hypo

SEQ ID NO: 271560 - DNA, 60 bp, Homo sapiens; identical to SEQ ID NO: 218257
  chr17:79653803-79653863
  hypo

SEQ ID NO: 271561 - DNA, 1225 bp, Homo sapiens
  chr17:79655115-79656340
  hypo
aggctgaggtgcaagtgccccggagcctgcttgcagcagcctctgatcgcacgccgtcctgcacgtcacaccgggacggcgtccccgagagggccgtagacgcgaggccaggctgcgctctaaccgggggagaggatggctgcagggggtctggagcccgctctgaatttggaggcatttctggagcggctgccccccgcgtctccccggctgtgactggaaggaggggcgtggccagagccccgcagtacccctgtgttctcagccccaacaccacgctgccaccgtcaggcctgccgggtcctgcctgttggaggctgacgggaaccggggatcctggggtgggcaggtcccgtggggaaagggagagacagatggtcaggggcacagagacgcggcgttgtttggctccagcaagtagaggcaggcgtgaggtttgaactcagggtctgggaacaggttggtgcatggcccccacgccccactcggggggccctccctggcctctgtgtcagccccatctgctcagaggctgaggtctgccagctgcttcctcacaccgaggcctctggcgcctggagtgtcctgcgaccctcacccccttctccctgcctgcagagacaagtggaggtaaacgtccgtaacaagatcctgtacctgatccaggcctgggcgcatgccttccggaacgagcccaagtacaaggtggtccaggacacctaccagatcatgaaggtggagggtgagtcaggactgaggttgggaccaggttgaggcttggaactgctgggcagtcaggctcaacgggcacagtggcgaggggcctgggaagatgggttgttccctgtgttgggagggaggagggcggtggcctggagccagggaagaccgtgcatgtgagggcgggttcagaccggctcctgcctttctggacccacggcccacgggcaggggcaggcagtgatggcagacaacacacaggtgaaaaggcagcagacagcctgtttcagagtggcaggactcctgggggccgggttgggctgtgcagtcagggaaggcctctgaaggagctgtcccaagtgtcgagactggaacagaagccagagccggcgtgagcaggcaggcagcacccgtgggcagacactcagggttgaggccccagggcagaaaggtggccagcgtgccagaggagagtgcagccgggcctgtgcgccgagggcctcca

SEQ ID NO: 271562 - DNA, 35 bp, Homo sapiens
  chr17:79657392-79657427
  hypo
tgtgtgtcctgggcggaggcgtagcagctgtctct

SEQ ID NO: 271563 - DNA, 40 bp, Homo sapiens; identical to SEQ ID NO: 218259
  chr17:79658810-79658850
  hypo

SEQ ID NO: 271564 - DNA, 64 bp, Homo sapiens
  chr17:79664245-79664309
  hypo
ctgaatgcgacagcgagcatttcctgaaaccagcaggtgctgggctgccgatcctcgtctgtag

SEQ ID NO: 271565 - DNA, 118 bp, Homo sapiens
  chr17:79668267-79668385
  hypo
tcacagggggagacgcatacccgaggccccttctcagcagacagaacgaggacacaagtctcagggcagatacgcgcatccgcaagtgtagacaggaaaaaccgtgaatttacttgaa

SEQ ID NO: 271566 - DNA, 58 bp, Homo sapiens
  chr17:79674301-79674359
  hypo
cctgggccccgggcgaggtcccgccctcccgtggtcactggctccgcccccagcacca

SEQ ID NO: 271567 - DNA, 153 bp, Homo sapiens; identical to SEQ ID NO: 218260
  chr17:79682601-79682754
  hypo

SEQ ID NO: 271568 - DNA, 251 bp, Homo sapiens
  chr17:79687598-79687849
  hypo
agctgcaactccccgcgagaccccgcagctgggtgggatgaacaagcaacgcagaccacaagcgagtgcctgggagggagtggcccagggtggttctggagccattgtgggtgagggtcgagggccaccgaggtcccgcgcaccgctgcctgccctgcagtggctttaacagttagttttgccaaagcctctccactcaccagcaggcggtctctgtcttcagggattgtgcctgcgtccctcgggcacct

SEQ ID NO: 271569 - DNA, 102 bp, Homo sapiens; identical to SEQ ID NO: 218261
  chr17:79705356-79705458
  hypo

SEQ ID NO: 271570 - DNA, 365 bp, Homo sapiens
  chr17:79769295-79769660
  hypo
cgcaatgccatccacgcgaatctgtttgcgtccttcgtgctgaaagccagctccgtgctggtcattgatgggctgctcaggacccgctacagccagaaaattggcgacgacctcagtgtcagcacctggctcagtgatggagtgagcccccctcggcggccccaggcaggtgggtgggtgggcagccaggcaggtggccacgtagccgcgctcacactgcacctgtaccaggcggtggctggctgccgtgtggccgcggtgttcatgcaatatggcatcgtggccaactactgctggctgctggtggagggcctgtacctgcacaacctgctgggcctggccaccctccccgagaggagcttctt

SEQ ID NO: 271571 - DNA, 260 bp, Homo sapiens
  chr17:79772552-79772812
  hypo
ccacacagagaggtccggcctacgccagtcctcgtgccacacagagaggtccggcctacgccagtcctcgtgccacacagagaggtccggcctacgccagtcctcgtgccacacagagaggtccggcctacgccagtcctcgtgccacacagagaggtccagcctacgccagtcctcttgccacctcgtggtgggtgggcgccctgcttgccagccagggagcaccaggaaagagctgcctcctgcgtgctggacacagg

SEQ ID NO: 271572 - DNA, 42 bp, Homo sapiens
  chr17:79776471-79776513
  hypo
gacatatgcgtgcacgccaacactacacagcagatagtgact

SEQ ID NO: 271573 - DNA, 41 bp, Homo sapiens
  chr17:79776573-79776614
  hypo
acagcagatagtgacttgtgtgtgcacgccactacacagca

SEQ ID NO: 271574 - DNA, 278 bp, Homo sapiens
  chr17:79792218-79792496
  hypo
caaagtgctgggattacaggcgcaggcgtgagccaccgcccccagcctctagggttcttgccgacaccacccgggctacattttggggctcccatcctggggacccactgaggcccggaggggtcgggttcaagcctgtgtagacccagggccccctcacctggctatgtcagggtacccatcgctgcaggcaatgtgcaggggtgtccagcccgcctcatctcgctggtgaatgtcagccccgtatttgaccagcagcttcacgcattccaggtttc

SEQ ID NO: 271575 - DNA, 102 bp, Homo sapiens; identical to SEQ ID NO: 218262
  chr17:79803003-79803105
  hypo

SEQ ID NO: 271576 - DNA, 165 bp, Homo sapiens
  chr17:79803521-79803686
  hypo
atcttggcgatgacgatgttctcatggtccttgtacgtctctcccagtttatcccaaatgggagccaactgtttgcagtgaccacaccatggggcatctgaaaagaaagcagttctagggtgtgtcctggacacaaagccactggcagacgcttccccaggagtc

SEQ ID NO: 271577 - DNA, 243 bp, Homo sapiens
  chr17:79804099-79804342
  hypo
catctgggccagccgtgtggacaagagggctcctacaggtccccaaaggtgtgacaagaatggtggtcttcacaccatcttgggctccgtcctcttactctgaagatcttactttgaggacgaagcccaggacactgagagcccagagaccccaaggtggcggctctacccgggaggcagccctggcccggggacgcgcctgcaccttgattttgccctccaggaagcggtggcagaactctg

SEQ ID NO: 271578 - DNA, 309 bp, Homo sapiens
  chr17:79826862-79827171
  hypo
acccttgggtgcctcctccacgggggtcaggaactcgtactcctcggcccggggcccatagctgcctaccatgtagtcagtcttgtcaactgcggcacaaggaagagggcggtcagcggccccgcttccccgcctggcagcacgcacccaagcggccccctctgccctgcccggggccccactcactcttgacgcctttcctgtacgtatgctggatgtacttcatgccggacactatctctcggttaacctgcaggacccgaagcgaggatcagggaaggtcggtccggaccccagccccagccccgc

SEQ ID NO: 271579 - DNA, 177 bp, Homo sapiens; identical to SEQ ID NO: 218263
  chr17:79844241-79844418
  hypo

SEQ ID NO: 271580 - DNA, 309 bp, Homo sapiens; identical to SEQ ID NO: 218264
  chr17:79846191-79846500
  hypo

SEQ ID NO: 271581 - DNA, 120 bp, Homo sapiens; identical to SEQ ID NO: 218265
  chr17:79851770-79851890
  hypo

SEQ ID NO: 271582 - DNA, 31 bp, Homo sapiens; identical to SEQ ID NO: 218266
  chr17:79863961-79863992
  hypo

SEQ ID NO: 271583 - DNA, 191 bp, Homo sapiens
  chr17:79869958-79870149
  hypo
cctgagactggcctggtgagcgaggaaaggccgctgggcgcttccactctgcaggccggggctgaaataacccgagttccgttctcacagaaaggtgcggctgccacctcttgacacagaggccggatgggcaggtgtcctcgatggccaggccgtatcagggtacaaccgcagcagtgcaaggggcttcc

SEQ ID NO: 271584 - DNA, 436 bp, Homo sapiens
  chr17:79870436-79870872
  hypo
ccttcttcaccagcacgcaggggagtcgccagtgagaaaatgggatcctgccacctgccaaaaagggaaagcggcatcaggcgggcctgggagcctctcgcagtcacacctgccccagctcgggaaagctgtctgcggtccctgccttcccatccccttccctcccgtgtcaactgcggcggggctctggttggcggcagcttcattgttaccaagctgcagaacggatgtgggagaggtcacctcttaggtggtgactcaaaggtcggcacccacactagctcggtctcctcaaaactccgtgtccttgtccaccactgagcggcgtgcacacacagggtggggcagcagtggccccagggctgcctccgtctccagggatgagtcactagcaactctgggccccaccttccacttgtaccgctggggcaggtgg

SEQ ID NO: 271585 - DNA, 371 bp, Homo sapiens
  chr17:79871391-79871762
  hypo
tggagcaggagcacgcgggcagaatccctctccccgcggggattgtgtgtgccacatcagccagggcaggagtggcacacgcagggtctccgccaaccaccgaggtcaggccctctggagaccaccacgcttcagtcatgcctcaggcaccactgcaaacacctcagagcttcctccacactcagctcacgagagaagacagacaaggcccagcacacagaggtgcggggaagcaggctgctgcagcggctcactcacctgctataggcggggatctccaagcccagctcggccatgaggagccgcatgacgtcatcacacttcccatgtagcttcagggcagcccagtcatccttcggggtccactgagg

SEQ ID NO: 271586 - DNA, 439 bp, Homo sapiens
  chr17:79873416-79873855
  hypo
ggagagctggagctcaggcccgtgctgccgctgcccagcctatgtgggaggccatgcctggcccgcttacctaacgcttctccctttctgaagcagtgtccacactccattagggccccggtagtctgggatagacgctgcctgcatgtcgagaaaaaaggtaagccaagtcaaaaggcaccactgtaggtactggcagaattcccagaaacggaaagccactgtcactcctgccgcattccgggctggcctgcatgttggcctctattcattccacaggctgacctgcctgagcccatatggagtgtaccccaattcggctcctcccttctacctggacttccgtttcccgcctggcctggctcatccttccaggctgcacgcagccctgcctgcctccggaagcctctctggcaccgagcacaaagctgggctctgt

SEQ ID NO: 271587 - DNA, 126 bp, Homo sapiens
  chr17:79880223-79880349
  hypo
tggtacaaaaggggttggggcgaccccacgtcaccgccgaactgaccaatcccaacatacaaaacacacgacgacaatgacgagatcaaaggggctcagcccggcgcccctggggtacaggttgtg

SEQ ID NO: 271588 - DNA, 500 bp, Homo sapiens
  chr17:79887408-79887908
  hypo
cctcacctccccagcggctcctggccagctccccacggagagcccaggacacttgtccctggacacagtggtgcagccatgcttgggccaaaccatgaggccaccagaaccgcgaaaggctactgtactgagagggatactgcgagagaggcccacaggtttccaagcatccctctcactccgcacactcatctccacgaccggctttaagtgcggccttgaggcctggctccctgtttggacttctctgcacctccaggagctcacttcccgtcacagctggatgcctcctcccgcaggcacctcccgggcatcctcccgccccaggctgcaccttctgtgggactggcccccgcaggcacctcccgggcaccctcccgccccaggctgcagcttctgtgggactgagccccgcaggcacctccccggcatcctcccgccccaggctgcaccttctgtgggactgagccccgcaggcacttccccggcatcctcccgcc

SEQ ID NO: 271589 - DNA, 572 bp, Homo sapiens
  chr17:79892730-79893302
  hypo
ggagcagggacagatgtgcccggtggtcccgggaagtgcccgccgccgccagcttcccccgcagtccttacgtaggcggggccgctgccactgagccccgtgacggcatcaatcaggtcctcttccacctccgtgcagaagcccacgctgctcagcagctgctccatgagcctcccgtcctccacctgggcgtgcgtgcctgtggcatacacggtggccccctcccgcaccacgactggagtgttggtcatgcagcggatgaccctgggggctggccgaaacgctgacagcttctggaagagaaaccagcgtgtccgtctggccatggacgcagtgcctagatgcactcaccccaccaagcagtgcccgagctctcccagtgggccgggacgctgcaacccttttgcagatgaaaactgaagtactgagggcccgggctctagacagcccctctccacaccccactgggcctgcggtgctaccttctcaatggagctgatggtgacgccggccgcgcaggacaccacaatgtgtctgtcctcaatgtcggcgcctatttcatccaggatgaa

SEQ ID NO: 271590 - DNA, 306 bp, Homo sapiens
  chr17:79899061-79899367
  hypo
tgtcatggaccagcgccccgaagatgatgcaggccacgaaggcctggacgatcttgaggagccccgacaccgtggccatatagctgctcacctggccgggccgggcccgcgtcagggccacctccacagcgtaggccaggaagaggagcccggcgaagacactggctgccaggcggaagtccctggcagcacagccggcgggctcgggggaacactcccgccgggcaaagtacagcggatacaggaccgcagccgtcgcgcatagcagggtggccagcatggcgaaggcggcggtgaagttgcccc

SEQ ID NO: 271591 - DNA, 170 bp, Homo sapiens
  chr17:79906753-79906923
  hypo
gccccctctccctcccgagctctgtccttgtggggagtcctgtccaaggccctgcctggaggtctggctctggaggccccgagaaggaggccaccagactcccccggaccccttctctcacctccagccctcggtctccacatctctgaccttgtcgtctccattggctg

SEQ ID NO: 271592 - DNA, 276 bp, Homo sapiens
  chr17:79913170-79913446
  hypo
ttttttttgttctggtttttcttcttttgttttctcaggacctctatttttaaataaggagggagctacccggcgtggggctcccggggcccacacactcacggcacgtccttgagtgtgtggcgcagctcgcggccgaggttctggatgtacagccgcaggccctcctgcaccggctgccccgtcaggtgcacgttgtccaccgtcagctgtgcctcgtcaaacagccactgcaccacgaacacagggcctgcgggcggcggggctcagttcggc

SEQ ID NO: 271593 - DNA, 69 bp, Homo sapiens; identical to SEQ ID NO: 218274
  chr17:79914600-79914669
  hypo

SEQ ID NO: 271594 - DNA, 208 bp, Homo sapiens
  chr17:79940109-79940317
  hypo
gctgggattacaggcatgagccaccgcgcccagcgcattgttacttctcagtgttcacctgcccgtggtctgtgtggtggtgtctggtgggaaccagtgagtgcgattttgaggcaggtcctgcaataccatagccatgttttcaggtgcccttttcctctgctaatggtaccacttgcttacaaagtgcagccggtgcagaggaatg

SEQ ID NO: 271595 - DNA, 84 bp, Homo sapiens; identical to SEQ ID NO: 218275
  chr17:79942955-79943039
  hypo

SEQ ID NO: 271596 - DNA, 77 bp, Homo sapiens; identical to SEQ ID NO: 218276
  chr17:79946358-79946435
  hypo

SEQ ID NO: 271597 - DNA, 506 bp, Homo sapiens
  chr17:79950561-79951067
  hypo
gggttctgctccggcgcattttgaggccttgtgttttcctgagccctgcgtctcggggcctctgggccgagtctccagccatttggagggaaggcaaatccaaggccctttgttggctgctctgtgggacgggagcttagggagtgtgtcccagcctgtgcgcagaggacacccgccgtgtgtgtggtgcgcacgtgctccacaggctagaggcccttggggaaggggctcccctgtaggcagtggacccagggagaccatggggctaagtccacgaccctgtggggcctctgcagccagaccaggctgtcagagtcggggcctgggtgggaaagggatgcccctcccccaggattgaggacgtgaaaaataaaggccacgaaacaaaagaaaacacgtcaaacccacacacgtggccgagtccccaggtgtcggggctgggcctgtcctgggtgtggcaccttgggcttttctgcttggtctgttctcatttcagggaggcaagt

SEQ ID NO: 271598 - DNA, 453 bp, Homo sapiens
  chr17:79951969-79952422
  hypo
tggggctggatgtgacggcatgtgcccgtctcccgggctgccatgcacatcaggcatgtgtgggaggcgtgctgcatatacctgcccacccatgcacgggtccagctgtgcctcctgcggggcgaggctcagaaagacactggtggcagagtccgacatggacttataagcacggcctccccggccacaggcaagcgggcgtgagcggagtgcagcgcccctccctccatgcttcggtgacatcaggcgtcggctttgaaggaggacatcaggcggtggagacaggggcacctcctcttagtgggcggcttaagatgaaagcccagacgtcggtaccctgactctcaggctcctgagtacaggtgtccgtgagccgcattccggagccagtgctgctcgcccctcctgtgcggtccctgggccctgccggcagctccacgtcctgccagcggc

SEQ ID NO: 271599 - DNA, 378 bp, Homo sapiens
  chr17:79961365-79961743
  hypo
tccccagccatgtggccactcgctggcaggcccgggccatgagcatcggtgcggatgctgtgctcagcctgggggcggcgccgtctcctctgggtgggattcgaggcctgatgcctctgcctggtgcaggagggatgttgtgctgagggtgttccccgtgctttggatgtaaaatttgggcatggagtttgtggtgtcttcagaggcagtcccgcctgcgtcctttgtgcatgcctgtccacgccggtcgcagcggtctccccacagagcccgcgcccacgccctggcacagcctctcctgctgtgcacgtcccaggcctttgatggcgtccacgtgctccgccgcctgcctccgagggtggccggggcgctgagtaa

SEQ ID NO: 271600 - DNA, 269 bp, Homo sapiens
  chr17:79963939-79964208
  hypo
tgtgcgtgtccttgcgtgtgcacgtgtgtgcttgggggcgtgtgtgtgtccttgcgggtacacatgcgtgcttggggtgtgtgtgcatgtccttgtgggtgcacgtgtgtgcacgggtgtgtgtgtgtgcgtccttgcatgtgcacaggtgtgtgtgtgtgtgtgtgtccttgcgggtgcatgtgcatgcttggggggcgtgtgcgtgtccttgcgggtgcacgtgcgtgtttgggggtgtgtgtgtgtccttgcgggtgcacgtgtgc

SEQ ID NO: 271601 - DNA, 158 bp, Homo sapiens
  chr17:79964538-79964696
  hypo
ctggggaggggggacgggaattcccccaggggccaggccttgactgccctgcagggccctcgctgtcgcttttttccctcacagtgtctcatccctcaacctctgttttccatccaaaggcatctctgtgaatccacctggcgcgggagcggcgctga

SEQ ID NO: 271602 - DNA, 236 bp, Homo sapiens
  chr17:79972011-79972247
  hypo
aagccactcacctggcagggcgtgactggcacttctggcctgagtgcctgctgggcgcccgcccctagccagttctgtcgtccttcctttccacccaggacagccccgtcctgcactgccgtgtcgcccactgccggggcctctctgggaccaacaggcccccttccttccacccaccaggccctaccccacctggaccctctgaaatgttcctcgttgacaaatggtcttgcaga

SEQ ID NO: 271603 - DNA, 519 bp, Homo sapiens
  chr17:79977136-79977655
  hypo
ccccacttgcgccccgacccacgctcacgcaccagctgcggaagcaccttctccagctggtccacgtccacacggagcgcgtcttctgcctgggcctgccgcacgccgcggactgctgcttctgcggtgagaaacgcgagaggtgggggatgctggggggatcttaaacccgagcccagtgagggcctcagcctgggccggtgccccccccaacacccacgggcagcccccagaaccaggccacagcacctgacaaacaggctcaggagacccaagtttaggcccttgtgggaaacgggaaaacacgtcttggttttcccgctggaaaaacgcaaaattccggatgctgtgcccggagggagcgtgggccctgggctcacccacaacgaagaccttcagcaactccaccatgagctgcagcgcgtccccgctcactgcaaggcagggggaggttatgcgggaccctcacccaccgctctggctgggtgctccagacatacccccgccctcccgaggcct

SEQ ID NO: 271604 - DNA, 373 bp, Homo sapiens; identical to SEQ ID NO: 218283
  chr17:80005250-80005623
  hypo

SEQ ID NO: 271605 - DNA, 84 bp, Homo sapiens
  chr17:80011809-80011893
  hypo
gatcactgccccacgctgcgggtggaggccctgaagatggccctctccttcgtgcagagaacctttaacgtggacatgtacgag

SEQ ID NO: 271606 - DNA, 267 bp, Homo sapiens; identical to SEQ ID NO: 218284
  chr17:80018605-80018872
  hypo

SEQ ID NO: 271607 - DNA, 792 bp, Homo sapiens
  chr17:80019100-80019892
  hypo
tgaagaggtgggcccggacgtaggacagggggcaggggtgctcccgcacgatgtccagatactcctcggccagctcccacacggcagggctccggccctcgaacagggcggggttgtgcaggttgccctctgtgggaggaggagcggggaaggacacctcgtgggttgctccaggtggacggcacaggaaagcctgggacactcaggacacccttctgtgccacctcacaagggacaaggccagctcaggcccatcagagcagactgggattgatgaacaccatctgtgaacagcaccatggggagggcagtaggcagtgggaggcaccgacctgggcggtggtatcaggccgtgtgcatggggccctggctgctgtcctgggccctgcccacctgcgctcatgacgccctgcacacccgtgtcccggaggcagcgctccacgtcctgcaggcactggatgttcccgttagcaaacacagggatggccacagccttcctgttggcagagaaatgcctgtttccacccgcccggaacagcacccaggtgatgctgcccccagccacggccccctgggtggtcacgggcgtcaggcgtgccgagcaccctgaggtgtggagctgggacccccagcaaagccccaaggactgagggctgtgtcacccacacccactcaccgcacagccttgatatgctcccaggacgctgcacccgacaggggccccttctgctccttggtgcgtccgtgcaccgtcagcaactaggacagagcagtggtcgcttgacccctcca

SEQ ID NO: 271608 - DNA, 137 bp, Homo sapiens; identical to SEQ ID NO: 218287
  chr17:80030812-80030949
  hypo

SEQ ID NO: 271609 - DNA, 44 bp, Homo sapiens
  chr17:80031799-80031843
  hypo
gtgcatgcgtatatcgttttaaaggcatgcgtgtactgatgact

SEQ ID NO: 271610 - DNA, 64 bp, Homo sapiens; identical to SEQ ID NO: 218288
  chr17:80038872-80038936
  hypo

SEQ ID NO: 271611 - DNA, 87 bp, Homo sapiens; identical to SEQ ID NO: 218289
  chr17:80040622-80040709
  hypo

SEQ ID NO: 271612 - DNA, 199 bp, Homo sapiens
  chr17:80041640-80041839
  hypo
cactcacccttcccgcccgtgtgccacagcacatgctgctcgaaggatgtgtcccgggagttggcgaagctggtgctgtcgagctgggggaacctggcctggaggtacgcccgcttctcagccgaccctggtgaagagaggaagcgcggctggtgagccagggcggcggggccaggagggcagcgggaggcaccggggg

SEQ ID NO: 271613 - DNA, 231 bp, Homo sapiens; identical to SEQ ID NO: 218290
  chr17:80042509-80042740
  hypo

SEQ ID NO: 271614 - DNA, 875 bp, Homo sapiens
  chr17:80045801-80046676
  hypo
cagctcccgtgccaccggccctgcttaccactcactaccaggttgccgttctctgacacctcgaaggcacgggaggcctccaggagccgtacctccagggacactgtccctgcagagcgggagagttggagatcagagggcagcacccgccccccagctacccccgccttggtcctggggtacccctcaccagtcttgggcaggatggtggcctggtgcagcaccacatcctcaaacaccacaggcagctgctcgacgcccaggcccagggcgcgggccagcgtcttccacactatgctcaggtagccagtggcggggaagaggacgcgaccgtcgagggtgtggtccaccaggtagtggtcaggagactcggagctggtgtctgcgggagggcacaggcctcagcacagagcgggcgtctgtggggagggaagagtctgcccacccgccgggcccctgctcaccgatgttgtagatggcggctgagggggaacctgaaccgttggggaagtcctcggcggccggcacgtcccaggccaggctgtggtcccacttgatgagtggggagatgaggggagttcctcggggagctgggaactccacaggtgggaacaaggcattggggttggcgtcgatgctacggagaagggaggcatgggtagcacacccgtcaccggggtccaggggctctgggttcagcccacccactgcctgcggtggaccatccagggctgctgccaccggcctgggtcagtgaggggcccgcagccccgctcacccaccccacgccgtccccgactccgggagacgagacccgggctgggaagggacccaccctgagaggtgcagcctgccgatgccggccaggaagaact

SEQ ID NO: 271615 - DNA, 59 bp, Homo sapiens; identical to SEQ ID NO: 218293
  chr17:80047423-80047482
  hypo

SEQ ID NO: 271616 - DNA, 160 bp, Homo sapiens
  chr17:80049202-80049362
  hypo
tggcggggacagccgcgatgtcgttcagcatgctcaggaaagccaggtcctggctgtgccggaggccctgctccagcagcttctgcacggcctcaggggtgcgtccgctggcccgcagcagacggggcagggtggcatgtggggcgggtgcggggggcgg

SEQ ID NO: 271617 - DNA, 947 bp, Homo sapiens
  chr17:80050746-80051693
  hypo
caccccggaaccccggcagagcccaccttgctccttgaagccatctgtattggtgccggcgttcaggatggtggcgtacacccgccgggccagggacttcttggtcagcaggacggccaccacaccctccgagcggcagtacccattccctgggtagagcagcacctcaggcccggggctcagccccacgccggcccccaccccaccaggaggagctctggggtgtggggtgggtgcttgggtgggggatccccggagctggcaggatcctgctcagcgtggggactgtgcggggggccgtcctgtgccactgtcccgcctgccctggccgcgcagccgcacactcacccgctgtgtcgaaggccttgcaggtgccctcggggctgagcatccccagcctcaagaactgcacggaggtgttgggcttcagcaggacattgatgccccccacgatggcggcagggcactgcccgctgtggatggcctggtaggcgttctgcagggccatcaggctggaggagcaggctgtgtccagtgcgatgctgggccctgcaaggaagggtgctgcggctcaggtggggctgtgagcacacgagacccctgagcacacctcctgccaccaggctggacacacactgcacggagtgagcccacgccacgtggtttctgctcagcatgtggggacctgaaggccacccacctccgcaggaggctgggcaggacccacctctgaagtcgaagaagaaggagagccggttggccatcatcgctcgctggcagcccaccatgctgtagcccacgagtgtctcggggtctcggctcagggcctccgaggtctcagagccgctcacgcccacccagacgccagtgtgtgttcctcggagtgaatctgggttgatgcctgccacaaacagtggtcaaggtgccacggccgggccccacagcgc

SEQ ID NO: 271618 - DNA, 282 bp, Homo sapiens
  chr17:80062707-80062989
  hypo
cccggcttggaggtttgaagctggtggaatctcagggaggacatagcctgtcctattgcagggaaggtgcggccctcactcccgtctcagcctgggggcatgagaactctgagcacaaagaggacggagctggtccccagctttctggccaccctgtgagtttcttctcctgcacctgagcctcagctcagctcttgaccaagttggcctctggtggctcattctccaggctgctccgggctctctgggtgcccctgggcacacctacgtggcttcctaggg

SEQ ID NO: 271619 - DNA, 104 bp, Homo sapiens
  chr17:80077690-80077794
  hypo
aggctgtcataaaaacgcaggtgagagaggaggctaggcttggaggtgggtcctccaaagagccgcatccagggtgtatgggggagccccgactccagccagct

SEQ ID NO: 271620 - DNA, 284 bp, Homo sapiens
  chr17:80084435-80084719
  hypo
cctcccagcagaggcgctgatgccaatcctgctgccaccggcaaaagttccgtgtggctacaggactctcagacactgctgctgggagcagcctctgggtgggtggcggaggctgaggcgatgctgtccaccacacgtggcacgcgggcagccttgactacgcaagcccctggggcacgtacacgtgtgttttcacacacactgcagcctgtaaggttactattctaacagtatctgtgacggtaaaggactggaaatagcctaaaatgcgcatgaaggagaga

SEQ ID NO: 271621 - DNA, 318 bp, Homo sapiens
  chr17:80085172-80085490
  hypo
ccccaggagcagggccgtctaaagtgcaccaatgcccacgcgtctcacctgggctccattctaagtcagcctgcgcccgggtgtacagtgctccattctaagtcagcctgcgcccgggtgtacggtgctgcattctaagtcagtgtgcgcccgggtgtacggtgctgcactaggaaatggcatggtttctgcccttcagggctttgcaccataacccgggaaacactcaggtgccaaatgagaggtaaagagactccatgcattactcaaccaaagtgcagggatttcagggtgcaggaggcacgcagggtgctgact

SEQ ID NO: 271622 - DNA, 38 bp, Homo sapiens
  chr17:80100748-80100786
  hypo
cagcccacactggccgggtacgtggctcacgcctgtaa

SEQ ID NO: 271623 - DNA, 187 bp, Homo sapiens
  chr17:80135500-80135687
  hypo
gtcctaagtacactcggctgccttaagccaagcctcaaggcagagaagcaaattgaatgggagagaatgcgcaccagtggctggccgcttagtgcggggaggtgggaccagcaggggcagggactcttgggtggtcttgttggggtgggggtgcttgggcacacttacatgtcggctgcactgacct

SEQ ID NO: 271624 - DNA, 71 bp, Homo sapiens; identical to SEQ ID NO: 218297
  chr17:80139084-80139155
  hypo

SEQ ID NO: 271625 - DNA, 160 bp, Homo sapiens; identical to SEQ ID NO: 218298
  chr17:80144203-80144363
  hypo

SEQ ID NO: 271626 - DNA, 236 bp, Homo sapiens
  chr17:80159381-80159617
  hypo
tgcacaggagggcgcgtcggtcggtggctcacctgtggacgcgctccagctccaggcgatgctcctggaatgccagctgctgctgctgctgcagctcctccaccttcctggcctctctggctagcgcctgcctcagcttagctgcctctatcttgagctcgctcacctctgcccgcctggcctcttcccactccctggcctgggcgaaggcggcgtcatagcgctccagctcgagg

SEQ ID NO: 271627 - DNA, 109 bp, Homo sapiens
  chr17:80176133-80176242
  hypo
cactgggggggtggacggccaaggggagcccagcctcggtcactgcggggtggacggccaaggggagcccagcctcggtcactgggggggtggacggccaaggggagcc

SEQ ID NO: 271628 - DNA, 676 bp, Homo sapiens
  chr17:80201407-80202083
  hypo
tcacttctgaccaacagacacgcgcccaacagaaggtcacagcgcagactctactttctggccgtgaaggttctgggtccggttgggagagtcacctgctccttggcacctcagggtgggtccttctggcctgccggcttttctgagctagtcttggcacgtggcaaggacagccccgctcctggttttaagcacaggcattcatacagacggagtgccaatccgcacaggagcattgagtgctgagaaaatggactgagtgcaaaggcagcaaggcaacaaacactacagtaaccacctctcggttcacagtcctctcccaagggaccagaaacgcatcttccaccttgaatcctgggactcccaattgtcctgctagggtctcaaagcctctgcttccaagctctcagctgcctgcccacctcctggggaagaagcgcgcagtgctttgcctggtaacacccactgcacccctgccccgcggcagcctgcggtccctaactgctctccgagggcctcaagagttcctgacagcaggcatgtcaattacgggaggagggagggtgagacgccaaaatcaggttgaagaggtcccaccacacacgggcacacacacacaccacggacttttgatgagaaatctcctctccaaagcggacaataaaacactgcaaaa

SEQ ID NO: 271629 - DNA, 176 bp, Homo sapiens
  chr17:80202410-80202586
  hypo
ttttcttcccagccccgttacaaccgagttcacgtggggggccgcagtgcagccccagcggtggcagctcttggagtctgtccgtttagtatgtttcccccacgagcgtcgctgggtgagtggcctggagagctcccggtgttaacatttcgatcctagaccgggggacgtgtcac

SEQ ID NO: 271630 - DNA, 138 bp, Homo sapiens
  chr17:80207968-80208106
  hypo
cgtggccagcagccggcagccggatctgtgctgcactatccagatgcacgggggtggggaggtcagattttaagccgagacagcaacctatgaaaaagcagattctaactgccaatgctgtgcggcaggggcctgcaa

SEQ ID NO: 271631 - DNA, 570 bp, Homo sapiens
  chr17:80221651-80222221
  hypo
ccaaggccacaccccgcaccaccctgctctattggctcgtcacaccttcaaggcaatgcaggctccaggcccttgagaagccagtccaccaccaagggccgccagacaggctcccagggcggagtctctgctgagctttccctgggttggtgatgggatttttcattcctgtggcctcctctggtcacgtgaggcccgtgatgggacacactgggtgcccctctctgtaacgggttccccaggaccacaggtgctgccaaagatattttgtgtcacataaacttagaaacgtcggtttcttgtagtagcacagattacgtgcttgtgctgagaaaagatgtcaaagaatcaaatcaacagtcctccctttcccgtgacaaaagggctaacagaggccctgaacaggttttcctttggccagttgcccaaggggactcacccaaccatccacctacaaatgtgccgcggagccttctcactgggagggctccacagacgtggcacagccactcttcagacaaaaagctctgttcccaaagagggctcctgccagaccgaagctctgctgtt

SEQ ID NO: 271632 - DNA, 35 bp, Homo sapiens
  chr17:80224602-80224637
  hypo
agctctctcctcttccctcacgagtcccttcagag

SEQ ID NO: 271633 - DNA, 96 bp, Homo sapiens
  chr17:80229865-80229961
  hypo
caggggatcttggaataactcgtgcattgcacaatcccactaacaagtgcggaaaattaagttactttaaaattacaaacttgggccaggcgcggt

SEQ ID NO: 271634 - DNA, 35 bp, Homo sapiens
  chr17:80230201-80230236
  hypo
aagagcgaaactccgtctcaggaaaaaaaaaaaaa

SEQ ID NO: 271635 - DNA, 47 bp, Homo sapiens
  chr17:80232301-80232348
  hypo
acgtccatgtgtctcgagacctgtcgcatcctcgctgaaactcaaga

SEQ ID NO: 271636 - DNA, 88 bp, Homo sapiens; identical to SEQ ID NO: 218301
  chr17:80239662-80239750
  hypo

SEQ ID NO: 271637 - DNA, 309 bp, Homo sapiens
  chr17:80240741-80241050
  hypo
agccctgggcaaatcgtgtatcccctagtcagcttctccagggtgaccggcagtgactgaagtccctgttccctgttccaccctccctgcgcagggctgggcacaccgggcgccgtcagtacactgtctgcaatggccgagaaggcagcgctccatgcaggaggaacgatgcgtccttgccactgccctcatttgtgacttgggacagctgctcccagcaggatggtgtcctttcctccagagccaggggaggagtgaggcctggtgcccgggcggtacctgcctcacccaggtcgcagagagctattc

SEQ ID NO: 271638 - DNA, 140 bp, Homo sapiens
  chr17:80247838-80247978
  hypo
aggtacttggagggagggtgcggtgagacaggaatgtaagccgaatgggttggtcaggtatacatactcaacaagttacaggaggcgttgcgaatatacatgcatgtttattcggacacgtgtgctggataaacatgcat

SEQ ID NO: 271639 - DNA, 161 bp, Homo sapiens
  chr17:80251905-80252066
  hypo
tgacttaggtatatacgcatggggggaatcctcgtaaggcaagaacgtgctgcacattctggggactgggacaggataagcacacgagtagatctaagtcactggaaatacctggttttgctgttggaggggggcttgcaggtgctcgttatattattacg

SEQ ID NO: 271640 - DNA, 72 bp, Homo sapiens
  chr17:80254257-80254329
  hypo
ctgcgggacagacccggcattcttcgttatccattcattcgttgacggacacttaggcgagttccgtacctt

SEQ ID NO: 271641 - DNA, 98 bp, Homo sapiens; identical to SEQ ID NO: 218303
  chr17:80257491-80257589
  hypo

SEQ ID NO: 271642 - DNA, 48 bp, Homo sapiens; identical to SEQ ID NO: 218304
  chr17:80260760-80260808
  hypo

SEQ ID NO: 271643 - DNA, 114 bp, Homo sapiens
  chr17:80275866-80275980
  hypo
cccctggtttggccgtggggaaggagcctgggcctgcacccgcacccaacgctgcagccgaccagctgaccgtggctctgcgttccatgtcctggaggcgggaggtctgaggta

SEQ ID NO: 271644 - DNA, 188 bp, Homo sapiens; identical to SEQ ID NO: 218305
  chr17:80285255-80285443
  hypo

SEQ ID NO: 271645 - DNA, 567 bp, Homo sapiens
  chr17:80289191-80289758
  hypo
gaggcttcaggctgcggaccatgcgtggccccagctctgtctgggcagcaggtgtcagcgactttgggttgctgtgggaatttgctccgtttatcagaagaaaacgcaccctggcaacacaggcccctctcaggtcaccaggcacatctggtcacatctgagtctcagataaacaaccaatgatgtcctggtgaaagcttgtcccgtgggacactcgggacacacttatattaaaacacgattaacgatctcaaactcagatgttactgggtatcctgcgtttttgttggcagctctgccactctgcccgtctgcctgagtcctctcctgccatcctcctgaccagaggcgtgggcttgagttgaatgccacgcagtggctaaaaatcagagagagggcaggcggcagggcgcggccccagggaaagtggccaggtgggcggtgactggccgggcagctccgtgtgtggcacagggagacctggcacagggagaccaggtacagggagacgaggcgcacggagcctcaaaacttctagagtgggccgggcgcggtggcgcatgcctg

SEQ ID NO: 271646 - DNA, 58 bp, Homo sapiens
  chr17:80290202-80290260
  hypo
gaaagttcacgcaccgcccagcacgcctgcgcatgcctgttcccgctccctggtgccc

SEQ ID NO: 271647 - DNA, 566 bp, Homo sapiens
  chr17:80294441-80295007
  hypo
gtgagccactgtgctggcggcatttgcttttctttgtaacttgattctctgggttcccttgcctttcatccttgcccacccacgtgactgcagcctgtggggcttcctcctaatgtcccgaagataactcgtcatccttgaccccgccgccacctcgggttctagtggaggatgtggcccgcctgccacccccacaggcaccgggtcctccaggcctccttgacccacttccaacccacctgggatgtctgcgcgttaccagcccagatgcctcttggagccttccacctgcaccccatctcctgtcccaacaggctgggcccctcctcccgggctggccaagccagtacctccgcaggggccgcaggtgcagcaccctctgtgggggagctagggggatcgctcctctgctctgcgcacttttatgaaagggcctctgaccctcccactgtcctgctcactctgcccgcgcacccccggccacctgggggccgccccccaaagccctcggcccgtggacagactcgcagcctcctgggagccgagccaaccggccccacagattt

SEQ ID NO: 271648 - DNA, 89 bp, Homo sapiens; identical to SEQ ID NO: 218306
  chr17:80303790-80303879
  hypo

SEQ ID NO: 271649 - DNA, 116 bp, Homo sapiens
  chr17:80332162-80332278
  hypo
tgtccacccagccctgagcccgtcgtgaggggtcagagatggcgctgacccccgagtccccgagcagcttccctgggctggccgccactggcagctctgtgccggagccgcctggc

SEQ ID NO: 271650 - DNA, 152 bp, Homo sapiens
  chr17:80352181-80352333
  hypo
tagtaaatgactattagattatcacctgcttccttaaagcaggactcagcacggcaaccaaggaatcaacaataagcaatgctctcagcttccagaatcgcatgtgtctctcccctctcgggcgggtggtgagtccccggaggacacctgac

SEQ ID NO: 271651 - DNA, 141 bp, Homo sapiens
  chr17:80354750-80354891
  hypo
caggacacagtcaggccaaacgcccccaatccacgccaggggagactgtgcccagggctgcggcacacacggcctgaagccggctgcagggagtgggcttggccagccgctggctacagcgggaactgtccagcctgtggc

SEQ ID NO: 271652 - DNA, 323 bp, Homo sapiens
  chr17:80355877-80356200
  hypo
cagacatgtggccccgtagacaccagcctcctgggtgttgggactggcgctagacctgggaatcactcagcaccggcccggcacacagcagatgctccgtgaactcagcctcgctcccagggacacgccccccacacccaccgtgcttgcctgagccaggagccccacgcccaggccccgcccgcgcctcctaccagctctcggctccaccgtcttgttggcaccctcctccatgaacatgaaccgccctccgccgaagtcctccaggtagttggagaggtacagcagcgaggtgtagtcgaaggagccgtaggtcacctgag

SEQ ID NO: 271653 - DNA, 134 bp, Homo sapiens
  chr17:80369331-80369465
  hypo
tgcgaatccgctccgcttcctccctggtgatgacgacatcggtgacacctctgccgcactttcggggagtgcagcctgtgaagggacagccagggtgagacgcagtttccaaggccaccggcgcatgcccttcc

SEQ ID NO: 271654 - DNA, 118 bp, Homo sapiens
  chr17:80371142-80371260
  hypo
gagagggtcccccgcggcacaggagcgactcggcaggaaggggaaggggcagcagacagcagacagcatcgccccatgacacacgtggcaaccaaagcacagacgctgctgggtccat

SEQ ID NO: 271655 - DNA, 39 bp, Homo sapiens
  chr17:80391608-80391647
  hypo
gcagagtccctggcgctggtgggcgccatgattgaccag

SEQ ID NO: 271656 - DNA, 118 bp, Homo sapiens
  chr17:80393112-80393230
  hypo
cccccaggccccggcgaccacggtctgcttcctatctcggtggatttgcccgtctgggcattccacgggtaccgagtcacacagtgtatgacctgtgctcctccgggctgtcagctgc

SEQ ID NO: 271657 - DNA, 376 bp, Homo sapiens
  chr17:80394873-80395249
  hypo
actgggacccgggccggccgcatacactctggagtctcctacactgagacccgggcctggctgtctcaggcggctcccatgttggctctgggtacagccccgggaggcgtgtccagggccgtgttggccgcctcccctggagccactcacctgtttgctttctcacccagtcctcctcatgcagaagtaccggcggtgcggctttccgcagctgtgggcagccagtgccttcaagggtgccacggggcccagccaggccgtgccccctgttgagcaccacctcaggaaccacgtgcagtggctgcaggtggcgggcagcgggcccacggactcactgcagggcatcatcctgaccggctggcagaggtaagtcctg

SEQ ID NO: 271658 - DNA, 433 bp, Homo sapiens
  chr17:80397797-80398230
  hypo
caaagcaggctggagagtgacgcgggaggcacccctcagacacagtgaatccgcagaaatgcacgcaggtcggaggtggggaacggctccacctttgctgcacacacgtcctgcccacctggccgagcaggtgtggggctcaggcgcccggccctggaaggccccgcaccctggacccagcactcacacttccaggtctcctgagggagcagcgggacccatgggcaggggcaggcaccggggaaccccttggggtcggcagggggcttggccagaggagctgtgtgtgtggaaactcgcaggccacacgggaaattagcgactgcgtggtgctgatgcagaaagaaaaatggccgagacgcgcggagagcgggacccgcaggcgcggcggcccagggacggggacgcggccggtgagaggacgcagaatgag

SEQ ID NO: 271659 - DNA, 540 bp, Homo sapiens
  chr17:80445732-80446272
  hypo
aagctaaggcagaaagatcgcctgagcccaggataaacttacctgtgtttatctttcaggatgcttaaatggcagaggccaagcccagactccagacggacatgcggataaggccctgctgcggcagatggaaggcatttacgctgacatccctgtgcggcgtccggagtccagtgcacacgtgcaggagctgtaccaggagtggctggaggggatcaactcccccaaggcccgagaggtgctgcataccacgtaccagagccaggagcgtggcacacacagcctggacatcaagtggtgaagtcaggccagggccttccagctgctcttggggccagagccaagagcctctcagtagagggaggggctgccctgagtggagtattaaagacacttaagaaaaccgctcaatggattactttggtttctccgagttccctgctaccccgtttattggaggcccctcaggcagtttcatgtggtgctatcttcataataggtgtgggattggaactttttttttctttttttttttttgag

SEQ ID NO: 271660 - DNA, 199 bp, Homo sapiens
  chr17:80448678-80448877
  hypo
cacagctggcctgccgtgaagccgcccctgcaggtcgcgtggggaggccaggctgaggcactgggcaccaacatgagacaccagaggtcccccgtgcctgctggtgggttatagccatggggactgtgtgcattttcttctgcacaggagaaaagtggcgagatttccttcattgtaaccggaacggtattagccgtca

SEQ ID NO: 271661 - DNA, 159 bp, Homo sapiens
  chr17:80451150-80451309
  hypo
tggtaagttaagtaacacttcgcctgctctctgttgcccctaagcctttgtctcgcatcaatcttggcagaatcctcctgttcctctgtcttcggctttagccaccatcagggcgtgtgtcctgctatttccccactcgtttttgccctgtaaaggaaa

SEQ ID NO: 271662 - DNA, 33 bp, Homo sapiens
  chr17:80451584-80451617
  hypo
ccaacccagagggccgtgacactccagcccttt

SEQ ID NO: 271663 - DNA, 180 bp, Homo sapiens
  chr17:80479373-80479553
  hypo
ggttgttggagatgctggtaagagctgttgcttttcttcttgacttgcgtgttgtgtgtgtgtgcatgcgctgttctgtttcttagcatggaaaggtgcaccagcatattccttaaactttggtagtagcattttaaagaatgttattttcaggccgggcgcggtggctcacgcctgtaa

SEQ ID NO: 271664 - DNA, 100 bp, Homo sapiens
  chr17:80487529-80487629
  hypo
gggattacaggcgtgagccatggcgccccacctgaaagtgccttttgtaaaacagagcctggaggttgagactcattgcggagtcactagataactcctc

SEQ ID NO: 271665 - DNA, 277 bp, Homo sapiens
  chr17:80491463-80491740
  hypo
catacggctgttcgcgtagtaggttcgttgacaccagcatcaccccagactcatgagtaattcattgcactatgacatcacaatggctaggaataggaatttttcagctccatcataatcttaacgggaccctcatatatgcggcccatcattgacttgaaacgacgtgaattttgttagccgggcatggtggtgcccagctgtaggttagccgggcgtggtgacgcacagctgtaggttagctgggcctggcacagctaggttagctgggtgtggt

SEQ ID NO: 271666 - DNA, 62 bp, Homo sapiens
  chr17:80503130-80503192
  hypo
tcccactcctcagctcggaattcctatcccgaattctaaaccataaattagttttgtttgct

SEQ ID NO: 271667 - DNA, 283 bp, Homo sapiens
  chr17:80517078-80517361
  hypo
agtgtttgatttggtgtcctgagtgtctgtatgtggatgtggagtgcggttttccactgagcttcagtctgaggttgcgcggttggtgctcgctgttcttcccatctctgctactggctggcgaccgtgcggactccacagctgcgctcagctcagagccagcttcgtgtgcagagcccagcagagatggcggagccacttggcatccaagcaccttgccctgtttgtgtccacctggttctgccgtgagaacccctgggttttaagccgttaggctggtatg

SEQ ID NO: 271668 - DNA, 180 bp, Homo sapiens; identical to SEQ ID NO: 218311
  chr17:80519708-80519888
  hypo

SEQ ID NO: 271669 - DNA, 191 bp, Homo sapiens
  chr17:80524560-80524751
  hypo
ccctgaggttgggtcggctcccaactccgcctctcctcccacctgctgctttcttttcatcctgcgtttccttgcttgcccctccccacacctgcacagacctttgtcagggggaacccaggtccccggggcctccaggtggagcgagcctgagcaacctgactttccaaacctgccgtccacccagcagg

SEQ ID NO: 271670 - DNA, 205 bp, Homo sapiens
  chr17:80535282-80535487
  hypo
gcaggctcctaccccgcctgtggcccaacctgcatgcagggcgtggcgggcggccgggttaaggtctcgcagccaaagctgcggcgtgctcactgcccagtcagggcagcacctgcgtgccaggcccagccctgggttagggccccgccgggccctctgtgcataccgccgacactgcgggccaaggtctcggtgactccaaaat

SEQ ID NO: 271671 - DNA, 506 bp, Homo sapiens
  chr17:80554480-80554986
  hypo
cactaaggaggtgtcgctcctccaactttgttctttttaaaaatcgcttcagccattctaggtccttggcatttccgcgtgaactgtaggattcctacaccaagcctgctggcgtcttgattgggacggtgttgaatccagagtgtgtggcagagctggcggagcccctctttctttgatctctgccgatctccttgatttcacgtttgttttattccacagaccaccccctccccatcttctcacctacttcaggttccatttcatggtaggaaattcctgtagtcctcccgggcttgctgaagtgctgctccaagttacagtccccgggttgtcaggcgtggcgagagccccttgtgctcagagctctcacggaacacagagcaagcctgtctacgagttcagccggtgaggggcaggggctggtgaaggcggcggcgcctctgggtgtgcccaggggcagggtcgcctccaggccccacgcgctaagccgtgactccctgtaa

SEQ ID NO: 271672 - DNA, 217 bp, Homo sapiens
  chr17:80562621-80562838
  hypo
gacagcgggttgagcgtgcaggtagaaaaggcgccgtgtcacaggcagtggtaacagggtcttgattgattgatctatgatgtcggagttttaaagttacttggagattgtggctgccactatttcttctgcagactttctctccaacctgagaatgaagatcactgcaaagcatcttgagggacattttctcagaaaatgaaaaagcagctcttgg

SEQ ID NO: 271673 - DNA, 396 bp, Homo sapiens; identical to SEQ ID NO: 218313
  chr17:80563138-80563534
  hypo

SEQ ID NO: 271674 - DNA, 933 bp, Homo sapiens
  chr17:80571117-80572050
  hypo
agaaggctgcagatggccagcgcccccgactacagtggtgggagcgggaggtggccaggggttcacacaggcatcaacgccaaacacagggtgggtatgggtcagggctgcgttccacagggcacaagccgcctgtccccgcaagacatcccagggccacaggggagggaggacagaccagaaacgcagccggagtcatccatgcccacgcacctgtacgatcagacaggaaagctgctgagtaggcaccgtctgaggcagtcactctggagtcccttcgcacccacgtccggggcacaggaggttcgtgggggaggcagcagcccggccttgtttcccatacactgcgcttcccatcagttccacttgaaaagcagctgcgctcccgagtccgccggcctagggacaccgtgtccttgccgctctacagtgatttttaaaaagcacatgcctggggagggccggtgccgccagggcctcacatgaggcacgtccgtgcaggccctcgccacgttcctggtgaacgggcctgtgacacagccccgccgtccgcatcagttctgaggctgttcacgtgcactgcgagaaaacccacccttcttgcatgcatttcccccagattcatgtttatcaactggtaattacgctcctactcccccacccagagtcagatctcaagtgttagacaagccagggtgacgccggctcacttgaagctgccacttcaacatgcagggacattgctgctgccagccaccctccacctccacaggccagcaggagcctcagacctcccagagccacacaggcctcctacagatgcatttcctccctccctcctccagaggtgcccttggggcacagggagagaggagggcaggccgccccgtcccgacacagggagagaggagggcaggccgtcccatccccgac

SEQ ID NO: 271675 - DNA, 80 bp, Homo sapiens
  chr17:80578336-80578416
  hypo
tacctagaaataactaaacctgttctcagctgagtcccaggagtgagcgggacacgccccaaaccgcgtgtccccacgtg

SEQ ID NO: 271676 - DNA, 120 bp, Homo sapiens; identical to SEQ ID NO: 218316
  chr17:80593584-80593704
  hypo

SEQ ID NO: 271677 - DNA, 35 bp, Homo sapiens
  chr17:80600025-80600060
  hypo
tgggtctgcaaccccggggcagtactggtccgtgg

SEQ ID NO: 271678 - DNA, 120 bp, Homo sapiens
  chr17:80600120-80600240
  hypo
aagctctgccccgacagatcagcggcagcatacgattctcacagaagcatgaaccccactgtgaacggcacacgcgagggatggaggctgcacgctcctcctgagactctaatgcctgat

SEQ ID NO: 271679 - DNA, 34 bp, Homo sapiens
  chr17:80600300-80600334
  hypo
tgaaaccagtccccggtgccgaaaaggctgcaga

SEQ ID NO: 271680 - DNA, 86 bp, Homo sapiens
  chr17:80600935-80601021
  hypo
atctgcgtgtcttacgcaccctgactcatttttacaataactctgaggcaggcattgttatcaaccttatttcacgtacaaagaaa

SEQ ID NO: 271681 - DNA, 120 bp, Homo sapiens
  chr17:80603958-80604078
  hypo
agcactccagcctgggcaagagcaagatccgtctcggaaaaagaaaaaaaaaaagatctacaactatactcaacaatacggaaaaaaaaaatcacaaacatgatgttgagtaagaaacct

SEQ ID NO: 271682 - DNA, 139 bp, Homo sapiens; identical to SEQ ID NO: 218317
  chr17:80604378-80604517
  hypo

SEQ ID NO: 271683 - DNA, 119 bp, Homo sapiens
  chr17:80607968-80608087
  hypo
tcctccctgagagcgaccagaagccttccgatggcggagcgagttgggccgccccggctgtgactagggctcgggggcccaggtccaaatcacagagctggggcgagacctaagtgcgg

SEQ ID NO: 271684 - DNA, 111 bp, Homo sapiens; identical to SEQ ID NO: 218318
  chr17:80614273-80614384
  hypo

SEQ ID NO: 271685 - DNA, 110 bp, Homo sapiens
  chr17:80624871-80624981
  hypo
aggggagaagcagcgccgaggctcgcaccagacctcaccctggagaccgtcgtggagcacacggcctctgcagctctccttccagagaagcccacgatgtagccagtgag

SEQ ID NO: 271686 - DNA, 80 bp, Homo sapiens; identical to SEQ ID NO: 218319
  chr17:80645605-80645685
  hypo

SEQ ID NO: 271687 - DNA, 184 bp, Homo sapiens
  chr17:80654594-80654778
  hypo
ctccagccctgtcctccaggcgctcaatctccagccctgtcctccaggcgctcaatctccagccctgtcctccaggcgctcaatctccagggcagcgctggccctcggactttgccacagcgacatccgaactatctagaaatgtgacgaatggaagctttttgttttctttccttctaattac

SEQ ID NO: 271688 - DNA, 282 bp, Homo sapiens
  chr17:80654808-80655090
  hypo
cctactggacaccacggtcctagagacctgccaccgagcggggaggggggtaggacatgcgggggcagcggcgcctggggacaggtagagacgcaggctcccctcctgccccacggagcacactctgcacccaccagctgccagagactcccccgcatgctgcagtttcaggaggcctctgggtgctggtcgtgagcccaagcccatctcagctgctcccccaaactctgcccattcctcaccccgtcccctaagctgaggtgtggccgggcacctgagtcc

SEQ ID NO: 271689 - DNA, 229 bp, Homo sapiens
  chr17:80660560-80660789
  hypo
tgggaagggctgaccggctgtgctgtgggaagggccaggtgtggccggcctggaagtagctgagccagggacccagtgccggcgaggccggcccacctgccgcctttgttcctcccacggtgcccgctggtcttcctgtcgctgcagaggggctccctcctcacaggagaaaacatggcccccaggtttcaccccttggagagagaacggcctcactcactctcaggtc

SEQ ID NO: 271690 - DNA, 61 bp, Homo sapiens
  chr17:80661017-80661078
  hypo
gaggcagaggccgtcgccaggcccctctctgctctcccctgcactacgggacccctgcacc

SEQ ID NO: 271691 - DNA, 85 bp, Homo sapiens
  chr17:80661330-80661415
  hypo
cgtgccttccgagtgctcataggggaagcctgcgtccgccttccagccctgtggtctctggtcttcccagcgggtgagggccccg

SEQ ID NO: 271692 - DNA, 116 bp, Homo sapiens
  chr17:80671048-80671164
  hypo
tccagacaggccgccgccatctgtgcgtgtcacatatctatgcagagactgctgcagacaggccgccgccatctgtgggcgtcgcatgcccatgcagagactgctccagacaggcc

SEQ ID NO: 271693 - DNA, 159 bp, Homo sapiens
  chr17:80671194-80671353
  hypo
cagtgactgctccagacgggccgccgccatctgtgggcgtcgcgtgcccacgcagagactgctccggactggccgccgccatctgtgggcgtcgcatgtctatacagagactgctccagactggccgccgccatctgtgggtgtcgcatgtctatgtag

SEQ ID NO: 271694 - DNA, 74 bp, Homo sapiens; identical to SEQ ID NO: 218323
  chr17:80678256-80678330
  hypo

SEQ ID NO: 271695 - DNA, 45 bp, Homo sapiens
  chr17:80692470-80692515
  hypo
tcatgcatggccgggcgtggtggttcacggctgtaatcccagcac

SEQ ID NO: 271696 - DNA, 88 bp, Homo sapiens
  chr17:80692875-80692963
  hypo
ttaaaaacacaaaaaacaaacaataaaaaaacctcacgtcaaatgacttcagcacggactgggctcaggtgcgcacctgctcgtgtgc

SEQ ID NO: 271697 - DNA, 360 bp, Homo sapiens
  chr17:80712025-80712385
  hypo
gcccggctggagttttattattactcagatcagtctccctgagaatttgagggccagggttttttagaggtaatctgggggaaagggtgggggtggctgattggttaggggtatacaatcataggggagtcggaaatgatcctccgtgatgtgctgaatcgcgtctgcgtggggccccaggagcagtgggcgggtccaggtggagctatcatgggtccgtggatcctagtgtaggtgtcagacatggaaacaatctgaaaagatatctttaaaggccagtctcaggttctgcaatagtgacatggtctgcaggagtaactggggaactcgcatgtcttgtgatctcaagaataatggctg

SEQ ID NO: 271698 - DNA, 86 bp, Homo sapiens
  chr17:80712952-80713038
  hypo
ggtctcgtcagggaaggcgggacatcttgggtgggagggcgtccagggcattggtggattcaaatatttcacgattggtgattggt

SEQ ID NO: 271699 - DNA, 257 bp, Homo sapiens
  chr17:80720793-80721050
  hypo
ttctctgcgtttcccggatgccagttgcagttgttttccatgtatgaagacttgcagcccagcgtatggtctgttttgttgaacattccgcgtgcacttgagaaaaatgtctgttctgttgttgggtagattgttctctaaatgtcacgtaagtaaggtgggtgatagtgctgtttaggtttcagcgattttctcttacttgttctatcagttcctgaaacaggagtgtcgaagttttcaaccgtgtctcctttcat

SEQ ID NO: 271700 - DNA, 162 bp, Homo sapiens
  chr17:80732519-80732681
  hypo
acctcccagacggagcggcggccgggcgggggctgccccccacccgagtgtgtctacctgtcgtttgtggtgggacatttagactgctgccctcccaatttggtattaaaactcaatattgcaaacagtccacgtaaaattgtgtaccgttctgactgattt

SEQ ID NO: 271701 - DNA, 40 bp, Homo sapiens
  chr17:80744319-80744359
  hypo
atttgatctctgtccggtctcttaacgggcttctaggggt

SEQ ID NO: 271702 - DNA, 251 bp, Homo sapiens
  chr17:80744601-80744852
  hypo
tgggtgcagggctccgagtccttctcggcttgggagggtcttgtggccacatgtgtctagttctgcagtttctttgttgtgggttcggttctttactttttttttttttttttttgatgatcttgttggttttctctagattgttcccaagttttctgttcttccatcccaagtgggagacacgtgttgcacagcctgcatttggaatacccagagggtgggtgggcgggacggctcgctgccccattccc

SEQ ID NO: 271703 - DNA, 273 bp, Homo sapiens
  chr17:80745052-80745325
  hypo
ggcaaagagtgaggcgtgctgtcctgccgtttagggcagagcacccaggcggtttggcagcagcacctcagaactattcagagatttgccctcagcaagagtgagcaattgtctgacgcagccggctgaaatccctgggaagggaatgaatgaaactgccgtgaagcaacgcctggcggggccgggcttctggcagctcctggggccagcacgtcccttccagagcgtctgaagccctgggcggctgctggagcatctcgagtctttccagag

SEQ ID NO: 271704 - DNA, 286 bp, Homo sapiens
  chr17:80747040-80747326
  hypo
ggtaccccaggccacgctggttcggtctcctcgtggcgttaaggaaagacctggagcagccagctcctaacactcatttcccatcactcagcattttatgtggggcgggcacagtgccgtgagtcttacagaaacctgcatggtgagccgcacgcctttgagtccccatcagccctggcccatccctgctgaggtggcgcgacctgctcacagacgtgtgctcacaggcagcccgtcgcggggtcatgtgctagacggggagggggcttggcgggtcaccagcctc

SEQ ID NO: 271705 - DNA, 259 bp, Homo sapiens
  chr17:80747740-80747999
  hypo
ctggcctgtttacccgggagcccagcaacaaatgggagcttctgtgctgctgtccgtgcatacggcccaggagccgggctcatccccgagacgccgtgttccctcccgctgtccgctcacacctgcctgtgtggacgtggctctgacatgtctccttcctggttcattgctcatctgttctcatgtggctgcgccgccaccctgtcctgggggtccttgtcccagcacgtggctctgtgcttcacgtcatcctgagtct

SEQ ID NO: 271706 - DNA, 103 bp, Homo sapiens
  chr17:80749266-80749369
  hypo
atggatcattaacctcttttctagcatcttacctctgtggtggttcacttttgcgagcttttgctgggccttggaaggtgcgtgggctcgctgctcctctctt

SEQ ID NO: 271707 - DNA, 150 bp, Homo sapiens
  chr17:80749614-80749764
  hypo
catgaaacagtcatgcgtcccctaacaatgagggtagtcctgagaactgcgtcgttgggcagtgtcgtcgtgtgaacaccgtagcgtgcacttaaacatagatggtgtggcctgctgctcccaggccaggtggtgcggcctgctgcactc

SEQ ID NO: 271708 - DNA, 103 bp, Homo sapiens
  chr17:80762942-80763045
  hypo
acagccaggcggcccgccctgcactcacccttggcaggagcagctgtgtacgcgggggccttgctcagcgcagggctgggctgcacgccgagcgcagactctg

SEQ ID NO: 271709 - DNA, 159 bp, Homo sapiens
  chr17:80763316-80763475
  hypo
gtgaccggtgagacgcagcacctggtgatgaaggggcggtgtgtggcctgggcggtggcagtggtggccgttcaggaaggggctgccaggaggcagagggtcccgaaggccgggtgcttccccagggaaggcgctggtcctgtcgtctgtgtacccatc

SEQ ID NO: 271710 - DNA, 127 bp, Homo sapiens; identical to SEQ ID NO: 218330
  chr17:80767312-80767439
  hypo

SEQ ID NO: 271711 - DNA, 112 bp, Homo sapiens
  chr17:80771620-80771732
  hypo
cgcaaggggctcacggagcctctgggcagacagtacacgtctggaacttgtttaattgtgattgagtctgtcggtgacagtgagctctgaggagcccgctggtggacgctgg

SEQ ID NO: 271712 - DNA, 753 bp, Homo sapiens
  chr17:80772715-80773468
  hypo
tttccaggagactgacaaggcgtggcatgggggatgtctggcgctggcagagctgggcaggagaggcctgttgctgccgtctcgactcgtggatggtgagtagctgaggcacggtcaggggggatgtctggcgctggcggagctgggcaggagaggcctgttgctgccatctcgactcgtggatggtgagtagctgaagcacggtcagctgcgtcaccaggctgtccgtggcaggctgcagcccttcgtctgaacccatctccgcggtgtggccctgccgcgggcacgcccagaagagcttgagaacaaggtctgtctacctttttctcgcattggcctttgtaatttcctaattgcctcttttgtctgctgtggaattttaatgccacagattaccctgtgtagctggttttggagggccacgaatccttgtaatgtctgattttcttactccccaaaaccggttttcattcttgagggacattgtcgccccttaaggacacatgcagtggcacctgcttcagttgtagaaccaggtacccctggcagcatcctgggtcacctggagtgacgtggtgctccctggagatgaggctcacgccagcgtgaaaccagggtgggaactggggtggagggccaggggagctctgcagtggccagcagtggggtggggacagagggcacagcatggcagatgcaggggcactgccccagaccagctcttgtgccgtggccacacgcagccctgtctgt

SEQ ID NO: 271713 - DNA, 165 bp, Homo sapiens
  chr17:80775961-80776126
  hypo
ctgaccccaggcagctggggcgagaggatatgggtgttggcatcataaacgaaaagggtaaagctatggttcagaaactgacacgtgatgtggaatacactggcccatgaccttcgcatggttggttggccccttctgcctggcggtgccctccatgtgagctga

SEQ ID NO: 271714 - DNA, 189 bp, Homo sapiens
  chr17:80793757-80793946
  hypo
tgtagcagggacagcgaggcacggtttggatgaggacaagatgtttgttaccctacaaccagggagggtgtcgggtgacaccctgggctcagaccccgcgctcagcacccgtctcccaccgtgggctgccacagaagctacaaggcaccgggtcaaggccaagcaaatgaaacacgtaatgatagctct

SEQ ID NO: 271715 - DNA, 74 bp, Homo sapiens
  chr17:80794410-80794484
  hypo
tcagttttcgaagccgcattatttcacattgctgatacctctagcgcctgaaacacaagcgctcagaggagcaa

SEQ ID NO: 271716 - DNA, 1223 bp, Homo sapiens
  chr17:80797612-80798835
  hypo
ctcattagaagttttgtaatcgtggtctgcatcccagccatgcacctgctgggtcctgagtaatcctcggagcccagagcaaggcagagcagacacggagcaaacgctgcgttcagctgggtattttagatacgtctgagaagagttttaaaataaaacttgaatttgaaaagaaatagtgagtacttaccagaggtgggcagtgctgggatgtggccggtcttggtgccggtggctggcggtgctcaggaagcagtacctgttctcacgcttgctgggtgaaactggagcctgctgttccagtgggagggatttaagtgtaggagttgagccctcggggcgtagagatgcacctgatattcctcctgcccgcagctacgattcatgtgtttgcacccaccgagctgctgcgggcagcctccccagcactggacccagcaagcaagttatctcgccgactcccagcgctgtctccagactcaactgtctgtgagtgcggcgtcggtgctgcctggacggccatatgtcagagggctttcgatgtgtccgcagttagaatagagattactatattcatcagaatcacacccgatgaatatttggcgtcatgataaagacatgtgagactttcctttagaacttgagcatgtgtacgcaggaggcaaacacttggattgattctcaagcgcgcataccctgggaggcacagtattcatggcgtccttgccatgaggtccagtgaggcctttgaggatctgtggaccttccaccctctaccctgctcctgagagtctctgtccctggtcctcctcaggagctgagccggcagggagggagcttatcccagagcctggctgcagggacctgccggagcttgcccgacaccaggcaccgcaagagctgcggagcagggtgtgtgggtgcgggggagggggccagctgtgcactcccgcaaaccaccctccccccactttaaattgcagaggcacttaacttgggggccagtttttacctccacacccccccaccaaaactgcttgcttgcttaatcggaggccgcaccccagttgtagcgaaggctggcatgtggtgtcggtttgaggactgggaaaggaggtgggatgagctggtgtcaggcccttggatgagcctgaggctgcagggcagaggctgcagggctgtggcatagggacgagctggccaggacagacaaactggttttt

SEQ ID NO: 271717 - DNA, 119 bp, Homo sapiens
  chr17:80816746-80816865
  hypo
ggactttgtctagacaagagaactgctgtcagtggcgcttcctgcggggggatgagtgcggctctcagcgcctctgtggggctgggggtcttgggccgtgaggccggggccaggctgcg

SEQ ID NO: 271718 - DNA, 33 bp, Homo sapiens
  chr17:80818624-80818657
  hypo
ttgtcttgtttcatcgcccgtgtccgggctgtg

SEQ ID NO: 271719 - DNA, 217 bp, Homo sapiens; identical to SEQ ID NO: 218335
  chr17:80819087-80819304
  hypo

SEQ ID NO: 271720 - DNA, 35 bp, Homo sapiens
  chr17:80820743-80820778
  hypo
gtctgtcctctcacgcgtccgaggtggctgccggc

SEQ ID NO: 271721 - DNA, 34 bp, Homo sapiens
  chr17:80825506-80825540
  hypo
atttggtttagttcggatcgaggtaatcatcttg

SEQ ID NO: 271722 - DNA, 58 bp, Homo sapiens
  chr17:80827938-80827996
  hypo
ctaacaggagccccgaacctctgggtgggctccgtgtcgcttgcgtgcctcactcatc

SEQ ID NO: 271723 - DNA, 84 bp, Homo sapiens
  chr17:80828571-80828655
  hypo
agcagattcttgggcgcaggtgatcggcacgctgggtggcgtgggaggaagcaagtggggcacgggaatcgcctgtgcgtgctc

SEQ ID NO: 271724 - DNA, 78 bp, Homo sapiens; identical to SEQ ID NO: 218336
  chr17:80830876-80830954
  hypo

SEQ ID NO: 271725 - DNA, 154 bp, Homo sapiens
  chr17:80831395-80831549
  hypo
caaatcaagtccccgctactggacggggctggcagctcagctggggccggagagaaaagtcacgagcaagaaagttcttacctaaggtcctggacaggcagatacataacttctgcctttggcaacgttagatgtcatcgttccagagtaaaat

SEQ ID NO: 271726 - DNA, 764 bp, Homo sapiens
  chr17:80832119-80832883
  hypo
tgaaggactgtaggacgcactgtgggctgcaggcttgaagaaggatgtgagtttctggagtagcctggactgcacagccagggcctccccggcatgtggcggggccagcgttggcctgggtcccacttggctttgatctcgtggggctttggtttttggaggtcctgggtgcgtctccaccatggctcccgggttcccttgcgcacaccgagccagcagctgctggggcctcagggctcgcagctcacaggcttctgacgcctcagcctggagctggcgttgtgcccctcgcccctttacctgtgccatcccggccgcagacccaagggtgcccttggagccgtgcccgccggcctgggtgtcaggcttgtccaacgggttcttagagaacctgggccccatccctccttggcccacgcagactccaggcatccggccgggcgggctgtgagtcaggctgcaccaggtgagcgtgtgggatgctgctggtgcgagcctccctgcccaggagccctgcgcacccgggtatcggttggggtgtgcccttccagatctccctcccttggtttgtcataggtgaccacattttaattaccagcttttatgcccgtcaatttgggaacgtgatacaatcttgatttctctaactttcacaagttcttcggtgggtcctgtaacagtgggtgcttgggatcagagcatcagagtggaattttcgcagggaaatggaaatgcctgatcgagctgggcggtggcagcagccg

SEQ ID NO: 271727 - DNA, 355 bp, Homo sapiens
  chr17:80839229-80839584
  hypo
cattcggtcaggccgcttgccgccgatgaggggtgcagagcttctgcagcatcctggggaggtcccggaacgtgggtctgggctgtgctgatgctggagcagccagcggggagagctgccaggccactcctgacagccccgcacccgctctggatggaagcttctcgctcccagccgatacgggcctgctgcctgctgctggggctggaggggcccctctgcttgagccttggggtaccccgtgcctacgtgccctcctggctttgcccatggttggtggccgtgttttgggctgcgttgatgtcgttgtggagcccgctctgggcctcggcacgtctgagcttgattggggtgg

SEQ ID NO: 271728 - DNA, 464 bp, Homo sapiens
  chr17:80847831-80848295
  hypo
ctctgcagggtggggcgggtccctgggaccagcctggccttgcggggacgcagacctgaccccgcctcatcccacacagagcaggagctggctctgttgacgtcagcttgtgcctcatccagaccatagacgggcccagaagtcagctcccagaagctacggaccccatgaccccacgaccccacatcatgctggggctgcttttgctgtgccctctgaccctgacatctggtcactggtcagcttcgcctgtgaatggggggccccaggttactcatgttgtgtgtgatgacgtcacatcttgggcgtgtggttgggtcttgcaggagagtgggacagaggccggagaggggaccggggtctgggctggacctgggcggggagcaaagttcccacgagaagtcagccgagaaggctctggagttcccggacagcaaagcaaatgcagccggggtctgggctgt

SEQ ID NO: 271729 - DNA, 200 bp, Homo sapiens
  chr17:80859372-80859572
  hypo
cctggggagcggcccggctgcctactgtggtcctgctgcctactattggtcctgcttcctggggagcggcccggctacctgcggtggtcctgctgcctggggagcggcccagctgcctactgtggtcctgcttcctggggagcggcccggctacctgccgtggtcctgctgcctggggagcggcccggctgcctactgtg

SEQ ID NO: 271730 - DNA, 42 bp, Homo sapiens
  chr17:80859833-80859875
  hypo
atatatgcccgtagcgtcggagctgtgggactctccagctgg

SEQ ID NO: 271731 - DNA, 55 bp, Homo sapiens
  chr17:80859905-80859960
  hypo
actctccagctgttgctgtctgtctctgcctcagttctgtcggcctttccttcac

SEQ ID NO: 271732 - DNA, 197 bp, Homo sapiens
  chr17:80860237-80860434
  hypo
gggccgtccttacgcgaagaggcctcgggctgggcttgcggctgcagactgcattgcctccgcttctcaggtgctttgtcttttctgttccctcagagttgcaggcgatggtcttctagacagcatgcagttgggtgtcgctcagggtgtggagtcctggcacatgagacgccacctgcctcgaagagctctttgtt

SEQ ID NO: 271733 - DNA, 140 bp, Homo sapiens
  chr17:80867214-80867354
  hypo
tgtgtcctaatgaagaactgcgctgtcaggagcaggcggggcgggtgtgttcgcttccctctctgcctatgtgtgtttgggttgagcgggtgggtgtcacccggcccgctgtgggaggcgcatgagggtctgacctggtt

SEQ ID NO: 271734 - DNA, 310 bp, Homo sapiens
  chr17:80867900-80868210
  hypo
tgcatgtacggcgccgtgttatccactcaccagcccaggctcatctgggtttccagcctttggctattgtagggaagctgctgtgcacatctagacgtacaagtcttggtacgtttcacgtttcctggctgactaccaggagcagcatcgcagggtgtggggcacatgtgtgacttctcagcagccgagccaacttcccagaccctgctgctgcacgtccccatccacaagtgaccccttggtgtggtcggctctgaacgtgggccctctgggtgagtagaggcctctcgctgctgctggagtctgcctc

SEQ ID NO: 271735 - DNA, 157 bp, Homo sapiens
  chr17:80873073-80873230
  hypo
ggacgccggcatgtcggtgacatgccgcccgcaggagcatcaggtgcgccctggccgcaggtgccccggaggtgtcgaaccgcagatttcttcagacgttttttgcacattttgtgggaaaagtggctcaacccttgggagtcgtctgcgtccccat

SEQ ID NO: 271736 - DNA, 349 bp, Homo sapiens; identical to SEQ ID NO: 218341
  chr17:80879334-80879683
  hypo

SEQ ID NO: 271737 - DNA, 155 bp, Homo sapiens
  chr17:80882754-80882909
  hypo
gtgtggctgtacacgatgggcagcagagggcctctcttcacactcgttgcttcctttcagaggagctgatcacgcagtacctggctgagcttcggaaccccgaggagatgactcgctgtggcttctcgttggccttgggcgcccttccaggcttc

SEQ ID NO: 271738 - DNA, 851 bp, Homo sapiens
  chr17:80888853-80889704
  hypo
cacggacgtgcttgcggacgctcatcagccacccggcaagtgagagctctgtgttcctgaggatggaatgtcaagtgagaaacatcgctgctttctagaagtttctggctttacatggaggcagagtatagaccctgtgggccttgacctcagaattgggaacatcctctggaagggttgttcccagcatgtgcgaggacgaggacacgggcctggtgtcccctcgggcggggcctcggcagcctctcccatgagagcacagatgccgctctcggcaaacaggaactcggcccagccatgttttcttttctcgttacgactataatcagctgcacataaaggggcagttcgatcgattttgataggtgtccacccttaaaatcttccccagtcaggacggtgggctccagcccaaggtttcctcccagcccttcgagtccgtgcccctgacctgcgtcaccatagcctcagcccatggtcacttgaggcgctgggccgcgtgccggtcgctcattcctccgtgccggtcgctcattccgccttgccgttcgctcattcctccttgctgaccagtcgtgtctgttggtggaggcaccacagtgcatctgtctgtgggcattttggttgttgccgcatcggggctgttgctggtagagctgcaggcagtctgtgtgtgcgagcctgtgggtaggtgtgcacagctgggcctccctctctgtgggctgcggagcccagctctcctgtgtgttagtcggcctgtgctaaagctctcctgatgctcctgtcgcccagaggggacctccccagcctccttttctgtggggtaaataccgaggcgccgcaggctggct

SEQ ID NO: 271739 - DNA, 54 bp, Homo sapiens; identical to SEQ ID NO: 218343
  chr17:80894204-80894258
  hypo

SEQ ID NO: 271740 - DNA, 126 bp, Homo sapiens; identical to SEQ ID NO: 218344
  chr17:80895933-80896059
  hypo

SEQ ID NO: 271741 - DNA, 226 bp, Homo sapiens
  chr17:80897174-80897400
  hypo
tcctgtcgtctctccggggtggggcggtggcgcttccctccggcaaatgcactgcatccctgtcccagatccggaagaccacggccagccaggtgtacgagacattgctcacctacagtgacgtcgtgggcgcggatgtgctggacgaggtggtgactgtgctcagtgacactgcgtggtgagtgaaggcccttcctgcacggccacctgggcctggcaccgcccc

SEQ ID NO: 271742 - DNA, 107 bp, Homo sapiens
  chr17:80897430-80897537
  hypo
ctcccaaaaccctctgataggaggaggaaagagggttcccaggtctccacatcctctgcttaggttttacaaggcagccgtgctgctgtagccgaaacctcttctca

SEQ ID NO: 271743 - DNA, 349 bp, Homo sapiens
  chr17:80898972-80899321
  hypo
ccctccttggcctcgcttggtctgtcctcccgcagtccctgcgctgggcgtggtccttcccgaggggcaccccttgttgggaaggaaccgtcctcctgcgattccggaaagggctcaggctcgaggctctgctggagaacgtgctcctgtgacgtcttttctgccctcagcctggctatggatgtcgggggtgaggtctcctttccctgactgcggccatggaagcttgacgcgggacctccgcacacctgaggttctccggtgggcactcgagagactcacggctctccctctcctcacagggacgcggagcttgcagtggtgagagagcagcgcaaccgtctgtgtg

SEQ ID NO: 271744 - DNA, 114 bp, Homo sapiens; identical to SEQ ID NO: 218345
  chr17:80917377-80917491
  hypo

SEQ ID NO: 271745 - DNA, 363 bp, Homo sapiens
  chr17:80918442-80918805
  hypo
ccagacccgggcccacgtggccgctcctcacagtgacacgggagagggaggcggaccccgcagcactgggcgcgtcctcactgggtgctgcgattccctggccgtgcctctgccaccctccacggcagctgcgccccccaggcctgtggtccccgccggaccccactcatgagactcccgtcgggttaaagggagcacagggtttcagaaggacccggcgcgtggtcattttacctctgggaactagggaaggacgttcggccttcaccctggcgctccctggcgcccttgggaaatgccccttcgtggacgccgaatccccgccaccctcgggatgtgctgttgccccgtgtcccaccagac

SEQ ID NO: 271746 - DNA, 201 bp, Homo sapiens; identical to SEQ ID NO: 218347
  chr17:80935245-80935446
  hypo

SEQ ID NO: 271747 - DNA, 164 bp, Homo sapiens; identical to SEQ ID NO: 218348
  chr17:80964419-80964583
  hypo

SEQ ID NO: 271748 - DNA, 195 bp, Homo sapiens; identical to SEQ ID NO: 218349
  chr17:80965439-80965634
  hypo

SEQ ID NO: 271749 - DNA, 373 bp, Homo sapiens
  chr17:80965857-80966230
  hypo
acagcgcccagccgcgatgctgccggcaccttcctctgcaggagacctcgcgctctcaagaggaggcgcagggaagaggcacgctctcaagaggaggaggaggcgcagggaagaggtgcgctatgcgcttaatcctgcaccgagacgtcagattctcagggcaggagcttttgtgggcaccgcacctagcacagggcctggacccagtgagcagatgtgaatgagaggcctgtgcgctggcctgagaggctggctaactttctccaggttcctagaagaagccactttcaaggctttcgagaagtgttgtgagctaattcatttgaaagcctctgtgccaacaggcggagcagaaagcgcaggccgctggagt

SEQ ID NO: 271750 - DNA, 178 bp, Homo sapiens
  chr17:80967462-80967640
  hypo
actccccgtggattcgccacagaggccgagtcctgaagacggcaaaggggcgagaccttcgatgggcagcgcaggagggtcaagcgtgtctgggtgaacccaggtgaggtgccctcggtgcatggtgctgggtgcgagggaggaaggaggggccgggctgaggcgggaggcaaatgaa

SEQ ID NO: 271751 - DNA, 197 bp, Homo sapiens
  chr17:80968046-80968243
  hypo
aaccaccaggcaggcggctcttctccagcactgctgctgctgagccacgccccagggtccagagtcaccagcaccgggggcttcggccgccactcctgagcagcgatgttgaaggcgaaggtgaaggaggagcacccaggcctgacagcccgaactacagcccagcagagcccggaggcagccgtccagtgtgaccc

SEQ ID NO: 271752 - DNA, 82 bp, Homo sapiens
  chr17:80982744-80982826
  hypo
tcctgccagacacatcggccggcacagagggcagcaaacggctactgctggccaggatcaaagcagccggcagctgcaagac

SEQ ID NO: 271753 - DNA, 342 bp, Homo sapiens
  chr17:80995219-80995561
  hypo
ctcccaccctctctgcgttctccaacccggagcagtgcccctcttcataccaggtagcagtttaatttctagcattaatccctaaagtttagccagctcaacccagttagccagaggatcccagatgtcaaaaagccaggggcataaacaggcgcagggaggaaatgcacccggggaggcgagcgcctgttctgccctgggatggatggtgggccgtgtctccagggccgctgcagccaagcctccatcatcgctgcagggccaggtgagtgccctgaagctcctcacgagaaacacaggcggaggcacctgtgaggacgaagggccggaaggggccttcca

SEQ ID NO: 271754 - DNA, 34 bp, Homo sapiens
  chr17:80997455-80997489
  hypo
ctgctgggcgcccaccgcccgcccctgttctaga

SEQ ID NO: 271755 - DNA, 294 bp, Homo sapiens
  chr17:81008591-81008885
  hypo
acggggaaggtgttcggggcttaagggcaggtttttagggcacgtgtttggggtaagtgtgctgggcacacaggcaggtgtgtgggcacggaggaggtgtgcaggtaggtgtgtgggatgcgcaggcaggtgtgcacggcaggtgcacgggcaggtatggggcacgggcatgtatgcaggacgcagagcaggtgtgtgaagcaggtgtgcaggcacaagacgtgtgtgtggggcatgggcaagtgtgccgggaatgtgtgacggcagacgtgtggggtgcgaggttgtgtgggg

SEQ ID NO: 271756 - DNA, 62 bp, Homo sapiens
  chr17:81014244-81014306
  hypo
cagtagacttaagtgcggatgtggtccctcgagttccatttttcagccgcccacattcctgg

SEQ ID NO: 271757 - DNA, 274 bp, Homo sapiens
  chr17:81015926-81016200
  hypo
tccaggggccacaccgggacctgccctcagctctgccacgtcctggccaagtggccttggcatgccagccctggtgtccacagaggcatccattcctcatggcaaagtggagtcaagtcggctgatgcaggcgagacacctggccggcctggggagccgcaccagcgctccccacattgcactgctgactgaggggtgctcggtgccgcggcttcacacggtcagtgcacagacatgaacgctggactgagaagccgccgcgtgcacctggccc

SEQ ID NO: 271758 - DNA, 127 bp, Homo sapiens; identical to SEQ ID NO: 218351
  chr17:81021377-81021504
  hypo

SEQ ID NO: 271759 - DNA, 723 bp, Homo sapiens
  chr17:81032434-81033157
  hypo
caagctgggtgtgccgacggcgctggatggcaccatacgttgtccccgttgaggggtgactcctgctcccatgattagggccaaagggtcacaacctctgcagctcccacgtggctcaggggaaatgccaaaacagaggaacagccctcggccgcagccgggggatgcgtgggtgccctgcacactggccttcaacgtttgtgagtttcaggccttcggtagttggcatatgggacactccctctccccgcaggccgtggggataccggctccttccgaggcgtttctgccgtgagcgtcctccagaacgagtgggctgaggccctcggctgacgtcctgggtgaccgcagacctgctgtgtgtggccggccggccggaccttagcacgtcatcactgggctcacggtcctgcccctgagcacatctgaccggccgtggtcagggtccacgcagacgtccacctctgtgtacaaatccaccgtgtactgtagatggcccctcctgacaccaccccgcggaggccgaggaccctccttccctgtggggtctgagtgcccgagatggcagagtcactacagctcaccagccctggggccatggtcggttcatggccgggcggagggtgagatgctgccatgaacagctgctacaaacaactgctaggacggtgtggggccagcgtgccacacagaactgtctctcactgccgagctggcggctgg

SEQ ID NO: 271760 - DNA, 288 bp, Homo sapiens
  chr17:81033466-81033754
  hypo
tacgagaaggttggcgaaaatggcctgggagggaaacgggtggcaaatgacttgggaggtggtggttgggcggggccgtgggatgaactgtgctcacgtgaacgacagactgcgacgttcttcagtatttttcaaatgctgaaagagaaaatttcatggacgcgcttggggaaaccgtgtgatgtttttctggaggaatccagctactctgggaggagctgtttctttagtgagtggattcaggtgactggtcatcttgggcagcacattggccgtcaacacacattt

SEQ ID NO: 271761 - DNA, 547 bp, Homo sapiens
  chr17:81042717-81043264
  hypo
tttggagcgggtatcgtcctcactgactctctgtgggtgcgggtggggtgtgtgacgggagctccgggcctggctgacagtgtctctcctctgcagcgggctgacgcacgaggcacacaggaaggaggtggagcaggtgtatctgcgctgtgcggcgggtgccgtggagtggatgtacccaacaggtgctctcatcgttaacctgcggcccaacaccttctcgcctgcccggcacctgaccgtgtgcatcaggtccttcacggactcctcgggggccaatatttatttggaaaaaactggagaactgagactgctggtaccagacggggacggcaggcccggccgggtgcagtgttttggcctggagcagggcggcctgttcgtggaggccacgccgcagcaggatatcggccggaggaccacaggcttccagtacgagctggttaggaggcacagggcgtcggacctgcacgagctgtctggtgagtgtcctgcctggggcgggggcggcgggcctcgtcatcacggggctggtgatgtggcaggt

SEQ ID NO: 271762 - DNA, 812 bp, Homo sapiens
  chr17:81048444-81049256
  hypo
agtgaggggaccctcgggtggactggggtcaccacgcttctgtcgttgaccagctctctctcagccgaggccacctccactcacatgaggcgccctgggctgggacctctggccctgtggtacggggcaggtgctggcgtgcagtctcacctgtggaggataaaagtgctgcctgaaatttgagatcccccagtgctccctccttgttgcttccggacgtgagtggtggtctgtgctgctggcctctgtccagcacgtgcctgcatcaggcccagcatggtctgcagacccccagccggcgagtgggatgggggtccacataggtgaactaagtgtcaagggtgggccacaccccggggcccccataggagagcgcaccgggcggcttccagcttgggggtcaggaggcccccgtggtgggggctgcagtgtgagtctgtacacatcagcaggaaggggatttggccagaagctcccattctggagggttgctgggatggcagaggtgcccccccagtgccaggctggaccggcctcaaggtgctcagcagtgccaggctggaccggcctcgaggcgcccccagtgccaggctggaccgggcctcgaggcgctcagcaggctgtgcagtttctttttcctgataccttaatggaagcaaatgcaggaggaggtgggtgggccggtgagtcaggcactgagcccggctgggaggcgccctcacccctgcctggcggaaagtgctggccttgtctctgggtccctcctacctccaccctgcggggtccacaaagacctgcgcttgcccagtgca

SEQ ID NO: 271763 - DNA, 404 bp, Homo sapiens
  chr17:81049917-81050321
  hypo
gggaggccaggccccgcagggttcaggggcttcagagggggttctgtgagcagggcttggcttgaaagccatttggggcatgcacctcatcccgcggccaggtggcatccggggaaggggccgggccgatggccctgactggaactcactgccctgctgggtgaggccccacgccggtggcaggtggacgcgtcgctgcctgcttagggatccccttcctggaatcttggcctcgctggcccttccagccacatggggggtcccgcgggatgggatcctccttttgggtgccgctgccgtcgcgacccagggaagtgggcagcagagctgtggggagtgtctgcccttcgaggaagctgggaaatgagggtggtcccggcgccgtgggccgtggaggtgggttg

SEQ ID NO: 271764 - DNA, 380 bp, Homo sapiens
  chr17:81050555-81050935
  hypo
agcacaaagacccctccccacgaaggccctgggacatggccggactgagggtcttgctctcggacatgtgcccatcatggccgaggtgcaggtgcctttggtccaggtggggccgaggggtcccctgggtgagaccccgtcgtggtcgaggttgtgttttctgtctcccgtgctgccggcccctccagcacgtgccgccaactcacatttgaagtggcgttggtcacaaaggtgccttgacgtggacaccctccctgacttggctttgctgagtgtgagatcctttgacggtggtgggcggcgttccagagcctgtcccgtccaggctgcttcctgactctgcctttcttctccagcgccgtgccgtccctgcagtgaca

SEQ ID NO: 271765 - DNA, 315 bp, Homo sapiens
  chr17:81051924-81052239
  hypo
ggcagggggaggtgcggtggtcttgctgtgtgcttgcctttgctcactccctgtccccatctccttccccgcacagccgttcgaggctccatccagcaagttacccacgagcctgagcggcaggactcagccatccacctgcgcgtgagcagactctatcggcagaaaagcagggtcttcgagccggtgcccgagggtgacggccactggcaggggcgcgtcaggacgctgctggagtgtggcgtgcggccggggcatggcgacttcctcttcactggccacatgcacttcggggaggcgcggctcggctgtgcc

SEQ ID NO: 271766 - DNA, 467 bp, Homo sapiens
  chr17:81062114-81062581
  hypo
cgcgaccatgggtacgttggccacctgaaggttgagtcccgcagcctagagactggagcgtggggaccaggaggagcttcttagcggaactgggctggggctcatgcagccctccaggagcccccgacgcgacgccctggctcatcccgggtgaagaggctgctgagtctgaactgatgacagtggacgggtggccgccggttcccaacgcatggttgggcctggaacccaggtgactctgggagatgtggtcacagtcacagccgtctgtgggcctttgggttcaaaacagcgcgagtcacaggagacagaagggaatctgagcttgcgattgctcattcttgtcaccctcctggctctgggacacctctgccatctcctaccaagggtaccccattcctggcgagttggaaagtggcctcatgggcagaaaacgagggcaaagggagctgcgtgctgtgagagac

SEQ ID NO: 271767 - DNA, 180 bp, Homo sapiens
  chr17:81063043-81063223
  hypo
cgaagcaacagaagcgttcgcactggctctgggtgcagcctgcatcttcagccctggggcactgatgctgggcagcttctcggcttcactcgggaagggactcaggagcgaggtggtggggaagccagcagcttggctgaggcggcagtggaggtggtccagctccgcgactgctcccac

SEQ ID NO: 271768 - DNA, 427 bp, Homo sapiens
  chr17:81068540-81068967
  hypo
acagccccgtccagcgctgacctgtgggaaaacggcctcttggcaggtcagtccaggcggtggtttccctggagccaggggctgggttccagagcccggccttccacccctacagcgggcagggctgacgggcgcgaaactgggagcgtagctctgggaggtggcctcggggaaccattttcccaccgggcgggcccttttgttctcctgtctgtgcgcgcagggcagccaggtcccgggatggaccctattttgagagatttattgactttctttttcttttgaaagggctgtggccaggcagaatattgaagcgaaggagcccgacagtagccgctctctcagggtctaaggcaacagagagctcccaggtgtgtatagagcggggcgggagtcgggtctgcaggacggccggtggggaaaggcc

SEQ ID NO: 271769 - DNA, 141 bp, Homo sapiens; identical to SEQ ID NO: 218358
  chr17:81080731-81080872
  hypo

SEQ ID NO: 271770 - DNA, 261 bp, Homo sapiens
  chr17:81101703-81101964
  hypo
cttgctgtcaccaccgtggctggtctgtcagtcggggaacttgggaaccccagaatcctgcaggccgaagggaccttgccctcgagagggggtgaggaaacgaggctgagacgacctttgccagtgcccttggggggcgaagcgggatctggccttggcgtctgcccttttcaagggtcctccctgcacgcctggcgcctgtccctccccacagtggggagcaggggagccccactctacgtcccccgtttactgtcccca

SEQ ID NO: 271771 - DNA, 192 bp, Homo sapiens
  chr17:81102241-81102433
  hypo
tcctgggcttttctccgctgctcccacagagccctgggcctgggagggtgggaccacccaggaaggggacaattctgggccccgggatgcccccccgctctggggacaaggggatggtttgttaaaatcccactcccgctctgttgtgaaagatgattcttgtcttcctgcaccactcggcctgtcctgagg

SEQ ID NO: 271772 - DNA, 177 bp, Homo sapiens
  chr17:81104183-81104360
  hypo
gcatgttgttttaacgtatgtgagtggaaccccttgttctcatgccgcagcccattgtgtgaataggctacactatacctgtctgttcgattgttgatggctatttgggttgcttagtttatggccattttgaatatgctgccatggctgggtgaacatacgcgtttccgctgggtg

SEQ ID NO: 271773 - DNA, 44 bp, Homo sapiens
  chr18:72942-72986
  hypo
ggaaacgagcgaaagtccgtctcgaaagaaacaaaacaaaacaa

SEQ ID NO: 271774 - DNA, 92 bp, Homo sapiens; identical to SEQ ID NO: 218359
  chr18:196512-196604
  hypo

SEQ ID NO: 271775 - DNA, 250 bp, Homo sapiens; identical to SEQ ID NO: 218360
  chr18:196807-197057
  hypo

SEQ ID NO: 271776 - DNA, 91 bp, Homo sapiens
  chr18:320960-321051
  hypo
gtagatgctcaatagatacacgtggaattgaacgcttggccacctggattagctgtgtatggatgtctacggaaaagaactaacattggtg

SEQ ID NO: 271777 - DNA, 137 bp, Homo sapiens
  chr18:380756-380893
  hypo
gaaatttgggaatgtctttacgttcttagagacctcatctgcacaggcctcagctttcaactcaggcagagtacgtaagtttgcatgagaacgtagagtagacaaaagtgagagacggcagaaagaaagaggtacag

SEQ ID NO: 271778 - DNA, 42 bp, Homo sapiens
  chr18:460335-460377
  hypo
ccagcccaagtttcattttacgcatcagtgaaagcctcagcc

SEQ ID NO: 271779 - DNA, 793 bp, Homo sapiens
  chr18:580159-580952
  hypo
gctgttcttgccagctcaggcgtcaactcgtggaaaccggttaatgacccgaggggacagcggattctcgcctaagcaagatcccgcagatgggagggcgtaggaagaggttccccgggccggctccaggccccagcgggcgtgggcgttggcagtgagcgaggggtggtcccgcgccgcgccggcggggggcgcccgaatgagagcgcggggcggtgccgttgggaccacggcggccagagcggcaggatggcttccggcttcaagaagcccagcgctgcctccaccggccaaaagagaaaggtggcacctaagcccgagctcactgaggatcagaagcaagaagttcgggaagcatttgacctcttcgacgtggacggaagtgggaccatcgacgcgaaggagctgaaggtggccatgagagcgctgggcttcgaacccaggaaggaagagatgaagaaaatgatctccgaggtggacagggaaggcacggggaagatcagcttcaatgacttcctggccgtgatgacgcagaagatgtccgagaaggacaccaaagaagaaatcctgaaggccttcaggctctttgatgacgatgagaccgggaagatctcgttcaaaaacctgaagcgtgtggccaacgagctgggggagaacctcacggatgaggagctgcaggagatgatcgacgaagctgatcgggatggggacggcgaagtgaacgaggaggagttccttcggatcatgaagaagaccagcctttactgaagtcggttcagaagctaaagtgact

SEQ ID NO: 271780 - DNA, 97 bp, Homo sapiens; identical to SEQ ID NO: 218362
  chr18:635705-635802
  hypo

SEQ ID NO: 271781 - DNA, 37 bp, Homo sapiens; identical to SEQ ID NO: 218363
  chr18:698119-698156
  hypo

SEQ ID NO: 271782 - DNA, 163 bp, Homo sapiens
  chr18:930036-930199
  hypo
cagatgacaatagctggttacgtcgactggttaagcttggctttctcattagtgtctttgactataatctggctcgatgttcatattcaccatgtgactcaaaatggtgaactccatttgtttctcgccacagaggatttacgtccatttttttcttaatttt

SEQ ID NO: 271783 - DNA, 95 bp, Homo sapiens
  chr18:1098042-1098137
  hypo
gacagcatgctggcagccctcgccggctctgggtgcctcctcgccggctctgggtgcctcctcgcctcgcgcccattctggccgcacttgaggag

SEQ ID NO: 271784 - DNA, 80 bp, Homo sapiens
  chr18:1772178-1772258
  hypo
atgacttatttggttaagagcgaggagttgtaagattgcaaatttttggccgggcgcagtggctcacgcctgtaatccca

SEQ ID NO: 271785 - DNA, 77 bp, Homo sapiens
  chr18:1798116-1798193
  hypo
tgaaccacacccatgtaacacggcaaacttaataaatgttacctgtggccgggcgcggtggcccatgtctgtaatcc

SEQ ID NO: 271786 - DNA, 46 bp, Homo sapiens
  chr18:1800381-1800427
  hypo
tagaagttgagttttctagtcggccgtcttttattcctctagacta

SEQ ID NO: 271787 - DNA, 93 bp, Homo sapiens
  chr18:1847233-1847326
  hypo
accaacttagtttcccatagcgggggttcccaacccctgataccggtcagaggcctgttaagaatcaggctgcacagcagaaactgagcagca

SEQ ID NO: 271788 - DNA, 34 bp, Homo sapiens
  chr18:1928649-1928683
  hypo
actctagcgggaaaagaatcgggagaccctgctc

SEQ ID NO: 271789 - DNA, 63 bp, Homo sapiens
  chr18:1955269-1955332
  hypo
ctacaccatccctgcagcagcggcaggcgagagtgacaatgcgaggccagggtagagagtggt

SEQ ID NO: 271790 - DNA, 329 bp, Homo sapiens
  chr18:2405969-2406298
  hypo
gtgggacagttggggcacaccgggaaggttggccagcctgggcggaagcactagactgccctgccgtgcagtctaagacaggcttggcaaggccatcagggcgtccttgagccgaagccacccatcgggagagtcttagtaccgactgccacactcatcattggcagcagcagctcgtgggaatttcagcctcagtgaaaaagcggtaaaggatttgcgagcaccgcagcaggggccctaagtcgattctgggcagcacccggtagccgggattccatgaggtgcattcgcatggaggtcttggaagcgggtattgggaagggagaagg

SEQ ID NO: 271791 - DNA, 92 bp, Homo sapiens
  chr18:2565718-2565810
  hypo
tagaaagagctcaaacgtttgttcggtgagtaatgaatgttaatcctatcactaaaaaagaaaatgttgaggccgggtgcagtggctcaagc

SEQ ID NO: 271792 - DNA, 192 bp, Homo sapiens
  chr18:2851484-2851676
  hypo
atagagagagtgctccgagactgagggtgaaaccgctgggaaatggggtgtgatggaggtactcatttaaataacaggaggagggcttctgcgcccagccatgtcactgggccctgacagcctccttagctgtagagactgactacaggccgcaggtgccttgtcagaaggattagacggtgccctgtttac

SEQ ID NO: 271793 - DNA, 180 bp, Homo sapiens
  chr18:2876295-2876475
  hypo
aagctagcttgttactctatgtgataaggaaattaattcaagaggaaatggaaaaataagcagcttacaattgtgatttctccagcagatatatcttttgtactgggaaacagtctcctgtagaatattttcattttgaacacactgcattggtcttagatctgttattttaaaaatacg

SEQ ID NO: 271794 - DNA, 127 bp, Homo sapiens; identical to SEQ ID NO: 218370
  chr18:2910112-2910239
  hypo

SEQ ID NO: 271795 - DNA, 34 bp, Homo sapiens
  chr18:2910452-2910486
  hypo
ctgggctgctctgcccggacggagggcagctcca

SEQ ID NO: 271796 - DNA, 148 bp, Homo sapiens
  chr18:2913121-2913269
  hypo
agagagacgcctacgtggaagcagtgctgtcggtctccaacgccagcgtggcccagctgcataccgctgggtacaggagagagttcctggaataccaccgccctccaggagctttgcatacctgcgggggcccgggggcattccacct

SEQ ID NO: 271797 - DNA, 127 bp, Homo sapiens
  chr18:2921216-2921343
  hypo
gctctggggtgatccaaggacgcagctcagaactgcttagaagaggagccggagctgcctgaggaaatggaatggcagccacagaaacgatggaaaagcgtccttcgtataaattctggggcagatc

SEQ ID NO: 271798 - DNA, 216 bp, Homo sapiens
  chr18:2921975-2922191
  hypo
ccccaccttgggcccagccccgcccacatgctggggcggtgggcagagggctgcctgccggagaggtacctgtggaaggcggagaacaagctgctgggggacagcatcagggggccccggggcaagattgtgcccttgtcattgacccagtgcaggtagccacgggtcatgtcggccatgccgatggcacgagccgagcagtacagaaacttgtag

SEQ ID NO: 271799 - DNA, 211 bp, Homo sapiens
  chr18:2937551-2937762
  hypo
aaaaaaaaaaaaaaaaaagtgcgacgggtttcgactggtgaatacaaatacagaggcagccatcacgttatgtggaacactgaaataatttaccatctaatttgagagtacctggagccaaattaaacaaacgattacctttcttctttgacggcgagtctactttagctgccggtttggattctgagggcgcctccgctaaggctgcgtt

SEQ ID NO: 271800 - DNA, 165 bp, Homo sapiens; identical to SEQ ID NO: 218371
  chr18:3011266-3011431
  hypo

SEQ ID NO: 271801 - DNA, 162 bp, Homo sapiens
  chr18:3026813-3026975
  hypo
acccaacctgtttgctttctttgaactggatggttatcattcttagtcctgggcacaaagattcttccagttggtcgatggactttcttattttcaccggtcatgtgctgccaggtcataaaaccagggatcttgaaggccaaggtacggaaccgcagctgc

SEQ ID NO: 271802 - DNA, 161 bp, Homo sapiens
  chr18:3051275-3051436
  hypo
taaattaattctcacagaaacgtgaagcagggaagatgctcactgcgtgaagttgggagcagcatcggtcctgcccagtgctgtgcatgggtgacttgatcgcatgagactttgggccgagaggggctttattcatactcgctagcagaaggagtagatgc

SEQ ID NO: 271803 - DNA, 233 bp, Homo sapiens
  chr18:3061440-3061673
  hypo
ctcgattctgcccccgcaacgagttgcttctcttctttctctgcacagtcttcactttcatgaagccaaatgcctccttgcaattcagctcctggttttgagtgtgtaaggaagacacacgcttctcgtgaaattctggagaatgtctccggactgcgtgggaagcttatgaaccagaggtgcctgtactgacagaagcctgtgagcaaagagggttccgagaactggttagc

SEQ ID NO: 271804 - DNA, 135 bp, Homo sapiens; identical to SEQ ID NO: 218373
  chr18:3119810-3119945
  hypo

SEQ ID NO: 271805 - DNA, 160 bp, Homo sapiens
  chr18:3126626-3126786
  hypo
tgtgcctgcctgggcgtgcaagcatagcgtcatacataggacacgccacactacagaaagtcacgtgcttaccttgtatgcctcctcactgacagccttgacattggcttctctccattttcctggtaccccatcaatgacctcgcgatagttcacataa

SEQ ID NO: 271806 - DNA, 126 bp, Homo sapiens
  chr18:3135595-3135721
  hypo
ctcctgcagaattagaacagcggacacggaaacagtaggatttcccctcggccaagtcaaacagagcaaagcggggagacttcacagggagctccgtgttcactcgctgccagttttctgttcctg

SEQ ID NO: 271807 - DNA, 271 bp, Homo sapiens
  chr18:3214253-3214524
  hypo
ctaggcagaaacattctgagcgcaaggaaacccgctgtgaatactgaaatgatcttttctcgccctgctgctgctaaagtaacctgtggcaaaatttgcctgctcttagaaatagcaaattggcaacacaagcaagactcgcccgtgagaacaccaggctcttagtgaagctaaaagagacaataaagggaaataggtaggcacgggtcccgggtctcccaaacaaggtctgtctgcacacttggttgaaatgcagggctgccgtatttaa

SEQ ID NO: 271808 - DNA, 600 bp, Homo sapiens
  chr18:3214824-3215424
  hypo
aaaaaaccaaaaccgaaccgaaacaaagcgagaagtaactgggagggttactcagagcacacgcctcttcctgaggttggaaggttggaggagggcgtccgacatacccatgggaggagccataatcgtaggctgaggctgccttccgactgacttcagagctcagggcgtgctgcgaggcctgctgctgggaggaggaggcggacgcccgacggaaggcctcggactcccggcggtgcgcggcggaggagcggctgctgtaggccgtggagccctgggtgtagacggcggagcgtttcttctcccgctggtagtgactcacggtgctgcgcacgtccttgttgcggtagctgagatcatagtgctggtggcacctctgataaaaaggcaaagacatcctgtgccccttgaaggaaccgggccacctgaaggaaaacaacactttttgagtgacttattaaggaacaaattccatagaccaagtcatctaaatcaatgtgtaaaaatcaatactcttggctgggtgcggtggttcatgcttgaaatcccaacgaggatctctcgaggccgggagctcaaaatcaacctggccaacacagt

SEQ ID NO: 271809 - DNA, 256 bp, Homo sapiens
  chr18:3330573-3330829
  hypo
gtcacaggggaatgacggcagctgtgccaatagaaaaggaaaaggactacctgggggcggccatgtccaacatggaggctccatcttctctttttttgttatcacgtgtacagtaataaagaaatgggcaacatggtgcacctcaggcagagacgcgcctggataataaaaaaaggttaggatgggggataccagagattcgtgccctatgcaaatagcacaactggtctaaccagtctttcttgccctttcttgc

SEQ ID NO: 271810 - DNA, 329 bp, Homo sapiens; identical to SEQ ID NO: 218377
  chr18:3360375-3360704
  hypo

SEQ ID NO: 271811 - DNA, 36 bp, Homo sapiens
  chr18:3412987-3413023
  hypo
cctgggcgacaaaacgaggctctgtccccaaacacc

SEQ ID NO: 271812 - DNA, 238 bp, Homo sapiens
  chr18:3415134-3415372
  hypo
caggcaccatgatcccggctctgccttccggcgacccggagctcattgctctcatcctggagtggctcaagagccaggcccgtttggcagcttctgtcgatgctgcctggcccctgtggacaccaagccagcttaccaaaaccagaggcagaaagctgagggttcggtgtccacacacctggatgagcagaactggaatcttatgatgcgcaaaagcctattgcgaaatggtcagagg

SEQ ID NO: 271813 - DNA, 35 bp, Homo sapiens
  chr18:3417143-3417178
  hypo
gttgttgttgttgttcgttgtttgtttgttttgag

SEQ ID NO: 271814 - DNA, 90 bp, Homo sapiens
  chr18:3421739-3421829
  hypo
gtactctttctgtttaataaaaaaattaactgtaaagcaacctcaggcaggtccttcaggaggtattgcaaaagacggcattgttaccat

SEQ ID NO: 271815 - DNA, 89 bp, Homo sapiens
  chr18:3439668-3439757
  hypo
tcaggactagtagacgtgtgtgaattgttgcctgtctcagggaaaggagaaaagaaaaataggaatggggccaggcgtggcacctcatg

SEQ ID NO: 271816 - DNA, 86 bp, Homo sapiens; identical to SEQ ID NO: 218378
  chr18:3443525-3443611
  hypo

SEQ ID NO: 271817 - DNA, 120 bp, Homo sapiens; identical to SEQ ID NO: 218379
  chr18:3443851-3443971
  hypo

SEQ ID NO: 271818 - DNA, 94 bp, Homo sapiens; identical to SEQ ID NO: 218380
  chr18:3445349-3445443
  hypo

SEQ ID NO: 271819 - DNA, 42 bp, Homo sapiens; identical to SEQ ID NO: 218384
  chr18:3534580-3534622
  hypo

SEQ ID NO: 271820 - DNA, 38 bp, Homo sapiens; identical to SEQ ID NO: 218385
  chr18:3535411-3535449
  hypo

SEQ ID NO: 271821 - DNA, 32 bp, Homo sapiens
  chr18:3570505-3570537
  hypo
acctcagctgatctgcccgcctcagcctctca

SEQ ID NO: 271822 - DNA, 97 bp, Homo sapiens
  chr18:3580250-3580347
  hypo
agtggagtgggggacgctccaggcaccagcaatggcgcaactgtctcttccaccaaaaggcacaagtccctttttcagtgcgcgaaatgtagttttg

SEQ ID NO: 271823 - DNA, 213 bp, Homo sapiens
  chr18:3580780-3580993
  hypo
gtcaggggtggtgccgaagcgtcttccacctgccgtgcggaccgtggaaaataaaaggctctgcccccggggtgagtgtggccggttgtaccctgcagtagcgtctgccctgagctgccagtgctgggtatcccccagccccaggaaatgtggggtcggccgggaccctcacagctctgaatttgcttctgttatttacggctttttgctgct

SEQ ID NO: 271824 - DNA, 262 bp, Homo sapiens; identical to SEQ ID NO: 218386
  chr18:3581880-3582142
  hypo

SEQ ID NO: 271825 - DNA, 62 bp, Homo sapiens
  chr18:3592367-3592429
  hypo
gccagacaaatcagcggtctggctggagtcctccaccggcaaaaatgcgcaaaccctggcaa

SEQ ID NO: 271826 - DNA, 36 bp, Homo sapiens; identical to SEQ ID NO: 218387
  chr18:3600255-3600291
  hypo

SEQ ID NO: 271827 - DNA, 35 bp, Homo sapiens; identical to SEQ ID NO: 218388
  chr18:3600531-3600566
  hypo

SEQ ID NO: 271828 - DNA, 92 bp, Homo sapiens
  chr18:3602008-3602100
  hypo
atgaatgaataaataaataaataaaacatatgatttaccttggcccactataattttgcactacagggtggcagctccgtgctatgtacaag

SEQ ID NO: 271829 - DNA, 76 bp, Homo sapiens
  chr18:3608039-3608115
  hypo
accagctcagctgggcgtggtggcctgtaatcccagcattttgggaggatgcgggcagatcatgtgaagtcgggag

SEQ ID NO: 271830 - DNA, 93 bp, Homo sapiens
  chr18:3610054-3610147
  hypo
tcaaaaataaaataaaaaattgctttaaaaaataaaaattcatctcatcgctgttctcaattcatatgtcctctccttcgagagggctttaaa

SEQ ID NO: 271831 - DNA, 35 bp, Homo sapiens
  chr18:3628499-3628534
  hypo
taattacaaaatgaagattccgaaaccaccacgta

SEQ ID NO: 271832 - DNA, 154 bp, Homo sapiens; identical to SEQ ID NO: 218389
  chr18:3637284-3637438
  hypo

SEQ ID NO: 271833 - DNA, 37 bp, Homo sapiens
  chr18:3640025-3640062
  hypo
tacaggcgtgagccacggcacccggccccagagttgc

SEQ ID NO: 271834 - DNA, 139 bp, Homo sapiens
  chr18:3648338-3648477
  hypo
tgtggcaatatttacgcatgtaaagcatcttagttgaataccaaattcaaacaaaatcaatacaaaatggattttacagttaattttaatgggtgtgatgtatcgtttaagagggtgtgatttccgggttcataacatc

SEQ ID NO: 271835 - DNA, 99 bp, Homo sapiens
  chr18:3668966-3669065
  hypo
gagtaagactctgtctcaaaataaataaataaataaattaaaaagcaatagaatgatctacataatatttgacatgttaatattcgtacagcatctttg

SEQ ID NO: 271836 - DNA, 79 bp, Homo sapiens; identical to SEQ ID NO: 218390
  chr18:3669445-3669524
  hypo

SEQ ID NO: 271837 - DNA, 286 bp, Homo sapiens
  chr18:3729121-3729407
  hypo
cccgcgcactcacccgtgctgctctggatggtcctaacggtggtggtggtgcgcggcggcgaggacgacctcagggacacgcactcgtcgtcctgggagcagcctttctcaatggcccgcacatagctgtggctccgcatgcggaagcagccgggcatgggcaggtccagcgcttccacggcctgcgactccagctcgctgaacacggactcgcacacggactcgaactgcccgttcacttccatctcgctcacctgcgggcagacacaggcgttgtgacactcgc

SEQ ID NO: 271838 - DNA, 76 bp, Homo sapiens
  chr18:3879110-3879186
  hypo
cctgcaggtactggcaggagcgttcttgctgacacgactcggacttcaccatggcctggtccatgttcaccgaggc

SEQ ID NO: 271839 - DNA, 64 bp, Homo sapiens
  chr18:3920623-3920687
  hypo
tgccttgcacttggcgttcagttagggcgaaactctctctctcccactccgctccacccaagga

SEQ ID NO: 271840 - DNA, 169 bp, Homo sapiens
  chr18:3931025-3931194
  hypo
agacggtaagctcccggcatggcttctgggtgtagtcactgtgccaagcttaaggctgggccagtcccacgaactgctcctgcctccaccggctcactctaccaagtctggacttgccacatatatgctgctgcctgggctcccttcagcttctcgccggcatctcact

SEQ ID NO: 271841 - DNA, 195 bp, Homo sapiens
  chr18:3986862-3987057
  hypo
ttgtcctgagctccccggatactggacccttcaatggtgacaccctgcctcccacaaaaatgtcctatgatttagcaactgaaaagttaatgctcgacacaggacgaggctctgactacgcagagccattttgattggacactggtttaataacttgactatcaccctgcaaatagcgctcgtttccaggtatgt

SEQ ID NO: 271842 - DNA, 76 bp, Homo sapiens; identical to SEQ ID NO: 218393
  chr18:4009176-4009252
  hypo

SEQ ID NO: 271843 - DNA, 37 bp, Homo sapiens
  chr18:4042775-4042812
  hypo
ataaaattatggttcatagcaacgatgtatatcactt

SEQ ID NO: 271844 - DNA, 239 bp, Homo sapiens
  chr18:5133034-5133273
  hypo
tcagctttccgcctcgggttttggtaagctggtttggtgtccatgggggcctggctcttgagctgctccaggctgagagcagcgagctgcgggttcccgggaggcagcgaggcgggttgatggggccgccctcccgcctaagcctggccagctccaccaccaccgaccacgatggctgcgccccgggccgcgaggaagatggaacacagcttcttctccaggaccgagagcccagaatg

SEQ ID NO: 271845 - DNA, 154 bp, Homo sapiens
  chr18:5149403-5149557
  hypo
gaaaatagagatacaaatgtcgtagccaagtgtccaggaaccgttcagctgagcttcatattacaactcagatattggaaaaatccagtatactccagttattgtaccacctaggttatcctctgccatgagcgagcctcgtctctccatctgc

SEQ ID NO: 271846 - DNA, 35 bp, Homo sapiens
  chr18:5388296-5388331
  hypo
ggattacaggcgtgagccaccgcacctggccgata

SEQ ID NO: 271847 - DNA, 221 bp, Homo sapiens
  chr18:5469572-5469793
  hypo
gccaactgcagcctgcaagtcgagtgggcggaatgagcccaatgggcctgagcaaaaatcaagcataggcgccacccgccctagaggcttccggctggaaaaggaacgtccgaaagatcctgtgacactactaaaacacaagtccacgctggagacaaatactatactttggatcgttccttctgctgttgtagaatgaattttttttttttttttttgag

SEQ ID NO: 271848 - DNA, 40 bp, Homo sapiens
  chr18:5533864-5533904
  hypo
gccataaagaaacccaaggccgggcgccgtggctgacgcc

SEQ ID NO: 271849 - DNA, 198 bp, Homo sapiens
  chr18:6284881-6285079
  hypo
gtcggagcccggaacggggagggaaaacatccacaagttggggagtaggcacaggcctcagagcctggcagggcagcctggcatgggcgggggcgggaatgaaccctaaacaaggcgttgagggcacccacctggaggctgacccagcgaggggagtccagtttccggagggcgtcgagaggacggcttctgcggggc

SEQ ID NO: 271850 - DNA, 165 bp, Homo sapiens
  chr18:6444200-6444365
  hypo
aggatagtcactaaagcaagcgggacttgacattctccttcgattctgcagcaactgcggcacggtgctgatggcagggctgttgtaggccaagacaggcctaagacaatcccttgtcttccagaagaccaccaggatggctgcgtagtagaaaggagagcttta

SEQ ID NO: 271851 - DNA, 677 bp, Homo sapiens
  chr18:6929367-6930044
  hypo
ggagagccctgtagagtccccgcccagcgtgcccacccagggtttccacccagtgtccccgcccaggtcctcaaccaggtccccgcccagcgtccccgcccagcctcccggggtctacaccaggccacctgcgctcgctggttgacagcacagccccttccggctagcttgacggcctccgcccgatccaccctgcgtgaatacaattatttccctctgccttccactcggagagagcggccaggatgccaactggcttcactggaaacaccccggccccccagccctcctggggcatctctaggtgacaccccacaaggcctgaggcctctacgccttctctcccatccgcagtgaccctgcctcgcacctgccacgtgggtccagccacactgtcccggcagacgctctcaccttagcctcgggctggacttactgcttccaaaagcgctgggcacagccttatatgactgaccccgcccccgagtcccaggccgccccatgcaaccgcccaaccgcccaaccgccactccaaaggtcaccaaccactgctccaggccacgggctgcctctccccacggctctagggcccttcccctccaccgcaggctgaccccgcccacctcaccaacagacacgccaactgcgtctggccccgcccccgccgttctctcttc

SEQ ID NO: 271852 - DNA, 69 bp, Homo sapiens; identical to SEQ ID NO: 218397
  chr18:6953009-6953078
  hypo

SEQ ID NO: 271853 - DNA, 80 bp, Homo sapiens; identical to SEQ ID NO: 218399
  chr18:7351750-7351830
  hypo

SEQ ID NO: 271854 - DNA, 409 bp, Homo sapiens
  chr18:8348210-8348619
  hypo
cacagacttgctgccgattcattaaggcagagctggggacctgcttccccccattttgccctgaagcgctctgcattaggcggccctaattgctggtgttggagccgccaggagacctttcctgtcgcagcacctggtgcagaagacatagatgctgcacttccctccagcggggtccccggtacatctgacaggacctgtcattatctaagacttccttgtcaccaccatgcctccccttttagcccacgtgttctgggaagagacccttgtcagttttcctggcacctgccaccggctgcacacctggcattgaaatggcgctggaacgtgttgtgattattttccctctttaatgaacccacctgagggacatttagtttcttaatccagtcgcctgtttcccagg

SEQ ID NO: 271855 - DNA, 33 bp, Homo sapiens
  chr18:8400564-8400597
  hypo
ccctgcagtgccatgcggcggtgttcacagctc

SEQ ID NO: 271856 - DNA, 245 bp, Homo sapiens
  chr18:8612037-8612282
  hypo
tccactcatcagatcgtttgttgagcacctactgtgtgttgggtgttatgctacccagtggggattcagtggtaaacaggacatcgactctgtccagaagtggatcggagcttctgggagctgcgtgaccgcttgtcagggcagtgacagatgtgtatgggtatttgggagcacagtgaaagcgcctccagtcgaggctagtgatgaggcctggtcagagaaggcttcctcgtcattggaatgtt

SEQ ID NO: 271857 - DNA, 51 bp, Homo sapiens; identical to SEQ ID NO: 218404
  chr18:8612504-8612555
  hypo

SEQ ID NO: 271858 - DNA, 524 bp, Homo sapiens
  chr18:8625460-8625984
  hypo
gggcatactccttccggctgtactgctgattccacgggatgtgagcccccactaatgcctactagaaatgaatccaggcccctttctcaaatcacaattggaatgagagactcaaccagctgtgttataactgcactcagcactaagagctttctgttagctattaacctgttaacagcccgcaggtgctagcgacctgtctgtggaagaagggataagatctggtctggtggtctggcggtggcttaaaagtagccccattgaggtgctctgagaatgccgttttgttttgaatgctacagctgcggtgtactcagcttactaactcctcttggcaggtcaccctcagctctgattgtttgtccaccatgtgtgtgtttgctttcatctgcgttaattgctgcttcatctgtggcatcatcggtcacctaatgcttgaatgttagtgccatgtcttcattcttcatccgtgtccctgtctgggccgcagctgcagccaagccgcagtgcctgccttctggagg

SEQ ID NO: 271859 - DNA, 804 bp, Homo sapiens
  chr18:8659285-8660089
  hypo
gaggcagcgccccgcgcagaacgcccgtgcctgggaagaggcctgcactccagcagacttccatgttcgctggaagcctcccttcctgactgtgaattgggacaatgcgcagacttccatgttcgttggaagcctcccttcctgactgtgaattgggacgatgcgcgggattttctgaaacctcagttcctccgtctgtaagatgagattgtggggaggagggcggacctgtaagtgcccagccacgagggctgagagattcgaactcctttgctgccgcgaagaagggcctgttccccggaggccaggtgggctccaggccaagctcgcagaggggccaggtgtgctctggcggtgagagggccgcgcgtcccggcacacaccccgcccatttcagcaccctctccaccctcctcagatgaccagagaaatccaagcaggcccttggctttcaagattcagcttcagccatgcataagtccttcactgaagtggcagaggaaggacgagcggctttgttggattggggctggagccccgtgcccggctgtgggtgctcgtgggagagcctcgcccggccctgcgcttcccgagagttcgccgggagcacaagccctggagagcccatgggcagagctcaccagccccacctcacagagagggaaactccgaagtggccgtggatttgcccagggtcacccagtgacagacagctcagactcctttcccagctccggccaccgaagcttgcaggcgcgtccgttccagctcagataagcacctccgccacgctttcctcacgcc

SEQ ID NO: 271860 - DNA, 100 bp, Homo sapiens
  chr18:8662986-8663086
  hypo
taacttgtccctggcgtcctcactcgctgtctggcctggcaagcccgcggtgagctcccatctgtcccctgtcatctgcgagctgcgctatggaactgat

SEQ ID NO: 271861 - DNA, 217 bp, Homo sapiens
  chr18:8708639-8708856
  hypo
ttctgagttgttttcgtagctcaaaatgttccttgtggtgagcttttctaggggccctctgttttcttttcaggtgagagggccgtcatgcccgtctctccactagcctgtgtacgaatggtcacataaatcccactgccagtgtttcagttgtggggactgttcagttgccatttactgtggagaaggtgtcacttgcatccgtttactctgcctg

SEQ ID NO: 271862 - DNA, 56 bp, Homo sapiens
  chr18:8711911-8711967
  hypo
gactgtgttttgctcgagtgctcggagacagtcagacaagccggagtgctcgttgt

SEQ ID NO: 271863 - DNA, 183 bp, Homo sapiens
  chr18:8732473-8732656
  hypo
atactccataggattctctacggcctgagtgctgtttcttggtgttgctcagactcaagtgagccatcgtacgttgaaatggtatgattatgagccaaataagcaagttgtgttgtttttttctccctggtaataaaaaatcattcgcattgaaaagacgccgagtcacccatacatagttac

SEQ ID NO: 271864 - DNA, 145 bp, Homo sapiens; identical to SEQ ID NO: 218408
  chr18:8733060-8733205
  hypo

SEQ ID NO: 271865 - DNA, 65 bp, Homo sapiens
  chr18:8733742-8733807
  hypo
cactgaggaggctacaggagcgtcctcgcaggtgggagtgggccggccagctggctgggtcagtg

SEQ ID NO: 271866 - DNA, 196 bp, Homo sapiens
  chr18:8778934-8779130
  hypo
ctgctccttgggcgcgtgtcagaaaccctggtacctgggatgcgttgagccgcccacccagccggtgggattattgaggaaggagtttctgttcagcagaatggtggaatggagcgccctgggaactgcaggcccgcaaccaaaacccaaaggaagctggcgccccggcgcaaggtaggcacgtgggcagtcaccc

SEQ ID NO: 271867 - DNA, 215 bp, Homo sapiens
  chr18:8783992-8784207
  hypo
atcgaagaccacaaccggcaactgacccacgagctcagcaagtttaagtttgagcctccccgggagccgggctggctaggagagggtgcaagtcctggtgccgggggtggggcccccctgcaggaggagctgaagtcagccaggctgcagatcagcgagctcagcggcaaggtgctcaaactgcagcacgagaaccacgcgctgctgtccaacat

SEQ ID NO: 271868 - DNA, 62 bp, Homo sapiens
  chr18:8787325-8787387
  hypo
aagtctctcattctgcggatgagaaaagtgaggcctgagaagtgaagcggcttgccagtaag

SEQ ID NO: 271869 - DNA, 124 bp, Homo sapiens
  chr18:8794467-8794591
  hypo
gctctccaggagggcctaggcgcggtgctgctgatgctgcctcccgtggtgcgggtccgggtgtctcagcgcctctccacagccaggcggggaagggtctcacgttaccttcacattgcccctg

SEQ ID NO: 271870 - DNA, 564 bp, Homo sapiens; identical to SEQ ID NO: 218411
  chr18:8799966-8800530
  hypo

SEQ ID NO: 271871 - DNA, 149 bp, Homo sapiens; identical to SEQ ID NO: 218412
  chr18:8800560-8800709
  hypo

SEQ ID NO: 271872 - DNA, 154 bp, Homo sapiens
  chr18:8814259-8814413
  hypo
ctaagaagaataaaatacaccgcaggtgagctatgatccccactgcattccagcctgggcgacagaccgagaccccgtctccaaaaaacaaaagaaggaaagtacactgcagatagaaaagctgaaactcttcgtaggtttgaccacttacaca

SEQ ID NO: 271873 - DNA, 149 bp, Homo sapiens
  chr18:8823065-8823214
  hypo
tccaaagtggaaactggatgcgccctccccactgtccccatgtcctctgattctgactgcccggtatgtttccaccatactctcttcgttccacctgcaagcgcctacacatgctccagatgtatcccgggttttctcatcatggtttt

SEQ ID NO: 271874 - DNA, 89 bp, Homo sapiens
  chr18:8826027-8826116
  hypo
aagggggagagggcacgccagtgaagcaggacttatctgctccccctggctacacgctcactgagaacgtggcccggatcctcaacaag

SEQ ID NO: 271875 - DNA, 177 bp, Homo sapiens; identical to SEQ ID NO: 218413
  chr18:8829963-8830140
  hypo

SEQ ID NO: 271876 - DNA, 140 bp, Homo sapiens
  chr18:8856547-8856687
  hypo
tttcattctaataacgagaaaaagcctgacattctaaaacatcgtaagttttcttgagcccatctgaggaggtgaggccaggacacaatgaagtgaacataattccaaagagtgacaagcgcctgcgaccaaagtggggg

SEQ ID NO: 271877 - DNA, 188 bp, Homo sapiens
  chr18:8937278-8937466
  hypo
catgccacgtgactcgggccacatagccacattcctctcaaggctcagaagaatctaaagttccaacagctctaagtttgaatcatttcatttcacaaagggcaaggacttcagagagtaagacgggggaaggaggatacagtgttctcctggagagaggtgcggtctgcaggcgcagcctgggagca

SEQ ID NO: 271878 - DNA, 31 bp, Homo sapiens; identical to SEQ ID NO: 218414
  chr18:9101197-9101228
  hypo

SEQ ID NO: 271879 - DNA, 31 bp, Homo sapiens; identical to SEQ ID NO: 218415
  chr18:9101468-9101499
  hypo

SEQ ID NO: 271880 - DNA, 141 bp, Homo sapiens
  chr18:9196882-9197023
  hypo
gctaattactggatcgcttacctgagaagagggtgcttatgtgcctttgggatagctatttcagattgaactcttctcgcatattgttaaaagtttctttgctagtcatttttaaattacattactcgggttttgttttcc

SEQ ID NO: 271881 - DNA, 93 bp, Homo sapiens; identical to SEQ ID NO: 218416
  chr18:9285997-9286090
  hypo

SEQ ID NO: 271882 - DNA, 156 bp, Homo sapiens
  chr18:9288473-9288629
  hypo
aggagccacgcgtgcgtaactgcagcctgctcaagtctggctgcacgccacacagaggccaaacatgagaacccacatgtgatgaaaggagggcaaacttttttttttttttgtgggggcggggagggggacagagtcttgcccggtcactcaggc

SEQ ID NO: 271883 - DNA, 158 bp, Homo sapiens
  chr18:9333469-9333627
  hypo
aggtgccccgcggacggtctggtctagcgggctctaacttaatcaccctggaatcttctttaaaaagcaaattccggccgggcactatggttcacacctgtcatcccaacgatttaggagaccgcggtgggaggatcgcttgagccccgaaatttgaa

SEQ ID NO: 271884 - DNA, 33 bp, Homo sapiens
  chr18:9364507-9364540
  hypo
cagccaggtgtggtggctcacgcgtataatccc

SEQ ID NO: 271885 - DNA, 388 bp, Homo sapiens
  chr18:9417389-9417777
  hypo
ccagagcaccgccacgccggccacccctggggccagtggcagggtgccaggcgtgttcacgctctgaggctccagaaattaatctgacctcttgaaagaacacattcctactgactaggaatcttgaatgaaattcaagcagtgcaggtgttcagcaattctgaagacaaaattcagacagcagagctgctgccttctctggcagatggaggagtgtccgtgaaggagggcccttcgcaccccatggagctcctgatgtccgtgcctttatcagagactctcctcctcctctctttgattgctcttttttttttttccttttttcccttttttaagagacagagtctcgctctgtcgcccaagcagctggactgccctggcctgatct

SEQ ID NO: 271886 - DNA, 224 bp, Homo sapiens
  chr18:9428291-9428515
  hypo
tcaactcctcacttaacagacgaggagacggaggcccgacagacaacaacctcttaaaatcacaaagaggcagacgagggcgggtgtgcggcctccctggcttgtggtggtttgctgtgtgtttactccagaacgccctgctcacatggctgagacagaggacagaaggcttgagagggatggaaagagcaaccaggtggactgactgacgtgtttcctcacag

SEQ ID NO: 271887 - DNA, 491 bp, Homo sapiens
  chr18:9478438-9478929
  hypo
aggaggcttcacagcgaacaccacatgcctcgcgcccaaaaggacagcagaccgcgcttcagaacggaaccgccttctccatgtaaacttttgacgtaaactgtgtgcttcagggtggcctcttcttctccgagatcctctcctgcgtcccgagtttgggaatggcccggccgtgctcaggcccaggcggtggaggcctcggtgtagtagtgccgtgcttgtcgacgttcccaggagtccgggttcagaagccccctctccggtggattggcagcttcgcggtagctgggctagtcttcctctggaaactcagtaaaaagagtcggcgctgtccgcctgagcgcgggtttcctaccgagctagaggccagcctgcctcaggcgcagaagggtttgccgccggccttggtcagggcgagcagctccctggtggcgcccagagctggggtgtcctggggcgcggcaggcggaaaggcacgcgcgggccagggg

SEQ ID NO: 271888 - DNA, 42 bp, Homo sapiens
  chr18:9514021-9514063
  hypo
cctgtagtcacagccgcttaggagcctaggagattgaggctg

SEQ ID NO: 271889 - DNA, 101 bp, Homo sapiens
  chr18:9514123-9514224
  hypo
ctcctccgctgacgccccacccaaaaaaaggtagatactggaattttccccttaaggcatcttacttttcttgggtaggtcgtgttcgctatttgggatac

SEQ ID NO: 271890 - DNA, 353 bp, Homo sapiens
  chr18:9535687-9536040
  hypo
atcaagcaattcatgaggagcgcgaggccatcatcgagctgcgcgtgcagctgcggctgctccagatgcagcgagccaaggccgagcagcaggcgcaggaggacgaggagcctgagtggcgcgggggtgccgtccagccgcccagagacggcgtccttgagccaaaagcagctaaagagcagccaaaggcaggcaaggagccggcaaagccatcgcccagcagggataggaaggagacgtccatctgagcagcctgcgtggccgtctggagtccgtgagactgaaaggacccgtgcatcttactgtaacccgggggccaggccggctctctcgctgtacattctgtaaaggtg

SEQ ID NO: 271891 - DNA, 251 bp, Homo sapiens
  chr18:9539461-9539712
  hypo
tacaggacatgatccgtgacttagtcatcatgttattaacattaaactttatagtgcagagatgagtcggggaagaaagaacgtagcattctttaagatgcaggtttcatttctcagcctcaaggctcagctacagaataagctgtggcccgactgcctgcctaccattttacagacgggagactgaggctcagagcagtgacatggcctgcatgggtcactattgcccccactgtcgcgcacatccctga

SEQ ID NO: 271892 - DNA, 299 bp, Homo sapiens
  chr18:9547707-9548006
  hypo
tcccaggtcacatgcgtggcgaatgcccactgaacctcggctctcatggaagcaggaaagacaccgagattcaagccttctagtaggttgaggacgctgtgctcatggcatcttcggagattttggtactggcagggtggatgcttgcaaaatacttgacatcgctgtcacggtccatctgaagagccatgatggtctgctccacagcctcctggtggcagctggcagaggccaagaaatagtctggaaatgacatgtgcataggacagatgaaaccagtccaacggaacacttcagag

SEQ ID NO: 271893 - DNA, 223 bp, Homo sapiens
  chr18:9569203-9569426
  hypo
aaaagaagaaaaccggagtcattgaagttggataaacttaataaacttaagttggtaaataataacatttaaacagaaagctggaagctgtaaagacgttaaacatttatcaaaagttgactatgcttgctgtgaacattctatagtcttttcctcccccacgcccgagacagagtcttgctgtcgcccaggctgcagtgcagtagtgcgacaaacattctat

SEQ ID NO: 271894 - DNA, 203 bp, Homo sapiens
  chr18:9615430-9615633
  hypo
tgtctaggaggtgctcggtgaagggtgcctatgattcgctttgtcttctaaatacttttggcagcacttgaggtgttaaagtctgtatcccagactttattagtcttgttgttttacgtgacttaagcgattagctcaaacgcccaagtacaaaatggggctaaacccaggttttccgacacgattctacctccatggctcta

SEQ ID NO: 271895 - DNA, 159 bp, Homo sapiens; identical to SEQ ID NO: 218423
  chr18:9688382-9688541
  hypo

SEQ ID NO: 271896 - DNA, 79 bp, Homo sapiens
  chr18:9758085-9758164
  hypo
agcacagggatcccccatttcgcctgtgggccacccgagacgcggctcctgttcatacgtcccattaaatgttgctctc

SEQ ID NO: 271897 - DNA, 247 bp, Homo sapiens
  chr18:9797315-9797562
  hypo
aacacaataagtcaattttgcgaatcgctggcttaatgtcagcgatgcttctgcttctcctgctggcggacgttccctgatgacttgctgtgttccatgtactgttctgagtgcctgtgtgtactgatgcattcagccctcctcgcaaaagcactttgaggttgaaactgtcgttattcccatttgcaggtgaggtcactgagacagagacattaagtaacttgcacaatgtcgcagagctaataag

SEQ ID NO: 271898 - DNA, 153 bp, Homo sapiens
  chr18:9800802-9800955
  hypo
agctttactgagatccgattcacgtaccatacaatttatccatctaaagtacgcaccttggtgggttctgatgtgttccgaattgttcaaccatcagcacaatccattttagagcatttttatcagtccagaaagaaacgcttatgaattagc

SEQ ID NO: 271899 - DNA, 128 bp, Homo sapiens
  chr18:9833346-9833474
  hypo
agggggaccatgggacgacagggcccccagaagggaggcaggtcacaatgtgagggtttgggtccagagtacctgctggtttgattctgttttccctgtaaccaggtcctgaacgcccagagcctcag

SEQ ID NO: 271900 - DNA, 207 bp, Homo sapiens
  chr18:9835951-9836158
  hypo
ctgctgtgagaacgcgtcagagcacacacagccctgcagccctcctctgcttgattttgatgagatgttgtgaatgatttcccttgcttttggctgcaataccttaaacatgtgggatggttttgacagaaaataattccaccacacagttaacagccgtctcccgctcaccgctgctgtgctgctcgtggccggcttaattggtct

SEQ ID NO: 271901 - DNA, 269 bp, Homo sapiens
  chr18:9838068-9838337
  hypo
acttatggtgtgcccggcattattctgagcactttataatatcaacctccttttcccttacgtaaacactgaacattgctgtaaaatgtccacccagcctggtggaatgcatggacgacatagacctgagggaggtgagcactgaagggtatttactggtggagacgatcgctttctttctgtgagcagtgcacttgggctgcctgcctgtatttaccctctcatgtgaggtgctcatctgggccacctgggaacgactctgagccaaa

SEQ ID NO: 271902 - DNA, 89 bp, Homo sapiens
  chr18:9883100-9883189
  hypo
gaggagcagggaaaccgaattaagtttgcctgtttgtggaattttggctcaaagaacccttttccatggtgtagcggtgcaatctttca

SEQ ID NO: 271903 - DNA, 215 bp, Homo sapiens
  chr18:9887794-9888009
  hypo
aaacaatggagttcccggagggggacaaggtgaaagtgatcctgagcaaggaggactttgaggcatcactgaaggaggccggggagaggctggtggctgtggacttctcggccacgtggtgtgggccctgcaggaccatcagaccattcttccatgccctgtctgtgaagcatgaggatgtggtgttcctggaggtggacgctgacaactgtgag

SEQ ID NO: 271904 - DNA, 253 bp, Homo sapiens
  chr18:9912767-9913020
  hypo
ccctaatacctggatcgcacatgaaaacttggatttggtgcctacttctagactgctgtttcgtctcgtttattttctagacaaactgtgctgctccatggcagtagcatcaatatgtcttttgtttcgtggcgctacctagggatttaaattcaaaccgtatcacaaaatacaataaaggtttatttacagcacattggtttcatttgacgttcctgtaccggactaccctggcaatcggctaaagttttgt

SEQ ID NO: 271905 - DNA, 138 bp, Homo sapiens
  chr18:9917587-9917725
  hypo
gttttgtagaaaagtttgaagaagaaagtttataaaatgctaaaataaatttcaaatatattcttaatgatcagagagagacgaaaataaaccaaaatccttatgttgagagtggccgataacaataaatcaacaaag

SEQ ID NO: 271906 - DNA, 136 bp, Homo sapiens
  chr18:9962327-9962463
  hypo
tttgaaaaacacagatgagaagcacttggagaaattcactgtccaaacttaacggtcttggacaagtctgggcccttcatcataccatgctgcctttagggaaaaaagggggtgggaatgacggtgaaattgatct

SEQ ID NO: 271907 - DNA, 285 bp, Homo sapiens
  chr18:10031148-10031433
  hypo
ggccagaacgctgccggcgcagaacccaaatcagatagtcgagtgcatgcctgggcccttacaaacgattaagaccaaatcaaggccaaagaaaatgaataacagatgtctgggagatgctgaggccttaaaagtgtttatcacgtctgactttgagaaaatattggctgggatcagataagaggcaactcccggggccagcggtgccttgtcctaaggtgcccgctgagctcaggaggtgcgggctgcagggccccaagcaggcgcaggcgtcctccagccccg

SEQ ID NO: 271908 - DNA, 83 bp, Homo sapiens
  chr18:10047642-10047725
  hypo
gcagtaagcccagccgtcggcatgcagagctgttcccatctgtaccaacgaagcccaaagcttccgaacgtattccatatcca

SEQ ID NO: 271909 - DNA, 103 bp, Homo sapiens
  chr18:10069172-10069275
  hypo
ccttgccagctccccgcctctcacagcgagcctccggagattgggaagcggcgtttcctcacctgccagtgctcctgtactccagctccgcagaccccactcc

SEQ ID NO: 271910 - DNA, 249 bp, Homo sapiens
  chr18:10150712-10150961
  hypo
cattcacgtggaagcgtgttctgtgtgctgcatccatgtggaagcctgttctgtgtgtgctgcatccacgtggaagcatgttctgtgtgtgctgcatccacgtggaagcgtgttctctgtgtgctgcatccacgtggaagcatgttctgcgtgtgctgcatccatgtggaagcgtgttctgtgtgctgcatccatgtggaagcatgttctgtgtgtgctgcatccacgtggaagcgtgttctctgtgtg

SEQ ID NO: 271911 - DNA, 484 bp, Homo sapiens
  chr18:10165791-10166275
  hypo
cgagattgtctccacggacggccgggggattcctgtccctcacagaggccttttttcttctctgaatcggtgtctctaagggccgggtttctgtgcactgggtggtacctgccagatgagtttaattctgccccgcacataccggcgaggacccatcccgctcaagctctctgctggggacttcaggcccaaggtgaatgcgcgcagggcctgtggcaggggatgagggctagtgcaggccgaggggagcagctacagaggtagggtttccatacccagagacgggcatggacactagaaagggaggatcccctagctgggagggaagccaggacagtgaagacgtagtgggtctaacggggggtaccgcatgagccgaggtgcagaggctggacccagcggggacgccgaggggactgctcctgcagcctggggaaaagaagggggcgtcagaaggtctccgagccagcggggatcgtgttca

SEQ ID NO: 271912 - DNA, 46 bp, Homo sapiens
  chr18:10166509-10166555
  hypo
ggaatggagtttggcgtgcaagcatggagtccgcaggcccgtgctc

SEQ ID NO: 271913 - DNA, 98 bp, Homo sapiens
  chr18:10336858-10336956
  hypo
tgctccatggccaaggtctccgcccagggtcccttgctaggcaggccacgcgaaacacgcagtgcacgtgtgcacacgccatgtccctggagggcagg

SEQ ID NO: 271914 - DNA, 278 bp, Homo sapiens
  chr18:10414334-10414612
  hypo
gcaggcagaatgccaccactcggccaagaaggcgtgtttggctacgacagcccagagtccagagccacggcacttccggttgctgtccacgcggcttctgctggtactcagccaccacgcccaccagagccaccgcacttccggttgctgtccaggcggcttctgctggtactcgcccaccacgcccaccagagccaccgcacttccggttgctgtccaggcggcttctgctggtactcgcccaccacgcccaccacgtggagtctagcagctctccc

SEQ ID NO: 271915 - DNA, 146 bp, Homo sapiens
  chr18:10460167-10460313
  hypo
cggcaggtgaaaaaccgtggaatatattcatctagataattcagattgttaaaactttgttgaggacgggcacggtggctcacgcctgtaatcccaggccaagggcctcctttgggaggccaaggcgggcagatcacctgcggtca

SEQ ID NO: 271916 - DNA, 496 bp, Homo sapiens
  chr18:10474225-10474721
  hypo
atctttcaaatgatctcaggtaacgggaggaaggtgtgaatgtcatgaattaaaacggcccacagataatccagaaacctggggttagccaggagcatccccgcaacccgccgttccctcggggcctttgtgaaggtctgctgaataggaaaagcctgcccactttctagcagagacaccaaagagcctcaaaacaccaaaaagcacggggagccttgagtgcgaggtctgagtgaggaggcaggtgcggctggggaacttgctgggcgggcgtgggccgggctgtgggctccgaacccgaccttggactagtcctttgcacccactcaggttctggttccttttcctcaccttcatgcgcctgcacgggctctgatctcttctgctctttttagtactgggggaaaaattaaccatcatcacgtttattttcttacctgcctctctaccccgttgcactcctgggtgtggctccgcagatggagtctgaaagccc

SEQ ID NO: 271917 - DNA, 265 bp, Homo sapiens; identical to SEQ ID NO: 218427
  chr18:10485483-10485748
  hypo

SEQ ID NO: 271918 - DNA, 64 bp, Homo sapiens
  chr18:10538267-10538331
  hypo
ttggaagtgaagagcggggagaagcgccaggaggtgcatgctcatgtggcgggacagtgctgcc

SEQ ID NO: 271919 - DNA, 32 bp, Homo sapiens
  chr18:10578689-10578721
  hypo
attataaaaaccaaagccgcagctcagtgggg

SEQ ID NO: 271920 - DNA, 376 bp, Homo sapiens
  chr18:10589091-10589467
  hypo
ctgaattctgctgccagccacgtccttgatactttgtgggtgatttatttcattggctcgctattacttggcagcggcggtggctcctcaagccagcgtgggctccaggtggccccgggccgggaggcgatggccccgggccaggaggcgtggccacggccgctcgccggcgtccgtccccaggaacggccagcactggggcagcggaggaggcagcggtggtggtggcaccgggtagaaggcggtggcactgggtagaaggcaccgccgccgcccgccgcgggaggcttccgcggagactcagggctgcagagccagcggaggctgaaggaagagaaaggtaattttcctactcgcatatattaatttcagtaaa

SEQ ID NO: 271921 - DNA, 526 bp, Homo sapiens
  chr18:10725371-10725897
  hypo
tggtggagaacagccggcccacattggcggtcaacctgaccagagcccgccagtactggttggagggcatgctgtggcatgaaataggtcagggtgtgggtatccgggtggatgggtaggcatgaaaggggcctgggagctgggagtcgtgggaaggaggggccccactaactcccccttttgtttctcccctgtccctcctgaggtcggggctttcccttcctgagcagccgcctccgccctctggctcacagaggtaggccagaacatgcctgcccacgctctgggctcgccttcatctcttggtcctttcgggtatatttttctctctccacttcctctccgacttctctccacagtggcggcagggctggtgaggccctgacaggccagagggagaacgctcagggtcccaccaggccaaccaccacgcgggccctccagggtggatggaaggccagatcctgggaatggacttggcttgaggacacacggcgcctggtttaggaggcgactggccaggctg

SEQ ID NO: 271922 - DNA, 81 bp, Homo sapiens
  chr18:11024138-11024219
  hypo
gcgccaaggccgcagaggcaccgaaagcgagcgagggtgcacactgtcacctctcactacgatagtgcaaagtactgtttg

SEQ ID NO: 271923 - DNA, 38 bp, Homo sapiens
  chr18:11116413-11116451
  hypo
aaagaatgaaatttgcaggccgggcgcggtggctcacg

SEQ ID NO: 271924 - DNA, 271 bp, Homo sapiens
  chr18:11533023-11533294
  hypo
agtgggatactgcttaggggcgctgtcaggggccacactgcccgcggtggggtgcaggttgggtgcactaactggggcgtcattccccacggttagggaaaggttggggttgctatccgctatccggggctgctccccatcgtggggagcggattgggggccttaaggatccgtggctgcactattcactgtggggagcaggctgtagcgctctctgagacgtcactgctggggtgtcactgccttcagcggggggctggttaggagtcct

SEQ ID NO: 271925 - DNA, 40 bp, Homo sapiens
  chr18:11534215-11534255
  hypo
acagcgcccaggagcggtaggagggcggcgagctgcggcc

SEQ ID NO: 271926 - DNA, 88 bp, Homo sapiens
  chr18:11571296-11571384
  hypo
agtccctgatgagacggacagcgggtggcactgggaaccttaggatgcgctaaaatacggagcttcttgaaatcgaggcatttaacag

SEQ ID NO: 271927 - DNA, 45 bp, Homo sapiens
  chr18:11589694-11589739
  hypo
acaatttttttttcttgagacggagtctcgctgtgtcccccaggt

SEQ ID NO: 271928 - DNA, 389 bp, Homo sapiens
  chr18:11821762-11822151
  hypo
tgcaggagggagccgggaggtccttgagcaggggccccagtaaatgcttcagagctagaatgtcctccctttccagctcaccaagggctgaagcacaagggcctcccgcctccctgcagcgcacatccgccctctggcgaggccaggccggcatccagtgtggcccggtggccagaacgcgcccaggccatggccgccgctccgtaggcctccgtttcacgggtgctaagtaagtcgaaaagcaagggcatctgataggagcctcagtttctcctccgcctgccaggaggtcttgtgcgtgcagagcggcggatgcgtgtggcaccgcaggcgcggggcgagggcggctccggagaggcccaggggcttagcgcgcctggctttccaca

SEQ ID NO: 271929 - DNA, 166 bp, Homo sapiens
  chr18:11877623-11877789
  hypo
agggcgatgttcccggtagtactccaagtgcacttaacacgtgtggacaagatcttagtccaggtagcagtagggctgatcctcggctgtggggcctttccacggggaccggcactccagcctggcctttcaccacccttttcccggcacacccctgtgggatgac

SEQ ID NO: 271930 - DNA, 175 bp, Homo sapiens
  chr18:11881075-11881250
  hypo
tcaacgactgccgcgacatcatccagcggatgcacctcaagcagtatgagctcttgtgaggatgctgccgccaccctgcgacggagcggcgccccggactgcctgactgccagccccatgccatggtaggaggcagagtctctagttccatctcgctgccgtctgtcccgttctg

SEQ ID NO: 271931 - DNA, 36 bp, Homo sapiens
  chr18:11929334-11929370
  hypo
gtagtgaaagttctaagacaccggatcatttccaga

SEQ ID NO: 271932 - DNA, 44 bp, Homo sapiens
  chr18:11946060-11946104
  hypo
tgtgtgtgcacgcgcacgcgtgcgtagcattcagctatcaacca

SEQ ID NO: 271933 - DNA, 35 bp, Homo sapiens
  chr18:11979848-11979883
  hypo
gagccaccgcacccggcctctgtcttaaacatcat

SEQ ID NO: 271934 - DNA, 220 bp, Homo sapiens; identical to SEQ ID NO: 218430
  chr18:11992149-11992369
  hypo

SEQ ID NO: 271935 - DNA, 194 bp, Homo sapiens; identical to SEQ ID NO: 218431
  chr18:11992751-11992945
  hypo

SEQ ID NO: 271936 - DNA, 45 bp, Homo sapiens
  chr18:11999660-11999705
  hypo
gatgcacgccccctcgcccaggccagagggcgcagtgggaatggc

SEQ ID NO: 271937 - DNA, 64 bp, Homo sapiens
  chr18:12059558-12059622
  hypo
ccccaacccaccccaggctgcgggcagtgcggccctggatagcgcacctacccctttgcctttc

SEQ ID NO: 271938 - DNA, 213 bp, Homo sapiens; identical to SEQ ID NO: 218432
  chr18:12093611-12093824
  hypo

SEQ ID NO: 271939 - DNA, 77 bp, Homo sapiens
  chr18:12208466-12208543
  hypo
gtcttttccaagtttattggcgtagtggtgagaactgtctctatgggcttatgagggtgccgcgttgtttaaagatg

SEQ ID NO: 271940 - DNA, 216 bp, Homo sapiens
  chr18:12277183-12277399
  hypo
gcacatacatgctccgggtgctggatgacaaggaagagcggccatccctccggtcacaagccaagggcaggttcacgtgtggatagggatgcaggctgtcgccggctcttgagccaaacactgtgtttcgtttggctcaatgacgaatgttgaagatgcttttatgttctgagccacatgcacttggaggccgctggtcacgctgctcaggagtgg

SEQ ID NO: 271941 - DNA, 696 bp, Homo sapiens; identical to SEQ ID NO: 218434
  chr18:12279587-12280283
  hypo

SEQ ID NO: 271942 - DNA, 138 bp, Homo sapiens
  chr18:12291804-12291942
  hypo
ggacagcaacaggacgagacttacacacagcacacagctacccgacagccccatacggttacagttacatcccccaggttcccgtgtggcagagcccaagttaagccacagagctgtgagacgcgctcatcccagcca

SEQ ID NO: 271943 - DNA, 420 bp, Homo sapiens
  chr18:12375057-12375477
  hypo
aaaaaaaaaaaaagaaaagaaaagaaaagggatcagagcttggtaaaacagggaaatggatacaggaaaccgaaaaaggacctaccacacggcagcgtggcgtgaccatggcgaagaaattgatttaagactggcaagggagcctcaaggagtaaaaatcatgaatgcaggcactattattccccctccccacccccgctctttttttttttaggagacagagtccgtcacccacgctggagtacagcaatgcaatcaaaactcactggagcctcaacctcccgcgccaagcaacccgccttggccccccgagttgctgggactatagtcataagtcactgagcccaggtaagaaaaaaaaaaaaaaaacaatttgtagaggccaggagctgtggctcaggtctgtaattccaacacttt

SEQ ID NO: 271944 - DNA, 120 bp, Homo sapiens; identical to SEQ ID NO: 218439
  chr18:12375777-12375897
  hypo

SEQ ID NO: 271945 - DNA, 268 bp, Homo sapiens
  chr18:12396677-12396945
  hypo
gtgtgtcacctggccgcccgcacccccatgcctgcctgcgagggcctttctgggctgctgtccagagcgcatgcgccgccctgctgcgacctctccgcaagggctgcagggtgggccaggtgcgtctctgctggagcgctcttctaaaaaagggcatggctccacttactatttacttaaaaacaatgcatctttttctgttggagtggtgggcgattggggattgctcctttgtttcccacaaacagaagcaagggccgagaggggg

SEQ ID NO: 271946 - DNA, 98 bp, Homo sapiens; identical to SEQ ID NO: 218443
  chr18:12431471-12431569
  hypo

SEQ ID NO: 271947 - DNA, 317 bp, Homo sapiens; identical to SEQ ID NO: 218444
  chr18:12432919-12433236
  hypo

SEQ ID NO: 271948 - DNA, 452 bp, Homo sapiens
  chr18:12433981-12434433
  hypo
ccaaacacaaagcccgggtccccggccggccgacgtcttcctcctgccttttctctcggggctgtttggacatggcaccttcctccagcatctaggctgagttctgggtttccccgccccgttctgctctgcgtactcgtccctggcgttgccactctgtgaccttgcctgcgtgtcgcgtgcccgctgcggaagccgggccgcggggcttgggagctgaggggaggccgagtccggagatgcgcggcgcgagcccggccggcccgcacatggtcactccgccaggcttggaggaccctggaggggccctcagagtggccactgcggacgccatcctccagcccgggtgcagcccccggaggctgcgggtcccgctgccatctccactgccacctcgtgcgaggcccaggccgggatcccccgccagagctgctcccgtaaatgctcatcac

SEQ ID NO: 271949 - DNA, 161 bp, Homo sapiens
  chr18:12460294-12460455
  hypo
aaggtactgccaacacgaggtgcctttagactggatgggcatttgccctcggttatttgaccaaatgatgaaaaaaaatgacattttaaacatcacaagaaaagggagggagatacaacaaaaataaaaattatcagccgggcacagtggctcacgcctgt

SEQ ID NO: 271950 - DNA, 38 bp, Homo sapiens
  chr18:12699046-12699084
  hypo
gtttagaacgaaaacgttggtttcgataatgtaaacat

SEQ ID NO: 271951 - DNA, 33 bp, Homo sapiens
  chr18:12701659-12701692
  hypo
tgcactcagtcgagcgagcgctgcagaaactgg

SEQ ID NO: 271952 - DNA, 86 bp, Homo sapiens
  chr18:12741269-12741355
  hypo
taactgggactacacgggttcgccatcaccttttttgttctttgcaggccttcaatgggttgaatgaggcccgctggctttggaga

SEQ ID NO: 271953 - DNA, 35 bp, Homo sapiens; identical to SEQ ID NO: 218445
  chr18:12849993-12850028
  hypo

SEQ ID NO: 271954 - DNA, 76 bp, Homo sapiens
  chr18:12854822-12854898
  hypo
gaggaaaatcagaaaaattacggggttaggaaaaaaggcacggtcggctgggcacagtggctcacacttgtaatcc

SEQ ID NO: 271955 - DNA, 39 bp, Homo sapiens
  chr18:12856102-12856141
  hypo
tctaggaactctagcgcaatgagccgtagttctttccca

SEQ ID NO: 271956 - DNA, 41 bp, Homo sapiens
  chr18:12949141-12949182
  hypo
aggcgtgagccaccgcgcccggcctacaagcagaatttcta

SEQ ID NO: 271957 - DNA, 193 bp, Homo sapiens; identical to SEQ ID NO: 218447
  chr18:13033466-13033659
  hypo

SEQ ID NO: 271958 - DNA, 107 bp, Homo sapiens
  chr18:13036732-13036839
  hypo
agggctgaggtgctcggcagcagccttgagggcagacattaggggactcccagtctttgtccggaccggggtttcctgggatggggggcaagcggtcctggggcacg

SEQ ID NO: 271959 - DNA, 452 bp, Homo sapiens
  chr18:13131736-13132188
  hypo
acctaggaatgcgacggtgcctaattgatacatacaaatcaatagtcttcctatacataaggaaataatgaacgaccagaaaacagcggaagacaaaacagcagaaataagtttagaaatgtgtgaagtgtatacaaaggaaactgtcaggttcctctggagcacatcggagacttgagtaggagtaacttaccggactgcactgggggccttcttccgtagcatgaacagcacccatgagtggggatggggctggggccgcaccagtccaggcagcatttcccccagtggagggggagctctgcaggtgcccagcctcccacgctgtttcagtagcttgttaggaactctcccagacacggatagtggcccagctgcccatccctgccgtcactgggtctgagcgtggcctgtcctttgtttaaatcctacatttagctggccggactcac

SEQ ID NO: 271960 - DNA, 148 bp, Homo sapiens
  chr18:13135170-13135318
  hypo
ccgaggaggcgccaagagtgagcgagggctgccagcaccctgtcatctctcaggttttagctcagggctgctgtccagcacccgctcttgcttggatactttcggtggtgtggctgctggttactgtattgcacgacaaatgtttttc

SEQ ID NO: 271961 - DNA, 135 bp, Homo sapiens
  chr18:13162994-13163129
  hypo
caagcgatcctcctgcctcagcctcccgagtatgagaaagggtttttctgaggcaagtggctgatccgatttgccccgtggggaagccggcactctgggagtcccagcacaaacggcagacagagggtctgcagg

SEQ ID NO: 271962 - DNA, 90 bp, Homo sapiens
  chr18:13165627-13165717
  hypo
aacgcgaagtttcccggacagaactcgggcgacgggtgaatcggagcgcagacacagcacagaagccgcggcaggcggggaagcttgaaa

SEQ ID NO: 271963 - DNA, 101 bp, Homo sapiens
  chr18:13181960-13182061
  hypo
atctcatcccgagacggctcctaggtggcgatgacggtacggacatgctggagaaaggaaggattcacaccccacctgggaccgagcgggacagggcaagc

SEQ ID NO: 271964 - DNA, 161 bp, Homo sapiens
  chr18:13195829-13195990
  hypo
cccggccaagaagtacatagacatttttaaaaagagataagaggaaaaagataagcagacatgggagacacacggctcctacgtgtacagagaatcaggctgtttgtttacttcacctccgttggtctttggggctccacgctgcccgcctttcctaccct

SEQ ID NO: 271965 - DNA, 221 bp, Homo sapiens; identical to SEQ ID NO: 218450
  chr18:13212918-13213139
  hypo

SEQ ID NO: 271966 - DNA, 325 bp, Homo sapiens
  chr18:13231194-13231519
  hypo
gcaggtggtatgggaggaagcgggagggagaagggcaagaggggtctggaccggttttgcttgagaagaaatggcagtggacacatggctcgtgtgaaaggtgggtgcacgcagacaggccagaggcttttgggagcgggagtgaacctgggcacggggcgctgctcttggtgagcatgtcgggtggcccttgccctttgggtcaccattcctcctgattgcggcctgcccgagatcgcgtgagtctggttctggtgtggagcgtttcctcccatctttgtcgaaaaccaaatcaaccagccacgaatggtaaagaaaaacaagc

SEQ ID NO: 271967 - DNA, 221 bp, Homo sapiens
  chr18:13233040-13233261
  hypo
tgatcaatgaggactctagacgatggcagaggatctgcttgtcgccacacacagtgcgttagggatggagcttgccaccagtggcgccacctctttgcaggcgcctgtcctgaaggacgtgagcgggcgaagtgctcttgggtctgcttggacacgggtcactggccgctaagaaggcaaatgccatgccgttcagatacgttctctgctactggatgatg

SEQ ID NO: 271968 - DNA, 299 bp, Homo sapiens
  chr18:13252607-13252906
  hypo
gcagctgcaccctgggaactcggtggtgccccccaccatactgggcacggtgggactgccgcagatgtgatggatgacaagggttcctgccagtgagaggaatgaagatgctctttgcttctgtgaggtcaaggcctcatttcatgtgacatgcagaaccagcctcacttgccgtcggccctccacatccacagctgtttctgcgcagggatgtctggctctgagcccttctgcggagcagtgttgcgctgttcctagaatagtgtccttgtagtctcgttaggctttgcttctctttg

SEQ ID NO: 271969 - DNA, 182 bp, Homo sapiens
  chr18:13254436-13254618
  hypo
gcccagctgagcagggctggcgcggacagagagaatcccgcctcttcaaggtcgctcagctgaccatgggcatagctggacctagagtgccagcgaccctccatgcttctgccaggaagtccagcggcatctttccattcatggtggttacggaattggccgagtccttactctgacctaca

SEQ ID NO: 271970 - DNA, 89 bp, Homo sapiens
  chr18:13257121-13257210
  hypo
cgcgctggagggtccggcgggacagacgtgcacagcctcgcggccctggctcagaaaggcctgaacccatgtgccgtgggtctggtttt

SEQ ID NO: 271971 - DNA, 236 bp, Homo sapiens; identical to SEQ ID NO: 218455
  chr18:13292802-13293038
  hypo

SEQ ID NO: 271972 - DNA, 148 bp, Homo sapiens
  chr18:13296052-13296200
  hypo
gctcttgcctcttccgtcaagggctcctgcgcctggcgggcatctctcgtgcatccctccagcgcggtttcacgagtgctgtgcccagaagccaggaggcatgacctgtcatgttagagcaggaacagagtgccgtagatgacttctg

SEQ ID NO: 271973 - DNA, 140 bp, Homo sapiens
  chr18:13311612-13311752
  hypo
ttgggcattgtgacagctggcgatgctgctggcactgtgctcttgagggaaggcgggcctggatgtggagggtatgcccaaaggcctgagtccggaaaggagttctgcatttccatgccgcctgtggctcacctggaaaa

SEQ ID NO: 271974 - DNA, 54 bp, Homo sapiens
  chr18:13381476-13381530
  hypo
gaggagatgggagccagggccgggagtcaccacgggtaccagaagcagagtggg

SEQ ID NO: 271975 - DNA, 310 bp, Homo sapiens
  chr18:13387328-13387638
  hypo
ttgcttttcagtttcagaggcggagcacagagagctgcggctgggacaaggagcacccgcgtgcaggtgcgaccctgcaggatgctggcagcggcgtggccaggggcgcccgtgttctgagggcctgagggccagcccctccacccgcgccatggcctccgcgccctggctggacggctgacgggagcagggaccgccgccgcccaggtgccacacccaggtaccgcccgcccgcgcgagagccgggcaggtgggccgcggatgctcccagaggccggcccagcagagcgatggacttggacaggctaag

SEQ ID NO: 271976 - DNA, 130 bp, Homo sapiens
  chr18:13393100-13393230
  hypo
ccacagaccttccgcgcattcctcatccctctcctctgcaaggttgcacctgtggctgacccacggatgccctcagcccccgccttccagagctgcccagagaatgctcgctttaggagatattgagagc

SEQ ID NO: 271977 - DNA, 128 bp, Homo sapiens
  chr18:13400464-13400592
  hypo
gggtgtggggcccagacctgcgggctccagacggagccttctctttgtgcagtccgtgcacacatgagcagccctgactcttagaaacgtggtgatggggaggagacggtgaaaagagtgtttatgat

SEQ ID NO: 271978 - DNA, 279 bp, Homo sapiens
  chr18:13404255-13404534
  hypo
gttcccttgctctgcatccccgctgtttcccctgcccctgaacaggcgtggagatgtgcacgggacactcggaggccggatgctcaacagagtggagtgccgcgacggtgtggccgcagcctggctgtgccttcacgacgcagctgcaatcagaggagctgtgggacgctgtcccacgtggacacagcccactcactgggtgctgctcctgtgctgggcgctgcacttttattgtcgttaaaaatttatattaagatgcggccgggcatggtggctcat

SEQ ID NO: 271979 - DNA, 38 bp, Homo sapiens
  chr18:13404774-13404812
  hypo
cgactgagcgaaactccgtctcaaaaaaaaaaaaaaat

SEQ ID NO: 271980 - DNA, 77 bp, Homo sapiens
  chr18:13412928-13413005
  hypo
tgtcctgagcttcctggatgcgctgcttccttctcctggtacgtagtaagggcagcgtgtgtgacctgacaggatca

SEQ ID NO: 271981 - DNA, 182 bp, Homo sapiens
  chr18:13425935-13426117
  hypo
agagggaggctgagattccccgagggcaggacggtggaccacagtgaccctgtgggaagaggtctggggacggatggcccatggcggcagggtgcgcagagctcctgggtgctgggccatcaggccacactgcacaggtgaaaccggctctcaacaggacatgccctcggggaagaactgaa

SEQ ID NO: 271982 - DNA, 40 bp, Homo sapiens
  chr18:13426842-13426882
  hypo
atgggtgtttatgtagcccacgccctatgaggtcagtgag

SEQ ID NO: 271983 - DNA, 67 bp, Homo sapiens
  chr18:13432048-13432115
  hypo
caggttcccagagggattcacgttgataacacgccggtgcagtctcgcagcctactcaacatgtgca

SEQ ID NO: 271984 - DNA, 364 bp, Homo sapiens; identical to SEQ ID NO: 218457
  chr18:13442501-13442865
  hypo

SEQ ID NO: 271985 - DNA, 202 bp, Homo sapiens
  chr18:13458111-13458313
  hypo
caagactacagcctgcagaacgcgcagggcctgggcatggggaagcacggatgaggagcctgctgctgatgctgagcaggagccgtggaggggtctacaccactctgctgactctgcgtgatgaggattcaaaatgccattcacgcaaaacaaatttagcaactaagaagtagagcggcgcgctgctttagaagcactatgt

SEQ ID NO: 271986 - DNA, 506 bp, Homo sapiens
  chr18:13460975-13461481
  hypo
gccgtctgcatggccggggcccttctgcagcccccactgcaccaacctttgtccgcctttattgttggtgaacacagtgcccacctcaccatgctggggtggcctggcttgctgtctcttgagtaccgtgggaactgaggcgggctggccttgtctccccagcgcctgctcacagaaggtgccccatgatgtctgtcgtgcagatgaatgtgtccacgcgtgctgggctagtacagaagatcggtaggcaggggtcttcgtggccagggcctgaggaggaccgatagccttggggactgcatgggttttgagagtctgggggaaccagggggaagtaggaggacatagtaaacaaaggtcaagaagagcgaggaagacgtggggatggggacacgtacctgactgaggaaaatggattctaggaacacaaacgtcattgaagaaggagagtgtgtgttactggttgagggtgtcctggtccttggcatcttgaacaaataatcaga

SEQ ID NO: 271987 - DNA, 86 bp, Homo sapiens
  chr18:13461541-13461627
  hypo
cgaaagtacactccacagggtggtagcatgccctagcaagcggctcctgagcccggttacagaattttctccgctttaaagactct

SEQ ID NO: 271988 - DNA, 42 bp, Homo sapiens
  chr18:13462966-13463008
  hypo
ggcaagctgaaggcagatcccgactgccaggggcagcagcca

SEQ ID NO: 271989 - DNA, 87 bp, Homo sapiens
  chr18:13477885-13477972
  hypo
cactggttaggggaaactggcggcttttccgtggtcccgggctcggataatgcatctcagatcaacgaaggataccaaaggcaggtg

SEQ ID NO: 271990 - DNA, 38 bp, Homo sapiens
  chr18:13481383-13481421
  hypo
caggttcaaagcctgagaagcgggggcacgtgtagacg

SEQ ID NO: 271991 - DNA, 99 bp, Homo sapiens
  chr18:13481451-13481550
  hypo
gcaacatgatttctgaggcatgtgctgtgacacggttgtgcatggccccgtctgctgggaagacttctggtggccctcgagctgtgaccaccacccaag

SEQ ID NO: 271992 - DNA, 240 bp, Homo sapiens; identical to SEQ ID NO: 218458
  chr18:13491221-13491461
  hypo

SEQ ID NO: 271993 - DNA, 120 bp, Homo sapiens; identical to SEQ ID NO: 218459
  chr18:13498452-13498572
  hypo

SEQ ID NO: 271994 - DNA, 84 bp, Homo sapiens; identical to SEQ ID NO: 218460
  chr18:13498973-13499057
  hypo

SEQ ID NO: 271995 - DNA, 240 bp, Homo sapiens; identical to SEQ ID NO: 218461
  chr18:13499117-13499357
  hypo

SEQ ID NO: 271996 - DNA, 83 bp, Homo sapiens; identical to SEQ ID NO: 218462
  chr18:13499657-13499740
  hypo

SEQ ID NO: 271997 - DNA, 60 bp, Homo sapiens
  chr18:13503353-13503413
  hypo
ttcccagccggcagcgtggtccctgccaccaggtgcttgaacaaacggccatgtgtatga

SEQ ID NO: 271998 - DNA, 44 bp, Homo sapiens
  chr18:13505525-13505569
  hypo
actagtgaccttgccaggcacggtggctcacgcctgtaatccca

SEQ ID NO: 271999 - DNA, 119 bp, Homo sapiens
  chr18:13514461-13514580
  hypo
tgaccatggatatccgagtcaggtgggcctcgctgacaggtgagccaggattctagggccaaatagagacagacgaggtaatgggaaaggctgacatcataggccgtggtagccctctc

SEQ ID NO: 272000 - DNA, 150 bp, Homo sapiens
  chr18:13518870-13519020
  hypo
tagtcattttccttgcaggccgctagggtaggaagggtctcggggatgaatttattcctagttcaccattctacggaggatataattttgtgaagactcagctttcttcagcagcagtgttcgttgtgggagccccgcagtggaaatgcc

SEQ ID NO: 272001 - DNA, 147 bp, Homo sapiens
  chr18:13519311-13519458
  hypo
gtggcatcaacctacgtggctctccctggtgttccggagggagccggggagctggggtcagctctttccctgtctgccttgggtttcccttctttcattgatttcctcaaggggatgcttaccttttctaaaaagacttgacaactt

SEQ ID NO: 272002 - DNA, 202 bp, Homo sapiens; identical to SEQ ID NO: 218463
  chr18:13525325-13525527
  hypo

SEQ ID NO: 272003 - DNA, 74 bp, Homo sapiens
  chr18:13528924-13528998
  hypo
tgctgttggtctgtggcccacgctttgggtagcgagagcttagatcctcggccgtggttctagcttcccaatgc

SEQ ID NO: 272004 - DNA, 269 bp, Homo sapiens; identical to SEQ ID NO: 218464
  chr18:13532099-13532368
  hypo

SEQ ID NO: 272005 - DNA, 226 bp, Homo sapiens
  chr18:13550420-13550646
  hypo
gtcatgggtctgtggagagacgtaatactgggagctgcagagggctcggaataagtcaaagctcgaggggctagagggtgtctggacggcttacatcataaacacatgctgtgagaatgagaaggcgtccctgaggacggccaggaggaaggctcaaggcatgagtgctggcgatgttgatgccatcaagacgatgagtcccgccgagcagccttccacagtgggt

SEQ ID NO: 272006 - DNA, 35 bp, Homo sapiens
  chr18:13571915-13571950
  hypo
tgagctaccgcaccgggcctataaactattattaa

SEQ ID NO: 272007 - DNA, 360 bp, Homo sapiens
  chr18:13583719-13584079
  hypo
ggggggcccggccgcgccgaagcctgcttgagtcaccgagccagggcgctgcggctccccactgctggcggagtcttattgttgtgtctctcgctttgcctttcacagttctggcatggcagggcttaatgaatgtcaggctcagagggaagagaatggaacctgcgagcactttctgccactcacagagcggggtcacctcgccctgctcccccagctgcctacaggcctgccgtgcccttcccatctccgcagcctcagcctggcttcccttgaggaccaccaccgcccttagcccatctcccacacccatcttgctgagagtgcaggtgagcccggcccacccgaagccacgttgcc

SEQ ID NO: 272008 - DNA, 57 bp, Homo sapiens
  chr18:13590480-13590537
  hypo
gtgactgttcagaatgtacacggccctgcagctcccgaaggccagctctgctgcaac

SEQ ID NO: 272009 - DNA, 254 bp, Homo sapiens
  chr18:13621654-13621908
  hypo
gctgggtcctggaggtgctgcggggacaaatcacgcgctcatcgtcactaaacgtgccggcagcacatgggtgccatgagctggaggacgcctggagcttaaggcctcgggagcttcctggggatcggcggtggggttgttggcggtgggcttgtcagcggtgggcttgtcggcggtagggttgtcggcggtgggttgtggagggtggggttgtggagggtggggttgtcggcggtggaccctcaagccaaact

SEQ ID NO: 272010 - DNA, 117 bp, Homo sapiens
  chr18:13654304-13654421
  hypo
agccaagaagcactcggctcagatgcctcggagacagtgcaaaccaagcgacagacagaacgggcggggttggaggggatgatggcagggagagagggcaagcgctatgtccaatgc

SEQ ID NO: 272011 - DNA, 428 bp, Homo sapiens
  chr18:13826242-13826670
  hypo
gggccatcatcgccggcatctgggctttctgcacgggctgcggcattgtcttcatcctgtactcagaatccacctacgtcatcctgtgcctcatctccatgttcttcgctatgctgttcctcctggtgtctctgtacatacacatgttcctcctggcgcggactcacgtcaagcggatcgcggctctgcccggggccagctctgcgcggcagaggaccagcatgcagggcgcggtcaccgtcaccatgctgctgggcgtgtttaccgtgtgctgggccccgttcttccttcatctcactttaatgctttcttgccctcagaacctctactgctctcgcttcatgtctcacttcaatatgtacctcatactcatcatgtgtaattccgtgatggaccctctcatatatgccttccgcagccaagagatg

SEQ ID NO: 272012 - DNA, 138 bp, Homo sapiens
  chr18:13836864-13837002
  hypo
gaaacagtgctcctaggatccgccctccagtcctgctctcagtgagaactcagcgcagggctccggacacgggcagacgccgcgctttgtcttcccgtcttcccctcacctcagtgtcctctttctctcacgttcttt

SEQ ID NO: 272013 - DNA, 145 bp, Homo sapiens
  chr18:14221785-14221930
  hypo
cttaaaagataagttctggccgctgccgctgcagcctgctgggctggaggaagtggagctggtgccgtccctgctctcttgctgggaagcaactgagggggcggcgcggcaggccccggcagccgaagaggctggcaggtggcac

SEQ ID NO: 272014 - DNA, 33 bp, Homo sapiens
  chr18:18700054-18700087
  hypo
cctagccttcgcgccttttattttttcctcagc

SEQ ID NO: 272015 - DNA, 88 bp, Homo sapiens
  chr18:18997462-18997550
  hypo
agactccatctcaaaaacaaacaaacaaaaaataatctttcaaaaatgaagatgaaataaagacactttaagacgtacaaaatatgga

SEQ ID NO: 272016 - DNA, 120 bp, Homo sapiens; identical to SEQ ID NO: 218465
  chr18:19064405-19064525
  hypo

SEQ ID NO: 272017 - DNA, 180 bp, Homo sapiens
  chr18:19216811-19216991
  hypo
gcaagactccgtttcaaaaaaaaaaaaaaaaagaaagattcaggttccagcaggatgtttccaattaagagtcacttccatgtctgctccttgtcacaggctgatgtatatttctgcacaatctgaatccgacttctattctgaagttttaagatttgagtcagagggctgggcgtggtg

SEQ ID NO: 272018 - DNA, 239 bp, Homo sapiens
  chr18:19243722-19243961
  hypo
ctacaagttcagcttcagaacgcagctccagggatggctgggagtgcgtcaggaatcagaaggtcaacatggcagccggtgagtgatgcaatcgacttcatgggcttcagacaaaccttcaggctcacaaaatccgcagtcacagagacccgtagttaagaaaaatattaaaattcacctgaattaattctttccttccttcgttcattcaatcaaccgcatttaataaaatatgataa

SEQ ID NO: 272019 - DNA, 32 bp, Homo sapiens; identical to SEQ ID NO: 218466
  chr18:19253263-19253295
  hypo

SEQ ID NO: 272020 - DNA, 38 bp, Homo sapiens
  chr18:19395658-19395696
  hypo
ctgatttgaatgctcgaaacaagcgccgacagacacca

SEQ ID NO: 272021 - DNA, 59 bp, Homo sapiens
  chr18:19769948-19770007
  hypo
cagtgttgttgccactacagcgtgttagattaatatgcgatattagttcatttctttga

SEQ ID NO: 272022 - DNA, 34 bp, Homo sapiens; identical to SEQ ID NO: 218468
  chr18:19778302-19778336
  hypo

SEQ ID NO: 272023 - DNA, 80 bp, Homo sapiens
  chr18:20109533-20109613
  hypo
gagagagaagcacaggtccacgcaggcagccaaagccatcttcttggttgaaagatactcttttcggggggaggagccaa

SEQ ID NO: 272024 - DNA, 132 bp, Homo sapiens
  chr18:20380480-20380612
  hypo
tctgatgcaaaatgttctcccgccagcacccaagaccatagatgctgtggcggtggtggcagcaaacactgggcatgcttggacgggcagccacagggttgccacggtctcggcagggtctagtagacagag

SEQ ID NO: 272025 - DNA, 217 bp, Homo sapiens
  chr18:20696270-20696487
  hypo
acgggtgtgagccaccgtgcccggccgctacgtttaactcttaacctctaagattcattgcccctgggagtagttgctcttcaaggataacacatggctcagggactgcctgtcacaccccaacctgagaatcagcagagactaccacggggcccatcaggccactaggcaggtgccactcccctggcagggagagaggtgccggtggccaccgacc

SEQ ID NO: 272026 - DNA, 163 bp, Homo sapiens
  chr18:20770343-20770506
  hypo
tggccactgtgagccgaaggaaaccgggtgactcggggtaccggctacagagggctctcccctcttcaggaattcccaggcagggctgttgagcctcgggatgcagtgtccttgagtctcgaggtgtcgaggagaggctggaggaggacgtgggttctgcgtt

SEQ ID NO: 272027 - DNA, 219 bp, Homo sapiens; identical to SEQ ID NO: 218475
  chr18:20790547-20790766
  hypo

SEQ ID NO: 272028 - DNA, 260 bp, Homo sapiens; identical to SEQ ID NO: 218476
  chr18:20800425-20800685
  hypo

SEQ ID NO: 272029 - DNA, 329 bp, Homo sapiens
  chr18:20829538-20829867
  hypo
atgaaatttttcagcgtcttttacgtacgttttgttctctttgatcttcaagataaacctgggaagcagccccatcaggttttctcatctcatctcgttttggaggatgagggtgaggctcagggaggttgagtgactttctccctgttgcctgatttgctgaaggtggacctgaccccccgcccccgacagccctttccactgctagcgatcttctcggacatcctggtgagagcccttgtctagggagctactctgtgctgcttattcagtaccatgaaggagagaaaagcaggaaggcagtgcatggggcacgagctggaagcagc

SEQ ID NO: 272030 - DNA, 193 bp, Homo sapiens; identical to SEQ ID NO: 218477
  chr18:20846712-20846905
  hypo

SEQ ID NO: 272031 - DNA, 256 bp, Homo sapiens
  chr18:20853662-20853918
  hypo
agtcattcgcctcacggtcacattccatttactcagtcaccgcaagtctcctgccacctaaagccagtcactgtggaaagctctgcttgctgatggtcataaggataacagtaaggtttactgtctgtttactgtgtgccggtatgctaagcacaacacatacatacattactataatttttttccatttaattgtttcaacaaacgtttgagaggattaaattacctttccatttttattttattttttttgcga

SEQ ID NO: 272032 - DNA, 47 bp, Homo sapiens
  chr18:20882093-20882140
  hypo
ggtgggagagatggcgccagccacctgtcactcgccagccacctgtg

SEQ ID NO: 272033 - DNA, 42 bp, Homo sapiens; identical to SEQ ID NO: 218478
  chr18:20910923-20910965
  hypo

SEQ ID NO: 272034 - DNA, 641 bp, Homo sapiens
  chr18:20911025-20911666
  hypo
cagcaggagcgttcagcgagaggcagagccccggaacagcggtgttcactcagttaaacctcatggtctgagagagtggcaggtgtgccgttttccataattagtcacagcccctgaaggaaaagcgcgcccgtgtggggcaggaccaaaggaagaaacgcttctgcaatgctaccgggaagtctgagctcaccttctttaccttggcaccgagctgaagatctgttagaaaccctctccaaccaggactttcaggagaaacggtggccaccgcccagaataacaaggccccagcagcaaggtgtccttttcccagcaagtgaaacctgccccccgccaccacctgtagtacaggagacaccacaaagcaagaggccccagggctctgctcgggaagctgccgggcctgtttttcctcccagtggccaacaaacaggagggcaggttcagcacgttgggctctgctttctgagcgccgcaccattacagcatccacatccgatttttaaaactgaagtataacataaataccgtgtagtgtaggaggcacaggaatctcaagtacatggcttgctgagcatttatacccattagcacccacacagctgccacctggacagagacaccggcccttcccagca

SEQ ID NO: 272035 - DNA, 43 bp, Homo sapiens
  chr18:21042374-21042417
  hypo
gattacaggcgcgcgccaccgcgcctggcctgttcttgttttt

SEQ ID NO: 272036 - DNA, 155 bp, Homo sapiens
  chr18:21104196-21104351
  hypo
gtggtcctgaagtcctcctccgggcagctgtgaataacactccgagagccaccccgcaggcagcttccctgactgtccaggggcctcgcgtttagcgtggactcagtacatggtgggcaggggcgagtgctagcggaaactgggtttgctttttg

SEQ ID NO: 272037 - DNA, 94 bp, Homo sapiens
  chr18:21164538-21164632
  hypo
taatgtgaagcctggctgggcgaggtggctcacacctgtaatccccaaaagaggagggcggatcgctagaggtcaggatttcgagaccagcctg

SEQ ID NO: 272038 - DNA, 44 bp, Homo sapiens
  chr18:21306854-21306898
  hypo
tgtaggagtgagctaccgtgcccggcccattgcccactttttaa

SEQ ID NO: 272039 - DNA, 203 bp, Homo sapiens
  chr18:21388620-21388823
  hypo
agtgagtaaactagccgagttcccctccatcagtgagagtttcttttacgtttctgatgacaacacaggtaaattctgtcgttcaccatcatttactaaaaagcactttcagagaaattcaccatacatgggctgggctgtcacagagaatgaaaataacatggtctcgtccctgtgggggccccatgcgccaaggcttagat

SEQ ID NO: 272040 - DNA, 73 bp, Homo sapiens
  chr18:21422659-21422732
  hypo
agagcctgaagtggccgcaactgtgaaggttccagaaggaaagtccttggttttggtgcgttccactcgttcc

SEQ ID NO: 272041 - DNA, 42 bp, Homo sapiens
  chr18:21426405-21426447
  hypo
cccaacgtcatcgggcggcagtgcacccgctgtgcaacaggc

SEQ ID NO: 272042 - DNA, 78 bp, Homo sapiens
  chr18:21461950-21462028
  hypo
tactatggcaacgccgtccacggatcctgcagggcctgcccatgtcctcacactaacaggtaccgtagcagcttgaca

SEQ ID NO: 272043 - DNA, 154 bp, Homo sapiens
  chr18:21508086-21508240
  hypo
atttaacatttctacgcctgctttccgaggctgcatgaaaaatttgaagaaaaccagtggtgtcgttagattgaatgatactgtgggagtaaccaaaaagtgctcggaagactggaaggtaagtgaaagttcagaacctcgtgaaggagtgctt

SEQ ID NO: 272044 - DNA, 120 bp, Homo sapiens
  chr18:21608975-21609095
  hypo
cgcgcccctacgtaatatttttaaatgattgcctaaaattaattagtgtttgagttgcttgtataaatagatgtgtgtggtgttgttgttgttgttgttgtttttgtgtgagacggagtc

SEQ ID NO: 272045 - DNA, 192 bp, Homo sapiens
  chr18:21656908-21657100
  hypo
ggatggattcttaacgtttgtttccagttctaccatccatttctgtagctcctcacctgaggtcagaattgttagcattcatgtctataatcctggtcccttcgacgtcacgttgagagatgccgtttctccgggagcaggtgttcactcctctgttgggcttgcacccttttgtcccggtgtgtcccctgc

SEQ ID NO: 272046 - DNA, 165 bp, Homo sapiens
  chr18:21702069-21702234
  hypo
cccttgggctctgccgatggtagcctatcctggtacgtgcacgcctgggataggtgactgcttgaccatgcccaaatgcgagtacgggaccaacctacttttaggggtgctcaggtaacgaagggggaactagccaggcacagtggctcacacctgtaatcccag

SEQ ID NO: 272047 - DNA, 116 bp, Homo sapiens; identical to SEQ ID NO: 218482
  chr18:21849311-21849427
  hypo

SEQ ID NO: 272048 - DNA, 204 bp, Homo sapiens
  chr18:22098635-22098839
  hypo
gatgggctgctgctgttccacgctgccatcgccaccgggacccaacatctcttcctgaagtccgtgatgcaggattttcactccaccgcttgcgaacagccccacacccagcgccctcccgcacacaccgtcttggggcctcctccagcgcagtgcactcctgctgccacggtacgtcctgccggggagaattacaaacttctc

SEQ ID NO: 272049 - DNA, 32 bp, Homo sapiens
  chr18:22552213-22552245
  hypo
tctatgttgtttgtttgtgacggagtttcact

SEQ ID NO: 272050 - DNA, 186 bp, Homo sapiens
  chr18:22597055-22597241
  hypo
acattattcatgtcactgaacgtaagtttcacatgatcgtagggcattgggatgctctcagtgttgttggcgatcactctgctgccctctgagtgactctcgttgagcaccatatctttccgaaagcagccccgagatgccccatcctgcagttgaccagcccacggtggtagctacatcttcaca

SEQ ID NO: 272051 - DNA, 69 bp, Homo sapiens
  chr18:22636372-22636441
  hypo
gaaatcaacatccgcggttgccctgagatagcatcacccatcgttccgccggtgcgccctccctgagat

SEQ ID NO: 272052 - DNA, 42 bp, Homo sapiens
  chr18:22653944-22653986
  hypo
atttagataaactgtgttaagtatgagccacctcctgagagg

SEQ ID NO: 272053 - DNA, 44 bp, Homo sapiens; identical to SEQ ID NO: 218484
  chr18:22658458-22658502
  hypo

SEQ ID NO: 272054 - DNA, 70 bp, Homo sapiens
  chr18:22721843-22721913
  hypo
agtgtaactttccaacattccatgcgctaggaagtttttgctcatttgcgcctgtctggtttagctgata

SEQ ID NO: 272055 - DNA, 263 bp, Homo sapiens
  chr18:22756670-22756933
  hypo
gggctccgagggatcgcagcgtagtgcaacagattacaccagcttgcccaagtcggccgccccggtgttgctttccttacagaataaatgacaaagatgaaactgctcccggaaaattctagacactcacacatgctcaccagcacacgtgcgcgtgcacgcacacactcataagcacacgctccctggctggctccaacattcggcgctggcgtggaacctggtgtttactcccaatactcgctgtgacctgagcacttacc

SEQ ID NO: 272056 - DNA, 74 bp, Homo sapiens
  chr18:22787366-22787440
  hypo
caggactccaggaccgactctccagcaccgcctctccatcgccagttcttgctactaaccgctgccttcttgga

SEQ ID NO: 272057 - DNA, 170 bp, Homo sapiens
  chr18:22804889-22805059
  hypo
ggagaggcatcttgcaaatccggcagtttccagtatcaagactcttactatgcgtgactttgtgttcagtaagagttaaaagggagggaaaccgctctccgcaaatagggcacatgtagtgtttgacagggcctaggtgggtctgcatatgttcccggaggccattttcg

SEQ ID NO: 272058 - DNA, 418 bp, Homo sapiens
  chr18:22806990-22807408
  hypo
catgagggaggtctcctctacgaagagctcgtggcagtagacacactggagggccgctcggtcctcatttggggagcattcggggtggcactctgcaatgtgtttttggaggtcttccgggaagtcaaagccttcctcacactgactgcacttctgagtgtccttcatcttccagtcctccatcctggaaccggactgagagccgtccttgttcctctcatgaacctgcatgtgtccgtgtaaggaactagaggacagaaacccacggcgacaaatggcacatttatatggcttgttggacgtgtgagtctttaagtggatcttcaagtgatcacttctggaaaacgcagcatcacattcactgcagtggtacttcttgtccccggtgtggagttttatgtggcgatctcggctgcgc

SEQ ID NO: 272059 - DNA, 154 bp, Homo sapiens; identical to SEQ ID NO: 218486
  chr18:23652341-23652495
  hypo

SEQ ID NO: 272060 - DNA, 130 bp, Homo sapiens; identical to SEQ ID NO: 218487
  chr18:23988507-23988637
  hypo

SEQ ID NO: 272061 - DNA, 227 bp, Homo sapiens
  chr18:24059431-24059658
  hypo
aaggggctgaaaaacgcgcgctgccagggcagaaaaggctgcgtgggctccgtggaagcagagcaggcaaggggtgtggagagaaagaggaaagggctggaagggaagggtgcttgggccgcggaggcacaggcctggcggaggtgaaagcctctcagagaagaaaacgttccccattggaagcaacaaacgctgggagtaataaaaagaaacgcagggctgctgat

SEQ ID NO: 272062 - DNA, 32 bp, Homo sapiens
  chr18:24409812-24409844
  hypo
gagacacacctaaaccacgtgggggagacaaa

SEQ ID NO: 272063 - DNA, 37 bp, Homo sapiens
  chr18:26202689-26202726
  hypo
acaagcaatgtaattcgccaataaagtttaaagaaga

SEQ ID NO: 272064 - DNA, 139 bp, Homo sapiens
  chr18:27755725-27755864
  hypo
ccctcatccctgtggcagggcgtgcgacaagcgggggctcccctcgatgtcctctcaatgtccggtggcttgtcttctttggccgatattttcatctcgtcgtccagcagcttccgtttctgtcttgctagggtctcgg

SEQ ID NO: 272065 - DNA, 99 bp, Homo sapiens
  chr18:27932659-27932758
  hypo
cccagtcgggtgtgcgcggcctcggggcgacactgacatgccagcccccggtcaccatggccccctccagactttgggtactgacgagcatgggaggga

SEQ ID NO: 272066 - DNA, 150 bp, Homo sapiens; identical to SEQ ID NO: 218489
  chr18:28934936-28935086
  hypo

SEQ ID NO: 272067 - DNA, 120 bp, Homo sapiens
  chr18:29026532-29026652
  hypo
ttgcactccggcctgggcaacacaaagagacgcagtctcaagtaagtaagtaagtaaataaataaataaataaataagaataatgtttcattttctgtactactcgggagcctgaggcag

SEQ ID NO: 272068 - DNA, 172 bp, Homo sapiens; identical to SEQ ID NO: 218490
  chr18:29199777-29199949
  hypo

SEQ ID NO: 272069 - DNA, 43 bp, Homo sapiens
  chr18:29200381-29200424
  hypo
attacaggcgtcagccactgtgcccaggcgacaaatttcaatt

SEQ ID NO: 272070 - DNA, 45 bp, Homo sapiens; identical to SEQ ID NO: 218492
  chr18:29269413-29269458
  hypo

SEQ ID NO: 272071 - DNA, 54 bp, Homo sapiens; identical to SEQ ID NO: 218493
  chr18:29293795-29293849
  hypo

SEQ ID NO: 272072 - DNA, 99 bp, Homo sapiens
  chr18:29325111-29325210
  hypo
taatctggaagcccccgactaccttgcttcaagtgccgcgcctttccagattgaaccaatgtacatattacattgtaatattacaggttatattgatgt

SEQ ID NO: 272073 - DNA, 61 bp, Homo sapiens
  chr18:29366854-29366915
  hypo
ataatattttatatccgattagagcagggtttctcaatcttattgccgttggagctagata

SEQ ID NO: 272074 - DNA, 39 bp, Homo sapiens
  chr18:29520730-29520769
  hypo
attacaagcgtgagccaccgcgcccggccgaaaattttt

SEQ ID NO: 272075 - DNA, 45 bp, Homo sapiens
  chr18:29521106-29521151
  hypo
tttttttaggaattcaaggccgggcgcggtggctcacgcccataa

SEQ ID NO: 272076 - DNA, 157 bp, Homo sapiens
  chr18:29610273-29610430
  hypo
gggattacaggcgtgagccaccctacccggcagtgaatgtacctaatttttagaaaatgaaactctgtttaggataattctgaaatactttcaggtaaatggattgaaacgttcaatttgtggtcaagtatgagcagtaaagcgtacatcaaattgg

SEQ ID NO: 272077 - DNA, 80 bp, Homo sapiens
  chr18:29670904-29670984
  hypo
tggatcccatcttatcgatttatcctttttttgttcttctttttttttgagagtctcactctgtcgccagggctggagtg

SEQ ID NO: 272078 - DNA, 72 bp, Homo sapiens
  chr18:32702565-32702637
  hypo
ctcagcctgcactgtgtccccgttagtgaggcttaacggtggggcagaagcggtgcttccatcccacatgtg

SEQ ID NO: 272079 - DNA, 43 bp, Homo sapiens
  chr18:32957798-32957841
  hypo
ttgaaaaataagtttgaggccgggcgcggtggctcatgcctgt

SEQ ID NO: 272080 - DNA, 80 bp, Homo sapiens
  chr18:32989494-32989574
  hypo
actaaacttcatcgcgcacacaaccaggcactgcaggattttgaaagggtgctgaaggatagatacgggctgattcccaa

SEQ ID NO: 272081 - DNA, 127 bp, Homo sapiens
  chr18:32991120-32991247
  hypo
tggagggtcatgcgcggtgaggttttcagaaagctcgactgggagggaggagaaatggatcagaaagggatttggatggttggaatgaccggaattatctgattactaagcgcgtgcgctctctctc

SEQ ID NO: 272082 - DNA, 118 bp, Homo sapiens
  chr18:33041505-33041623
  hypo
agaaggagtgctgggcgtggatgcaggggcctggctcacagccttcccttgcctctagtttctctcttgaacctcaggttccttaggtgtagagcgagcccgccgctacacttgcctc

SEQ ID NO: 272083 - DNA, 91 bp, Homo sapiens
  chr18:33078643-33078734
  hypo
accacgcccggccggttcttaatctcttaggattcacagactcttgagcatggaatctgtgcttcctatccctgccgcacacccccacctc

SEQ ID NO: 272084 - DNA, 94 bp, Homo sapiens
  chr18:33485572-33485666
  hypo
ttgagattcctccccgaggcgcgcaatccttggctgagctccacagaattcctgggctgtgggaatgaggagtaagcggcggtgttgctctcct

SEQ ID NO: 272085 - DNA, 38 bp, Homo sapiens
  chr18:33550615-33550653
  hypo
agccccccgcctcccgcctttttttttttttttttttt

SEQ ID NO: 272086 - DNA, 131 bp, Homo sapiens
  chr18:34297789-34297920
  hypo
ttcaggtttgtggcccgcaggtgtccaggatgcaggtgtaaatggacagtgtggcgacatcctcaccaacaaacggttcatgcttgacatgctgtatgcccataacaggaagtctccggatgatgaggaga

SEQ ID NO: 272087 - DNA, 35 bp, Homo sapiens
  chr18:34366183-34366218
  hypo
tagaataaggggtcagttagcgtctggtggtgttc

SEQ ID NO: 272088 - DNA, 54 bp, Homo sapiens; identical to SEQ ID NO: 226558
  chr18:35145806-35145860
  hypo

SEQ ID NO: 272089 - DNA, 436 bp, Homo sapiens; identical to SEQ ID NO: 218503
  chr18:35249614-35250050
  hypo

SEQ ID NO: 272090 - DNA, 120 bp, Homo sapiens; identical to SEQ ID NO: 218504
  chr18:36298627-36298747
  hypo

SEQ ID NO: 272091 - DNA, 120 bp, Homo sapiens; identical to SEQ ID NO: 218505
  chr18:36889351-36889471
  hypo

SEQ ID NO: 272092 - DNA, 120 bp, Homo sapiens; identical to SEQ ID NO: 218506
  chr18:36939330-36939450
  hypo

SEQ ID NO: 272093 - DNA, 82 bp, Homo sapiens
  chr18:37109505-37109587
  hypo
gaggaatacacaagcggctggtcgtggagaggaacacaccgacaagtaccggcatgtggcaggccaacgaccggcagaacta

SEQ ID NO: 272094 - DNA, 100 bp, Homo sapiens; identical to SEQ ID NO: 218507
  chr18:37198432-37198532
  hypo

SEQ ID NO: 272095 - DNA, 47 bp, Homo sapiens
  chr18:42295260-42295307
  hypo
tgggcaggtcacagcggcagtgaggcgtggtacgaagtgatgggctg

SEQ ID NO: 272096 - DNA, 272 bp, Homo sapiens
  chr18:42530678-42530950
  hypo
taagaaggatccccgtgtccctaagttgagtaaaatgatagagaatgagtccccctcagttggccttgaaactggtggaaatgctgagaaagttatcccaggaggtgtgtctaagccgcggaagccacccatggtcatgacacctccaacgtgcacagatcactctccatccagaaagctgccagaaatccagcatccaaaatttgctgcaaaacgaaggtggacttgcagcaaaccaaaacctagcaccatgcttcgagaggcagttatgg

SEQ ID NO: 272097 - DNA, 139 bp, Homo sapiens
  chr18:43299705-43299844
  hypo
aatcttgaagaaacaaaaggcgcaagcctgggagggaggatgatgccccgggtggtgtagtggatgggatttggcgctctcaccaccatggcccggatttgattcccggtcagggaagcctttcttcttgccaggcgtg

SEQ ID NO: 272098 - DNA, 192 bp, Homo sapiens
  chr18:43307167-43307359
  hypo
agagctagggcacacgtcatgctgattcacatatttttgccctttgtcatgtattgagaaaaagtaaggatgaatggacggtctttgattggcggcgctggtgacgcccgtcatggtcctgtttggaaggacccttttggaactaaagctggtgacgcagcgcgcagaggcatcgcccggctaagcttggcc

SEQ ID NO: 272099 - DNA, 66 bp, Homo sapiens
  chr18:43410024-43410090
  hypo
ctccgccatgaaaccgacaagcagctcagctttctctctagttaacagaagcgtgactacgcccac

SEQ ID NO: 272100 - DNA, 180 bp, Homo sapiens
  chr18:43450342-43450522
  hypo
tagatgttttaacacgataaaatgacttccacaagacactgttttccacaggcaccaccgaggcaacacagaatgtattcatggtccacgctagcacacactgccactatgcctaacaaccacagtgaccaggctgctccctagaagccagatctctctaggctgcgatgccgggaatga

SEQ ID NO: 272101 - DNA, 32 bp, Homo sapiens; identical to SEQ ID NO: 218512
  chr18:43599472-43599504
  hypo

SEQ ID NO: 272102 - DNA, 193 bp, Homo sapiens
  chr18:43613983-43614176
  hypo
tgaccagctaatgcacgaagggaatctgtcattcccaccctggcaatctgtccttcttaaggctgtcctgagacatagccgaccacagtgagggtcccggaaacagagctgtagccagggcaggttgaccatgggacgtacaggagcttatggggaagagtacagagtcctgaggcaccggggctgtggatcc

SEQ ID NO: 272103 - DNA, 120 bp, Homo sapiens; identical to SEQ ID NO: 218513
  chr18:43767225-43767345
  hypo

SEQ ID NO: 272104 - DNA, 67 bp, Homo sapiens
  chr18:43779976-43780043
  hypo
ctgtggattttaagcgccagcatcagatgcagatagccttacagaaaattctttattgtgtgtgtgt

SEQ ID NO: 272105 - DNA, 97 bp, Homo sapiens
  chr18:43906113-43906210
  hypo
gtagcaatcgctaacgcatccacctgactagacatgctcttcccttgtctaatcccctctgcagtattttcttttcttctttttttgagatggagtc

SEQ ID NO: 272106 - DNA, 336 bp, Homo sapiens
  chr18:43906510-43906846
  hypo
tagggtacgaatcacttctaccttcagttaggattagatctggccatgaacacagagacccgagtctcagtagtttaaaaaagacaggagtttatttttcttgcaccgaggttgtgaaggggacacactgtccaccgcagccatgtgtggtgagtgggagccgtctgtgttcttgagggcttcagcggcagaggggagaccgtccaaggagggcttcagcggcagaggggagaccgtccaaggagggcttcagcggcagaggggagaccgtccaaggagggcttcagcggcagaggggagaccgtccaaggagggcttcagcggcagaggggagac

SEQ ID NO: 272107 - DNA, 44 bp, Homo sapiens; identical to SEQ ID NO: 218515
  chr18:44010836-44010880
  hypo

SEQ ID NO: 272108 - DNA, 84 bp, Homo sapiens
  chr18:44140397-44140481
  hypo
caccaccaggtgccgcagccacacggtgtccacgaaccagctgggcccaaagccctcgcccgtgtgcccgagccggagcttata

SEQ ID NO: 272109 - DNA, 122 bp, Homo sapiens; identical to SEQ ID NO: 218516
  chr18:44260343-44260465
  hypo

SEQ ID NO: 272110 - DNA, 44 bp, Homo sapiens; identical to SEQ ID NO: 218517
  chr18:44700791-44700835
  hypo

SEQ ID NO: 272111 - DNA, 104 bp, Homo sapiens; identical to SEQ ID NO: 218518
  chr18:44701015-44701119
  hypo

SEQ ID NO: 272112 - DNA, 290 bp, Homo sapiens
  chr18:45121093-45121383
  hypo
atgaggcaagatcgcgaacaaaaaaatgtaatttataaggcgtctgtggactggaatttatcatcggatccgctcgccgccgctcaattgatatgtagttgatttcaaacaacaccccccaggcgcccagagggaacattttttagattttacgcttggatatatctgtttaactcgccatttaccaaaacaacggctgatgacagcacaaaccagtcactctggagaaaacacgcacgcatgctctcatacacacgctctcgcccgcgtgtgcgcgcacacacacatgc

SEQ ID NO: 272113 - DNA, 34 bp, Homo sapiens
  chr18:45186646-45186680
  hypo
ttgcctggatgggccaggtgcggtggctcatgcc

SEQ ID NO: 272114 - DNA, 78 bp, Homo sapiens; identical to SEQ ID NO: 218519
  chr18:45353784-45353862
  hypo

SEQ ID NO: 272115 - DNA, 200 bp, Homo sapiens
  chr18:45554569-45554769
  hypo
tggcccccatctcttcgatgttggccctgagagccccaagacactgcacagccttggagggggcactggagatgggggtaaacattaaatagcgcccccaggagtccagacatgaacagcggcctgcagggaaggtagggtagcattctgagttcgcagagctacctgtgggctttgctgaagctcggaagctcccctga

SEQ ID NO: 272116 - DNA, 322 bp, Homo sapiens
  chr18:45567034-45567356
  hypo
atcatcttcgtcgtcgtcatcgtcctccttgtcatcctcctcccccccgtcccccccaggctccatgatctccaggcacacgttcacgatgcactggatctccagcatcctggctgcgttgaggatgtgcttgacattgccagcggtgatggtgagcgtggaggtgtaggcgaactccaggatagcagccagagcctcaggctggacaaagtcgatctcatagacgtagggctggctggctagggtgccggctgtgaaaagcttcttgaagtacttgctgcaggcagccaggacggagcggtgggtccgatactcctgctcc

SEQ ID NO: 272117 - DNA, 189 bp, Homo sapiens
  chr18:45579501-45579690
  hypo
taaaagtgcttgatgcgtcccttccgcctgccccagaggaaaagtgaggaggcagcttccatgtctgtcttcccatcgcccctacagtggccaagaatgggcatggagttgggagcggccgcttctgcagaatgtgcacagattcattacagacaccccacaggccttgcatgcgcgggttggggaatg

SEQ ID NO: 272118 - DNA, 86 bp, Homo sapiens
  chr18:45594043-45594129
  hypo
gcccttacaattgcacgagccaattctgtaaaataaatctctctctcagttgggcatggtggctcatgcctgcaatctcagcaatt

SEQ ID NO: 272119 - DNA, 194 bp, Homo sapiens
  chr18:45820419-45820613
  hypo
cattagcacgaatgcggtgtttacctccctggggaagggcaagcaagctgctggcgtggttcagcatgcaccttcccctgggagcccggagagcacattagcagaggcttggagaggggactaggcaatcagcaggtgcgtgtgcacatgccagcctggaatttgaaattaatcacctgcggaaggcacaatgg

SEQ ID NO: 272120 - DNA, 154 bp, Homo sapiens; identical to SEQ ID NO: 218521
  chr18:45917050-45917204
  hypo

SEQ ID NO: 272121 - DNA, 86 bp, Homo sapiens
  chr18:46041295-46041381
  hypo
tgcagctggcccagcgtggggccgtgcgccagtccaaacggcccagctggagaattctctgcctctgccaccgccgccattggcaa

SEQ ID NO: 272122 - DNA, 291 bp, Homo sapiens
  chr18:46142031-46142322
  hypo
ccattgagggcagccgcatggggcgctagctcctcatactccgggttgcaggtgccaggggccgggggcttcctgcaggcatctcctgactgcagaggaagcctggacaggagaccccggggcagctgaggtgaggcgccgctgggctaccccatgtgaatctggctgggcagcaaacactagagtagaaggaatggccgagaggacgtgaggacacaagaggcacccgcagagcgagtcctcttccttcctcggggcaccaaaaggctgcaggtttgggatgggtctcaa

SEQ ID NO: 272123 - DNA, 457 bp, Homo sapiens
  chr18:46142352-46142809
  hypo
gtttggggtgatgaccatgcccaggctccctcatgggaccctgacacagccctgagacactcgggcatgtttgggagagccccgcagagccggccagaggctgctgctgcaggcagagcctggcactcaatcctcctggaaacggctccgtgtagagttcctgcaaaacccggttctccgactgcacctgttaggtgtgccagggagcccttgataagatctgacgtcttccaggaataatgggcgtggccttgtgtattgacttctcctgcaggtggctccttttcagccctctctggacatcggcggttttattcccatccagcggaggccagcttcccggggccaggcacggagcctgcttggggccagctctccggaacctgtgcccagctggggaataagcacatgctcagcacttgaagaattcactgctcactggcgagtcagtatggaa

SEQ ID NO: 272124 - DNA, 135 bp, Homo sapiens
  chr18:46189304-46189439
  hypo
tggagctgtaatggcggatgctgctgtatacgctttctgtacatgtcttttggtgagcatcgggcacatttctgtgtgtttatacctgggagtgaatttctgggtcatacggcgtgcacacgttcagctcaggtg

SEQ ID NO: 272125 - DNA, 340 bp, Homo sapiens
  chr18:46287802-46288142
  hypo
atggacaagctgatcgagatcctgaacagcatgcggaacaacagcagcgacgtggacaccaagctcaccaccttcatggaggaggcccagaactccaccaactccgaggagatgctgggcgagatcgtgcgcacaatctaccagaaggctgtgtccgaccgcagcttcgccttcaccgctgccaagctctgcgacaagatggcgctctttatggtggaggggaccaagttccggagcctgctcctcaacatgctgcaggtaactggacgccggccaccaccgccccgcgccccctgcccctctgcgttcggtgagttattcctagcgagaaggctgcgag

SEQ ID NO: 272126 - DNA, 228 bp, Homo sapiens
  chr18:46385808-46386036
  hypo
agtccatgctgacccggtcgctgctcctagaggtcatcgagctccacgctaacagctggaaccctctgacgccccccatcacgcagtactacaacagaaccatccagaaactgacagcctgacagccagggggcctggcaggcggcccacgggcagctggggccctggtgcacagggccagatggacaggcgggaggacaggggtggccctggcgggagaaagaaatg

SEQ ID NO: 272127 - DNA, 408 bp, Homo sapiens
  chr18:46386252-46386660
  hypo
gtgagggatctcatcgctgtgactcctcggagaccttggcagcctcgcacgccggggcaccgcttgggtcagaaaggacctcggaaggctgaaaaagtgggtcggagacgggctcgcattgttcccgcatgctgtcagccgcagtcgccaactggcagcaggcgacgtgtagcagatgtccgggaggacaaaggcaggcacggtccccaccagccgcccgtaattgacggcctttgtcagccatggcagagctgacgctccacctcccacctccaagtcctcctcactgcagcccccacagcctcaggcctagggggtcaggcgcagcgggggagatggagtttgcagttccacttgcactcttttgtttattgtgttttatttttcaaaagtcggttgctttgaagt

SEQ ID NO: 272128 - DNA, 305 bp, Homo sapiens
  chr18:46418913-46419218
  hypo
cagggctgggcgcccgtgaggaggtgggccctgatttggcaggtgtgcatgaggccccctccacacatgcatgctggtgcgggtgccagcacggccacagtggagggtaagaacacacttccaggcggcactgccagccctcgccgtgttccagcttgttgacaccgtgatggcataattacagtttcaatcgcagattaataataagtcatttttgcaaacgaggaggcaggtctgcactggaaagggccccaaagggcctgtcgcctctgctatctgaggctgctggccgccgtttgatgttt

SEQ ID NO: 272129 - DNA, 139 bp, Homo sapiens
  chr18:46481278-46481417
  hypo
gcgcccggcccagaaatgggatttttaaggtgtctgggaaatgtatcatattttcaccttagaaaggcttagaaagagtaccagactagaggtcagaaaacctgattccaggctggggcgttgccgctcactggttaag

SEQ ID NO: 272130 - DNA, 81 bp, Homo sapiens
  chr18:46486896-46486977
  hypo
ggccccttgtgtgggttttataaggaccagttagaactctgtcaaagaggtaaggctagcgtctgagtttaaaaacaaaca

SEQ ID NO: 272131 - DNA, 84 bp, Homo sapiens
  chr18:46524824-46524908
  hypo
ctgggagggtgtcctggccccgagccagacctcccactgacaacaggcccagtcctgagccccgtggggacacccttccatccc

SEQ ID NO: 272132 - DNA, 255 bp, Homo sapiens
  chr18:46547227-46547482
  hypo
gacagaggcggccgcgtggcgggcaaggggaaagaggcgctggctctggagctggggaagctgggtccaagcccctgcagtccctgtgtgagctggggcccagagctacctcctgaggcctcagtttcccctctgtttcggagctggtgggagagtgactgagactgggtgaagtgtgtggagagtggcagggggctcgtccagtgtgggtcccggatcccgcatgggaacccttgcagtcgtcagggcctggct

SEQ ID NO: 272133 - DNA, 231 bp, Homo sapiens; identical to SEQ ID NO: 218528
  chr18:46578116-46578347
  hypo

SEQ ID NO: 272134 - DNA, 44 bp, Homo sapiens
  chr18:47012298-47012342
  hypo
attagcaaggtgtgatggcacgcgcctgtagtcccaggtatttg

SEQ ID NO: 272135 - DNA, 92 bp, Homo sapiens
  chr18:47019807-47019899
  hypo
ctttgtcttctcctccgggttcctcttttatgttgcatggtgacaagagtaacagacaatgggccgggcgcggtggctcacgcctgtaatcc

SEQ ID NO: 272136 - DNA, 151 bp, Homo sapiens; identical to SEQ ID NO: 218529
  chr18:47285297-47285448
  hypo

SEQ ID NO: 272137 - DNA, 88 bp, Homo sapiens; identical to SEQ ID NO: 218531
  chr18:47812104-47812192
  hypo

SEQ ID NO: 272138 - DNA, 270 bp, Homo sapiens; identical to SEQ ID NO: 218532
  chr18:48190331-48190601
  hypo

SEQ ID NO: 272139 - DNA, 199 bp, Homo sapiens
  chr18:48493689-48493888
  hypo
aagtgatgggattacaggtgtgagccacggcgcccggccagctgctggatattttgaccacctcaagtacgctgagcacgaaatcagtgcatctggcagtacacaggagcttgaaatactttttttaaaagttgttattcaaactgaaggagtttttccctgtggtctgtaatcgccacgtgcccgttctgtatacagc

SEQ ID NO: 272140 - DNA, 158 bp, Homo sapiens
  chr18:48661656-48661814
  hypo
aaaaaaaaaaaaaaaaacttcatagtgaaagacgaccacagcatactcagcttacctggcacacactgctgtccagcccagcaatcagatagtacagtagtcccccttatccacgcacagtttcagttacccgaggtcagcctcggtccaaaaacacc

SEQ ID NO: 272141 - DNA, 85 bp, Homo sapiens; identical to SEQ ID NO: 218534
  chr18:48664888-48664973
  hypo

SEQ ID NO: 272142 - DNA, 120 bp, Homo sapiens; identical to SEQ ID NO: 218535
  chr18:48725413-48725533
  hypo

SEQ ID NO: 272143 - DNA, 95 bp, Homo sapiens
  chr18:48725593-48725688
  hypo
acctcctaggctcaagtgatcatcccgcctcagcctccccagtgcatcaccacgcccggcgcgcatcaccacacgtggctaattttgtttatctt

SEQ ID NO: 272144 - DNA, 223 bp, Homo sapiens
  chr18:52576694-52576917
  hypo
gtcatttttctggccgcaaatgtttgaggccagtggcgcctttgccagagttttacttggttccgttgggctcattttgttcactcagcctggcaggctgtgaactactggcctaggtctcatgcctgtcaagggcgagtcaggtgtgaaatggtgaggggtgtgtgagcaagtggtgtggggtccggccactgtgtatagtcaaacatgccgactgctacag

SEQ ID NO: 272145 - DNA, 242 bp, Homo sapiens
  chr18:53074041-53074283
  hypo
atagcagtgatgaacaaacccggcgcgttcactgcggaattttcgagacaaccctccggtactagaatgcgacagccgctgcggatattttttggcacaaagacaatggtggcagtgccaagccccatggctaaaactactcaaaagaggcataagggtagcattaatcgctcaagtcttttactgcatggagtactgttgtccatatttttaaaactaaaagtacccgttagtaacatttg

SEQ ID NO: 272146 - DNA, 211 bp, Homo sapiens
  chr18:53074492-53074703
  hypo
ttcataaactaagtcgacatattggctaaacaactttcttctgcaaaaatgatgtatacaagggaacatgtaatactatgtcacaattttttaaattaaacaaggaaaacgctgtaaatgagcagacacaacatccgtcaatcaatccttctggagacaaaggagatcaacatgcagccccgtctacagaacaagtcggcatctccagtga

SEQ ID NO: 272147 - DNA, 31 bp, Homo sapiens; identical to SEQ ID NO: 218536
  chr18:53106926-53106957
  hypo

SEQ ID NO: 272148 - DNA, 159 bp, Homo sapiens
  chr18:53126065-53126224
  hypo
tttccattttttttgcataccgcgcaataccctctcgctctgagggtgacttccctgaccccagtctgacactgcgccgttaatgtcagataaaccatttagcccaagcacaattcttttctgtgcaaaaatctgctcgaggtggaaaatgtagcagtt

SEQ ID NO: 272149 - DNA, 32 bp, Homo sapiens
  chr18:53333160-53333192
  hypo
cttttttttttttttttttgcgacggagtctc

SEQ ID NO: 272150 - DNA, 163 bp, Homo sapiens; identical to SEQ ID NO: 218539
  chr18:54398593-54398756
  hypo

SEQ ID NO: 272151 - DNA, 157 bp, Homo sapiens
  chr18:54483260-54483417
  hypo
gctggagtcacatcagaagccgcgcagactatcaccacggctcctgatgcctcagggcctgaagcaaaagtccaggaggaagagcatgaccttgttgacgatgacatcaccactggtaagcacagacatctttaacgtctgattggagctttgtttg

SEQ ID NO: 272152 - DNA, 290 bp, Homo sapiens
  chr18:54694221-54694511
  hypo
cctgtccctccagatgaacacgtcactgctgggaagcatcggcatgctgaactcggcacctcagctgcgctgcattaaaacctaccaggtgccccctgtgcagcccgcgtcccccggctcccacaatgccctcaagctggcccggctcatctggacttccaaccgcaacgtcatcctcatggcccatgacgggaaggagcaccgcttcatggtctaatgctgctgcctgccgccgtgactgcgttttagttctctaaattatccaagccgatgttgctctgtccttcctc

SEQ ID NO: 272153 - DNA, 53 bp, Homo sapiens; identical to SEQ ID NO: 218541
  chr18:55315834-55315887
  hypo

SEQ ID NO: 272154 - DNA, 133 bp, Homo sapiens; identical to SEQ ID NO: 218542
  chr18:55329689-55329822
  hypo

SEQ ID NO: 272155 - DNA, 110 bp, Homo sapiens
  chr18:55398780-55398890
  hypo
gatcatctttggcacgtgtggccatgacccacatgaggatttataagcgacctagtcaccgggacttcatgtggttaccttttctgaatggctcccggttctcctctgct

SEQ ID NO: 272156 - DNA, 45 bp, Homo sapiens
  chr18:55426742-55426787
  hypo
tcaaagaaaccaggaagggccgggcacggtggctcacgcctgtaa

SEQ ID NO: 272157 - DNA, 44 bp, Homo sapiens; identical to SEQ ID NO: 218543
  chr18:55427027-55427071
  hypo

SEQ ID NO: 272158 - DNA, 187 bp, Homo sapiens
  chr18:55760789-55760976
  hypo
accttcaattcactactgtgcgcatattcatgtttcatgctgagcagttcacttgagactttctcacggaaagaagtgcgatacagttggtggtagtcttatatttgctacgtgctcatgtgttgtctgatgatagaatgcagtggtcaaatattgcacaatttacgccagaggaggagaattccca

SEQ ID NO: 272159 - DNA, 180 bp, Homo sapiens
  chr18:55784750-55784930
  hypo
tgtatgaaaaccatcctcatcgcttcacagttgtctttgaaccagtttccctgggattgttcgaaatgtagcaaacgtggctcacggttaccctgacggggccagagcaatagggggaggtgtgggcacctgtatacatttgcgttgaaaaacgtacccgggctattctgaggtcctttc

SEQ ID NO: 272160 - DNA, 33 bp, Homo sapiens
  chr18:55817734-55817767
  hypo
ggcgtgagccactgcacccggccgttttttgat

SEQ ID NO: 272161 - DNA, 39 bp, Homo sapiens
  chr18:55821161-55821200
  hypo
agtcaccgcacccggcccgaaatattgttaaaaccaagt

SEQ ID NO: 272162 - DNA, 55 bp, Homo sapiens
  chr18:55847725-55847780
  hypo
accccctttctgtgcttggccgactccagcgcccgttcttctgcccctccttggc

SEQ ID NO: 272163 - DNA, 298 bp, Homo sapiens
  chr18:55850818-55851116
  hypo
cttttcatgttgcatcttaccgagttgattgagtattcacttcgaagctccatgctgcacgcatgggcctgtaaatagctttttcgtgcacttgtgggtgtcatttcagatcgcttcatcggatttcagttacccaagtttttacttggttcaccgtaagtttgcaaaaaagactttttgttatcctgaacattgcaggtggaaacatgattaattttgaattatttttgtttaacttctaccctctttcctatttacagcctattttgtttattttaacttccgctgttaagacttc

SEQ ID NO: 272164 - DNA, 51 bp, Homo sapiens
  chr18:55852265-55852316
  hypo
acagtttcatcagcaccaggcgtgcacggcgttagtcatggtccttgctct

SEQ ID NO: 272165 - DNA, 103 bp, Homo sapiens
  chr18:55862023-55862126
  hypo
gactggttgatttcggataatacttttagagccacggggaactgtgaaagacaagaaaatgtaaaaaaagcacattgattgcaggaccggtggtccaaaagca

SEQ ID NO: 272166 - DNA, 117 bp, Homo sapiens
  chr18:55922278-55922395
  hypo
acttgtcattattccgtgtggcggaaggtgggaaaataccgtgtgtgctgttaaacatgccaggtccctgcactggttagacagagtctcagtgctgtgctccgttgggaaagaagt

SEQ ID NO: 272167 - DNA, 192 bp, Homo sapiens
  chr18:55923975-55924167
  hypo
aagccctgtttccacgggagctgacaccacggtaagttcacagcgtgtttacatgtgtttactgatttcaacttcgatgcttactctgcggcgtaaccaaaataaaacctcaccctctgttccgggagtttccctgcttcaggccagtggatctgaatgtttggccgagttctggcacgatgatttgtggtc

SEQ ID NO: 272168 - DNA, 184 bp, Homo sapiens
  chr18:55945680-55945864
  hypo
accccttctaatccacgtcccacattatagctcaaaagtatggattttacagatcttatcctctcctgttctgccaaaaccccatacggtcctccattaccaatcaggtgaatcgacttgcatttcccagcgtgtccccacacccacaaacactccatgacactgggcccgtccctgcctttat

SEQ ID NO: 272169 - DNA, 42 bp, Homo sapiens
  chr18:55947809-55947851
  hypo
agtggattcatggagcctgtcgaggaagctacctgtgtgctt

SEQ ID NO: 272170 - DNA, 173 bp, Homo sapiens
  chr18:55977131-55977304
  hypo
ggagtgtcttctcaccaccccgattatactggtctagttatgctttggagttaaagccaggctgctattgcagggctgctgcaatccttgcaagcacagttgttctttgcttgcgcttgctctcgctctcgctctcactctcactcttgctcgctctctttctctctctctga

SEQ ID NO: 272171 - DNA, 261 bp, Homo sapiens
  chr18:55992342-55992603
  hypo
actatgtcaaccacaacaaccggaccactcagtggcacagaccaagcctgatgtgagtaccgtgtgatggtcaggaacacgtgcacgtgcactgcacagctagggacaaatatggcggccctttgggacaaggctgggaaataaatcatatgtctataagagcagatggtggtgtggtacgagattcctctccatttacgtaaagcatgcaagagcagtcagaacttgtatattgtaagcgattgcctttgagtcacatgc

SEQ ID NO: 272172 - DNA, 47 bp, Homo sapiens
  chr18:56002735-56002782
  hypo
ttcatcaactgtcacgggtggtgaggaaccaacggtaatgatccact

SEQ ID NO: 272173 - DNA, 169 bp, Homo sapiens
  chr18:56008830-56008999
  hypo
gttgtttgggttcgcgctcctaatcacacacaccgggagatcctcctatgaagctaacttgtttttgcctccaaaatagcttgcagaagatggtgcgtccggatcagccacaaacagtaacaaccatctaatcgagcctcagatccgccggcctcgtagcctcagctcg

SEQ ID NO: 272174 - DNA, 38 bp, Homo sapiens
  chr18:56036807-56036845
  hypo
gcctgcatagggccacgctgagccggggagaattggcc

SEQ ID NO: 272175 - DNA, 136 bp, Homo sapiens
  chr18:56062044-56062180
  hypo
aagtgctgccaaagcgagcacgtgaatggttagcttttaaaacccaagaagttactttgctcattcttggaatcacacatcaatacctggagggggcggttttaaacacagtttgagcactcgcggcagaggcagc

SEQ ID NO: 272176 - DNA, 115 bp, Homo sapiens
  chr18:56063563-56063678
  hypo
ctaacagacttttgcagaggcgatggcagagagcagctgcaggcatggtccctggagccgagccttcaccacgcactcgtccaagttcggatgcgggaacctggtcccagcttga

SEQ ID NO: 272177 - DNA, 141 bp, Homo sapiens
  chr18:56359260-56359401
  hypo
gcgagactccgtctcaaaaaaaaaaaaaaaaaaaaaaaaagagggtggttgtggaatgcgttgggctgactggtttccagtgggagacatccaggaagtttttagctctgtatttacatggtgctacgtgagccaaggacc

SEQ ID NO: 272178 - DNA, 40 bp, Homo sapiens
  chr18:56483562-56483602
  hypo
aagacaatttttccacggaccaggggtggggaagatgaaa

SEQ ID NO: 272179 - DNA, 180 bp, Homo sapiens
  chr18:56483782-56483962
  hypo
gccggttcctaacaggccacagaccggtaccttcacagaagaaacaacctgggccccttgcctattgttagtgtgtcccttcccacagtcacaccctcttgtacctgtccctgggaggaaaacacaaggtatcagtaagtttgaaattccccggccgggcgcggtggctcacgcctgtaa

SEQ ID NO: 272180 - DNA, 61 bp, Homo sapiens
  chr18:56814249-56814310
  hypo
cagtcctcaggcatcgccagctgatcctagtgcacgctgatgcttgcgctgctgctgtaaa

SEQ ID NO: 272181 - DNA, 43 bp, Homo sapiens
  chr18:56815806-56815849
  hypo
ctagtgcttatgcatcaactcgtgtgaccctcccacctgtgct

SEQ ID NO: 272182 - DNA, 190 bp, Homo sapiens
  chr18:57684684-57684874
  hypo
gggtaatagtcttccgtaaatcgcgcttccccctccggcactccggtgactgctgagagagacgccgagccagcaaataagaatgctccctggtggatttgttggtaaataagacatctcgcgtcgggggcagctcgccggggcgagggcgaggacagcaggaggtgaaccgcgtcgctggccgccgcct

SEQ ID NO: 272183 - DNA, 498 bp, Homo sapiens; identical to SEQ ID NO: 218546
  chr18:59483204-59483702
  hypo

SEQ ID NO: 272184 - DNA, 202 bp, Homo sapiens
  chr18:59533473-59533675
  hypo
ttctagacagcgagtcgggcccaggtagccccacggatggctactccccaccagatgccttatacacggggactcgtttatcctcaggacaacttgaggaagtcaccctcattgtcttcttattacacaccaggagctggcagcaaagatgttcaaacactaccccaagctacagagtgagaatctgcgaggacaagattca

SEQ ID NO: 272185 - DNA, 35 bp, Homo sapiens
  chr18:59589239-59589274
  hypo
caggagggttgcaccgcagcgggtgagcaagcaaa

SEQ ID NO: 272186 - DNA, 208 bp, Homo sapiens
  chr18:59728760-59728968
  hypo
aaaaaaaaaaatgcaataaaatagtgaggacaaaagggcaacattccattcccgtgaataaaaagcatggaatggctgaaatcgctaattatactattaacacaaaggagtttaggaataaaattcgtcatgaaggggaaccagtgcaggagcacaattccaataaccccggcacctgtgaagggagctctgccggtcagtttataat

SEQ ID NO: 272187 - DNA, 83 bp, Homo sapiens
  chr18:59834319-59834402
  hypo
tatttagtgtatctcttccactagaatgtaagctccttaagaacacagactgacacctcgttctctcccgtatgccttgtcta

SEQ ID NO: 272188 - DNA, 39 bp, Homo sapiens; identical to SEQ ID NO: 218547
  chr18:59975663-59975702
  hypo

SEQ ID NO: 272189 - DNA, 86 bp, Homo sapiens
  chr18:59987232-59987318
  hypo
aaaattacaggtaggtaataaaaacatttttatttattaataagttttcactatatgcaagattcgtaaagtcttatgtttgcata

SEQ ID NO: 272190 - DNA, 164 bp, Homo sapiens
  chr18:60004628-60004792
  hypo
tcaataccacacaattctgacggtatgggtgtatattaactcacaatgcgtataaattagtaatcagttatgtgaccttataccctacccacctcacactgcacttagtcacacgggctatcttgctgtttctccgtcaagccgtgcatgcttcctccaagggc

SEQ ID NO: 272191 - DNA, 188 bp, Homo sapiens
  chr18:60077430-60077618
  hypo
aatgcttgaaaaacccgtccttggctggggggcctcggtcacctgcactagtagaaagtctgtggacccatttttcgtgaagaggagatctgctgaccttctataaacaattgcccaagtggaggcagggctcatcgagactcacccagcagaggaaaatgagtccaacactgcggctgggcaaagtg

SEQ ID NO: 272192 - DNA, 120 bp, Homo sapiens; identical to SEQ ID NO: 218549
  chr18:60110134-60110254
  hypo

SEQ ID NO: 272193 - DNA, 41 bp, Homo sapiens; identical to SEQ ID NO: 218550
  chr18:60110314-60110355
  hypo

SEQ ID NO: 272194 - DNA, 180 bp, Homo sapiens
  chr18:60111709-60111889
  hypo
agcgagactccgtctcaaaaaaaaaaaaagtgttaattgaatgcagaccccagggagaagcagcttctggggcatacacgttaagtgacaaaatggcaaagtatgatgctgcgggggacacacgccaccagagaaaggaaaaagcctcagatgggcaggcatgtaactccctaaacacac

SEQ ID NO: 272195 - DNA, 164 bp, Homo sapiens; identical to SEQ ID NO: 218551
  chr18:60117014-60117178
  hypo

SEQ ID NO: 272196 - DNA, 193 bp, Homo sapiens; identical to SEQ ID NO: 218552
  chr18:60120642-60120835
  hypo

SEQ ID NO: 272197 - DNA, 157 bp, Homo sapiens
  chr18:60154518-60154675
  hypo
ttttttttgagacagcgtcttgctttgctgcccaggctggaatgcagtggcactcgcatggttcctgacctcttgggctcaagtgatcctcctgcgtggctgggaccgaaggccacacctggctaatttttgtaatttttgtagagactaagtctca

SEQ ID NO: 272198 - DNA, 146 bp, Homo sapiens
  chr18:60210294-60210440
  hypo
tgtcttcttcttgcccgtcagctgtatcgggaattccttgtccacatcttccttacttctccctgcttgagctacgccttttctcctcaggttggatggcacgcaccctgaagccaggtggaaccatgccacgtttttgtgaatcc

SEQ ID NO: 272199 - DNA, 83 bp, Homo sapiens; identical to SEQ ID NO: 218556
  chr18:60216459-60216542
  hypo

SEQ ID NO: 272200 - DNA, 165 bp, Homo sapiens
  chr18:60217646-60217811
  hypo
ttgaaaagggaggaacggcgacatcctgacctagagcccatcctaaggtaatgatttacctgacgcctatcatagcagcatacacacaggacaaagggccgctccaaatggggtcttcaggtgggggaatcatagagatcctttctctggcgtacttcttaaaat

SEQ ID NO: 272201 - DNA, 87 bp, Homo sapiens; identical to SEQ ID NO: 218557
  chr18:60229135-60229222
  hypo

SEQ ID NO: 272202 - DNA, 136 bp, Homo sapiens; identical to SEQ ID NO: 218558
  chr18:60234752-60234888
  hypo

SEQ ID NO: 272203 - DNA, 34 bp, Homo sapiens
  chr18:60242135-60242169
  hypo
cttctccccagccagcgagcgcaggtatcagcca

SEQ ID NO: 272204 - DNA, 70 bp, Homo sapiens; identical to SEQ ID NO: 218559
  chr18:60273154-60273224
  hypo

SEQ ID NO: 272205 - DNA, 90 bp, Homo sapiens
  chr18:60377413-60377503
  hypo
aaaaaaagttcaataagtacttgttgaatgaatgtcccaggtaatttacattattagggtattggggtgggtttacgccgcctgtatttc

SEQ ID NO: 272206 - DNA, 80 bp, Homo sapiens
  chr18:60430703-60430783
  hypo
tgcagcaagtcatgcgaacacctcattcagccttttgcagcctgtactgaactgctgtcgctcatcgcacccttgttttg

SEQ ID NO: 272207 - DNA, 186 bp, Homo sapiens; identical to SEQ ID NO: 218561
  chr18:60523278-60523464
  hypo

SEQ ID NO: 272208 - DNA, 33 bp, Homo sapiens
  chr18:60534964-60534997
  hypo
tttggtattctgccacggcgatgcatgccaaga

SEQ ID NO: 272209 - DNA, 37 bp, Homo sapiens; identical to SEQ ID NO: 218562
  chr18:60549764-60549801
  hypo

SEQ ID NO: 272210 - DNA, 169 bp, Homo sapiens; identical to SEQ ID NO: 218563
  chr18:60609801-60609970
  hypo

SEQ ID NO: 272211 - DNA, 97 bp, Homo sapiens
  chr18:60614284-60614381
  hypo
caaaaaacaaacaacaacaacaacaacaaaaatttccagaatttttactttctgtatagtaactttcacattgaggaagagccgtgctctgaaggga

SEQ ID NO: 272212 - DNA, 202 bp, Homo sapiens; identical to SEQ ID NO: 218564
  chr18:60645390-60645592
  hypo

SEQ ID NO: 272213 - DNA, 210 bp, Homo sapiens; identical to SEQ ID NO: 218565
  chr18:60645979-60646189
  hypo

SEQ ID NO: 272214 - DNA, 43 bp, Homo sapiens
  chr18:60654359-60654402
  hypo
aaccccctccacatgcgctgagtgcagacgacacaggagcaga

SEQ ID NO: 272215 - DNA, 226 bp, Homo sapiens
  chr18:60813471-60813697
  hypo
taaagaaattaagtgttggccgagtgaaacaagtgagacttctgcagccgcagccagggcttggccatagctgcgagggaccttccagcccgcctcctggcagaaggacgctggtcgtggacactgatggggaaatggcggctgtccctgagccccccaagaaatggagcgaggtaactagaggcagtgtggttaccatttgaccgtggaagtctgacaggacgcc

SEQ ID NO: 272216 - DNA, 191 bp, Homo sapiens
  chr18:60878883-60879074
  hypo
cagtgaaataaataggtactcgacgatagtatgtgttgttgctgtgtagttcttttgctcctgaacagcaaataccattggacttggcattgtcctactgtggctgcaagctgtgtctcaccacagctaacgccagtgcagaggagccatgccacgcaaaggtcccctgcggcagcaccagcctgaagctc

SEQ ID NO: 272217 - DNA, 88 bp, Homo sapiens
  chr18:60935229-60935317
  hypo
cagctaatcagcggcgatgcctttattttctctaacattcctgcattccttttgcatctcttttcacgcatggcggaagccactagaa

SEQ ID NO: 272218 - DNA, 111 bp, Homo sapiens
  chr18:60959765-60959876
  hypo
taatagaaagggggggcttgcgcacagaaggaaatgggttcatgttggcaccacccaggtgctcagcaaatggacagcaaataaaccgtcgttgaagaaaggcaatgaaag

SEQ ID NO: 272219 - DNA, 165 bp, Homo sapiens
  chr18:60973501-60973666
  hypo
caaagctagcaatttcttgccgttcccactaccattcctctaggtcaggcacttgatctcttgcccgtttgctgaaagagccttctatctggtcactgatttctcccccgtctcattaacggtctggagtggagtcagggtgacgtatctgaaacaaactcttcc

SEQ ID NO: 272220 - DNA, 169 bp, Homo sapiens
  chr18:60992577-60992746
  hypo
aaataccacaaattaggtagcgtaaaacaacagaaatttattctctcacagctctgtgggctggaagtcaaaaagcaaggcgaaagcaggcccacgctttctctgaagctcgggtacagtctgttcttgcctctccctagcttctggtggtggccggcaatccttaatg

SEQ ID NO: 272221 - DNA, 353 bp, Homo sapiens
  chr18:61143911-61144264
  hypo
accttccggtcctgcgtgggccgagaggattgccgtacgcatgtctgtacgtatgcatgtaactcacagccccttcctgcccgaacatgttggaggccttttggaagctgtgcagacaacagtaacttcagcctgaatcatttctttcaattgtggacaagctgccaagaggcttgagtaggagaggagtgccgccgaggcggggcggggcggggcgtggagctgggctggcagtgggcgtggcggtgctgcccaggtgagccaccgctgcttctgcccagacacggtcgcctccacatccaggtctttgtgctcctcgcttgcctgttccttttccacgcattttccaggat

SEQ ID NO: 272222 - DNA, 39 bp, Homo sapiens
  chr18:61450038-61450077
  hypo
cagaccaggatcatcagcaccgcctggagaacttgttag

SEQ ID NO: 272223 - DNA, 111 bp, Homo sapiens; identical to SEQ ID NO: 218567
  chr18:66360549-66360660
  hypo

SEQ ID NO: 272224 - DNA, 42 bp, Homo sapiens
  chr18:67073950-67073992
  hypo
ccttaaatgtctttcaaacacgcacagtaatggtgaatattt

SEQ ID NO: 272225 - DNA, 36 bp, Homo sapiens
  chr18:67957153-67957189
  hypo
gatcctggcacaaaacttgggatatgtgcagtagtg

SEQ ID NO: 272226 - DNA, 90 bp, Homo sapiens
  chr18:67985374-67985464
  hypo
aaccactgtacctggcctattatttattatatagtttttttttaaaggaatgtttccctagtctttttgcctgtacgtgattctgcagaa

SEQ ID NO: 272227 - DNA, 266 bp, Homo sapiens; identical to SEQ ID NO: 218569
  chr18:67991029-67991295
  hypo

SEQ ID NO: 272228 - DNA, 370 bp, Homo sapiens; identical to SEQ ID NO: 218570
  chr18:67991980-67992350
  hypo

SEQ ID NO: 272229 - DNA, 361 bp, Homo sapiens
  chr18:67992600-67992961
  hypo
cctttggaaggatcacggagctattgtctggacagctcttctcccatggaagtctctgcggttcctcctcaagtgggagggcgcgctttccccgaggatgagagtcaggtagaccaggacctagttgtcgccccagagatcttcgtggatcagtccgtgaatggcttgttgattggcaccacgggagtcatgttgcagagcccgagagcgggtcacgatgatgtccctccactctcaccattgctacctccaatgcagaataatcaaatccaaaggaacttcagtggactcactggcacagaagcccacgtggctgaaagtatgcgctgtcatttgaattttgatccgaactctgctcctg

SEQ ID NO: 272230 - DNA, 40 bp, Homo sapiens; identical to SEQ ID NO: 218572
  chr18:68042712-68042752
  hypo

SEQ ID NO: 272231 - DNA, 45 bp, Homo sapiens; identical to SEQ ID NO: 218573
  chr18:68053094-68053139
  hypo

SEQ ID NO: 272232 - DNA, 181 bp, Homo sapiens
  chr18:71844279-71844460
  hypo
gagcccccgctgcacggccgctctccctcgcagcctcgcctctcaggggtgcgcccatctgttcacacgacatctgtggtaatttaataaacgtgggcacacagaaggcggctccgctttgggaagacatttaacctgctgcagaggtaaattatttgactctacccggtgagagcgaaga

SEQ ID NO: 272233 - DNA, 83 bp, Homo sapiens
  chr18:71847878-71847961
  hypo
ggcgttcctggagaccgtaaggggcacgttcatggagcagaggaagcagagacatgagcgatggtgggcggaagtccacacca

SEQ ID NO: 272234 - DNA, 172 bp, Homo sapiens
  chr18:71867254-71867426
  hypo
gaaggagcgaagccccgtccttgggaagaggagacgtgagccaggcaggatgggcccaaggagggagtcccttagaaactgtccagatgaaggctaacgaggtgcagctccacccagcctcctcgggctctccttcccacaggagcctctcatcctgcgatggccacattct

SEQ ID NO: 272235 - DNA, 33 bp, Homo sapiens
  chr18:71874053-71874086
  hypo
acctctgcacccggcccatacttcaggttttaa

SEQ ID NO: 272236 - DNA, 99 bp, Homo sapiens; identical to SEQ ID NO: 218576
  chr18:71879693-71879792
  hypo

SEQ ID NO: 272237 - DNA, 171 bp, Homo sapiens; identical to SEQ ID NO: 218577
  chr18:71889077-71889248
  hypo

SEQ ID NO: 272238 - DNA, 48 bp, Homo sapiens; identical to SEQ ID NO: 218578
  chr18:71904650-71904698
  hypo

SEQ ID NO: 272239 - DNA, 61 bp, Homo sapiens; identical to SEQ ID NO: 218579
  chr18:71983206-71983267
  hypo

SEQ ID NO: 272240 - DNA, 460 bp, Homo sapiens
  chr18:72177631-72178091
  hypo
cccatcaggctcctcggggagagcagcgcttctgtgcccgggagcagcgaaggtcacacaggaggacccgcacctcctcgtgtcggtggctccgctggtataatcaggactcacgtggtgttcctcgtgtcgtggcccttattgcagagggagcagcacaggctttcctggaagctcccctcggtcatgtggggtgactccagagagccccaccttgcgagactggaccagtccaagtggcctggagccacagcggcctggcagtacctggggagggggtgatgacaggtgcacacggaggcccatgtggtctgtctggagaatgccggagatgtgaaatatgtaatcctgagtgtggcttctagaaggaaggttcgcaaagctgaatatccactcgtgctgttcccttctcacaggagattcctgtcaacgtccgattctgcctcgaaggcatggagga

SEQ ID NO: 272241 - DNA, 336 bp, Homo sapiens
  chr18:72189898-72190234
  hypo
agaaggcccttgccaggttccggtccctccaccttggacctcccagcctcccgaacgttgagccaatacatctctgctcattgtaaattacctagtcttgggcattgtgttacagcagcaaaaagcagcctacggcagtcaccgtgctaacacctgcagcagcctgcggcggtcaccgtgctaacacgtgcagcagcctgtgtggctcaggccagtcagcttcccctggaagcaagtgtgaggtcgtcgcctctggaagtgctagcggagggtgatctcccggaggaaatcagagtggtgttctactagaaggccgatgactcctgggtaaagtgc

SEQ ID NO: 272242 - DNA, 252 bp, Homo sapiens; identical to SEQ ID NO: 218581
  chr18:72226538-72226790
  hypo

SEQ ID NO: 272243 - DNA, 51 bp, Homo sapiens
  chr18:72239212-72239263
  hypo
aaaaggtgatgtgtgcagaacgcttgtcacggtggctggaatgcagcatgt

SEQ ID NO: 272244 - DNA, 270 bp, Homo sapiens
  chr18:72335127-72335397
  hypo
tgtgaatgtgaatccgtgtgtgtctgtatgtctgtgaatatgtgactgcgtgtgtgagtgcgggtgttagtgtgtgtgcatgtgagtgtgtgtgtgcatgagtgtgagactgcgtgtttgagtgcaagtgtgagtgcgtgagggtaagtgcatgtgtgaaactgcattgtgagtgtgagtgcgcgtgtgcgtctgtgactttgggtgtgtgcacatgagggcggcagagcgagagctgcagctcgcttcgtagatactctttaggaggga

SEQ ID NO: 272245 - DNA, 56 bp, Homo sapiens
  chr18:72342003-72342059
  hypo
aagagcttgagcacgaatggtgatatgtaatgagattatacgtgttgttcattgga

SEQ ID NO: 272246 - DNA, 62 bp, Homo sapiens; identical to SEQ ID NO: 218582
  chr18:72344372-72344434
  hypo

SEQ ID NO: 272247 - DNA, 306 bp, Homo sapiens
  chr18:72347358-72347664
  hypo
catctggctagtgccggccacatgagaaatgagcaggccagtgtggaggagcttccggagggaggggccacctttaaatgtgtcaagtgcacagagccctttgattctgaacagaatttatttttacatattaaaggacagcatgaggaattgctgcgggaggtgaataagtatatagtggaagacactgagcaaatcaaccgcgagagggaggaaaaccagggaaacgtctgcaagtattgtgggaagatgtgtcgaagcagcaactcgatggccttcctggcacacattcgcactcacacaggt

SEQ ID NO: 272248 - DNA, 136 bp, Homo sapiens
  chr18:72378034-72378170
  hypo
aaggtgcatggtgacgtggtgcagtgggagcctcagcctgactgctgtgtgcacgccccgcagaagcataggttggagggtgagggcgctctgtgtgccctgtgtgccccgttttcagactcgccattggctacca

SEQ ID NO: 272249 - DNA, 215 bp, Homo sapiens
  chr18:72543641-72543856
  hypo
ccttttggccaatgcgaatgatgctgcctccccatccgtcgatgccacgtgtccccctcacccctgccctgctgtgcatcaccctgagtgtggggacctctccatatacctgatgccacatgccactcccacccctgctgtgtgtcaccgtgtgtggaggggcctccctgtgctcctgacgccctttacctcccaccctccgtgtgctgtggccc

SEQ ID NO: 272250 - DNA, 170 bp, Homo sapiens
  chr18:72568950-72569120
  hypo
tcaaagaaggcactcgttaattagataaaggctaaagctctcattatttttaaatgatttaagaacgggtaaagatcttacagcgtatactgcagctctaatagttctctgcttactgccttgtaataagagtattaaagacagatgggcaaggccgatttaaaccaatt

SEQ ID NO: 272251 - DNA, 158 bp, Homo sapiens
  chr18:72604260-72604418
  hypo
tagctgtgggaccgcggtcaaactatcgagtgaaatgccactttctgttttgtaaattgtgggttcttagtggaccaacctcataggattatggtaaatattaggtgagaagcactttgaagtcacctagagagagtcggccacgtcagtcgcttgat

SEQ ID NO: 272252 - DNA, 245 bp, Homo sapiens
  chr18:72611942-72612187
  hypo
caggtagacggatgcgtgctgtctttgtgttggcattcatttgtttgcgtaaaatcactttctgaaatgtactttaatgtttatgtgccaaatgtttaaatgtccattgaaaccgtgaggctgaaaactgcattattcgtgatggctagtacagtgtatacgtgattagggttggtgaagcaggggcactgctaatagttagatcctctgaggacttctcagaacactcccgagttgagccagtg

SEQ ID NO: 272253 - DNA, 137 bp, Homo sapiens
  chr18:72617315-72617452
  hypo
gcacaggtttcctgcgggtgacagagaggccagcgcagcgcctgctgttcaggagcgtctcagaggcacacgagagccggttggctgctcgcgcagagagcgcatgtggacacctggacagccgcgtgacttggaag

SEQ ID NO: 272254 - DNA, 114 bp, Homo sapiens
  chr18:72632539-72632653
  hypo
aactgtcccaagtgtgactacgggaccaacgtcccggtggagttccggaaccatttgaaggaacagcatcctgacatcgaaaacccggacctcgcttacctgcatgctggtaag

SEQ ID NO: 272255 - DNA, 224 bp, Homo sapiens
  chr18:72670002-72670226
  hypo
gtttggagaaccataacccacgtctcacttacactgtgaagtggtctaaaaatgttcgtcttcacctacgagactctggacgtctttgagtattcattccttcattctttcattatgtattaaggtccttattatagatgaggctgatgtaagtgcctgcgataaaacagtggaaaagatcagcaaaagagaacactgtcgtcgttgtcatcatttactgagtg

SEQ ID NO: 272256 - DNA, 32 bp, Homo sapiens
  chr18:72670449-72670481
  hypo
tttgatgaggagcccgccgtgcacacacctga

SEQ ID NO: 272257 - DNA, 126 bp, Homo sapiens; identical to SEQ ID NO: 218584
  chr18:72741505-72741631
  hypo

SEQ ID NO: 272258 - DNA, 262 bp, Homo sapiens; identical to SEQ ID NO: 218585
  chr18:72764593-72764855
  hypo

SEQ ID NO: 272259 - DNA, 244 bp, Homo sapiens
  chr18:72777722-72777966
  hypo
gtggcctccagacgcggagcactgctgcacatcccctgcagcccgatactgtttctcagcatctggcaaatggcccagatgcattctggtgacaataacgtattctatcatggatagcatctagaaatcgtgaagagcaggcatgagaggaaaggagagtggtaccttctttgtttaaatacaagtgccgtttaaaatctcttcctgagagagcatggagaccagctcacgctttgaccagttc

SEQ ID NO: 272260 - DNA, 75 bp, Homo sapiens
  chr18:72778315-72778390
  hypo
ttgatcactcctcccgttagcagtagcccacggccctcggctcggatgctaattcctaaccgtgcgtagtcctgt

SEQ ID NO: 272261 - DNA, 166 bp, Homo sapiens
  chr18:72819560-72819726
  hypo
gacaaagattacctcgtttcaaataaactagctctaattcactccttgggactggaggaaagggctcacctaacctggtatcaagacatctgtgcccgataccggaacacagccaggatctgttagtaggcaacggggtccaccatgaccccgtgtggaccccact

SEQ ID NO: 272262 - DNA, 694 bp, Homo sapiens
  chr18:72844252-72844946
  hypo
ccacgtgggcaccccgcgcacaggcagtgcggcgtcctgctaggtgcacagctttataccacttacaggttgcaagtagcaacgagaaaaatgctagattttacaggaaaataatattcataaatctcccgctgtgaattacagtataactcagagctgtctttgttttgctgctgcgatgaagtcaattctgtttcgggtggaaatgatacacacagagcccaaggtggaagccagtcccctcgcatttggtgaggtttgtagccagtcccagctggagcgcggaacagctgaacccactcgacgccggcaattcctggagttttcttttctcttcttgagagcagagctgcggaggacgtgaggggactttcttgggtgctgtgccctgaggtgaggcccctttatccttttcaccaggcggtattgcctcacaccggttccccagagggaaatggtcccaaaggtacctctcccgggctggccctggggaccgcggctggtcactctttcttcatgctgatgtcgtggaaggggtggtcgtgtgtttcaaacagagagcaagtacacatgctcatattccacacatcttttgatccatccaaactatacggagacatgcaattttgttcatgttttattgtccctagaagagttcattttccccaaaagatccccgcggctcagtggtaga

SEQ ID NO: 272263 - DNA, 318 bp, Homo sapiens
  chr18:72895946-72896264
  hypo
acttgctcgcttgacgtgtacagttggtgggacagagaccatgttttgcagacttttcatcctcactttagtacagtaggtgcccagtgaatgagagctgaacgagttaaagcacgagcaaagtcacacagaacggtcgccatgtgagtgctcatggcgcgatgcccagctctgccgcagaagcaggtctagcggttctgggccattggcttctcctggggctgccctccccatcgtcactggaaggctggaggactctccattatggagcccaggggaggttgaggacgtccctgcactccccgccctgtaagcatc

SEQ ID NO: 272264 - DNA, 165 bp, Homo sapiens
  chr18:72914982-72915147
  hypo
aaaattgggtagagcgatttttatgaaacattcaacatttcacagtccttttcaaatgaaaaggaaagcaaatcgttactatatttttcctcaacaagaagcagagacataacttgattaataccagatgattattttcatcttggtatccggagtcaatttaat

SEQ ID NO: 272265 - DNA, 295 bp, Homo sapiens
  chr18:72956539-72956834
  hypo
ggctttctccagtgcggttgggccggaaccccgggatggtgagcctttctttgtggtcgttgctctgccaatcttgagtccgtccttgctttttgctggcataaagcgctttgggtatgctgtgttctgcaggctcagtgcagcgttgagcttcagtgccccgtgtttcctgggggatgaggttcccggtgagtctccctgttatgacttgagacagtggataatagttacaaaaggaggccttggtttagtgagagctggttcaggtggctgaaaaacacgaccgtttgaccga

SEQ ID NO: 272266 - DNA, 485 bp, Homo sapiens
  chr18:72960668-72961153
  hypo
gacatatagatatacgtttacttgcctaattatacttgctgttaacaatacatcatgtgtttgcctgtgcgtccagctttgcgagtgtgatggtttaattaccctctgtggtgtctgcacgctctgctaagtcttgtgtgggggaacggttagaaatagccgcagaggcaaggatttagaagctggtgtgccgtgaagccatagggtcacccaccagcagcagtaccaggcgagccacctccgcgtgggaggaggcccaggtgtctgcttcctaacgcggggcctgagccgggcaccctggggtggagaggcttggatgggagccccagatctgggccactgtggtccctgggctactgggggaaagccaggtccttcaccgccctcctgcctacccggggctctgggctccaggccgtggctgctctctgtcccttgtccctgcggccacccaggccccacctgctacccgggcaggctgctca

SEQ ID NO: 272267 - DNA, 76 bp, Homo sapiens
  chr18:72972083-72972159
  hypo
ggcaggcctggccccggaggggttctttctgtgccccaggccagcctcttagcctgcggcttctcgtgtttccctg

SEQ ID NO: 272268 - DNA, 34 bp, Homo sapiens
  chr18:73282767-73282801
  hypo
aagctggctgggcgcggtggttcacgcctgtaat

SEQ ID NO: 272269 - DNA, 502 bp, Homo sapiens
  chr18:74062229-74062731
  hypo
ggagagcagagagccgggggagtggccacttcagagtggggccaggacagctggggccaccgccttcccggcgcaaggtgggccaggccccacaggtggccccagaattgcaaagccaatggcagcttcctaagtggtcaccgaaacgcactttcagtgtggacccgccggcctgtgtgtattcagcaatcccagccatccaacctgacctcgggctgcaaagacgatcgtggccggagccggctggctctttgcgaaagcggcgggacccggggacagcaggctgcctgcgccgcttccctccgggtggcaggcccactctctgcgggcaccgcgtcctgctcacccgtgttgtggtcgggccgcagagcaggccccttgacggggggatccggagccgcctggtgccggcacagcctcagggagcagcccctaagctgccccgtgacagtcaatcgcccgctttccccccgtgggaagtctgtgccgtgaccagagcctc

SEQ ID NO: 272270 - DNA, 96 bp, Homo sapiens
  chr18:74065277-74065373
  hypo
tcagaaatccaaaacgtcttgttttgatccactgaggacctccaatcatctcgctgacaggatccacaccctaggtcgctgcggtgatccatgcgg

SEQ ID NO: 272271 - DNA, 132 bp, Homo sapiens
  chr18:74068650-74068782
  hypo
aaataaaagtgctgcgatgaatgcagccattcgtggtaaggttttacattgttgggggtggggggcgtcatgatacccagcttccgcacctagcacgacatgggcaaactgcagacacggagaccccgcgcc

SEQ ID NO: 272272 - DNA, 180 bp, Homo sapiens; identical to SEQ ID NO: 218590
  chr18:74069254-74069434
  hypo

SEQ ID NO: 272273 - DNA, 111 bp, Homo sapiens
  chr18:74069464-74069575
  hypo
gtggcgtacccaaggctagacgctccggttgggggaaggacgcccagtgctgttcagagttccatttcctgcccagcacatctggaaagccacattcgggaacttatctag

SEQ ID NO: 272274 - DNA, 177 bp, Homo sapiens
  chr18:74073695-74073872
  hypo
cgctagctctcttccgaggcggaatctacgcattcccacagacgtgtctcctttgccagattcgctcagttcgaatggtgggaagaatggaacaggcacacggccccagggaggagtgcgatggagccagtgaacaatgagggtctcatcatcatacccctccgccaagcctgcttc

SEQ ID NO: 272275 - DNA, 89 bp, Homo sapiens
  chr18:74074287-74074376
  hypo
agtttccactccagcgcagcggctcgggatgtgaggtgtctgctcaggagttccccggctgttcttccatggagcggccaggtcacagg

SEQ ID NO: 272276 - DNA, 389 bp, Homo sapiens
  chr18:74082314-74082703
  hypo
cccacagacggccccgaagggtcaggttccaagtcaaagcatataggattatttacacatctagtgaaaaaaacaaaaagaaggtcatgcttcagtgatgagcatcatggtgcacctttcccagctaccgcatcgaaacccagacatccaattcatcatgagacctacttgtttgggggcgtctgcggaggtggtatgaacttcagaaccccgaggcccatcggactcaaacaccactgtgggaacaaggggtttgttaacagatcagcgtgtgagcttccggacgtgcacattaaatgagtccattacagattaagtacttccacaaaaaaagacaccagcgcctagcctgtggctggaaaataccaatttaccgtaacacttacagt

SEQ ID NO: 272277 - DNA, 33 bp, Homo sapiens
  chr18:74082939-74082972
  hypo
gacagtttccagcccgatcgggtgcaagctctc

SEQ ID NO: 272278 - DNA, 719 bp, Homo sapiens
  chr18:74083288-74084007
  hypo
gatggcaggccccccgccgcctggtaggggctgaaatctcagtatctccctcgctgcggatggtcaagccactgacagaagagacccctcttcctctgctccccttggggatagctgggcgggagggcgatacctgagtgtgcccgcatgtgggccctgaggtggccgggctggtggaagctctttccgcactcgatgcagacgaactctcctggccgggcctgcgtccggagtgtccctgcggtggcgaggtggtggtggtggcagggccgtggtggggttggcgtggaggtgaggaggcaggagagcgagggggaagcgagaggaaaacatcattagtctgtctaatgtgtcatcatgtgaggctcccttcaggccctggtgacaactgtcagccttcatctcggctctgctgacaggccaggcactctcaggactgcaaggatgcataaattacagcgaattaaaaaccactccctgggacaggaggtgcccgccaggcagcacgtcgggctgtgcagctccgagcaactgcaggctgggcacagccatcacccggctctgtcaagcagcacatccagcaaatcagagtgacaccggcgtgacagagacgaggctcatggaaaataggaagtgagcgggaccagagcccaccgtgacccggccgcgatcctgggagacccacgcagagtgagtgcggccacagggtggccccacct

SEQ ID NO: 272279 - DNA, 162 bp, Homo sapiens
  chr18:74089153-74089315
  hypo
catgggcggggagaagatgaggatctaagaccacgcctcagggacgccactcctgagtcacacctcaagccaacgtgaatgacgagaccctcgggtgtccgggcctacggcctcatcctaaaaagttcacaagtgctcagcgggctcttcaaagcaggaatg

SEQ ID NO: 272280 - DNA, 1433 bp, Homo sapiens
  chr18:74090916-74092349
  hypo
tgcccctcggccaccggctcctgtttgatggagtgtaggacgggggggcgccccagccacgccgggctgggcctgcaaggccgcgtcgcccctggaccccgcagcacaggtggccagagtcctcagctcctgggctgccttcgaggggggctcgcggggaggtagaggaggagcgcccccttcgccctttgcaggaggtggaccctgaggctgagcactgaatttggctttcagggagtccggggcactgtgcttatttgtgggggcaaagccagcccccgctggggggaccccaaacttctccacaggcttgctattggccgagggctgcgcgccagcccgggcgatgacggtgggcgtaggggtggcgctcctgctgaagcccccgccacccggggcaggcaccggtttggagctagcctcctgcctgggcttggccaggggcccctgtgtggccgcgccatgtggctcctggccgtgacaaggtttggtctgtcgatacccgtcagggccgggcgcccacagagcgcagggacctccggaatggctctccttattcttaggcatgctagcggcttttgtgaccactcccaggggagaagagccacttttggaccccggcatcccccctggcacctgagtgcgggtgaaccgagcaaggagcaaaggctggcattctttgccaccgagggcaggcggggggcccgtgcgtccgctccgggaaaggaaaaccaaattgcttctgatgcttttgtaaccattgggctgaatccacgggggagccacggagttgcagctgacgcggtgccagatgcgtttgtgcatccacaggacctcggggtagtaggtcttgtggctgcagtaaggacacgggtgaacgactaaagccgcctgcagggaggaggccgtctccttattgctggggtcatcccgcgtcgacctcgcacttaaatctagcggcatgaggtctggggccagcgcccgcttccctcccccagagtgttccttgttgtgcaaatcggacagcttttctgcagggtgacccgtctggccctccgctcccgtactggaagggaactccacaccatcaccagggacgggcacctcctgcttggggtgaaatgctggcatctttaagtccatagaaaatctgtgctgctcttgccttctagaagtctctctgctactgttttcaagtatggacacagaagctgcgatccctgccttggactcgccggtgtctctttccgaggcgttatctcccatcttgtgactctggtctccactggagagctcggtcgaagtcacctcttcggaaaagcagcagcggcgcggctgtccccctagaggaggcaaaatatgaaacgggaagttaccatttctcatcagaacacagcaagacacacggtgcgtacagctacagcatgttccaa

SEQ ID NO: 272281 - DNA, 154 bp, Homo sapiens
  chr18:74093649-74093803
  hypo
gtgcgcaattcatacgccgtgttaaaggacttgtccatgtaaaaaacgccagcagttaagggctgatcagcagaactggtgcggagatgagacaaaggaagaaaaaactatccaactcctaccggctcctaaaggctaatatttaaataaagtc

SEQ ID NO: 272282 - DNA, 52 bp, Homo sapiens; identical to SEQ ID NO: 218595
  chr18:74094279-74094331
  hypo

SEQ ID NO: 272283 - DNA, 894 bp, Homo sapiens; identical to SEQ ID NO: 218596
  chr18:74096593-74097487
  hypo

SEQ ID NO: 272284 - DNA, 34 bp, Homo sapiens; identical to SEQ ID NO: 218597
  chr18:74113520-74113554
  hypo

SEQ ID NO: 272285 - DNA, 353 bp, Homo sapiens
  chr18:74113767-74114120
  hypo
ccaaccacacccccgcgctccatctctccaccaaccacacccccgcgccgcacccctccactactgtttataggctctcaagagggacagggaaaaccagtattgtttgagtgccaactctgcataaacaatttccacagaatgactgcacatgcatgtgcgtgcctatgtgcatgtgtgtacgcgcgtgtgtacacgtttgtgtgtacacgtgcgcgcatgtgtgcacgtgaacgtgaccagtggtctctgcatcccacagggaggggagggcttctctgaaaagaaattgtatatgcacaagccttagccccgcgccttctatttgctgaagacatcgcctcggtcaacac

SEQ ID NO: 272286 - DNA, 63 bp, Homo sapiens
  chr18:74116224-74116287
  hypo
cacgcctgggggagacgacgtgatcccactcgccccactccagcacttcgtgcatgtggaccg

SEQ ID NO: 272287 - DNA, 117 bp, Homo sapiens
  chr18:74118864-74118981
  hypo
gtcccctgccaggccggagtccccgtgctcctgcctggggctatcttagatttgctaacccggggcacacagtgcgtctccgtccactgttgggtgagacctcgcccagacagaatc

SEQ ID NO: 272288 - DNA, 60 bp, Homo sapiens
  chr18:74119406-74119466
  hypo
aggaaacccagtagcgcaggttcaatgtcgggacaggggctcgggcggcagcatccataa

SEQ ID NO: 272289 - DNA, 485 bp, Homo sapiens
  chr18:74120285-74120770
  hypo
ctggtgtggacagcaagctccgaggggctgcggcgtgcgtctctcctgacagcgacacacttgagaccctccgggagttccagccggggtgaaaccagtcacaagggaaaatagcaaaaattaagaagaagtgcatggctctggtatagctcggaaagtacactgtgaggtttaagggatggtttaaaaggaaccaggaggtgaaaaacgtctaaaggcggaaggtgtcaatgtttgtcatccaactaggaaactgagggcacatggctcccaagactgtgtgagacactggcaccctaacaccaagaagaacatgaccgctaacgacagaaagaggcgtaaaaagaggcctttccaaactgacccacgtgaatgtttgcatagtgacacgtttgtgttcgctcgctaattcacagaaaacaacttccacaaagctgtccttagatttccagtaatgtatcaccctcagtcgacaaacattttcc

SEQ ID NO: 272290 - DNA, 137 bp, Homo sapiens
  chr18:74128214-74128351
  hypo
ggactgccccttttcgtatcgcacaccaggaatgaagcgccctggccttcaccacctttagacaaagctagtgatgctccccaagtctgtgagaatgctgtgatgttcttgggcagagcctacgctgaaatgtcgcc

SEQ ID NO: 272291 - DNA, 259 bp, Homo sapiens; identical to SEQ ID NO: 218601
  chr18:74133243-74133502
  hypo

SEQ ID NO: 272292 - DNA, 182 bp, Homo sapiens
  chr18:74134219-74134401
  hypo
cgcagaagagcctgcggagagcgggccggtccctcggcactccctgcactgcggcagtaagaagcagaccacggtctccaggggcctgacggatgatgaccatgtactcatacactcaggctatggagcagagctgcacctgcaaacacgtgactgccctaactttccggaagctaaatgta

SEQ ID NO: 272293 - DNA, 186 bp, Homo sapiens
  chr18:74134941-74135127
  hypo
tctaaatcttaatgcgtctggccacctggagtttgcatggagaccctgggctgtgcacaccgcaggactctcacctggaacactcggagaccccaggattcaagcactctgcagctggcagcacaatctaacagagacccattaaaacggatgtccacaacacaatttacacgcattctttacaag

SEQ ID NO: 272294 - DNA, 161 bp, Homo sapiens
  chr18:74135457-74135618
  hypo
tgaaaaggttcccccgaaacacacgcaggtgaaaaggcttccccgaaacacacgcaggtgaaaaggctcccccgaaacacacacaggtaaaaaggcttcacccctgaaacacccacacgcaggtgaaagggtccccccgaaacacacgcaggtgaaaaggc

SEQ ID NO: 272295 - DNA, 45 bp, Homo sapiens
  chr18:74136486-74136531
  hypo
gaaaaggctccccccgaaacacacacgcaggtgaaaaggttcccc

SEQ ID NO: 272296 - DNA, 239 bp, Homo sapiens
  chr18:74141719-74141958
  hypo
acccagaatggaaaatgatgcgccgagcagtggctacggaaaaggtatcaaggaatccaatgtctgccagacaccgcacggctaccaggctgttctgcaaaagcaaacacggtgcccttttgttactgaggtttcaaaacaacatcaagaatttgtttctaagtggagtgtaggctatcaccatagaaaccgcagagactctgtcttgctggtgtgacgcacaacctgtccagaacctt

SEQ ID NO: 272297 - DNA, 93 bp, Homo sapiens
  chr18:74143480-74143573
  hypo
cctcatgttgcgaccgattccctttgttggaggtggggcccgaggggcggtgtctgggccatggggatgggtcccttacgaatggcttggtgc

SEQ ID NO: 272298 - DNA, 465 bp, Homo sapiens
  chr18:74143894-74144359
  hypo
caggtgtgttcaggcggccccgcccaccactgccctggcgggaacaggacagggtctgctattctaagcagccaccaatgccagggccaatggcaaagttcccgtggatgagacgctttggagatagtctctgcagatgtcaccagttgaacaaggaaggactccttaaggaaaggacaggctttgggatctatctagagatcctcaaaatgtggcgcccacagcactcctcaagcaatgggatggccagtcctccagcacctgccctcctccgcagcctctgccttcggcaccaacaccgtgcaaagcaccagcaccatcgatacctgctcaccccataggcctctgccttgagtgctcatgctgtggaaagcctcagtactgtcattacctgctctccccacaggtctctgccttccgtgccaacaccgtgcaaagcaccagcaccaccgctacgttctcacc

SEQ ID NO: 272299 - DNA, 1196 bp, Homo sapiens
  chr18:74144938-74146134
  hypo
aacaacaccaaaagcgagacctggccgcacatcctgagtccacacatcctgagtggcaacgacactgaaatccacacatgcggcactttccattgaagactctgtaggcttctgagatgctcccattaaatactaactgtaaggccagcctctgctgcgactgctgttcatcgctgtttctgttatcagacaggaagatctctagagtctagacatccagtaaaaagcaccactgaccgctgagtactcccgtgcaaaactacccactcccgaatacaacatttctccatggagttcgctgtcaactctgaagaacagaattcatcaaggtgcagctccagccactgttctcagcgtgagtcctgcggggccctcaagaaaaagcaggtctggcccctgtcttcaatgagatggcaatttgaggatgcctgacgcaaggcggatgctggggacagagagggtcatcctgcctgaaaagaatgtgtccacgcaacagggaggaatggggccagcctgaggcccaggtttgcattccaccctgggtgccgtaccgcggctgcacgctcaggccttgtggaggagacatgggagccttgagtctgggcatagcatccgggtcacagcaaggtggagaggggagaagacgggcaggtgccagagctgaaatgcatatggagctgggagccacctcagcttgcaaggaggaacaccaaagggctgggcagaagggtgggaatccgtgcgttaagcaaacgcctagtgaagaatcgagaaaggatgggcttagtcgcagcacatcacggatacaggagggcgacaacacaaccaacacaggcaggtgcagaatcatcagtcggaatgactagaatctcccaaaaagctcagcagcaaggcatcatctcacagtgccacgtccccagctccacaggggtgcacaccgctccatggcatcacacctctcctggccgggaaaccccaccgcgaccgccagcaccttttctcacaggtgcaccaagccctcggcaacgccttacccaacccagcacctgctgctctggccgttgctgtccgttcttccagctggtcaggaactgacggctcggagtggaatcagacctccctctttaccaggagcgatcctgcctggtccatgagatgccctatctcacgggaacggggtgcaagaaccaaattca

SEQ ID NO: 272300 - DNA, 51 bp, Homo sapiens
  chr18:74147444-74147495
  hypo
tgaacaatcaccgtcgtgttcatgtgtgcgggagcgcggattaagagtggg

SEQ ID NO: 272301 - DNA, 281 bp, Homo sapiens; identical to SEQ ID NO: 218604
  chr18:74148372-74148653
  hypo

SEQ ID NO: 272302 - DNA, 283 bp, Homo sapiens
  chr18:74149035-74149318
  hypo
acacacacacacacacacacataccgtctctcaccctccctaagctattctaattgctgtctgtgttctatcagaaagaaagaaggacagttgttgaacctctgtgcccagccgcatgactgcagcctggccttcctcacagccagcgcaccagcacggacagccagccagcctccaagcacgtgctcagcaaacaccttacagcaaaagcctcagtgcgcctggtgacagtggaaagaagatgggctctgaggacggggctgctgggcggcagggaggcagc

SEQ ID NO: 272303 - DNA, 171 bp, Homo sapiens
  chr18:74149887-74150058
  hypo
tcccatctattgagtcgcagtgagtatctaaaaagtgagggtgggttcaacaggatggagtatggattttacatgacagatattagcacgacaagaaatggtgaaaagcgggagtagtgaaattagtcttgaatgatatgcagctcaacggggcaccgcttgtgcattatg

SEQ ID NO: 272304 - DNA, 1790 bp, Homo sapiens
  chr18:74153253-74155043
  hypo
gccaggccagagcccggggagtcagcagcggcacaggcggagccagggctgctgggctgggaggccgagtcaccctcactgagtgatccgcagcgggcccgcgccgccctgtccccgtcactgtccctctcgcggcgcgcgcggcgatgcacgcgtgagtgcagcaccatctgatgataggtgcggaagatcttgccgcactcgaagcactcggaggacttgccctggccggtggtggctgcggccctgcggttggggcgcgcggccgagcggggatcgaggtggccggcgggcgcggggtccccaggcccgctcgcgcgcttccgcgggggcccctgcgcggctggtgcatcctgctcacgcttgcgcttctcctggctcaccaggacgtactcgcgcctgtccttgtcgaaggccacgtccccggccagcgcctcgtcccaggccccgtacttgaggtactcggccggctcggccaccttaccccgcgtggccagctgccaggcctggtagctgttgaccgggtccagctcagccacccgccgtccggcctgcgtgccagggcacgagtcgccggccgccgacggcctcaggttcaggcactggaggaagaactgcttggtgtccgagggcccctccgccccctcctcggccggggcgcgcgtgcggctggcctcgactctgcggtggatggcattgtgggcgttcaagctgtccaggtttgtaaacaggttcccgcacttggcgcagacctcgtagaggctcaggccggcgacgatcacctcctcctggaccacgttgttgatggtggcgatggggtccagctcactcttgggcctgttcttgctgcccgtcttggggccgtgcgccttcatgtggttcttgaggaaccagggctccttgaacctacggccgcagatgtggcagccgtggtcgaaggagccccggtgcttcttcatgtgcgccttcaggaaccaggtctggctgaaggcctggccacacacctcgcacgggaactccccggggctcagctcgggcttgccgttctccacgcaggcctcgccgctgccgggcccctgcgcggtgatgtggtccctctcgatgtggctcagcagcgactcctcccgcagcgtcgcgtagctgcacagcctgcacttgaacggcttgtgcgcctggtgcacgtgcagctccaggtccttcttacgctcgaactggctcttgcagaaggagcactggaccgctgccttggcctcccccggggcgcatgcggacccctctgcccccttcttgctgctccgcagcaggactctgccgctgtcggcctgcgaggccccgttcaggaccctggcgccgtcggcctgcgaggccccgttcagcagccggttgcaggccgaggcgctcttggtggggctggcgcaggcgtccaggccctcggaggcgcgcatctcacccagcggcgcctcgcccgcctccggctcgtgtccctgaatcagagtccccgtgcggtggctccggatgtgaatcttcaggttgcccttctgggaagcccggtggtcgcagtagggacacttgtagggcttctcgcccgtgtgcttgcgcatgtgctgcgaaagcgagctctggaaggggaagctcttgccgcagatgcagcaggtgtggcaggtagccttgtccccatccacctcgtggccccggccggccctggtggggctggggcctcgcctcagctccatctcggcctctctgttgcgatccatccgaaggacgggcgcggccggtggtggcggcac

SEQ ID NO: 272305 - DNA, 65 bp, Homo sapiens
  chr18:74156516-74156581
  hypo
tgacagggccacccacgaaaagacctggggtggcagctccctgtttgctccgagttttgcagcct

SEQ ID NO: 272306 - DNA, 483 bp, Homo sapiens; identical to SEQ ID NO: 218606
  chr18:74159158-74159641
  hypo

SEQ ID NO: 272307 - DNA, 320 bp, Homo sapiens
  chr18:74170468-74170788
  hypo
tttctagacaggtacgaagggaatcccgtccctgagaggaccaagggcacaggagtagtgctcgggaccctcaggacggggcatgcactgtgggcaacgccaggcctcaccgtcgtgcgtgtgcatgcctcaccgtcgtgcgtgtgcgtgcctcaccgtcgtgtgtgcgtgcctcaccgtcgtgtgtgcgtgcctcaccgtcgtgcgtgtgcatgcctgtaggcaatgccaggcctcaccgtcgtgcgtgtgtgtgcctcgtgtgcgtgcctcaccgtcgtgcgtgtgcgtgcctcaccgtcgtgcgtgtgcgtgcctca

SEQ ID NO: 272308 - DNA, 531 bp, Homo sapiens
  chr18:74171117-74171648
  hypo
cgctgcagcagtaacggggcgccgggcccacctgctgcccctctcctgtgcatagggcgctctctccctgccccgagcttcggcttctcctccatgcacggtcactgctggaggcacactggacccagtgccagctcgggaaatcctgggccggtgacagccctgacccgtggccaccatccactcaacatcattgagccctcccacaggcacccaagctctctgaggacagccgtcctagcttccttcgtgggagaaaactctggccctccactgccggccagggaggcctcgcgtgccaagctggccctgagctcagcccaggatttgtgccattcaggacgtggcggccgtgtgcaccccatcgggcaccgcgtcgcctccctcggaatgtattccagcactgtctgccatgatgccaacagcaacacttctcaacaccaagcctttaaatgtccagcagctccacagcccgagtcagagtggcccagcctcccctggacctgatgcggggcttcaggaagtggcagg

SEQ ID NO: 272309 - DNA, 80 bp, Homo sapiens
  chr18:74172212-74172292
  hypo
tgccaccctcatttcacagacgaggacgctgagggtcaaagctgtgagccacatccctcgacaaggctgtgagcccattc

SEQ ID NO: 272310 - DNA, 192 bp, Homo sapiens; identical to SEQ ID NO: 218610
  chr18:74175494-74175686
  hypo

SEQ ID NO: 272311 - DNA, 134 bp, Homo sapiens
  chr18:74176911-74177045
  hypo
cccagggatacagccgtgcatccgatgagggcagctgcaccctcctcaccttcaggcaacctcgaggggagccgccagaggagagaggctccagaggtgccagggcccagggctcgccacgcagctcaaggctg

SEQ ID NO: 272312 - DNA, 188 bp, Homo sapiens; identical to SEQ ID NO: 218611
  chr18:74183548-74183736
  hypo

SEQ ID NO: 272313 - DNA, 441 bp, Homo sapiens
  chr18:74194233-74194674
  hypo
ttttcccttcatcgcgacctattattccattgcccgttctttatttttgtttgtattttactgtagatggtccccaacttaggaaagtttgacttacactttttcaactttaccaggtgaggaagccacaggcagtcagcagaaagcagtgagctgctccctccacaggcccggcagcggcagccccgcgatctccagggtggacgtcggtacttcatggcaacctgcactgccaggtgctcctgcccaactgtcggctaacatttacccattccaagcgcacttaaggtaggtgaggctatgttaccatgttcagtagactgaagggtattaaacgcatttccgacttaaaagtatcttcaacttaggatgggtttctgggaaggcagccctgtcgtaaattagagagtatctgtctgtatcaaacgtgtgaccttacgt

SEQ ID NO: 272314 - DNA, 267 bp, Homo sapiens
  chr18:74195359-74195626
  hypo
atgatccactctgtctctgccgcctccctgcccactcctgtgggaagctccctctcggcatctgtccgtcatcagcatctgtccgtcatcggcatctgtctgtcacgggtcatctgccgcaccacactgagaacccatgagtgccaaatgtcccccgtcagctggcccacccgcatttcatcttcctggcttaagaaggtgagtctcagggcccagccgtctatcagaactgacctggtcttctccgacccctttccctatgatttt

SEQ ID NO: 272315 - DNA, 74 bp, Homo sapiens
  chr18:74196405-74196479
  hypo
tgtaacactcctaacgatataacaccgtgctctaaaatggcggccgccctaaccccgctcgggccaagaaggtg

SEQ ID NO: 272316 - DNA, 150 bp, Homo sapiens
  chr18:74260505-74260655
  hypo
ctaccaaaggcactcgggtaaataccctcgctccatgaacagccttgtggaggcctctgtggaaatgcgtgctctgaaatgcactgctctgaaacacgcctttggtcatggggtgagtgtgtgcttcacatacctcggatggctggtggt

SEQ ID NO: 272317 - DNA, 203 bp, Homo sapiens
  chr18:74275176-74275379
  hypo
gacctgccagtcaccgatgtccctgctatctggacgtccctctgccaccggaggtgcctgggccggctcggctcccagtggctgctgcgtctgtgtggcgtccggttcagcatctctccctcttggggagatgggcagggccaacctgagacaggacaggtgcgctcctaccgctgacaccagagtcccgaagatgcccgtcc

SEQ ID NO: 272318 - DNA, 34 bp, Homo sapiens
  chr18:74299118-74299152
  hypo
tgcatatatgggccacgtgcgtatatgggacacg

SEQ ID NO: 272319 - DNA, 312 bp, Homo sapiens
  chr18:74301965-74302277
  hypo
gcttaaaatagctgcgcttctggtcgctttattacacctagacggcgactcctcctccaccattgctcggaaaagcagggatcctacatgcagtctctgcagaacgtctgtctgctaaagaaggaatcgctccgaataatccagtcaatgaaaaacgctgaagtcatgagcagtgagatgtagtgaggaaccttcaagccctgagcccttttgctcctgcttctgccttgaggtcctcagctctgcatgcacggtcggtcctagggcccggggcagcccaggtgagggggcggcttccggagaacctctcct

SEQ ID NO: 272320 - DNA, 642 bp, Homo sapiens
  chr18:74323520-74324162
  hypo
tgcggtggagggggcgatgtgcctgcgtgtgtgcctgcgtgtgtgtgtgtgcctgcgtgtgtacctgcgtgtctgcctgcgtgtgtgcttgcggtggcgggggcggtgtgcctgcgtgtgtgtgtgtgtgcctgcgtgtgtacctgcgtgtctgcctgcgtgtgtgcctgcggtggcgggggcggtgtgcctgcgtgtgtgcctgcgtgtgtgtgtgcgtgcgtgtctgcctgcgtgtgtgcctgcggtggagggggcgatgtgcctgcgtgtgtgcgtgtgtgcgtgtctgcctgcgtgtgtgcctgcggtggagggggcgatgtgcctgcgtgtgtacctgcgtgtctgcctgcgtgtgtgcctgcggtggagggggcgatgtgcctgcgtgtgtacctgcgtgtgtgtgtgtgcctgcgtgtgtgcctgcggtggagggggcgatgtgcctgcgtgtgtacctgcgtgtctgcctgcgtgtgtgcctgcggtggcgggggcggtgtgcctgcgtggtgggctccctggagtgatgggcattagccttctcatgactgccgcctgggagactggttattccaaaggacctggcgcccaacgccagcacgaccgaagccttgaaggcgagcaggcaccctc

SEQ ID NO: 272321 - DNA, 626 bp, Homo sapiens
  chr18:74325506-74326132
  hypo
tctcgtgcaagccccgcctctcccttactagcaaagttgtgaggacagcgcctgcacgcaacacttgcttactaacttgtaactgttattacagaaagcgtggagccaaacagatggcagaggcccaaggaagagcgcgctaaacccgaagtagatctgatttcacatcttgacttggcgattgtttagctgggtcagggtaaatgcctcactgttcctcgtctgtaaatgaacacgggtgctgaggttggggtgagcgcctcaccgagcctcagtttctcatctgtaaaatggacacctgtgcgcgcctcgcggcaggggctgctgagcacgcggatgggtcctctggaggctgggccgccaagaggcggcggctgcaccatctgatgctagagaacgagaaccgcagtgcgtgcccgacacaaagggaaggacaggggacactggaacaggggagacgacatggaagaaatctgggggagccaaaagccgccatgccgagaagggggtcggaggaggcgcgggagagaaaagcccagggctgtacactcgcatccctctgctgccggcccttcgggtacattcaaatactgggcatgagtcccgcagacaaggctttgaaagga

SEQ ID NO: 272322 - DNA, 289 bp, Homo sapiens
  chr18:74396240-74396529
  hypo
aagaggccacgagtcgattctgtgcccagctcagactgtggctgatgcgcagaggcacgtgggctcttggagggtggggatgagctgggcagccccacggctcctcctggcagggcccccatgctgcgcgtctgtgggctcttggagggtggggatgagctgggcagccgcacggctcctcctggcagatcccccatgctgcgcgtctgtgggttccacggcagccagttccaggcacagggcattcttggtgcacttgtcaggtgattgactccgtgcagcgatctcc

SEQ ID NO: 272323 - DNA, 153 bp, Homo sapiens
  chr18:74399785-74399938
  hypo
ttcgcacagctctccggggctgtctccaggaggccctattttattggccattgatgccatgtctgctcagagatacaatcagaaaatatgattggtgttcccgcatgacacacaggaggaggcacggatggcattacacaaacggcccaacag

SEQ ID NO: 272324 - DNA, 113 bp, Homo sapiens
  chr18:74419745-74419858
  hypo
tcttgcagaaatctcggtctcccttttaaggcattgttttcaatgtaagatggcaaaggcaaatccagtaaaaggttgtggctaataccggacatttacggccctgagaacag

SEQ ID NO: 272325 - DNA, 280 bp, Homo sapiens
  chr18:74420127-74420407
  hypo
ctctgctcaggaagcggctgtgaacccgctgccttcctaacacaagtgttagttctctcagggtgccgtggccttaacagcaagagccacagcgtctgtgctcccaactgccagggactctggcttccgggaggtggcctgagaaccagctcagacagcagggatgggccgggcctggccctctgctcggggccacccaggcctcaggagcctcctgttttacaactgtcatacccgggatccaaatccctttcccctgccggcgcggatcaaagaaggg

SEQ ID NO: 272326 - DNA, 35 bp, Homo sapiens
  chr18:74420789-74420824
  hypo
ggcttagagagcggtcgtcacgtgacccggaagtg

SEQ ID NO: 272327 - DNA, 44 bp, Homo sapiens
  chr18:74424292-74424336
  hypo
gattacaggcgtgagccaccgcgcccggccggattaattgcata

SEQ ID NO: 272328 - DNA, 205 bp, Homo sapiens
  chr18:74426497-74426702
  hypo
gcatcagacagtgcccgtgacgaggtcagggccactaggcaacacttttcaggtaagggaaggctgggtatgtgctgggcacctgcatgctggtggtgggggttaaaccgcgtgaagctgaaggagccaccctcctgagtctgtctctgtcagggagaggagtgggctggagtcactatcttaggacatacggcagatttttcta

SEQ ID NO: 272329 - DNA, 120 bp, Homo sapiens
  chr18:74443717-74443837
  hypo
ctccctttctctgcagcttccagaacagagcagcctctgatgaccttgctcactgcgccatagccgtgaggttcaagccactttatgaaagaaaatcaccatttcctgcttttttttttt

SEQ ID NO: 272330 - DNA, 38 bp, Homo sapiens
  chr18:74471098-74471136
  hypo
aacgttgttcctgcccgggaggacgcctgcagccgcgc

SEQ ID NO: 272331 - DNA, 300 bp, Homo sapiens
  chr18:74500998-74501298
  hypo
aggcaccgagagtgagcgagggctgccagggctgccagcacacctgggaacccagccacccacgtgcccctccaggcccggacctgcctctcagcgcccagagctgcccctgcagtgccccgtgttccctccccagccacgcttgcggttggcgctccccacggtcccgacggggctttctcatgggatccatcaatgcgcagtttagacaccccaggctctcccgccctacacggagatgagaaaaaggttgatagaataaattacattaggccgggtgaggtggctcacgcctgtaat

SEQ ID NO: 272332 - DNA, 533 bp, Homo sapiens
  chr18:74503932-74504465
  hypo
ggttgctagaagagcggcagattggatggagcagggagttcgggtgtgacaggatgactgtggtgtggtggtaggacttcgacgtgtggacccccaggtatttggaaatgtaggtccggggcgcacctgagggctcaggactggaagtgcacttggggagccacggatgcgctcccagaagtgcgcccaagaggaacagtgtggggcctgagcaggcgggaagcttgaggagtgcccacccgcagggaatgggaaggacagcgcagcagcttgaggagaggacgctcagagagtgagcttcagaggaacacccagggtgtgaggcgcgcaacccaggcgtggcacagctgcatggaaacccggggcaaagtggcatgagcagctgccaggaagtccagagggctccgtggtaggcagacgttctgtgacggagcccacggcaggtgcaagtgtgagctgagacctgagtctgctaaggagaagtgaggacgcccctgataaggttttgaagctgaaggcgccacaggagtctt

SEQ ID NO: 272333 - DNA, 95 bp, Homo sapiens
  chr18:74518708-74518803
  hypo
accgctggtctttacgatgaccggttgtgacatgtgagcctcagtcctcgctatatcagggagtagcttcctccgactatcggaatcacccttgc

SEQ ID NO: 272334 - DNA, 325 bp, Homo sapiens
  chr18:74569872-74570197
  hypo
tgtgaaaacatcagcgatgtttggttactatggattcagtacactttttacgtttcttaagtattttaagattctaatgatattgtgtagggaggtcttttggccatatgttgtgttacgtgcctgtaggaaagcgatgcatttgtgtgtgttagttttccctgccatcctccctgattctctatgcagcctcatctacacataataatcgggtagtaagtttttggttctgtgttgttgcaactagcatatgcgcagtttttaaaaaaaaatcacccttatatcatttattcgttttcatagtatgtagcgatggcatattcac

SEQ ID NO: 272335 - DNA, 171 bp, Homo sapiens
  chr18:74586687-74586858
  hypo
actggggcaagaaccgcccaggcggcggatttcagaggcccggaagtggagaaacctgcctggtgtgtctgagggcggtggcagaagtgggtagagggagcaagagagcaggggcaggggagctgacaacagctggtgtgcgaagcactgcactggcgcctcctctactga

SEQ ID NO: 272336 - DNA, 187 bp, Homo sapiens; identical to SEQ ID NO: 218620
  chr18:74592528-74592715
  hypo

SEQ ID NO: 272337 - DNA, 209 bp, Homo sapiens; identical to SEQ ID NO: 218621
  chr18:74625650-74625859
  hypo

SEQ ID NO: 272338 - DNA, 62 bp, Homo sapiens
  chr18:74627687-74627749
  hypo
catgaagccttataagtgtccgttttgtgaggagggtttccgaactacagtgcattgtaaaa

SEQ ID NO: 272339 - DNA, 361 bp, Homo sapiens
  chr18:74631683-74632044
  hypo
aggttttcttcattacgattttgatcccttttccttgattttgtgtagacatttgtatggaggaagaggaagaacattctgacagaaatgcatcacggaagtctcgtcctgaggtcatcactttcacggaggaggagacagcccagttagccaagatccggccgcaggagagcgccacggtgtcagagaaggtcctggtgcagtccgcggcagaaaaggaccgcatcagtgagctgagggacaagcaggcggagctgcaggacgagcccaagcacgccaactgctgcacatactgccccaagagcttcaagaaacctagcgacctggtgaggtgagggcatggctacgccgcgcgggttcc

SEQ ID NO: 272340 - DNA, 79 bp, Homo sapiens; identical to SEQ ID NO: 218623
  chr18:74633615-74633694
  hypo

SEQ ID NO: 272341 - DNA, 39 bp, Homo sapiens
  chr18:74680273-74680312
  hypo
ggccctcacccacgtcttctgatgcgagttggaagtaca

SEQ ID NO: 272342 - DNA, 230 bp, Homo sapiens
  chr18:74691007-74691237
  hypo
gacatggtattaagcccacacgaaacattcagaattagaattggattaagaagacgcgttttggcatcacgctgactactcctcatctccgtcctcggggagggtgatgccagcgtgggactctttggaaggcctatcaatcacaggtgcgctaaaatcaaaaggtgggtcagtaggttagggagggaggcgcgaaaggagatgccagcgggtgttaagaaggatatggt

SEQ ID NO: 272343 - DNA, 458 bp, Homo sapiens
  chr18:74696510-74696968
  hypo
tcctcaagcacctccggcttcacatgcatctcggaggaaatccacgcgtaaatgcgggtgggcaatgccacctgagcccctgcacgcctgctgggacagagcacgtccagggtacagtgcggctgagccagaggcggcagccacccttgtactcagcttagttggggattctgggagcccttagtccccgctcagtggagctgagcagagggtaccttaccagcttaaaaattttggaaagcgtgccctgggcatcgactcccttgaatcccttgtgagccgatttatagtcggacgctctgcctccgtagccaaatcctggtctctggccttcggccccctgcaagagaagaccacggagctcaacctccacccgcggtgctgggcacgctgcttgagccactgggagctgccaccagggccccggggaagggcccaggccccggactggactggtg

SEQ ID NO: 272344 - DNA, 34 bp, Homo sapiens
  chr18:74697571-74697605
  hypo
ggctggcacggggggcggccgcatcctggcagca

SEQ ID NO: 272345 - DNA, 196 bp, Homo sapiens
  chr18:74720163-74720359
  hypo
aaaatcctccttctcgccagcactgctctccagggcggggccggcagggtcggtgcctcccaggcaggggctggtgcatgcagccccatcttggtctcagtgaagcccaggtggccacagccccagtgcaccccagagaagaggcctcccagaaggacgggggaccctcagaaactacctgcgggtagtggtggtg

SEQ ID NO: 272346 - DNA, 134 bp, Homo sapiens
  chr18:74720707-74720841
  hypo
ctactcctggcccgcggcggtgcagccctggacagccaggcactagcatgatgtctgacatgcagccacacctggcggacgcttccccttcagggcctccaagttttggcatccgcaggcgtcctgtcccccgt

SEQ ID NO: 272347 - DNA, 165 bp, Homo sapiens
  chr18:74721776-74721941
  hypo
gatgggtgaggacccgccggcgtcttaccttgtacatgttgcacagcccaggctggctgcgggcatgagagggcagagggctccggcccggctttagccagggtacctgccgggggacacagagtgggctgcgtgagtccgggtgggcgccgccggcaatgcccc

SEQ ID NO: 272348 - DNA, 136 bp, Homo sapiens
  chr18:74723211-74723347
  hypo
cgtggataagcctgcgggagttgctgtgctgatgagacttggctgtcctcataagcagtgactcccatcagctggtgtccatgagcgtgagcaagtgtacgctatgtacagggccaacaagcgaagaactttccat

SEQ ID NO: 272349 - DNA, 155 bp, Homo sapiens
  chr18:74726189-74726344
  hypo
ggcattcccgggctcgggggcggccgctccaacatgtggtaccagcggccatgtgccctcaaggggagggaggaagagcacaggagggtgggaggaggacaaacagccccttttatagggtcatgggggggctccactcagagtctggcaggaat

SEQ ID NO: 272350 - DNA, 66 bp, Homo sapiens
  chr18:74726374-74726440
  hypo
gaagcagaactgtgtgtggggcaggccgccgtggtcctgagagacagggcccgggccttccactgc

SEQ ID NO: 272351 - DNA, 732 bp, Homo sapiens; identical to SEQ ID NO: 218624
  chr18:74728303-74729035
  hypo

SEQ ID NO: 272352 - DNA, 99 bp, Homo sapiens; identical to SEQ ID NO: 218625
  chr18:74729467-74729566
  hypo

SEQ ID NO: 272353 - DNA, 237 bp, Homo sapiens
  chr18:74731842-74732079
  hypo
tccaggaggatggccgggctgagaacctcccaggccaggcagtaacctgggaggcaggagggcctgtgcagggaactgaccatctgtgagcaacagcaggggtatcacagccttgatggctgtgaacagactgtggaaagggcagagcaggcagctatgtggcgagaagacagggcttggtttggggagcagcggggcctggggagggaagattctagtggacggcctctgtggagg

SEQ ID NO: 272354 - DNA, 146 bp, Homo sapiens; identical to SEQ ID NO: 218626
  chr18:74733725-74733871
  hypo

SEQ ID NO: 272355 - DNA, 284 bp, Homo sapiens
  chr18:74734080-74734364
  hypo
gccctgtaagtgagacgtatcatgcagtccacataagacctggttccaaggcaggttaacctgctctcacatacattacagatgtttgccaacagcaaagtgtaaagccagcagttggaacccagggtcgcggtggtctcgtccatgcacccaagggattgcgtacggctgccagtgtgactgtgctggctgagccctgtgcctgaaaaataggtcacctgctccaggacaagtgcggaaaaggcaggaccaggtggggcgggagacttcggtggcaccgttct

SEQ ID NO: 272356 - DNA, 1803 bp, Homo sapiens; identical to SEQ ID NO: 218627
  chr18:74736587-74738390
  hypo

SEQ ID NO: 272357 - DNA, 574 bp, Homo sapiens
  chr18:74755405-74755979
  hypo
tatttctgagtgctggttatcgtggcatctgaaaatgtaaataagtgatgtaccctgtggggtagctctgctgcaggcaccccggggacctgctggtgaccctgcccttctcctgctgcgatcatcccaggccagcgtgacactcagcagcgtggacgtctctctgcaaacgcccaaatgcagtgtatgaaatgtcatccctagaaatggcttcatttgggataaagctttgaacttgcgtgcgtgccccgcaccccgtggcggactgagtcactgctttgctgttgcggcgtggtgagtaaaactttcccaggggagccggagttgagtgagaaagggatgcaggacacgcaggagctgacacatctctatggatttaagtcgctgtttccacaaatgctactcacatgcccacacgtgtagggcaggactgtcacgcgtccactctgctcagctttccaggccggatctggtcccagccattctacctgacccagactccccgcacccctgccattcccccagctgccgtcctgtgtctcctgatttctgcgtttttgatcctgaggctctc

SEQ ID NO: 272358 - DNA, 356 bp, Homo sapiens
  chr18:74759063-74759419
  hypo
agacaaaacaaaggcgaccacggctgggtgcctgcccaagagaaccgcagacctatgtccacgggaaaccctgaacgccaaggctccggcagtaggattcacgacagccaaagggtggcagccacctgaacatccgtgagctgatgcgtggatgaactgacggtgatgtgcacacacgatagaatatcctcctgtcgtaaggaggaatgcagcactagcgtgcgctactccatgatgaacctcaccagcattgtgtgaagtgaaagaagccagccataaaacaccacgcatttacaggaagaatccaggacacgcaaatccacaggcatggaaagtagattcgcagtggccggggg

SEQ ID NO: 272359 - DNA, 83 bp, Homo sapiens
  chr18:74761164-74761247
  hypo
gcacccggccgagggcagggtttttaatctgttttgttcaccgatgtactcctgcctgacgcggtttctggggcataaaaact

SEQ ID NO: 272360 - DNA, 185 bp, Homo sapiens; identical to SEQ ID NO: 218630
  chr18:74763242-74763427
  hypo

SEQ ID NO: 272361 - DNA, 648 bp, Homo sapiens
  chr18:74763720-74764368
  hypo
ggttcagtttgatgcgtgaagaccaggggtaggagcgtgagtgggggtgcactttgctaaacctgcatgtaacagtgggcttaattttccctttttttaacaccttgtttcttcaaattacacaatgttgatgctaaaatgttctttgtagaagcgaggcccagctcctgaaggattcatctgagaaacccagggacatgcccttctctcattggaacaagtgggaaaaaaggcatcttaaaaaaaggttatggtgaagccgtgcggcagcactggaagaggatgaggaggctggagaaggcgtgtgagtgcaagctgccctcccgagactgtgccctctgagccagagtcttcctccgatgtgcccaagtccacccgaccaggaacgggggaaggagcggggcgatccaacagccacacaacagagtcccaagttccaatcacaaattcaggctgtgaggtgaaatcacaaatgtgaactttacttatggaaaccaaatagaagtgctttcaaattggggatccaagacccaacagacataagtgatcagcagcatcccgatcgggggggtaagacaaaggggtccttggatgggggcacctgtgagcagggacccctttgtctgagctccccgggtcccgagctgg

SEQ ID NO: 272362 - DNA, 456 bp, Homo sapiens; identical to SEQ ID NO: 218632
  chr18:74770085-74770541
  hypo

SEQ ID NO: 272363 - DNA, 232 bp, Homo sapiens; identical to SEQ ID NO: 218633
  chr18:74782716-74782948
  hypo

SEQ ID NO: 272364 - DNA, 141 bp, Homo sapiens
  chr18:74794117-74794258
  hypo
tattttataatagccgcaaggtagaaactacctaaatgtccatcaactagtcaatgaataaataaaatatgagatagtcctacagtgggatattattcagcaataaaaaggaatgaaggactggtacgtgctacaccatgg

SEQ ID NO: 272365 - DNA, 100 bp, Homo sapiens; identical to SEQ ID NO: 218634
  chr18:74805146-74805246
  hypo

SEQ ID NO: 272366 - DNA, 78 bp, Homo sapiens
  chr18:74806378-74806456
  hypo
ttgctcataagtgccggttcccggactctgcaggaggcacaccttaacggggacactttactgcgggtgccacgttaa

SEQ ID NO: 272367 - DNA, 117 bp, Homo sapiens; identical to SEQ ID NO: 218635
  chr18:74806769-74806886
  hypo

SEQ ID NO: 272368 - DNA, 244 bp, Homo sapiens
  chr18:74815191-74815435
  hypo
ttattactattaaataaaaacgcactacagacctcagcgaagaggtctggagactgaaattcaattccgttcaattccgcggacatttctaaagcatctgggtgtaagtcgggggttcccctgaccctcaccccggcccatcttcagcagccggacattctagtgcaccaccatctgcctcgagttggagacacataattttatgttgaattaaagtaccaacgaaatggaataatttcccttg

SEQ ID NO: 272369 - DNA, 178 bp, Homo sapiens
  chr18:74822939-74823117
  hypo
ctttggagtcttcgcggtgtacgggaccttaaagctgagctggctgtattgcctcgtggctgctccagtcctgtgctagacctctcgctgggtctcggggttctcagcgcctgttcagaaagcctggcaatgtttgcctgggaggaaaagctccataaatacacgctgaagacacgac

SEQ ID NO: 272370 - DNA, 429 bp, Homo sapiens; identical to SEQ ID NO: 218636
  chr18:74832019-74832448
  hypo

SEQ ID NO: 272371 - DNA, 37 bp, Homo sapiens; identical to SEQ ID NO: 218637
  chr18:74841696-74841733
  hypo

SEQ ID NO: 272372 - DNA, 40 bp, Homo sapiens; identical to SEQ ID NO: 218638
  chr18:74847361-74847401
  hypo

SEQ ID NO: 272373 - DNA, 106 bp, Homo sapiens
  chr18:74867171-74867277
  hypo
gggagcggtgcagccgcaagccaaggagcaccggcgactgccgggagacactgaggccggggaggcagggaacggattctcgctcacagcccgcaagaaggggcca

SEQ ID NO: 272374 - DNA, 176 bp, Homo sapiens
  chr18:74877174-74877350
  hypo
cccaacaggaatgccgtgaggattgcgcgagctcatattctggggccgacagaaccacgcctccttcagggttgcgtgtccaagtacttgtggaataagttaacctgcccagtgaacactgtgaccacttctcaggtgacatccactggtgcagcgaggttctggccctcaagggg

SEQ ID NO: 272375 - DNA, 136 bp, Homo sapiens
  chr18:75087208-75087344
  hypo
gcagactattgtggcgtgggaaggcccttctgcgggctgtaatggatggagacggggatgctgccaagcatctctcaatgatcagaatggcaccccgcaccacacaattgtccagaagcaacgtctgcggcgccac

SEQ ID NO: 272376 - DNA, 432 bp, Homo sapiens
  chr18:75088109-75088541
  hypo
ccacagtcaggatccgtagctccaagactggctgccccctttccattaaccttggacttgcagattcacagaagcccattccctgggctgcaagcgctgctcggtaacggcgcttgtttgcttcgtttcacggcggactccctagagcttggaatggtgcccggaacacagcagcgctcgaagaacaaacaccgtggggtctcttctgaggtgccattggcatggtacagagaacaatcaactggcgacactccggtgaatttttgtttacaatgtttattttattttacaatacgtttttattttacaactttattcacaattttctgttgtgtgtagtctaaccccgtagaagttttgtgtggacgagtcttcacttgtcctgtgcacacctgagagtggcgttgctgggtcgtgcggtggttttctgtt

SEQ ID NO: 272377 - DNA, 208 bp, Homo sapiens
  chr18:75120506-75120714
  hypo
gaggtggggaggccacactacgaaagagtgatggagtgtcgtgtgttgccatacaatgctgagggcacatctgaaatcggtgatcagagattgaagtgagttcacttagccaggcgacatgcttttctcctgatttgtttagcaatgcgaaagtcgtgtagagcaatagagttggggcccggacagcgggaaggaggtaaaaaggcca

SEQ ID NO: 272378 - DNA, 100 bp, Homo sapiens
  chr18:75214587-75214687
  hypo
ttctagcacttagccatctgcgttgtttcttttagcacagtcgttgatggtacccttgctactacatcgccatagccacgtccctttttggttcctggga

SEQ ID NO: 272379 - DNA, 195 bp, Homo sapiens
  chr18:75229788-75229983
  hypo
tgcttcccagtgagaaacttcggagagaagacaggaggagacgtggaatgtttcggggctagaaatgtccatttcttgaggtgtgtcgcgtgcgcgttttgacctcggactgcacatgtgcgcctccacccagggctggtcttcaacgggcaggacctggagacggggcgcaccgaggcacaggtggaaggtccc

SEQ ID NO: 272380 - DNA, 581 bp, Homo sapiens
  chr18:75230327-75230908
  hypo
ggaaccacgaggctcggagctgagtggtggcctcaaggacccttccagaatgcgaatgaatatttactggaaagagaccattaacccaaagcaaccagaacgctttgaagagacaagatggattttcctttccgtggagggaagaagggctcgccgaggcagatgagttagcacgaaaaagagggcgtcgtcctttcgaatacgtttgactgaagaaagtctcaggcttatcaggtccatatcacacatattcatagattccttaacttttacgtcagaagcgaatccactttccttctttatgtcctttattattgtgaaatcaaaggactccgaaaggaaatttactcctgtgtttaaaactgaagtctagctcgtgcttctgaaatgacgcataaataattcaagcttgagagggaagaactggccacactttggaggcgccgagctggggaacctggtgtccgaagccaagctctgctcgggcccaggaggacgcagggacatcgcactgtcccccacgcctggcctgtgctcctttaatcttggtcctaatgatcgaattaaagagggatacaaat

SEQ ID NO: 272381 - DNA, 233 bp, Homo sapiens
  chr18:75339282-75339515
  hypo
ctttccagctctctgaaaatcgccgggaaagttgggattgccccgcagcgtgggggtgatgccgctgcagcgcaggctgggacagagagcagcccggatgcgcggagcagacttggacttcagagcaccttcgctgaagccgagtgctgctgtgccaggtttgtggcggtcatggtggaaagtggtgagtgcctcgggatgggtgctcctgcggtcagaatcctgtggtcaga

SEQ ID NO: 272382 - DNA, 37 bp, Homo sapiens
  chr18:75361204-75361241
  hypo
aggccatcctaaaacgcaggtatgactcttttttttt

SEQ ID NO: 272383 - DNA, 62 bp, Homo sapiens
  chr18:75571260-75571322
  hypo
ccaagaaacagacaaggatccgctcagtgcggcgcaggcacgtgccatgcctgtttgatgcc

SEQ ID NO: 272384 - DNA, 42 bp, Homo sapiens
  chr18:75845223-75845265
  hypo
tcatgttttagaaacccttacgcccattttaaggataatgaa

SEQ ID NO: 272385 - DNA, 282 bp, Homo sapiens; identical to SEQ ID NO: 218640
  chr18:75873524-75873806
  hypo

SEQ ID NO: 272386 - DNA, 71 bp, Homo sapiens
  chr18:75957356-75957427
  hypo
taatcagtccacgtcgcctcatttcagcgcgcctggcgtctccagccccgtgtccccgcaccgcggcacta

SEQ ID NO: 272387 - DNA, 333 bp, Homo sapiens
  chr18:75998625-75998958
  hypo
cgtggtgtgtgtgtgtgtcgtgtgtcgtgtggcgtgtgccgtgcgtgtgcgcaccgtgggcgggaggcgagaggaagcgcagtgggagccgcgggcaggcggtcgcagaggggcctggggaggcgaagcagcccgggtgggggcgttcgctggaaacggggcccctctgaagggcgtgggcagccggtgcctgcagagcgtggagagctgcggccgcctcacctgacacaattgggcagcgatttctcaggtccaaagagcggaccccgtgggcactttcctgacggaggactcggctcctgggagctccggcaacatcagcgacagtggagc

SEQ ID NO: 272388 - DNA, 696 bp, Homo sapiens
  chr18:75998988-75999684
  hypo
agaagaaggaaggaggccgaggcgccgcagggaccctggcacctgcccctgacgcaggagtggacgcgaagggtgggcctggggcggaggctcgggagcggcgcggaggtgggagttggcagctccaggccggcgcatgtggaggagaggagggggcccttccacgtgactccgaggttggagcccccctgactggggggcggacagcaggtgttcacagaaggcaggaagagctggaagctggggtgagccagctcatgcgggtttccgggggctgtgcaggtggaaccatctagatagctggggagtctcacacccagagcgttttagacccaaggtggccttcatggctcccacgaatcccttcacggtttagaagagatcagctcagcaacgacgaatgccttccctcagttgtgccaagggggcagcgccaggtctcctgggtcagaaccacgggacagccacgggcattcttaaggctgccagcctgtgggtgtcacctggttcagccactttcggaggaagtcggtgggggacaagacccacttttgcagatttagaaaaggaaggcagaagtgtctgggcacgcggggaaacgcaaagacctgctgaaccagttcatttctaatcaaaaggagcgctggtgtggggtatgaagggcacgtcttcatgccgtgtcggcatctgctgtta

SEQ ID NO: 272389 - DNA, 378 bp, Homo sapiens
  chr18:76123568-76123946
  hypo
aagagcaattggggcttatccgtgatccacagaaatgattgctacgttccctgcagaacggacggcagtcgctggacagggccccagagcgcctgggtgcggtcagctccgcggactccccccgggacacctgcccagctgcggccgaccccggggcgcacaccctccgggatgaagacggcacgcctgctgcgcacggtggctgtgctgtgctttccagagacaccaaagatccagcaagccccggtttgtgtcgagtgtcacgggaatggagatgccttaaggctccggcttggacggcctgttgttcgcgtgctgagtgcactctgtgggcccgagcgccgagggtcccatttcgcacacagcatggagtgggtg

SEQ ID NO: 272390 - DNA, 377 bp, Homo sapiens
  chr18:76129257-76129634
  hypo
gtctacatttccctgtatttcgcagtaacacacggcacagaccgcgtgcctttcctccatctgcttaccgagtcggcgcggccacttaccacccatggcagcacattgcaaggtttgtccgtataaaagaaagtgccggcagatcgtgacgtggaggcctcggacctgtacactctcccgtgactctgccacaggccaggctttgctgcgatcactaaaacctggttcgaaatgagccactttagccctccgcatggtggcctcctaggcatccaggcagagggaccctccccgacagcgctctgggggcagcccaggaaggctcagtgctgcggtaattcggggcctccaggtccaccttacgctcatccacggcc

SEQ ID NO: 272391 - DNA, 463 bp, Homo sapiens; identical to SEQ ID NO: 218646
  chr18:76151088-76151551
  hypo

SEQ ID NO: 272392 - DNA, 507 bp, Homo sapiens
  chr18:76189659-76190166
  hypo
gcactggggtcagggatgctcgtgggacccatgacgcagagaggcaggtccctacccaccgggccgtgggccgctgagcacagagcgtggagccctgcggcggggtcgttcctgggccccgcgtgccatcctggggttgtgcatggtggcggcgaaggcacccagcgctgggaccccagcgaggcgacccggggccaccgggcaggcccaagagctccctgtctgcgggccccttgctttccgcagcagccggcctgtcggtcctcggcgggagcctctcgttccccagccacggggccttcccggggtgcggccgagtcaggcggagaccccctggggtgggtggcgggagcggggccgcagcaacagggcggcgtggagggggagaaacaccttacccagccggcggccccctccagcgtgcagctggaacgggaagctgtctgctcagccgtcagaaggatgcgagaaattacctagctccccgcagaggcctccagcagccct

SEQ ID NO: 272393 - DNA, 155 bp, Homo sapiens
  chr18:76252107-76252262
  hypo
cagaatgcccggaacgcccagaatgcctggaatgcccagaatacccagaatgcccgaaattcccggaacacccggaatacccagaaagcccagaatttctggaacatccagaattcccagaacatccagcatgcctggaacgtgtggaataccca

SEQ ID NO: 272394 - DNA, 131 bp, Homo sapiens
  chr18:76412642-76412773
  hypo
ggaagaggaagcagcagaatcggccttgggcgaggtcggaaatttcacaaaggtgccgaggaaggcggcggctacttggactaagtttgtcggggactttcctgggttgcgcactgaaagtcccagtccca

SEQ ID NO: 272395 - DNA, 544 bp, Homo sapiens
  chr18:76435961-76436505
  hypo
gttcactcaggaagccgaagcccagaagagtgaggtctcaaagttcacagcacgtggcctagaattcaggggtgcagagctcctgcttggtaactcatcccctgtgcggtgatgcttctgatcccacagcaatgcctgcttctgcgaggctggtccagggctggaacggagccctgtgccgtgatgcttccgatcccacagcaatgccacgctcctccagagctggagcagattccgatcccacagcaatgccacgctcctccagggctggagcagattctgatcccacagcaaggccgcgcttctccaaggctggagcagattctgatcccaccgcaatgccgcgcttctccaagactggagcacattctgatcccaccgcaatgccgcatttctccaaggctggagcagattccgatcccaccgcaatgccgcatttctccagggctggagcagattccaatcccacagcaaggccgcgcttctctaagactggagcagattctgatcccaccgcaatgccgcacttctccaaggctggagc

SEQ ID NO: 272396 - DNA, 61 bp, Homo sapiens
  chr18:76437856-76437917
  hypo
ctctcccaggtctgcggtgacctctcgggaccctcccccaggtctgcggtgacctctcggg

SEQ ID NO: 272397 - DNA, 328 bp, Homo sapiens
  chr18:76477467-76477795
  hypo
ccacctcccaagcccatgaccgataccctgggtctccacctcctgggcccatgaccgacaccgagggtctgcacctccagagcccatgaccgacgctgcgggtctccacctcccgagcccatgaccgacaccgcgggtctgcacctcccgagcctatgactgacacagtgggtctccacctcccgagcccatgaccgacaccgcgggtctgcacctcccgagcctatgactgacaccgtgggtctccacctcccaggcccatgaccaacaccgtgggtctctacctcctgagcccatgactgaccccgcagttctccacctcccaacc

SEQ ID NO: 272398 - DNA, 167 bp, Homo sapiens
  chr18:76480514-76480681
  hypo
cagcagactctgcacgcttggggaggaagggaagaccaaggcttgagggaaaccatcgaaggatgaggccattgtttgaaatgattctcctcagctgcaaggatggataagggtgtcgctgatctgaggctggccaggccgtgctgggccgacgtccttgccgactg

SEQ ID NO: 272399 - DNA, 627 bp, Homo sapiens
  chr18:76486293-76486920
  hypo
taataacagggactcaaagccgagtgatggcgcaaagcaggccggtgaagcctcggcgctgggcccggcctggcactgcgcatccttggccttcgggacccgggctcccgcccccgtgcccagcctcacggagcccgcccaggcctgctgtcccccgagctccaggcccactgcccgccagaaccttctggtcttgcctcgcttcccgcctgcacttttctttcccggcctggcagagacatctataccagtgggaaaggcgagccactccggcagcgctgccaggttgcactccagcacctcacactcgcttctcccgggacttaaatttaaactcctcgagcgtcatgtccccatggctgtctggggccatcattgccacctcgtactcctctcttcactgccacaagaccaagagacagatgcgtcccggggtccttccacagcgttcccaggggaggaggagggcgcctggagccctggggaaggcgagcccgagccagcgcacgtggagactccctcggagacctctgcgcacatggagacccgcgcgcacgtggagactcgcgcgcaaaaggagaccccagtgcacatggagacttccacgcactggtctctccaaggaat

SEQ ID NO: 272400 - DNA, 65 bp, Homo sapiens
  chr18:76491137-76491202
  hypo
gcggaacgctgcgtcgttcctagtgtctcctatgcagatcccagcgtcgtacctggtgcctcccg

SEQ ID NO: 272401 - DNA, 128 bp, Homo sapiens
  chr18:76491232-76491360
  hypo
tggtgcgttctgcgttcagggcctgtgctgcacccatcttgatcatctccgtgcttctcacgctggactcacaagagcctggcactgttcagcccctgggtgcctggacgtcacgtcagcctagccgc

SEQ ID NO: 272402 - DNA, 473 bp, Homo sapiens
  chr18:76495818-76496291
  hypo
gggcctgcctggaatgagaacgccacaaggaaacatttttatcctcggtgtgagcccggcctcgcctccctggtcacaagcaaagccagagggaagcagcgaatatctgtggacacctgctctgcgccgggccgcccgcacggctccagggcaagctcggacctactctgtgagccgtcattttgccccattgtagacaaggaagccgaggcctccgggcagccgtcgtgggtaaatattcgatcccagctctgagtcctgatgtgcggtggtttccagtttccaaggggtccccgtcacggccgattccaaggtagcaagcagacagcactgacggggttaggaagagacggagtgggaacaacacggcggcgttccctccccgtgagcgtgaagcgcggtcgatgccccgcaacggtgcgaggtgagcagtttccatgtttatcaccgtcgtgtttaatagaagttattgc

SEQ ID NO: 272403 - DNA, 114 bp, Homo sapiens
  chr18:76531049-76531163
  hypo
gagaacagagatcacgcttgctgtcgttctatcattccatcacctttccaagtacccctgaggctcggaattccctggtggtcccggaggaggcagcggcgtgctgtgcgtctc

SEQ ID NO: 272404 - DNA, 325 bp, Homo sapiens
  chr18:76534698-76535023
  hypo
aggttagcctcaacctgggacgcctgcagactgagcccagctcttaaccccaccgatgtttccaggttccctggcacccgctctctcccgaggctcagagtgggcgttggtgtggaacagcccctaagaggcacctcggccttcccggagccccggaacgtggaggctaacccaggacagagacggtcactgcaggagaaaagacgacaccgtcagtccttcccccggtgcacaaccgaggacctcctccgcatttgcccctgcgtctgaggcagcatctcgggaatctgcagtctccaagtgcgagagaggcagccccagaccc

SEQ ID NO: 272405 - DNA, 210 bp, Homo sapiens
  chr18:76546830-76547040
  hypo
acataccaatctcccgcacacgccacacgtgcaggagagggaaggaaggcggctgcgttgtcaccagtcaccaaccctcctgtcccgctcctgggtgttccggtgcgaccctcagcctctgcacctgaggtcacctgtgccaactctcaccctctgcacccaagggcacctgtgccaaccctcagcctctgcacccgaggacacctgtgc

SEQ ID NO: 272406 - DNA, 212 bp, Homo sapiens; identical to SEQ ID NO: 218654
  chr18:76552755-76552967
  hypo

SEQ ID NO: 272407 - DNA, 250 bp, Homo sapiens
  chr18:76626239-76626489
  hypo
agtcacccataaaggacagccgcggctgaacatgccaagctggctagagggagggtgacagccgcagccgaacctcagagctggctagagggagggtgacagccgcggacaaacctgcagacctggctagagggagggtgacagccgcggccgaacctgcagtgctggctagagggagggtgacagccgcagccgaacctcagagctggctagagggagggtgacagccgcagttgaacctgcagtgctg

SEQ ID NO: 272408 - DNA, 294 bp, Homo sapiens
  chr18:76653367-76653661
  hypo
aaggcagtcacaaaagcctacgcaccacatgactctatctacgggaaacacccagcagccagtcaccgaaggctacacaccgcacaactccgtctacgtgaaacgcccagcgcaggcgtgccggcacatggggtgatgagcgtgctctaaaggtgatcgcggtgacagactgcataaatctaggattctgccaataccctgaattgtatactttcagtgggtgggccgtacggtgtgctaatttcgtctcaataaagctgttataaaaaacaaggaaggcgccctgctcctttt

SEQ ID NO: 272409 - DNA, 212 bp, Homo sapiens
  chr18:76660960-76661172
  hypo
gagctggtgtccatcgtgaagaacgcggctgccctcaccagctcctactcgtggggtggggaaggggtagtttcccctgccagcatccacgcccctgccagcatccacgcccctgccagcatccacgcccctgccagcatccacgcacctgccagcatccacgcacctgccagcatccatgcacctgccagcatccacgcaccagccaggcg

SEQ ID NO: 272410 - DNA, 1051 bp, Homo sapiens
  chr18:76685333-76686384
  hypo
ccccacagggttagcaaagacgcaagagggcgtgaagccacgcggtcgcacacctggtaccgcgcacagtgagaaaggagggcaagtgcgctgagacccaggagggagggcagccctcccctgcgctgctgaggctcgtttctttcaatgtgtccctggctctgtgctgtatcgtgcgtttcagtgtgcatgaaatatcttgtgcaatcatttacgtgaaattagagctagtaggaaaatgtatcgtcaggcgtggaagagcgcactgcaccttctttttacttgcgcgcacctgaggattgtctaaaatccaggcctcacgggactcccagagcccgtgctcgtcacagctgctggctacagaaacacagcctgcaaagtcggcctcaccgccagccagacgagcccagccagtttccacgagcaggggagggcacacccggaggccaccgtggaaagcagcctggctgccctcgggaagccacacgcggagccgccgcggcccagcactcccacccctcgatgtgtgcccaggtcgaaggaaggcttgccacccgaaggcctgcacgggaaagctcacagcagcgttctccaaacagccaaaacgcggaagcaaccccgatgtgcgtgggctggtgaatgcaggcccagcgcggagtgcgcacagcccggaacggcattcagccaagaaaagacccacagccgggaacagcatattcagccaagaaaagaaagggcggcctggggcgctctgcaccgcgggtgagccgtgagaacacggcgctccgggagagaagccagcacgagacgctgcctcgggcgcgactccatttacttgaagtccagagcccgtaaatccgcgagacagacatggaggagcggcttaccaggtctggaagcagggaggggagtgagggactgctgaggggtgcgggtttcatgtggggccatgagaaggttctagaattagatggtggcgatggttgctccacgctgccatgggggcagctgagggaaaggaggtgggatcggggctcggccagctctcgcc

SEQ ID NO: 272411 - DNA, 96 bp, Homo sapiens
  chr18:76689833-76689929
  hypo
agcaagcagtgacatgtgtgaccacgaaggtgactccctaaagcatgtagcacaaaagccaaacacaaagaaggccgcacacgtgattccacacat

SEQ ID NO: 272412 - DNA, 312 bp, Homo sapiens; identical to SEQ ID NO: 218659
  chr18:76999756-77000068
  hypo

SEQ ID NO: 272413 - DNA, 161 bp, Homo sapiens; identical to SEQ ID NO: 218660
  chr18:77050733-77050894
  hypo

SEQ ID NO: 272414 - DNA, 188 bp, Homo sapiens; identical to SEQ ID NO: 218661
  chr18:77076163-77076351
  hypo

SEQ ID NO: 272415 - DNA, 256 bp, Homo sapiens
  chr18:77083046-77083302
  hypo
aatcggtaattgggatacccgtcacctcaagcatttatcgttgcttcgcgttagtaatcctccgtttatcgttgcttcgcgttagtaatcctccgtttatcgttgcttcgcgttagtaatcctccgtttatcgttgcttcgcgttagtaatcctccgtttatcgttgcttcgcgttagtaatcctccgtttatcgttgcttcgtgttagtaatcctctgtttatcgttgcttcgcgttagtaatattgcagttcca

SEQ ID NO: 272416 - DNA, 202 bp, Homo sapiens
  chr18:77089862-77090064
  hypo
tccgcgtagaaacacgtgtgaggagcttaacacacaggaacacattcataggaattgctttttccattgtatgttttattagactagcagttatttgccccgagcaatgcagcctaaatgtgcctctgtttatttttgttctttgataggatgaatccacggcagaaatcacattctacatgaagggcgctgacgtggccat

SEQ ID NO: 272417 - DNA, 313 bp, Homo sapiens
  chr18:77126100-77126413
  hypo
attgattctttttaccggacacctgggaggtgcagaactgtagggaagagacccgtccgtggtcgctaaaggtttgagtgtagagggtgaccggagaggcatcccgagggggtgtgggtgtggaagctgctctgtctggcgcggtggtggcggacacctgaccgtgcctctctcagagcccgctggacggcaccagcatggagctaagggaggaggaatgcagacagcggcccatgaaccgcagaaccacactgtgggctgggaagaaaggagctcttttcagtggccttgggaaaggcgtttgactgtggtt

SEQ ID NO: 272418 - DNA, 171 bp, Homo sapiens
  chr18:77127871-77128042
  hypo
caggtcattaaggacggggagacagaggcgctggccagatcacagagcccaggagacatcacggccagagcagcgtggggtcctgtgtggggccctgggcaggaaaagcacatttgagaaaaaccaggacctccacaccatttctctgccacggtgcgtgtctgtgtctcc

SEQ ID NO: 272419 - DNA, 163 bp, Homo sapiens
  chr18:77138794-77138957
  hypo
ctccgtattttccacgcaggcggcagcctccgccaggagtttcacctgttcattttcttccgcgtcgtttcccatcagggtgggccccgtcacctgaaatgctggcggagctgtgtgcgtggggttccgaaggcgtttcaccaaccagcggagggactgccca

SEQ ID NO: 272420 - DNA, 45 bp, Homo sapiens
  chr18:77143641-77143686
  hypo
agtccacaggccacccgtgggttctgaaacgcgcccctcagtgtg

SEQ ID NO: 272421 - DNA, 58 bp, Homo sapiens
  chr18:77145392-77145450
  hypo
cgccggggccaggccacaccgccggggccaggccacaccgccacggcaggccacaccg

SEQ ID NO: 272422 - DNA, 87 bp, Homo sapiens
  chr18:77161630-77161717
  hypo
ttctacctgggtgtgccatgcgagagtgtcgccccactcccgacctctctttatggggtgaaagtcggtcccatgagagtgtggcca

SEQ ID NO: 272423 - DNA, 379 bp, Homo sapiens; identical to SEQ ID NO: 218663
  chr18:77166684-77167063
  hypo

SEQ ID NO: 272424 - DNA, 358 bp, Homo sapiens; identical to SEQ ID NO: 218664
  chr18:77174745-77175103
  hypo

SEQ ID NO: 272425 - DNA, 594 bp, Homo sapiens
  chr18:77181264-77181858
  hypo
aggccactgttcccagaactcgagggttccctgacaccaagatgacatgtggcacagacctggaatcacgaggaaatgcccgtcctcctcccacgggcagacaggtcgagtgtgtttccagagaccgggccgtccgtggggcagtagcgcctggatgacgtctgctttcgcctggagccctggctgcaaggggcggtgccgggcaagggccaccccaggggtctgggagtgcagtgtcgggcctgtggaggtggagagcagggatcagcctctttttgtggatgaggaaatggagacacgtggaaacttctggtaagaagctgtcaagcctccaggtttcggttctggacaggtgcggggcaggtattggagcactttgggctctgaggtccacgtggcccagcggcctccaggagtcagctgcaaggcggagtccctgtccacaagctgcgttgcaggcacagagaccaggagagggctgtgaagcaactctgtgtttactgggctgaagcagcagctcttggcagtgccgccaccatgggctgtgtcctgtccccgtggcgacatcacagctgagcgcgaagctggaagctt

SEQ ID NO: 272426 - DNA, 273 bp, Homo sapiens
  chr18:77183185-77183458
  hypo
gtggagccacgggacgccatcagtttttatgaaatccccaaatgtgtcctttaaaacaaaacctctgcactccggcctcacagcccagatcccgcgcgctcccggtctgtggctttgactttggtttgagttcctgggctgggcttacctggctggcagggccgcagctgtggcactccctgtctggggacggaggctgcccatgcacccggctgtccaccttcttcccaaaggcggcgtcctgggctccctcccatgcggacccgggatcca

SEQ ID NO: 272427 - DNA, 268 bp, Homo sapiens
  chr18:77185306-77185574
  hypo
cttttaactaagggaaaagccgtcacacaaccaaatggccatgaggcccgcggctgccggctgaggagggctgcgggaggaccctgaaaccctcgccctcctgaagctgctcctgtggagtcctgtgggcgggtgtggccctgccgagttcagagtctgtcgcttcgtctgtctggaaactgcaggagtcatgagcagccttcacggttttcacctaagcaatgagcacgtgcgggctttaaccctcggaaaatcagaattaaaggat

SEQ ID NO: 272428 - DNA, 144 bp, Homo sapiens
  chr18:77186375-77186519
  hypo
aggactgtgtggccggctccccaggccacgggggccactgtcctccatgccacgtcccatgccgcttccaccgcagcgtgaggacagcaggacctgagccacgagccacactgctgtgggacccgtgtcgggactcgcagggcc

SEQ ID NO: 272429 - DNA, 200 bp, Homo sapiens
  chr18:77192931-77193131
  hypo
caggtcatgcagctcgtgtccctctgtgcaaagtaaccgaacagcctcccacagccctcaccgtcgtaccccgccctgctgcgtttgctcccaccgccctccatggacgccgtgtccctcctcctggccctcagtcagggccttctgtttgtcttgcagcaatcatggaatttgggggctggcggcgctgcgcacatcac

SEQ ID NO: 272430 - DNA, 441 bp, Homo sapiens
  chr18:77194172-77194613
  hypo
ccagggctcaaggtgctccccgaggagaggaggagtggcttccagagcgggcctgggcctggcagccacatccctgccggggtaggcctgggcctggcaaccctgcagccgcgtccctgctggggtgggcctgactcccccgggctgtggtgtggcttcctcaccttcctcacaccttgcgggaaagccacgtggagttaggctgtcgagggaggggtgtaatgaccgcgccagggacgggcagcgtctgcacagagccatgctccctctgcaccccaggtgttgatgtggatcccgggtagccgtgggtgttggcattttcttcgttccacctgttacctcgtcagctataggccccaggccctagatctgctgctttggcagccacagagcagcaagtgtgtccagccccagggctccaggctacgcggcagcacagag

SEQ ID NO: 272431 - DNA, 327 bp, Homo sapiens
  chr18:77194820-77195147
  hypo
gcgctggggtgaggcgttttcgccagcacttgcagatgatgttaatgtgatgtttgtggcctgtgtgcttgatgccaattagtacctccctcgttggtgcttgaagcaaggaaatgcgggagacacctgagcgcacagtggcccgtttgacatttaaagtctccaccctcccaggtgggaaaggtcagacagcgctgcaccacgctccgtcactgcaggcctgcacctccccatccctgcctcggtttttactgaccgaaagcttgttattgctcagtgggaaggatattagataggacaagaaacgaggctgtgaaaggaggagtg

SEQ ID NO: 272432 - DNA, 1761 bp, Homo sapiens; identical to SEQ ID NO: 218669
  chr18:77196527-77198288
  hypo

SEQ ID NO: 272433 - DNA, 171 bp, Homo sapiens
  chr18:77198659-77198830
  hypo
agtctgcaaagaggtgagggcgggtggtctgggatcctgcctcagccgcgcgggtgagaggggcgggcgggtcaggcgaagactcagagtcaggaggccagactggccccagggagggctcctggccataccccaagctcaggacgcagggtggggcgggcccgctggtgc

SEQ ID NO: 272434 - DNA, 1042 bp, Homo sapiens; identical to SEQ ID NO: 218670
  chr18:77199644-77200686
  hypo

SEQ ID NO: 272435 - DNA, 36 bp, Homo sapiens
  chr18:77201348-77201384
  hypo
acatggctgctgggcgggcagcgctcctgggcctct

SEQ ID NO: 272436 - DNA, 533 bp, Homo sapiens
  chr18:77201765-77202298
  hypo
tggccctggggtcacggggttgcggcgtttcccacttgcctgtttcaggagttgcattctagatgattctctctccatagaaggtcgaggtttctcagcatggattaattgattagatttaattaaatctaaacgtggtgtttccgggcagaatcttcttcagccaaagtgagcgtggccgtctcttctctgggcgcttccaggtgcgttggggcccctgcaccctccacgtcagtgccctggctccgtggccctgtcggtgctctggtgagtctggggttcgtgccgagcgccattgcctccaggtcgaggtgggaagcgcgctggtggggcaaggtggtccctgcatggcacaggttgggagagcagccgggagggcagcgggccgaggcggtgggggagggcaccagttctccacggcaagcacggcctctggggctgctcttccggagagacgtggagacccgcgtgcacgtgtggagactggcacgtgtgaggggcccacaggtgtggccgggcggcctttctcctcc

SEQ ID NO: 272437 - DNA, 1453 bp, Homo sapiens
  chr18:77204185-77205638
  hypo
acatgtggtgtgtgtgtgtgcgtgtgtgtgtgcacgctctgggggggtgtgcacatttcccagtgtggctgtgcgtgtgtgtgtgcccacgtgtgttcacagaacaccaggctttgccccgactcctggctcaggcctgagtctccagccatggcgtccccgttcctcccgttccttctctgcactgcacactgggaaccaggacaagaggtgtgcggcgtcaggctgtgtccttcccccacccaccccgagcccacgctgctctggagggagaccccagcttcccccgcctaccccgagccctcgctgctctggagggagaccccaggcccctcaggccctttcccgcatctgaaggggccagggcagggcgtccggcagatgaagctgccccttaaagccaggtctgggccggtttacagggaagcactgctcacgtacaacctggcagaccacaccagcgccgcacacacaggcacccctgtgggcacccacgtgcccgaccccgcagaccacaccggcactgcacacacaggcacccccgtgggcacacacgtgcccgaccccacagaccacaccggcgctgcacacacaggcacccccgtggccacacacatgcctgcacacgcacacttctggtgcacacgcccacactcacggaggcttctgcacaccacacagccagcaggtgaggaagtggacgctgcgtggctgtctcttggtggcttcacctggaatgtcaccgtggaccccagagcccgaagccccggcaagcacagaaatcacaccggcagcctgtcccacttcgggcaggtgaggcctggctgagaaaagggggaaggagagggaggatgcgggggtgtgtcctggtcctccacccgtttcgggtttggggtgctcccttcgactactggctccatttttgatgtcttttacttttgtttcgatttttcctggtatcttgagtaaagtctccctggagcatcaaattggatttttcttacaagtaccgtgtgctgttgactcatctgctttggtgtgccgtgggtcacgtgggcctgggctgtgggtaaggtgggcctcgttcctgcaggaacacctggctctgcagcagtggctgccgtatcatcctggccaggcccctgtaccgagggtggagccacggggtctctgatgccttccttctcgtgctttggtggagaatgtggctggacgtcctcccatgacagatgcactctcctgcctggttccctggccccgggcccagccctgagagacgcaccacggccttcacctggaagtgtcacctctggctgctgttgtgggtgatgaggattccagggctgagaagaggaccctagacgctgttcacacagcgtggcaatctctcaaattaatccagcatggggggaatcggggttgaaaccggtttgtgagccggattttctgtccc

SEQ ID NO: 272438 - DNA, 157 bp, Homo sapiens
  chr18:77208090-77208247
  hypo
cacccacacggcgccggccgagaagccatgagcggctctgcagggtggtgcggactatagacacctccatgcatggttgccctaggcagtgtctgccgccagcgtctgcctctggacactagctgctcagccaccaggacggcgttgagcgctcccc

SEQ ID NO: 272439 - DNA, 139 bp, Homo sapiens
  chr18:77208867-77209006
  hypo
ctaccaggtgcaccgcatcacagggaagaccgtgtccaccaccagccacgaggccatcctctccaacaccaaagtcctggagatcccactcctgccggagaacagcatgcgagccgtgtaagccgcgggggacctccgg

SEQ ID NO: 272440 - DNA, 42 bp, Homo sapiens
  chr18:77209431-77209473
  hypo
attttttagtaaggtgaggacgaaacatgtaacttccaaata

SEQ ID NO: 272441 - DNA, 927 bp, Homo sapiens; identical to SEQ ID NO: 218672
  chr18:77210976-77211903
  hypo

SEQ ID NO: 272442 - DNA, 451 bp, Homo sapiens
  chr18:77212145-77212596
  hypo
ctccatctgcagagagtggacgcttcgggggtcagttagcagcagggcaggagggagctcccctccggggccttcccctcccgccagcattcctggggtcggaggcagggatggggtgggtgccgcagacggcgggagctggggtggtctttaatgccacagccgtggtgtgtgtgaggctcttgtgccccaagggcacaggtcacccctgcctccaggtgttgcgctggcccagcctggaggctccggggctgaacttggaagggcagcaggggtgtcctcggagtgatgttcctcctggggccgtcacgcctgtggttctgtgctgcccacgggagactgtcctgcggggattgggctcacagagtggctcccagcccaggtcagttccatgcagacgccgggccccagcactctcatcccagaggggtggcctcgccggctccgagca

SEQ ID NO: 272443 - DNA, 458 bp, Homo sapiens; identical to SEQ ID NO: 218674
  chr18:77212957-77213415
  hypo

SEQ ID NO: 272444 - DNA, 45 bp, Homo sapiens
  chr18:77213652-77213697
  hypo
gaccctctgccagcaccagccggcgtctggtatacagcaggtgag

SEQ ID NO: 272445 - DNA, 175 bp, Homo sapiens; identical to SEQ ID NO: 218675
  chr18:77215331-77215506
  hypo

SEQ ID NO: 272446 - DNA, 785 bp, Homo sapiens
  chr18:77235786-77236571
  hypo
cacccccagcaagacgccaggcatcctagccacccgacgctcaggccgtgcgtgtcctcagagcgtgttttaaagcaggagggatttggggtggaagattgctcctgcagaaatcagagatgaggggagtaaattagggaaccagcgtcaggatccagacttctgtgaaagagccacagggctcagcatccgacgggcgcacctggggctgggcgagtctggctccagaaggggggtggggccgggagcctgagatgggatgagagggcgggaaggggcttgttgagaaatctaagggccacgggccaccaaaaacaaaccaggaggtgtgagtcagtggggaggctgggtgccaggaagcctgcgctctgggacatgcgtggggcaagaggggcgccctgagcttggcgacgccagccgcgcgcctgggagggatccgcctgtccacgtgcagccgcctccgggcggcgtcggccatgctgctgccccaccgtggctctgtggctccagccggaatggcaaagcctggctccacagctgcctgggagcgtgagtcacgcgccccacagaacacggcgggcagcgcgggcgaggattggcgaaagccgaccgatgtgttttggcttgtgtggtctgtgggagcgtcctttgtcatcagcctaattgggcaacagatcccacctcactgtgccctggagcagcacggggccaccacacagcctgaggccccacttgcgcttcccctcgctgccgtgctgtcctggccccgtcgctgccacctgaga

SEQ ID NO: 272447 - DNA, 894 bp, Homo sapiens
  chr18:77246336-77247230
  hypo
ccatactacagccagcagctcgcgatgccacccgaccccagctcctgcctcgtggccggcttcccgccctgtccgcagagaagcaccctgatgccagcggcccctggcgtgagccccaagctccacgacctttctcccgctgcctacaccaagggcgttgccagcccgggccactgtcacctcggactcccgcagccggccggagaggcccccgccgtccaggacgtgcccaggccagtggccacgcaccccggctcgcccgggcagccacccccggccctgctgccacagcaggtgagtgcgcctccaagcagtagctgcccccctggtctcgaacactcgctctgccccagcagcccctctcctccactcccgcctgccacccaagagccgacctgcctgcagccctgcagcccagcgtgcccgcccgccacgggccgcccgcagcacctgccgtccacggtccgcagggacgagtctccgactgccgggccacggctgctgccagaggtgcatgaggacggtagtcctaatttggcccctattcctgtaacggtcaagcgagagcctgaagagttggaccagttgtacctggatgacggtgagtgcccgcagccatgcaggtgtgtgccccgcctggcgccatggcgtgagctcatggaggggccgtgtgcgtgctgcgtgtgtggcacgtgtggaagtgcaccgaggcaccgggcagggtgtggggtgcgtcctcctgatataaagtgcccgtgcggtgccacggcgtcagcgccacctggggcgctcgccgtgagatctgctccggtggtcgcagtgtggggcccttggcgggtcctgggctgcagatcctcctgcgagacctgtcccggggtctaaggctcacattgg

SEQ ID NO: 272448 - DNA, 506 bp, Homo sapiens
  chr18:77251269-77251775
  hypo
taggaagcacagggcgccccaacaagggacgatcccagcacctggagaaggagcagagacgagagacagaaacaacacgaaccccaggtcaagtcggtgccgtgcgtgccaagtgtcctcagcgggtggaaagtgtcgctgtgtctttgatagtttacacaacagggagagagcgaaaagctggggttggaggaaacaggagagaagtaaggctgtgtggcggggacaagactcagacacacccctgactatctgtaaatgggccgatcggacacaaggccagggacctcctggccagccccgagccccgtgaggtgcctgtggcaggacgtgggtatggcaggtgacagaagccctgccgggtccactttccagcctccccggcttcccttctgcgttccgctggcctggccgccacctccagggacaacaagcctggcatggggtgcagatttagtctccagccctctgcgaaccaagcagtggtggatcgcagagctgcgtgc

SEQ ID NO: 272449 - DNA, 446 bp, Homo sapiens
  chr18:77255660-77256106
  hypo
accaagccctgatgttcagccgcgactgcgcgtctgggcagtgtggggcgtgtgtgcgatgcctttgtcatcttgtgtaggcaagccgtgaacagtggtaaggcgttcgcgagtcattgtaacgtaggcaggccgtgaacagtactaaggcgttcatgggtgtgtcactgtaacacaggcaagctgtgaaccgtagtaaggtgtccgcaagtgtcactgtaacacaggcaagccgtgaacagtagtaaggcgcccgcgggtgtgtcgctgtgacgcgggcaagccgtgaacagtagtaaggcgtccgcaagtgtcactgtaacgcaggcaagccgtgaacagtagtaaggcgtccgcgggtgtgtcgctgtgacgcgggtaagccgtgaacagtagtaaggcattcgcaagtgtgtcattgtaacgctgtgtttttctggtgtaga

SEQ ID NO: 272450 - DNA, 108 bp, Homo sapiens
  chr18:77263494-77263602
  hypo
gggcttaaaaccttcggtaaaccatgctgtgaacagaggtgccgtcatccgggctttgtcgctccatgggtggcgcacaggcagaggagattccgcgtcattcttagg

SEQ ID NO: 272451 - DNA, 60 bp, Homo sapiens
  chr18:77269734-77269794
  hypo
ctgtgacaactgtcagctcacggaccagggagggaacgcgaagctggggagctctgagct

SEQ ID NO: 272452 - DNA, 589 bp, Homo sapiens
  chr18:77270852-77271441
  hypo
ggggcatcctctgccggggcatcttccgccggggcatcctccgccgggacatcctccaccgggggctcctccgccggggcatcctgctccggggcatcgttcgccggtcttgtcgctgcggtggaagtgtcgtgttcccagccaggctgggagtggtcgctggcgaggcctggcgtgggcccgcggtgtctgtcagggtgccctgggccagccccgctgattcgatttagagctaacgagagtccaccaacggcaattacaggaacctaatggccttcctgccgcaccgctccgtggcacccggctcgctgtgatgaattgctcattatgtgcagtgttggaatagcctccacaagattaataattggataatcaatacagaaattcaatcttggggtgtttttttcactccggggtcaatatgtcctgaagattacaaggcccgactctgcctcccccctccccgctgcttccgcgttgggagtttggccagcacctcgccacacgatgggtcatggtgcgttgtctccgtacctccgtgacttttctattctttgcaaacagcaggttctgccgggggtcagtgctg

SEQ ID NO: 272453 - DNA, 108 bp, Homo sapiens
  chr18:77271864-77271972
  hypo
gagttggcaggattcggggcttctgggggaggccaggaacagagggcggcacgggcctggggagagcaggaagctgtgtgctggctctcaggagcccagtggatggga

SEQ ID NO: 272454 - DNA, 249 bp, Homo sapiens
  chr18:77276519-77276768
  hypo
ccttgttcttaccccgtttctcagccgagcgccgggcgcccagcagtgtcggacagtttagggtggaccgaggaggccgtggtggaggcttcatgtaggaggttatggaaaatccagatatttgcttgtgaaggaggaaacatttatggtagactttctaagaggttgcttcttctcaaaaaattaaaaaacccacatgagaggcggcctcttcagttaccttggcgcacacaccgaagccacctctgc

SEQ ID NO: 272455 - DNA, 172 bp, Homo sapiens
  chr18:77284566-77284738
  hypo
cggcccacacgcaccgccagcccgcaggagtgaggtgcaggctgccgctggctccttaggcctcgacagctctcttgaggtcggccctcctcccctcccgagagctcagcagccgcagacccaggcagagagagcaaaggaggctgtggtggcccccgacgggaacctgggt

SEQ ID NO: 272456 - DNA, 464 bp, Homo sapiens
  chr18:77288114-77288578
  hypo
ttcctgggctgtcacgtacactcctgctgccttacacagtgcattttagaatcttccagtctgtcatctcagctcttttgtaacatgcttcccttgtctgcgcggttgaaaccgtaggcttgttcatagtcgcatgctcgcatctttgtttttaatctggcttcgaacatagcacaagtaacttgaatagcacatcaataggttactggacaaaagcagaaaaacctgttacaggatagcctgcatttgcatgtgtgtacatatctaggcatctatttatgtataaataataacagagccgacgtgtcctcgcccaggagggcttccctgtcagcaataaccggcatccgttttggaacctgcgtctggggctccagtcgctgctcttgctggcgtccatcgccgcctcggacggccgtgcattttctcgtctcacgcagttcgaggaggaccctagaaagcca

SEQ ID NO: 272457 - DNA, 189 bp, Homo sapiens
  chr18:77304066-77304255
  hypo
aggcttgcgaaggccgctggtgatggccactgctccgtgctgaggagcccaggctgatgctggaggagctttgggcccggtcccgctgctgccccaggagcccttcccaagacagcactggcttccaaatgatgctggacccgtctaatctctggctgttggcagccttcaccgcgggccacgttgtcc

SEQ ID NO: 272458 - DNA, 1164 bp, Homo sapiens
  chr18:77307590-77308754
  hypo
tcagcactggcaaacggctctttcccagcgggcgcctccgcacccagcaaaccaggcccatccagaacggcagcacaggcgcctggctccagcggaggcggccctgagcagtgagccctgtgccccactccacaggagggctggccccagagcgcgggcggcccgctaggagccacacagccgacgcctcgggctgggcatggagcggggtctgtctgtctggtgtggctgcagctgtgtttggagcatgcaggagaagcccctccagatgcccacgagcccccaccactttggtgcccgtcctgccagccgtgctgcgggcgccctgggctcgctcttgtcaccccatcccccgaaggcctccagggccctctgttggctgctgacccagggccttctctagagcacctgactcgggcacacggaggctgctggaggagtgagagagtgagtggggggaggaattgcaaccaaattcagaatccgcccggccctgaggccgccccttgcctgccacccacccgggtgggggctttatttcgactcaggcacaggcgcacctgccggacccccggtgtctctgcgactccttctccgcactggcctgggcccgggctcccagccctccgctctgtctcgctggggcaaggcgtccctcactggccagttctgacattggtcccgggggagccgccttccacctgctggccctgctggccctgagtgtgactcagccgtgcccggcaggaccacgagacgtccgctgagcacgatgtctacctggcattcaaggtaagtcatcaagcgccccccggttaggctggacgtgtctgtgagggttccggatgagcctggcattgggatgagccaggccggctgcggtttgactcagtgagggaagaggcctggcttgggacaggaggaagctgcgttccagcctcaggggagcctccttcccctggccgcctccttccgcaccctcaacgcaacaaaaaggtgatttcagaattgtaattactaaagaaaacattaccaagaacgactctgcagcacccctcgttcacgtccccactcagcatctccacgcgggggccacgcgtccgtgtttgctgccggcagccatcagcatccgcaggggtcccccgtctccgcgcacagctcaca

SEQ ID NO: 272459 - DNA, 275 bp, Homo sapiens
  chr18:77309675-77309950
  hypo
ctgggacctgcccaggagctcgggcagatgggttccgccagcggcgccaactcccacggctcgcggggatggggagttgggggctctgaacccgtgtgtgtggagcagaaggagtgtcacctcatcccccgggggcccttcacatcccaggccccactggactgtgacgggcagtgggaagggaggacgtgtgtggggccgagagggagctcccaggagaccccgtcgttgtcctggggtggccgagacaaagcctcacagacccccagacaggg

SEQ ID NO: 272460 - DNA, 636 bp, Homo sapiens
  chr18:77312868-77313504
  hypo
tgagcttgggcaacgcggcggcatgcggctgcagccactgggaacgagcctggctttggggacttgacttggccgtcaggcgtcgcgggagcccctgctgcgggctgagaagagcagccatcctggtcacacccctcggagcagcttctcaaggcttttggagggaggagctttcacagccttaatgccaccgtgggaaccgggagagagagtcccacggaaattcatggaaagctctgctgaagaccatttaggcttctgtctcctgaacttaaacctgggtaaggcgagtgtaaaggaaacgcctgcgtttggcggggctgggtttcagcagctcacacccagggagacacatttggcagccgaggccaccgccgtcctcaggcgtgggttccgtgactcagggaggacccgcccactgattcaccggcgcacctgccccgtcccgagaaacctggttctcctggggctgacccagcctaacccaggctccccagggagactcggaaagcacttccaagaggcttctgctcacccgggccctccacgtccacggctggatgtctcatcaacagtcacctgtcactgagtgccggataaagaaggcggtgaatgaactagcggtgggtgaatggc

SEQ ID NO: 272461 - DNA, 314 bp, Homo sapiens
  chr18:77313806-77314120
  hypo
ggctgcactgtgaagaaggacgggacttcagcagcacgcggagcctgaggctaaatgctgcaaaacacagcaccggcctcccgctcccgttcccgcaccctgaggacgcgctggctgattgtggcacgcgtgccttccgagcccagatgtcccttcctgacacgccggcagcagccaccgcggattgttggcctctttgccgttctgccttaagctgacgttttggcgatgttggtgctggaacttcaaacctcggtgtggaaggaagggacgccgaggcccctggcctgcccgaggtcatgcctccctcttgc

SEQ ID NO: 272462 - DNA, 331 bp, Homo sapiens
  chr18:77314336-77314667
  hypo
acagttgttgatcagtttcacgtgtctgtcccatttggcttgaaaaactaagtaaggggcgaacctgagccccaaagtcgtgcatagccgtatttacctctcagtccccggtaactggcaggtggatgtcacagtcttcactgtccccggtatctgtggatgtcaccgtcttcactttaagggtgactgggttagcctcagagggtcggcctgcagccttcccggcccagtgtctggcagagctttgccaagcggctcccagaaagttaccacccaagggcatctcacgcaatccttcgtgaaactcttcgatacccaggagtattaacat

SEQ ID NO: 272463 - DNA, 334 bp, Homo sapiens
  chr18:77315293-77315627
  hypo
agccagagacaggctgcaagcggggctgggggccaccagaccattcctcaaacaccaagggcgcaggaggctggcagtgggagccctgggtgccccgggggcgacttctggacccgctgggctgtttccgcacccggcttccctccctcaagcttgcggccgggtgtggctccctcaacctcagcgccgacctccgtgtctgcgcgctctctctctaccttcctcatccgcggggtcaggggtcacacggcaccgtcgcctgggtctccgagcagggagagtcgagtgctgactctgccagaaggctggaaacgttaccttaggtggaaaagta

SEQ ID NO: 272464 - DNA, 89 bp, Homo sapiens
  chr18:77315948-77316037
  hypo
tagcggcgcctttcgggatggggccccgacgcatgtgtggggctctggagtggaggcgcagaggggctgagagccgaggctgggacgcc

SEQ ID NO: 272465 - DNA, 697 bp, Homo sapiens
  chr18:77317749-77318446
  hypo
ttgtctgtctgtcccgatctcactctccctgtctgtcccaatctcactctccctgtctgtctgtcccgatctcactctccctgtctgtcccgatctcactctccctgtctttctgtcccgatctcactctccctgtctgtcccgatctcactctccctgtctgtcccgatctcactctccctgtctgtctgtcccgatctcactctccctgtctgtctgtcccgatctcactctccctgtctgtcccaatctcactctccctgtctgtcccgatctcactctccctgtctttctgtcccgatctcactctccctgtctgtcccgatctcactctccctgtctgtcccgatctcactctccctgtctgtctgtcccgatctcactctccctgtctgtctgtcccgatctcactctccctgtctgtctgtcccgatctcactctccctgtctgtcccgatctcactctccctgtctgtcccgatcttggccgatccagacaagctgctcccttcagctgctcaggttcaacctctcaagactccggtgactcggtggccagcctcgtacttcccccgtccacctcctcaccactgtcctctgccaggggcccacaggccgccttgtccggcgagcaaggacttgctacctctcaggctcccggcccagccccaggcaccttccccgaccctggtctgca

SEQ ID NO: 272466 - DNA, 136 bp, Homo sapiens
  chr18:77319168-77319304
  hypo
accccagcatctgccgtgtggacgggaagtgcacgctgtctgccatggggatggtgggtgtagcgatttgcagtgcgtttttctgggtgggcgggaaaagacctttcctgtctgctctgccgtggccgatggcatc

SEQ ID NO: 272467 - DNA, 61 bp, Homo sapiens; identical to SEQ ID NO: 218689
  chr18:77320767-77320828
  hypo

SEQ ID NO: 272468 - DNA, 254 bp, Homo sapiens
  chr18:77329763-77330017
  hypo
ggtacagcaagacacgccctcacctttaccgtctcagtacagcaggacacactctcaccttcaccgtctcagcgcagcgggacacgccatcaccttcaccgtctgagtgcagcaggacacgccctcaccttcaccgtctcagtacagcaggacacactctcaccttcactgtctcagtatagcggtccacgccctcaccttcaccgtctcagtacagccaaacacgccctcaccttcaccgtctcagtacagca

SEQ ID NO: 272469 - DNA, 141 bp, Homo sapiens
  chr18:77334279-77334420
  hypo
cattgcgcattctgcgtgtgtcccaggaggaccctgtgcggtgactgttccacactttccacatttgcttctcctgcgagtcgcaatgggactgcgtgtgccgctggcccctggcattgcacattgcgggtttgtgccagg

SEQ ID NO: 272470 - DNA, 216 bp, Homo sapiens; identical to SEQ ID NO: 218690
  chr18:77336014-77336230
  hypo

SEQ ID NO: 272471 - DNA, 436 bp, Homo sapiens
  chr18:77338965-77339401
  hypo
tcccaagacagccgcgccgagtgtcctaacacagttgccacacggctccatgtcctgtgcacaggccaggggttcgagtgggcatcagcaatgctcacttcagagcccctccgccacgacgtggccatgtgcacacagctccgtggccagcgctggaaactgcgtctcctgcctccagctgcgttacttggagaagcaggaacctctccatcctcactttccatccgcacatccagggccgcccacgtgcacccacaccgtgcgctcactgtgtggcctgtcgagaacacagtgtcctctgcccctgatttcccaggagagtcgcacgtctgtgatggtggtctcccaggcacgcatggccatggagcacgggaacgtgtgcgcctgctgggagcacatgggaagactgcacgccgggtgctgaggcttcctgtga

SEQ ID NO: 272472 - DNA, 591 bp, Homo sapiens
  chr18:77340201-77340792
  hypo
tgtgtacgtgagcgcgtgtggcggtaccagcacaggggtgagctgcggcctcacaggcttctcactgctgcagctggatgtgccactgtagacggtcggggcaggggcctcctgccctcaagctgtgtgtggcagccacgggtccccgtgcctgcagcctgagacaggcgcctggagtcgctgcctggggcaagtgagttctgctggaggaaatgatgtagatgctgcaagaaggcaacagcagagtcagaagttgaggagaagacagaggtaatagggaattgctcctcagcaacgacacatgagagtcgcgtgtgccgtgatcccaggcagctgcagctgcgtggatgccacatggggaacccggcttccagacccgccctcaagggccgagcgtctcacgcccagcttcattcctccccatcttgggggtgctgctcttgtgctgcccagggtcccccagtcgtgcaaagcctgtctttgttttgttagccaaagtcccaggacgggggctcacccgaaccatgtcaccctgtgatgaggacaggagggatggagccttcctcgatctgagctcgggctgcagccctg

SEQ ID NO: 272473 - DNA, 150 bp, Homo sapiens
  chr18:77347862-77348012
  hypo
tatgtatagaaaagcgacatgctaagccgcaaagccgcccccttcaagacgcagcacacgcaaggctcaccctgccacgagcactggtaccggctcactttccgctctgctcggcgggactccggccaggcccagcgtgcagctgcagaa

SEQ ID NO: 272474 - DNA, 84 bp, Homo sapiens; identical to SEQ ID NO: 218693
  chr18:77356569-77356653
  hypo

SEQ ID NO: 272475 - DNA, 74 bp, Homo sapiens; identical to SEQ ID NO: 218694
  chr18:77356683-77356757
  hypo

SEQ ID NO: 272476 - DNA, 791 bp, Homo sapiens
  chr18:77358203-77358994
  hypo
cagggtgaaagccacagcaccggccctggtttgggatgacaccgcggctgtgatctcggcagccacaggcttccccgtccgactcggccgagaagcctctcctgccacctctgagctctaggcttggactctggagtggttgctggagtcacttcccaccgtgccgggcaagggctgcaggagggcacagcgtgcgggacgctggcaactcacagctgcctcccagccacaccccccacctcctgcaggctccagggccctttgtctctgagaacgagagctgcatcttgtccagtgggtttcacaggtctcaggactgggaatggcgctgggcgcgtggacaggtgaagtccattgttcctgctgctgccggtgtgagccgcagcccacgcccaccaccaaggaggcagaacggcggtgtgaatggagaaccactcatttgccaaatcatttaaatcagacttttcacagctgagaatgccaccgcaaagcacaaatgactttgttccagagagaaaagggagagcagggcaccgaggcagaccacgggaacacgagcagcgccttccacgctgtccgggcagggcaccgaggcagatcagactgcagcacagtgtctggggagccctctcgaccagtaaggaaagtggcacttgaggctgagaggaagagagcgattccaggtgaaaggactatttttaaagactccccagctagccggtctgtttcttcattaattttccttaaaagctccacttgtgagacaggcaaatgctcgccacctgcccccg

SEQ ID NO: 272477 - DNA, 111 bp, Homo sapiens
  chr18:77364434-77364545
  hypo
cgggcttgtggctgcgtcattctgccctctgccccctgggcacgcagctgactcccctgtatgggcccatctctccgaattcacatgaccgtccttcggtaaagacaccag

SEQ ID NO: 272478 - DNA, 224 bp, Homo sapiens
  chr18:77365607-77365831
  hypo
gctccttctctgcatttgcccgtggcccggagcccaccctgctctgctcatccagcacctggacccctcgccggctcccgagctcgtgccttggcttccccactgggtctgcgctcctctgtgtgctggggctcccacacccagtctgcgttccccgccaggtctacgttccccgccaggtctgcgttccctgccaggtctacgttccctgccaggtctgcact

SEQ ID NO: 272479 - DNA, 89 bp, Homo sapiens
  chr18:77366225-77366314
  hypo
ctcacctggtctctgctcctcgcctggtctctgctcctcgcctggtctgcgctcctcacctggtctgcgctcctcacctgttctctgct

SEQ ID NO: 272480 - DNA, 67 bp, Homo sapiens
  chr18:77368583-77368650
  hypo
ggcacaggtacacgcggtttccgggacctggccacgggccactctccaggactgactgcaaggacct

SEQ ID NO: 272481 - DNA, 65 bp, Homo sapiens
  chr18:77375217-77375282
  hypo
ctacgaagccacgccgggtgagaacccacccaaagcgtgtgatcgcctcacgtcacagcctggct

SEQ ID NO: 272482 - DNA, 159 bp, Homo sapiens
  chr18:77382549-77382708
  hypo
tcctgcacttgtcccagtgtcgtagctacaaccgagagcctgaatagactgtgggtttccactcacacatggccagacaccgtccaagactccgcagaaacaggcaagcccaggctcgtctactgcaatgaacccagcgttggtttggcatgaagaccc

SEQ ID NO: 272483 - DNA, 103 bp, Homo sapiens
  chr18:77390502-77390605
  hypo
cctaattacactcgcggcgtcagcgttctgggcaggccgttcacactgaaactcggtcggcactggcgctggggcggatcctggccatcgaccactccattct

SEQ ID NO: 272484 - DNA, 387 bp, Homo sapiens
  chr18:77410015-77410402
  hypo
tgcaccctagaagcttttggcggtgtgtgcgcgtgggctcagggctcgtgaccctctgttccggcccacgcttctgaccggtgattagaaagcggcacgttctatcctcggccctgtcagccctgcagggcgcaccagctgctctcacgggccacagaatcacagatgcggtcctcacctctcgggagcggccttctcctagacagcacacgagccatctacgttttcccggttgtctttttcattccaaagtccacatgtgcgctaccacctcctttaaaacataaaaacagaaaagcaaaacgacgaaaaaggtagcagttccctttagccacagtgcagcgcatttgttttcattattcctccgttttactgagagtaatgtgc

SEQ ID NO: 272485 - DNA, 246 bp, Homo sapiens
  chr18:77438002-77438248
  hypo
ttcccttgtagtcacgagggtaggggctggagaaagcagcagagatagtcaaaaacccacagctacaaaaaatgcactcctaagagcaagtaatggcgagggctaaaaggcactgtgccccttctgggccattctaattaccacatttaaatggttttgagaaaagagaatttttatctgaggaacgcgagttcttttaattatcaggccgagagagacattcaaatgaggcgacaatcgcgccct

SEQ ID NO: 272486 - DNA, 59 bp, Homo sapiens; identical to SEQ ID NO: 218696
  chr18:77456032-77456091
  hypo

SEQ ID NO: 272487 - DNA, 83 bp, Homo sapiens; identical to SEQ ID NO: 218697
  chr18:77457661-77457744
  hypo

SEQ ID NO: 272488 - DNA, 316 bp, Homo sapiens; identical to SEQ ID NO: 218698
  chr18:77463264-77463580
  hypo

SEQ ID NO: 272489 - DNA, 738 bp, Homo sapiens
  chr18:77474487-77475225
  hypo
tagtaaatcattctcgaggcactgaggtctcagagccatctccgcccgtgagagaccctgagggggtaacgcaggcccctggagtggagcccagcaatggcctggagaagcctgcacgggagctgaacggcagcgaggccgccaccccgcgggactcaccccgccccgggaagccagacgagagggacatctggccccctgcccaggcccccaccagcagccaagagctggcaggcgctcctgagccccagggatcctgtgcgcagggtggccgggtggcaccgggacagcggcctgcccagggtgccacgggcactgacctggactttgacttatccagcgacagcgagagcagcagtgagtccgagggcacgaagtcctcctcctccgcctctgatggcgaaagcgaggggaaaagaggccggcagaagccgaaggctgccccagagggagccggggcgctggcacagggcagttccctggagccggggcggcctgcagcaccgagtctccccggagaggccgagcctggcgcgcatgccccggacaaggagcctgagctgggtgggcaggaggagggcgagcgggatggcctctgcggcctgggcaacggctgtgccgacaggaaggaggcggagaccgagtcacagaacagcgagctgtcgggggtcactgcgggtgagtccctggaccagagcatggaggaggaggaggaggaggacacggatgaggatgacc

SEQ ID NO: 272490 - DNA, 81 bp, Homo sapiens
  chr18:77479162-77479243
  hypo
tctagttcctccccggttttctgtttcatagattgtgttttgtcttttacgattctggagagcagcgtgtgcccctctcgg

SEQ ID NO: 272491 - DNA, 260 bp, Homo sapiens
  chr18:77485494-77485754
  hypo
tgaaggaattgctccgcttaccttctctattttttttttgtttgtttttcagcctccttatttcgtactttccttctgcttgctttgggattatttcttatgacttttgttttgacagtcaagtgtggtctagagaactcgagcggagtctccggtgcttgcccggattcctgcttccgtcctcacgggaggttccctcggggtcccttccctcccgacctgacctggagtgtccatcatgctctcggggcaggcctggg

SEQ ID NO: 272492 - DNA, 39 bp, Homo sapiens
  chr18:77493027-77493066
  hypo
gtccctgagtctcctcgtggtgggcgtggccaaagcact

SEQ ID NO: 272493 - DNA, 441 bp, Homo sapiens
  chr18:77493433-77493874
  hypo
ctgagggttgaggtggggcccgtctcctgtacacccctgcggaaaagcctgctgggccccagagccggcgtccgctgcctctgcagctgcgttacctcgttcctgcctgttctgctgggccccaaagccggcgtccgctgcctctccagctgcgttacctcgtttctgcgtgttctgctgggccccaaagctggcgtccgctgcctctccagctgcgttacctcgtttcagcctgttctgcttctcatgctcaggatgctttcccgaccttgctctgtgtctcttcttgtttcccgtcctctctcttgaagccgtcccacctcactccagcgcagagctggggagagttttattctgtgatccagggtcgtgcaaggaggttggtagaaacatttcatttccgtgcattgacaggataccgtagcatctgctgttatctgt

SEQ ID NO: 272494 - DNA, 422 bp, Homo sapiens; identical to SEQ ID NO: 218700
  chr18:77497994-77498416
  hypo

SEQ ID NO: 272495 - DNA, 212 bp, Homo sapiens
  chr18:77503023-77503235
  hypo
tttgccagtagccgcgccgaggaggggcctaggattaaatgacagcagatggtgactggaatttacagcaagagctgaagagacccaggagtgctgaacaagaaggttggtctcaccgtgctccgagtgtgcacctgttccctgtcctgctgtaaataattacaacgatgcattgttgggtttgtagcatgcatggatgtggtatcgtacag

SEQ ID NO: 272496 - DNA, 96 bp, Homo sapiens
  chr18:77503529-77503625
  hypo
aaaaaaaaaaaaaaacagtgaagcacaaagtgaggagtctgagtgtgcacctgctctcactcctgctgtaaataattacaacgatgcattgttggg

SEQ ID NO: 272497 - DNA, 1084 bp, Homo sapiens
  chr18:77508725-77509809
  hypo
atctcacacaacagcgacagagtcatgatcagaggcctttagagtcatcattatcatgtctgtgtgtgagccgtgactgcctgggagccgtgtctgcctgggagccgtgactgcacatgagccgtgtctgtgtgtgagccgttctgtgtgtttgccgtgtctgtgtgtttgccgtgtctgtgtgtgagccgtgtctgtgtgtgagccgtgttggtgcatgtgcacagggctctccagcgggagctgaggtggtcccttccgtgggctcggttcaggtcctgtggcaccctgccaagttatgctggcgtttctgaaggtgtgtcctgctgtcaacagcactctgggtgtttttgtcggccttgtgaggggaacatatttctaaacctcaaacagagagtcacagctggcatttcccattctttgccatcctcttgctgccattagaactctgccacggatggcttcctcgcttgattttagaaagaaaagaattgttggaactggttcttgcacctctcgccctccccctcctctccctgcttgccccagggtcccgcctggctctcgtctgccccgtcttcactttcggtcggggcccctgcccctgcccctgctctgctcagtgcccctgatacgtccaacccagcgtcgctgtgagggagtcaaccacacctgccagcacccccgagtctggccccactaggaggggccagggctcccttgagcaaggcatcagcacacaggcagggagccgggcaccagactgtgagggtcgcgccccgtgcacacgagatccaggcccgccccctcctggacttggtgaccgtcccgagctcgacctgagagggcacttcggctctcctgttcacagtcatgactgccccctccccgaggtcagcgccatgcactgctctgggggcctgaaacaccgcctctgttcgcaagggtctcctgtcccgtccacctgccagtgggttgagctcttccaggggttcgggacacccctcacggcagcaccttcacgtttacgagaactgtctctgtcttgttttgtttcaagttctcaaaacggagtgaggtggag

SEQ ID NO: 272498 - DNA, 79 bp, Homo sapiens
  chr18:77510422-77510501
  hypo
agttgacataaaaataaattcgtttaaaacttggacggcaggtattagggcgtgcacttcccgctactctgcctttttt

SEQ ID NO: 272499 - DNA, 245 bp, Homo sapiens
  chr18:77511471-77511716
  hypo
gttgggttctctgaacgagcttgtcgtgactgatcggctgtgtgtgccagcccacggggttctcttgtcttctgttggttccatctgatcagctgattttattccttttgtctcttataaatgaactgtgattcttctaataccagcaagaatggtttcaagttatttctgcgctatagtttgtgtatattagcctcgagtgcatgtgtgttacatgcgtgctgtgtgtgcgtgcaggtgtatca

SEQ ID NO: 272500 - DNA, 202 bp, Homo sapiens
  chr18:77512014-77512216
  hypo
gctgaggttccttggcgcagtgggacgtcccagcacggcaccaggagggagggtgtctggcaggacatcaggtggttggaatttcagggctctggggatctcctgggtgtgccccgatcaagtcggctcacgtcacagaaaccaggtgcacctgcagcggctcctaaggaaaacctagtggcactggctggttatgcagagg

SEQ ID NO: 272501 - DNA, 282 bp, Homo sapiens
  chr18:77535504-77535786
  hypo
cgatgggcgggtcccgtcctgggtggggcagagcgggatggattctatcgcctgctcagaacgctgcacgatgtaaaactggtacttgccagggacaagaaggaccattcagctttgggacgtgaccaggaggtctcagagagaagcaaacagctgcgtccctgtgctgaggccgctggcgtgggcgcctgtcctggagcccggggtattggcagcgcccagggggagcccagcgacccattgtggctccacatcccacaggttcaccggagacaagccttt

SEQ ID NO: 272502 - DNA, 747 bp, Homo sapiens
  chr18:77542642-77543389
  hypo
ccgactctgcagcccggcgactgcttcccaggtgactgtttccagagtcaggtgttggccgtggtcaggttgacctgcctgtttgttttctataagctgtgtgtgttgtgcccgggtgtagatgccctgaggtttcacggccccccagcaagcagccccaggcccggcaccggatgggcccttcatacccattcactgtaacagacaagcagacggatgaggccatcgtggtccctctgaataaacgatgcttcacagaagtctcccctttcaaaacacgtacagcgaatgactcgggcttcagagccaccctggggtgccgtcggctggtgggtgatggagcggctctgcctggctcctctcggctctggcgcggcaggtcttcctgctttccaagcccgtgtccctggtgccagcacagaactgaactccgcccttgagtcgtgcgggacgagaccccgtgctgcgggcgcagtgccctctgtgggcggcgcgtggtggctgtcctccgtttcccacccggcgtctactgggccttgtccagtatcactgggagctgcaggctcggctagcaggtggctcccgtgccatccccgtgagctccgcctggccctgctgctcccgcccggaaagctcagacccataacccagcccacttggcagcagcgtgccgcctgatcggcaaggtttactccctttgaaaatctctgttgggtggccgggcgcggtggctcacgtctgtaatcc

SEQ ID NO: 272503 - DNA, 87 bp, Homo sapiens
  chr18:77543689-77543776
  hypo
gaaaatctctgttgggcacatctaaacgcacccaagcttcctaccgcacgtctctgcgaggagccgggtctccgaggcatggctcct

SEQ ID NO: 272504 - DNA, 251 bp, Homo sapiens
  chr18:77549955-77550206
  hypo
tcctgtgccaaggaaggggacgtccgtgcccctccttgtcccggggagcacggctccatggcgcccgctgtggagctgcggttctcaccatgggcaggtgcgaggccgtagactggtgtggtcagaccaggggactcctgcgttcaccctgggccccggagactagtgatcccgctccccagcagagcaccgccaaaagccccgggtgccggagctgtcctgcaagaatgaacgggcaggagacacaagag

SEQ ID NO: 272505 - DNA, 138 bp, Homo sapiens
  chr18:77550236-77550374
  hypo
agggcgctgttagcacccacgcgaggcggcagcgcatggaggaagcctcccatcgtaagcgcgtttctgcctgaaatgcacgtgtccttataggcagcggtcttgccactcatggacggagaggcagcatatgtttaa

SEQ ID NO: 272506 - DNA, 151 bp, Homo sapiens
  chr18:77561347-77561498
  hypo
gcgtcctcctcccccgaggggatcctcacatctcttagtccagcaggtccaggtcctccatccctgctgggtttcctcagccggggcctgtggaggggccacacctgccccgcactgcccacccttcacccaggcccggcaaggaggggac

SEQ ID NO: 272507 - DNA, 254 bp, Homo sapiens
  chr18:77562267-77562521
  hypo
cacttagaagaccaggtggacgcggctcatggaggggcgtctggggaccctggagcagtgaaggtcggctctcccagccgtgccgctccggtccggagagcctggcctcaacacctgtcccagccgtgctgctctggtccggagagcctggccttgacacctgtcccagccgtgccgctccggtccggagagcctggcctcgacatctgtcccagcccggccgctgcagcatcggccctagtggggaaggtctg

SEQ ID NO: 272508 - DNA, 604 bp, Homo sapiens
  chr18:77608083-77608687
  hypo
tgcagagcttctcccggtgaaggcagaatgtctgaaaccctagcgtgggctcagcagctgccaggggccagtgatgaacgccaacctcatctgtcctcgatccctgaggctaatggtgacgcatatgcttctaagtagggtttgccttttgcttggaaggaaatgttataattatttcaccctaacccgctgcattcgttgcttagagctgcgcagcctaaaacaccagaaatgtattctctcaaccccgggagtcccaagtacagagtaggggtccgcaggcctgtgctgtctctgaaccgctggggaggggcctgcgttgccgctcgggctcctgcagcaccggccatcgtcagccctccttggctgtgacctcggcctctgcatcccacggcctcagtgtcggcctctcccctcttatggggacatccgtccctggactcaggcccaccctaggggccttgtcttagccacacgcgaaaagaccctgtttccccatgaagtccgtctcacaggtcccggggctgagactcgcacacacttccggggacgcagtggaacccacagctctgcctttgggcagcagccgcgtgggggaaggagg

SEQ ID NO: 272509 - DNA, 742 bp, Homo sapiens
  chr18:77609431-77610173
  hypo
gccctgtgctggggcaggtgcgtccgacctcatccggggcaaggtcgtccgcgtgcaggagccgcatctggacaggccgcacctgccttccctccccgccttgctctgcgtcagcctaggagcctcctgtcctggccgcgggttacaccaagcgcggcggtaaagacaaccgttgtttcttagctgtcgtggtttctgagggcccagcgcggacgcttgcctttctctgctgcgtgaagtctgggcctcggctggaggcagagcggaggctggggccaccggaagccttgttcttgcgtggctgggggctgatgctggctgccggccgccctgggtggcgtgggagcaggagcgcgtggaagacccagcctctctgagagccccccacgtaatcacacagtgagaggtccgctgtggtttagtgggaggaacccgagactccacccaggctgagtgggagggaggcgagaccccacctggccgtgggaggaacccgagaccccacccaggctcagtgggagggaacggagaccccacctggccgtaggaggagtgtcccgcgcacctaaagggctgacagggccgtgtgaaaacccgccggggtcgctggtcctggctctcctgaccttctgcctccccgctaccctcatccatgtacccagcacacacgtgcacacatacgtggataaatggaataaacataaacttcacccagacagccgaagcccctccctctgtctaa

SEQ ID NO: 272510 - DNA, 39 bp, Homo sapiens
  chr18:77615733-77615772
  hypo
ccctcgtgctgtgacggccattcccgttcacctctgtcg

SEQ ID NO: 272511 - DNA, 148 bp, Homo sapiens; identical to SEQ ID NO: 218708
  chr18:77616284-77616432
  hypo

SEQ ID NO: 272512 - DNA, 142 bp, Homo sapiens; identical to SEQ ID NO: 218709
  chr18:77627461-77627603
  hypo

SEQ ID NO: 272513 - DNA, 637 bp, Homo sapiens
  chr18:77627958-77628595
  hypo
acaggtttggaagtcggctgctgcctgcagtctgggtgtctggcggccaggctgccttcccccgtcgtccccatgaggtccaggtcctgatcgtgcttccaaaaggtgctggagtgtttggctgtcctcggtcgaatatccaggagggaaaattcatttgtgtcacgttagagaataggagaagtttgggctgccccagctacagaagtcaccccaggaacaccagccctaacccttactgtggaccccaaaaccccagatcctctcagggacaaccctgggctccgtggcacccagcccttcacactcctggcacgcacccctaaattgcttgtccagttaagaagcagtcgccctccgcgtggggcctggtgacccgtgtccgagcgtccggttaagaagcagtcgccctccgcgtggggcctggtgacccgtgtccaagcgtccggttaagaagcagtcgccctctgcatggggcctggtgacccgtgtccgagcgttgcagctgctgctgactgaccgaaggtctttttcggaagcgattcagttgtgtgggtgaagagccaagaaaaggtggttctcactcctgtcctaagagaatatttcaaagcatgagaattggcgtgttggtgacgta

SEQ ID NO: 272514 - DNA, 425 bp, Homo sapiens
  chr18:77628924-77629349
  hypo
tgagaactaggagtcggtgttactgacagaatgtgagctctctgatgggatgtgtgcgggaggctgagtccagccaccacacgggtcggcttccacagggtttcccgcacgcactgtgctgtcccaggtgcaggggtggggatgcaggagccgtgagcacccctacacacagccctgcagacactggggagaccccgagccagagtccagctgggacagcctcccgggtctcctggatacctcggagaatgagggaagcccagggtgctggttgctttcagtgcccgccccgcgctgagtctcctgcccctgggctgcgacctgcacaggggcagtagctccctgtggggagggctcggctcagggaccacggaaacgcctggtctgctgcacacggcgggtgcggaagaaataggaagcctcag

SEQ ID NO: 272515 - DNA, 133 bp, Homo sapiens
  chr18:77631595-77631728
  hypo
gcaagtcgagtgggcggtgcaggaccagccggtggccccccgcgtctgggaggctcccacaccaccagtctccacccaggggcagtagagggaggggaaggcggccccctatgacgccttggcagagcctctg

SEQ ID NO: 272516 - DNA, 803 bp, Homo sapiens
  chr18:77635954-77636757
  hypo
actgcaccgatgtccggcacgcagtccccaggcgggcacactgcccagcagcccagtggcaggagctcagagctgacttgcttcttgcccaggtctggggttggtgcagcgcccgcagctcacgggccacagcagcggaaggtctgcggcattttggaccttgctgttgccggggcagtgggtgttggcgccacatccaggacccatctcccgcctggtgccgctgccatcacagtgaagctggactgaaacccacagacaggtccagccctgccgggcaggcgtgatcaggctgacactgcggaaaagccccactaggcaggtatgattgagctggcgtctccgaagggccccagccaggcagggatgatcgggctggcgctgtggaaagttgcaagcacactgtgtgggcacttggtggggctgggctgggtgcagagcacctaatggagaggagtcacctgcggcgtggccactgctgtgggctgcagttcccgggaaacagcagtggaaaccagcggcccagggacaggacaggggctgcaggtgctgagccgttgttcgacccagttgaattctaactcgtgacttggaacgattctgtcccgggaaggatgccctcttctgcatccacaggcagtggtgccctctgcgagcagcttgctcacctgtgtctgtgacgctggtgccctgagggcagggccagccccctctctcggcacagctgggtgaatcatcaacgacacccttggcaccgtgagcacttgcacctgcagaccgcctggtctcgctcttgggcacca

SEQ ID NO: 272517 - DNA, 367 bp, Homo sapiens; identical to SEQ ID NO: 218712
  chr18:77638243-77638610
  hypo

SEQ ID NO: 272518 - DNA, 254 bp, Homo sapiens
  chr18:77642672-77642926
  hypo
tcaaaggagggtgcgcggccggcaaggctcaggacctgcaggccatggagtggcgaggctgccatggagtggcgaggctgccgtggagcgcggaggccgggtacacctgcgcgtggagcgcggaggccgggtacacctgcgcgtggagcgcggaggccgggtacacctgcgcgtggagcgcggaggccgggtacacctgcgcgtggagcgcggaggccgggtacatctgcgcgtggcacgcggaggccgggtac

SEQ ID NO: 272519 - DNA, 230 bp, Homo sapiens
  chr18:77643802-77644032
  hypo
gcaggcatgttttcgtttttgctttggtgatagtggatgatgccgtttacagggcccgtcatggcggctgcagccccttctgccatttagcacagacttgcaccggcgtccccaccggcacgtccacgagggctccatgcagcccggcccactgacccccaactcgggtgtgcctgggtggggaccgtcccccgcccccgtctagccagtccccacgtcctgacgtttct

SEQ ID NO: 272520 - DNA, 432 bp, Homo sapiens
  chr18:77644509-77644941
  hypo
ctgtgatgtcccgatgcagtggaggagcagggctgggtctgggcctgggcctgggcgtggcagctccccaggcccacggggcaggaattctagattctgggattcctttcatcgttgctttttgtgttttctacctagagcggagaaatgtttgtggtttccaaagagaccggacacgcccaaggcccacagacacgtggcttcgtgatggggagccacgggggcaggggtccgcccggctctgtgttcctcgggggggctcatcctggggcccaggaactcgggagcggtttacccacaggttcctgtgcgtgggagcaaacttgcttttcccattcacagaaacacagtagcgtgcgcgggtcggtgatgcagccaagacaccatccctgaaactgtgataatgagagcgtcctgacaccagggctggga

SEQ ID NO: 272521 - DNA, 637 bp, Homo sapiens
  chr18:77664461-77665098
  hypo
tgacttctctgtggccgcaagagctgccgcctggctggggctctgcaagcccaagaacagtgagaccagctcgaggctacaggggacagcagggcgagcagctgacgtcagggcccctggtgcgcggtggcaattctgggaggggccgggcctgggagggtgctgaggacgcagatctgtgcccccaggcacacagccaagtggagcagagcagctgcttttgggtctctgccggcctccctccctggtgatagatgcaaaccttcctttcctggagtgaacagggagcagccgccacccaccatcccagtccgaacacgcttcccccaccgctgtgttcatgccctggcttgcctagcagtgaacatgagtgctgctgcactttcccgtgtgaaatgtttaaatcagcggccgctgacccttccacagctcctgaagccagaggcagagcctgggtggggagcgctgcctggacagaaaggacaggacacagccctcccccaccctggggcgtccgtcccgctcataagccagggtgggcacctgggtgccgtagccgccctgtgtgagagtcttcaggcacagccatggccgggtgtgttcagggctggagctaggaacccgcaggagacagccg

SEQ ID NO: 272522 - DNA, 278 bp, Homo sapiens
  chr18:77675215-77675493
  hypo
taaaagcgcagaccggatgaactgggcctggggagggctgaagctcccggcagcacgggcggggccagccccaccccctccgcatccccccagggcccgccctgtcccctccccatccccccggggccaggccagggcctcagtgcacagactctccggggcgctcattaccgtaactacaaccacacactccatcactccgagccgacccgacgctgctgctcctggtccccgttcctgacgaggatgcacagggtctcagcggtcccgcacttgaa

SEQ ID NO: 272523 - DNA, 130 bp, Homo sapiens
  chr18:77685460-77685590
  hypo
cattcaatgctaaacgaatgtttccaggcttggggggctcaccagaggcccaccctggcatgcactgagcagagaacagctgatcctcagaagcttccgtcgcacgggcgtggctgccctcaactcacag

SEQ ID NO: 272524 - DNA, 34 bp, Homo sapiens
  chr18:77718362-77718396
  hypo
gattacaggtgtgagccaccgcgcccggccaacc

SEQ ID NO: 272525 - DNA, 46 bp, Homo sapiens
  chr18:77729387-77729433
  hypo
aaagaaaaaaaaacgatgcagaatagcgcccacgttgagcaggtcc

SEQ ID NO: 272526 - DNA, 61 bp, Homo sapiens
  chr18:77729463-77729524
  hypo
agggatcctctgaacctccaggtcagaaagctggtgagccgtgaattcaccctgcatttta

SEQ ID NO: 272527 - DNA, 55 bp, Homo sapiens
  chr18:77740912-77740967
  hypo
ggtcactctgacaacgcccatttctgaaactctagtttcccgcagcgtccacagt

SEQ ID NO: 272528 - DNA, 175 bp, Homo sapiens
  chr18:77753637-77753812
  hypo
agtcctttcagctaccggatttgaccaactccaaaccctctagcttatgagtgtggaattttctaaagaaataagagcactttactcccctcagcctttcggggcattcttaggcaactgagaatcgcgtgagggtgtctgggaggaaagcaccttaagacgtgcaacagctctg

SEQ ID NO: 272529 - DNA, 92 bp, Homo sapiens
  chr18:77772123-77772215
  hypo
agtgtggggctggtttccccaataattttgatagaaatattaagcactgattttcttaagaaggggacaccgccaaaccaagataggccttt

SEQ ID NO: 272530 - DNA, 165 bp, Homo sapiens
  chr18:77804217-77804382
  hypo
cagttactggcagtcgcagactttggaccccgggatgaaagagacaactttgtacaaaatgatttcaggtgacgcatgtggacatatgttttgattccctggggtacattcctgggtgtggaatcaccattttccagagcagctgcccagcgccacatcccgagt

SEQ ID NO: 272531 - DNA, 381 bp, Homo sapiens
  chr18:77804875-77805256
  hypo
agcagcgtcaacatcgcctggcacctgccagagtcgggtttaaccagcctgccaggtgcatccctgagctggaagcaaagctccacgctgtagcaggcctggcctgaccgtgtcagcaaggggcagtgtgggggcggcagggcagggagctgagcccagggtgtggaaactttccaaagtggagccttggaggatacaggggctgtgacgtggccttgactaggtgctgttcaccaagaatagactcttcatgaaggcgaatgagtggcaggtctgataggcctcacctgcgattctgccagttgaactggcccgaggcactggccatgcttagagaaaaaagttgcaaacgcttttttttttttttttgaggcagagtct

SEQ ID NO: 272532 - DNA, 93 bp, Homo sapiens
  chr18:77805635-77805728
  hypo
ttaccctcagatagacgtttgggagggttctcaggcgagtagatgtaggaagtgtgatgtgctgttgtgttgtggcgacgacactgtggacta

SEQ ID NO: 272533 - DNA, 700 bp, Homo sapiens
  chr18:77808868-77809568
  hypo
atccaaccaggcgtcggctcagtgcctcctagaaagtggagtgtgggcacgtttgcaggggatccaaccaggcgtctgctcagtgcctcctagaaagtggagtgtgggcacgtttgtaggggatcccaccaggcatcagctcagtgcctcctagaaagaggagtgtgggcacgtttcagagaaaactggcttaggcctccctgtttctggcgtggccttccctgggagcgagttagggacacggaagctcacccgcttctgaatgggtccactcctggggatttccgcggccttccctgggagcgggttagggacacggaagctcacccccttctgaatgggtccactcctggggatttccgcggccttccctgggagcgggttagggacatggaagctcaccctcttctgaatgggtccactcctggggatttccacggcctttcctgggagcaggttagggacatggaagctcacgcccttctgaatgggtccactcccggggatttccatggccttccctggatgatccactcctggggattttccgcagctctccagatgacgtgcacgcacactaaacacccagaagttagggaggcactgatccagtgaagtcctcagatcaaccttgtgagctttttacaagtacctgtcactgttaaactgctgatgaaatgtgaaacgacttcacaggttt

SEQ ID NO: 272534 - DNA, 73 bp, Homo sapiens
  chr18:77828030-77828103
  hypo
agctcagatgcacccgttggcaaatggacaggcctggagggcgcagctcagatgcacccgttggcaaatggac

SEQ ID NO: 272535 - DNA, 38 bp, Homo sapiens
  chr18:77913923-77913961
  hypo
tttaaacaagctgttcgaggggacgagggttcaccctc

SEQ ID NO: 272536 - DNA, 168 bp, Homo sapiens; identical to SEQ ID NO: 218717
  chr18:77939058-77939226
  hypo

SEQ ID NO: 272537 - DNA, 193 bp, Homo sapiens; identical to SEQ ID NO: 218718
  chr18:77942205-77942398
  hypo

SEQ ID NO: 272538 - DNA, 946 bp, Homo sapiens
  chr18:77943589-77944535
  hypo
cacacatgcaccctcacacacgcatatacactcagacatgctcgcacaccctcacacatgcatataccctgacatgctcgcacaccctcacacacgcatataccctgacatgctcgcacaccctcacacacgcatgcacccacacaggcaccctctcgcatatactgtcacatatgcttgcacaccctcacacacgcacccacacatgcatacaccctcacgcgggcttgcacaccctcacgcacgcatgcacccacacatgcaccctcacacacgcatataccctcagacatgctcgcacaccctcacacacgcatataccctgacatgctcgcacaccctcacacgcatgcacccacacaggcaccctcacactcgcatatacagtcacatatgcttgcacaccctcacacgcacccacacatgcgtataccctcacgcgggcttgcacaccctcacgcacgcatgcacccacacatgcaccctcacacacgcatataccctcacatatgcttgcacaccctcacgcatgcatgcatcctcacacacatgcacccacacatgcatacaccctcacaaggctcacacaccgtcatgcacacatgcaccctcacatgcttgcacaccctcacatgtgcatgcaccctcacacatgctcgcacacccacacatgctcgcacaccctcacacatgcatgcaccctcacacacgcatatgccctcacatatgcttgcacacccacacacgcatacaccctcaaggctcgcacaccctcacatgcaccctcacacatgctcgcacaccctcacacatgcatgcatcctcacacacgcgcacaccctcacacacatgcacacacagcccttgcacacccccccaaaggatgcacacacacatccctgtgcacacgtgcactcatagctgctgctctcgatgggataactga

SEQ ID NO: 272539 - DNA, 88 bp, Homo sapiens
  chr18:77957216-77957304
  hypo
gtagcatgtgtcagcgcatcatttttcatggctcgataacattccactgcatgactagacacacacgcacatgcgcacacttttttat

SEQ ID NO: 272540 - DNA, 185 bp, Homo sapiens
  chr18:77988259-77988444
  hypo
ggaacctgttggagcgtgggactcggcagtagtttgctatagaatgacttcttgggctgacacgttgggacggtttaaaatcgggccacacacctatgagtcagatgaggtggagcctggcgcctgcctaggtgctgtccacccaagatccagagtgatgatggtgcagccgttggcactcgcag

SEQ ID NO: 272541 - DNA, 62 bp, Homo sapiens
  chr19:292200-292262
  hypo
agaagagcacgggggcgccaggagctgggaaccccatgaaatggcgccggggtctgtgcccc

SEQ ID NO: 272542 - DNA, 167 bp, Homo sapiens
  chr19:327875-328042
  hypo
catgtctgggaggttcggggccacgtcaccaccctcactctcccggtctgaaatggggtctgacgcctcgtagccatagagcgcaagcagctcatcaaagggcatgtcgttgctctgagttggggaagggaacaaggccccatcaggagggacggctctgggggttc

SEQ ID NO: 272543 - DNA, 34 bp, Homo sapiens
  chr19:369328-369362
  hypo
cctgagctcaatccccgcccggagaatgcaagac

SEQ ID NO: 272544 - DNA, 269 bp, Homo sapiens
  chr19:370622-370891
  hypo
gacaggcgtgagccaccgcgcccggcgtattcacatcagttttatcgtaacagtcctaaactggaagccacccaaatacccttcagtgggtgcctggatcggcaaattctggaattgaaccggcgacgacaaggaataaactaccgacgcacgcgagagtctcagatgcagggcggggggcggcagaagccgggtcaagcccgcaggctgcggggttcagactttcggaaaagcaaaaggtacagggcgtagagcgaggtcagtggttg

SEQ ID NO: 272545 - DNA, 160 bp, Homo sapiens
  chr19:379972-380132
  hypo
agggtcacggcaggcggtttcgggcgctggcctgtgacgccgtcctgggcaggcgcgtgcatctgaatgctttttacctggtctctcgactgttgcgttgggtaactcccatccatatcaccagtttcacaccaggttccagggacgaggatgtggacac

SEQ ID NO: 272546 - DNA, 429 bp, Homo sapiens
  chr19:401047-401476
  hypo
gtttgtcacagtgccggggtgcaggtgccgtgggctggggaagagcacatgaggcagcgtcccggagaagccccgtggtcctgtccggggaagccgggaactgctcactcacagggcgcacggaccaccaggaaagggcacggcagcctaggcgcccagagctctgcgagggatccctcgtgggggcttgattgactgattgcttgccacggggttgccctcgaactccaagggtgtctgacgctgtgagacccaaggcgctcccaagtcccacggttggtcttgctggtgtgaccctccctaccccagaccaagacgctcccctcaggcagggcagaaatcacctcccaaagccaaggcaaagcccagacctcaccccgcacgagaggattcctcaccccacgggggaaggtgcgggtctcatccgtg

SEQ ID NO: 272547 - DNA, 159 bp, Homo sapiens
  chr19:401847-402006
  hypo
tcagcgggtcctcccgcccacccacccacgatgcgcttaatcaacaggccctgccctgcgtgtgaccctggagagaggctctgggaccacgtcactgtacagtagggtaaactgaggctcaggcgccggcccgcgggaatggcccgccctcgtgggagg

SEQ ID NO: 272548 - DNA, 517 bp, Homo sapiens
  chr19:403367-403884
  hypo
agacctgaggcagggcgagacaccacgcaggcgcagaatccctggatgacgcccacttggaagtggaggggggagggcatgggcagctgcagctcccagacaccagcacacacaaacgcacacacaagtgcacaccagcagcgacacaggcacacacaagcgcacacagggtcacacatgcatacacggctcacgtgcttacacgtgcacacgccagcacacaggcagctatactcgagtgcctgcaggcgctcacctggcactgtcacatacgcccaacagatgagcacggtaacggcacacgcagtcacactgcacacacatgcggaagcacatggcgacgtgtgtgcacctacctggcacgcacacgcacacacccgtgcagcctagcgatgagtggctggggctgaagaggctacaaggcgcccgtagccctgtcaacccgtcccaggccctgactggggctcaccaggccgcggtcaggaggccgggctacgctgaaccccaattcccaaaa

SEQ ID NO: 272549 - DNA, 910 bp, Homo sapiens
  chr19:407244-408154
  hypo
cgttgaagacggggcggcggctgttcttcacgatggtgctgcgctgcttctgcagcttgcccggcaccaggcacaggcccacgcagcagttgatgctgcgggcgtcgcacaggcggtcgtagaggccctcggcggccagcaggtgcacccgcaggcgggcctggccggcctcgtactcggccagcagccgcacgctgccccgagggcccacgtggaccgtgtgctccccacgcgcctggcccgactcggggccaggttccgggggtgcccggcgggtcaggcggcgccggctcccggggctggcgtccggggtgctgtcgtccgcagacagggagccgtggcggcccacggagtgccggagctggctcaccttggcctggctgtcctgggcgaaacctttgagcagagacacggagcgggacagcagaggggacccgaagggggaggactcggccgaggaccctgtgtcgctctccccgccactgaagtagcggccggggctcatgagggccccgccagcctccctggggcccccatcacccccgttggccttggcagctgcccggcggcgcccggcccctggggagcccacctgggccagagccccgtgctcactgtggaacagagactccttgcgcctcgtgtgggggctctcagccagcatggcgaagccgtaggacgtctgggccttgggcaccgagggcagggacatggcaccctgggcctgggggtcggcgtcagtggcctcctcggacagccagtcctcggcactctcgatctggatcacgtgccgggtggctgccttcagcaggctcttgctctcggctgccagcttggcaggcagccgggggctccgtggggtctggcggggggccgcagaggccaggttctgttccgacgtggaggggcc

SEQ ID NO: 272550 - DNA, 294 bp, Homo sapiens
  chr19:416971-417265
  hypo
ccggggcgttagaccgaaccagccaggcgagagggggacccaagggccagggctccgaggcagcggctgcttctggatatattttctttaaaggcgaaatggttccgtctttggtatgaacaccctcactccaggcaaaggagggggtgggcaggggccccggcaggaggaggctctgcccagcccggggccagctggaggaaggaccatgccagaggctcatgcggaggaaggagaggcagcggtggttcggcctgaccaggatccaggaggagggctgagagccccaaggcc

SEQ ID NO: 272551 - DNA, 266 bp, Homo sapiens
  chr19:417295-417561
  hypo
gcaggagccagggctgagaacggtcacctgcgggcagaaagagaaggcgaggtcagggctgagacggtggccgcagacctgggctccggtgtgagccacatgctcttctgccttggcatcatctctgcaagtgccacacctcaggtccagcccagagctcctcaggtcgcatggctggggctccggtgcaggtgtcctgagtccttgctgtggacctagggcagtgccctaacctctctgctgtctcctcgcgtgcaagcaagaat

SEQ ID NO: 272552 - DNA, 840 bp, Homo sapiens
  chr19:418226-419066
  hypo
cccaccgtcctctccggcagtgcccacccctcctctgggaaggaggcctggacacccagcacgccgcaggggtccacaaagaccaggtgacgcccaccacagccgaccgcagtgtcacggtcatggctgcacgctgccaccctcgggcacatatccacccacgggcagtgacgcgtgtccacacacaacctgcacacaaaggctcacggcggccaaaaggcggaagcagccccagcgtccatcagcggatgaacacacaaaacgtggtcccctcacacagcgggacattatccagccgagaacaggagccaggctctggcccgggccacggcgcaatgcccctggaggacgtcacgctcagtgagagacgccagacacagaaggacacacagcgtggaatcccattgctatgaaatgtccaggacaggcccatccacagagacaggaggcggatgtgtggggttggagctggggaggggacagggagtgacggctggtggggacagggcttctttcggggctgacagaatgttctggaattcgacagagatggttgcacggctcggatgctgaacacccctgagtcgtgccctctagagggaaaggcacggcacgtgaaccgggtctcaattttcaaatcagaaaagaatctggcaaaggaggcaaggccagcgacccacggcggcagccacacacctggctcagggctcccgtgagaccacgccacgcaggtgcagctcactctcggcggccacgatgggctgcccgttctgcaggtggtggtcgatcaggtggctgatgctctcaaacagcacgtccttcgtccgtacctgcgggaca

SEQ ID NO: 272553 - DNA, 876 bp, Homo sapiens
  chr19:424489-425365
  hypo
tcgtcccagcaggccgggattcccacagagaaaagacgaggcctcccctctcagactaaggagtcccatggggcgagggtctggcttcccctgttgactggagggcctcacagacggggccgcagcctcccaccacactgaccattctttcaaggaatgacgaacctcctcccttcagaccgggggttccgacagaggcaggtgggttacccccgagagagtggagcttctcacagagcgggggccagcggcattcccaaccagactgggggttcagcagggaggccccgggagatggggtcctgtaggaggggctgggcctcacccattacactgctcggccgcattcgctagagagaatgggcctcccctgtcagactggccccttttaaggcagagtccaggacacccccatcagacaaggcctccgacaggagacagactgggcttccccgtcccacccgtcgacttgaaggatctcacggggagaagggagcctcccccatcagaccagggaatcccgtagggagtgggggtggggttgtgcctcccccatcagacaacacggccacacgcgatgacggccgccccccaggctgccacatacgcatgtcaaacagatcctttttggggctgtcctccggctcgggggcgtccagaccctgggtgttgacatacaggtgctcctcgtggtccggggggccccgggcgtccgcctgcacgtagccgtcccccggtggagctggggagtgtaaagaggggcagggggtcagctgggagccaggcgaggggctcgcagggagcaaggcggggtcccacgaggagctcccccggccaccacctgtgctgctggctgcagggcggatgctgctctgg

SEQ ID NO: 272554 - DNA, 37 bp, Homo sapiens; identical to SEQ ID NO: 218723
  chr19:434176-434213
  hypo

SEQ ID NO: 272555 - DNA, 36 bp, Homo sapiens
  chr19:434753-434789
  hypo
ggagtccactagcccgcccagcggcggctccttccc

SEQ ID NO: 272556 - DNA, 278 bp, Homo sapiens
  chr19:435182-435460
  hypo
aaccaggacatcaccggtcagggtggcaactctctgggatcaaagcgcccccgccctctggccccgatggcactggcaggaattgatcctgcaggtgctcctcagcaagcacggccccgagagccagaggggtgcaccccacctggcccacagtcgctgctgggataaattatgaagcagcctacggaaggcagaggcagctctggaggcaggcgaggagcccgtctcagcttcggagcgtgctgagcaacgtgcatcaagcacgctgtccccgtgca

SEQ ID NO: 272557 - DNA, 469 bp, Homo sapiens
  chr19:436223-436692
  hypo
gaaagcttggcccacggtgctgatgatgctctgtgccaggccctcacagcactccaggatgtggcaggctgcgggcacgttggtcatgcagcctccgagccacacggccgtgccccccagccacaggacccccaccggcctccccgggggcctcacctctctggttgatggggtccttggcgacgtaggccacgtaatccgtcatgtcctgggggcggggaggggccagctggacctgcctgggccccccaccgggattcccagctgcccaccccagcaatgcagagagatggggcagtggatgtgggcacagggtacgttaggcgggctctggggaaggatgagagggtctcgcggccggaggggggcggcagggctgcaggtccacccccatccctggcctcaccgtgtctccgcctgacgcgaaggagatggacggcatgtggtggttggcgatgacctgtggcgg

SEQ ID NO: 272558 - DNA, 34 bp, Homo sapiens
  chr19:449972-450006
  hypo
tctttgacaccctgcgccacgctgaccagtgccg

SEQ ID NO: 272559 - DNA, 220 bp, Homo sapiens
  chr19:450886-451106
  hypo
cacatcatatttcagcgtgtggatggccatgccgtggccatgtcatatttcagcgtgtggatggccataccatagccacgtcatatttcagtgtgtggatggccacgccatggctgtgccgtatttcagcgtgtggatggccacgccgtggccacatcatatttcagcgtgtggatggccacgccgtggccacgtcgtattttagcgtgtggatggccat

SEQ ID NO: 272560 - DNA, 509 bp, Homo sapiens; identical to SEQ ID NO: 218724
  chr19:453563-454072
  hypo

SEQ ID NO: 272561 - DNA, 355 bp, Homo sapiens
  chr19:455241-455596
  hypo
gcgcccagcagctccgagtcaggtctgtggtgacagccctaaaggcatcgcgagtgccatgacccagggaagggctctcgggcagctctttgacctgctgtgcctcagctgcctcatctataaaatgggtggaagccgcagggttgtggggagaatggaacccagggctcctcggaactcagcaccgcgcaggactcggcgtgagcctcggcgccggaggtactgcatttgcaccgatgctgcccacggcgctcggacgcggggcccacgccgctgattatccggcgtccaacttctctcccacacaccgggatcgctgcaggattctggggggttctgcgatgccggctgagtc

SEQ ID NO: 272562 - DNA, 120 bp, Homo sapiens
  chr19:477567-477687
  hypo
cagagcgagactccacgtcaaaatcaaaaaaaagagaaaaaaagaacgcctcctccccatcccaaaaaagctggtctttatttttatttttatttgtgtatttatttatttttgacacgg

SEQ ID NO: 272563 - DNA, 33 bp, Homo sapiens
  chr19:477807-477840
  hypo
acgcgccacgccacggcacgcaggccctgcacg

SEQ ID NO: 272564 - DNA, 34 bp, Homo sapiens
  chr19:484683-484717
  hypo
aggaccgcacctggcgaggcggaggagcgaggag

SEQ ID NO: 272565 - DNA, 275 bp, Homo sapiens
  chr19:485119-485394
  hypo
gcaacctcaacccagcggaggaccctgctgacctgcttagttgtttatggagggtcattgccgtgctctaccacgtaacacacgtacacacacacacacaggtgcacgtttacaccacgtgggtgcgcacgatgaggcacacacaggcaggcgcgcacacacacgcgtgctcacataggaacacgaagaggcaggagccgggcgtgcccgagccccgtggcgccctgggcatcccaaacaccgcctgcccagaacaggtgcgcagtgagtgcctg

SEQ ID NO: 272566 - DNA, 116 bp, Homo sapiens
  chr19:487188-487304
  hypo
cctgagcccactgtgaagttcgcggcgatctgtgagctggttggctcatgttggcagccacgatgggagtatttacaacacagggggcggcgtgcgctgcaagtgagggccttttc

SEQ ID NO: 272567 - DNA, 332 bp, Homo sapiens
  chr19:491285-491617
  hypo
aggcttttaaagaaacagtttagtgccctttatggtgtttgcgacgtcgtgtaaacaccagctctctagtctcaaacccggcgagggcggttcatagacaatttcagtctctcgacgcgacgccgtgtggcttgtgcccttctagccacctagaccctcgggagaggcctgtgcggctcctggctgggcccccgtcttcaaagcagcttttgagtggccctttgacccgtgagacagggccgtggaagctggggtgagcctggagatgcccccgggagcaccaaggcgtcagagcagctgaccagggccccaggcctcgccgcttccccagg

SEQ ID NO: 272568 - DNA, 217 bp, Homo sapiens
  chr19:529761-529978
  hypo
tggaagtgaccgctcggcccagagctctttcttggatccctccctccctctccactcctgatgctgttttcctttccccagacaggtttgcctgctggtcctcttccggggaccagactcatgaagccggggccaggtgttggggcacctgcgggacagagtggccctggtcccagactggtttttgtttttggttttttttttttttgagacggag

SEQ ID NO: 272569 - DNA, 337 bp, Homo sapiens
  chr19:530218-530555
  hypo
tcacaggcgtgagccaccgtgcccggcctgtatgttgatgcagctgtgtgtacccagggcatagcaacaatgccactggcacagtccgagggcagggccacccgtcacgggcacgactcaggggaggctgggctgccccgtcctcaccacggccagttctcccgaccaagcttcacagcaaggagcatgtgggtgtctgggcagccactgagccaggtcagaagtcaggtggggtcacagtgatgcccggaatcagctggggtcaagactcaggtgggctgggcgcggtggctcatgcctataatcccagcatttgggaggccgacgcagacggatc

SEQ ID NO: 272570 - DNA, 81 bp, Homo sapiens; identical to SEQ ID NO: 218727
  chr19:536230-536311
  hypo

SEQ ID NO: 272571 - DNA, 82 bp, Homo sapiens
  chr19:540964-541046
  hypo
tcctttgctcctgcgctgaggaaggcttttgccccccagtggggcagcatgggccctccctgttgccggcatcgttattttc

SEQ ID NO: 272572 - DNA, 344 bp, Homo sapiens
  chr19:541697-542041
  hypo
ttctgggttttcacgtgcttcagagaagaggggctgccccaccgccactcacgtcactcggggctcggtggacgggcccagggtgggagcggccggcccacctgtcccctcgggaggggagctgagcccgacttctaccggggtcccccagcttccggactggccgcaccccggaggagccacgggggcgctgctgggaacgtgggcggggggccgtttcctgacactaccagcctgggaggcccaggtgtagcggtccgaggggcccggtcctgcctgtcagctccaggtcctggagccacgtccagcacagagtggacggattcaccgtggccgactctttt

SEQ ID NO: 272573 - DNA, 387 bp, Homo sapiens
  chr19:542336-542723
  hypo
accaggtgcatctagtgggacgggagctgcctctgcaggcatccagcaaagcttcgtcgcgggtccacagccgcctgggcgttgatctcagcgtctcagggctcccaggaccacagatgcccccgatcagcactccggcggctccagctccgtccaggcacaccctcggggtggggagccgtggccctgggcacacagggcaggcacctcacgtcctggtgtcaggaagtccccagcatcgttttattacatgtcatggaggaaagctcggagctcccatgccctcccggggcaccgccttccaggaacctgcctgcgttccgcttctgggcacccggaaagtcgctcagtggctgattcagggtcgaggagctgtgaggatgaggt

SEQ ID NO: 272574 - DNA, 39 bp, Homo sapiens
  chr19:546049-546088
  hypo
gattataggcgtgagccactgcaccggcccgcaagcggg

SEQ ID NO: 272575 - DNA, 807 bp, Homo sapiens
  chr19:549179-549986
  hypo
tgcaaggtgaggggcgcccgggtggggctgggggaatgaggctggcgggagggccggggccagggcagccgccgggcaggttcctggctctcccgttctctggggagtcctgtcaggggctggggggcggggaagcactggcaggggtcccgtttctcaggtgcagaaactgaggctcagacaggtttagcaacctgcgcaagaccacacagccgggaagcggcagagctgtgacttctgctccagccaagacggtccggcgggggaagaaggagcagggttcacagggccagcgggagatggggaggggacacgcgtgggccgggagcagcccctgtgtctccttgagcctggggataacaggcctggccctgctcccctcggcgggccctgctcccctcgtcccctcagcaggtgcagaggctgagctgcggtgtgtcgtccctgcagggtgactcgggcgggcccctggtgtgtggcaaaggccgggtgttggccagagtcctgtccttcagctccagggtctgcactgacatcttcaagcctcccgtggccaccgctgtggcgccttacgtgtcctggatcaggaaggtcaccggccgatcggcctgatgccctggggtgatggggaccccctcgctgtctccacaggacccttcccctccaggggtgcagtggggtgggtgaggacgggtgggagggacagggagggaccaataaatcataatgaagaaacgctcagagcccgcctgagtcccagcccacctctgtccatgctggctgtggggcttccgacaaacctgtttc

SEQ ID NO: 272576 - DNA, 120 bp, Homo sapiens
  chr19:557934-558054
  hypo
attacaggcgtgagccaccacgcctggccccttattgaacttgatggtttctccttcgtatctcagaagtcacaagctggaggatttaggtttgaagaatcacgatgccaaggtcaggcg

SEQ ID NO: 272577 - DNA, 45 bp, Homo sapiens
  chr19:559344-559389
  hypo
tggcccctcggttacgcacatcaccctatttatttatttagagac

SEQ ID NO: 272578 - DNA, 300 bp, Homo sapiens
  chr19:559629-559929
  hypo
gtgctgggatgacaggcgtgagtcaccgcgcctcatcccctcctcagccccccagcacccacacgtcccctccctgtctctgtggatgggcctgtcctggacatttcatagacatgggatcacacagtgtgtgtccttctgtgtctggcgtctctcactgagtgcgacttcctcaaggtgcatccgcgccgtgggctgcgtccgagcctcgctcctgttcacggctgagtcgtgtcccattgcgtggatgggccatgctgtgtctgtccattcattctctgtttttgtttgtttgtttgt

SEQ ID NO: 272579 - DNA, 37 bp, Homo sapiens
  chr19:561123-561160
  hypo
atgagccaccgtgcccggccttcaaatttctttaaca

SEQ ID NO: 272580 - DNA, 59 bp, Homo sapiens
  chr19:562309-562368
  hypo
ctgtggatatctttacggggtatatgaaccagacaggcatcaaacgaaactagctgggg

SEQ ID NO: 272581 - DNA, 861 bp, Homo sapiens
  chr19:581312-582173
  hypo
aggccctcatgaacggctccgagagcaggttcttcgtgagttcctcgcagggccggtcagagctacacattgagaacctgaacatggaggccgaccccggccagtaccggtgcaacggcaccagctccaagggctccgaccaggccatcatcacgctccgcgtgcgcagccacctggccgccctctggcccttcctgggcatcgtggctgaggtgctggtgctggtcaccatcatcttcatctacgagaagcgccggaagcccgaggacgtcctggatggtgagccgtctgccctcctgcccacatgccctgctctcggggtggcccagggccactcctggtccgtccctgccagccccaccgctgacccagagcttggaactgaggagccccaggcagggagttgatgggaccccgaaagaaagtgtgggatggagggtctagccccgggcagctgcggctcagtgggcagcgggaccccgggaggaggaggcggcacctccgccccacagcctcacccggcccttccctcccgctcacttggctgcaagccagtgtcctccgtggtgagccggcccttgctgctctgcatgatcaggctcgggaacctgaggtcagccatgctgtgctccggcagcccctgcctgcctcctcgcggagcccttctgccccttgggctgcgtgtgccggggcgaggcctgtgtggggcctgtgatggcagctcctggaaaacgctgtggggcaggggtgaggcccacgaggccatggggacagctcaccatggggagcacacctgcaggtggggagggctgcctttccccacagcactcagaagatgcacgtggccggggctgatgagct

SEQ ID NO: 272582 - DNA, 126 bp, Homo sapiens
  chr19:585310-585436
  hypo
ggtggatgtccaccccgtcggtgggtgcccggcgcggaggggtgcggaggtggatgtccgccccgtcggtgggtgcccggcgcggaggggtgcggaggtggatgtccgccccgtcggtgggtgccc

SEQ ID NO: 272583 - DNA, 434 bp, Homo sapiens
  chr19:592198-592632
  hypo
agggagctgtagaacgtgcccactcccctccgtcccctccagcatgaccttcgacagagatgggtgcaccgcagcgtgggggctggcaggtggaggcccacaccagccactccctcccctgggcagctccagcgaccccctggctgcagaggggcggtcggtggcctggggggcaggtgggcagatggctgatcccggggcttggggggaaggccggtggtaggagtgaagccctctcatccttccaccctccttgggcgtggtcgcctggaggcctgggcaggctgtggccccgctctgtgctctgaggcatagagggctcagaggcccctgtgtggaccaagtgcagccccaccccggcagatgagtgttgaagtggaactgagcaggcagggaatggggttagcggggcctgtcttcgggactaggggagt

SEQ ID NO: 272584 - DNA, 145 bp, Homo sapiens
  chr19:600909-601054
  hypo
cagaaaccgcaccccgcacatgccacttctcacccctccaacccccggcccccggcacccatgcatccccttcctgtctctggattggcctgtcctggacatttcgtagaaatgggctcacacggccgggcgcagtggctcaggc

SEQ ID NO: 272585 - DNA, 220 bp, Homo sapiens
  chr19:601332-601552
  hypo
tctctcactgaacgtgacgtcctcaaggggcatctgcgccgtggcctgggtcagagcctcactccttttcgtggctgagtcgtgttccatggtggacgggtcgcgccgtgtttgtccctccgtttggtgatgggcacctgggctgcctctgcctttttgctactgtggatcgagctggtgtgaacacagcggagtggtcgtcgtccgcagtcgagctggt

SEQ ID NO: 272586 - DNA, 147 bp, Homo sapiens
  chr19:603408-603555
  hypo
tcccgcaggctcctcggaggaggcactggctcgaggtgtgggcgcccctcgtcccccaaggaagagtgcccggggctggtcccgcaggtgccccggggaggcaccggcctgaggtgtgggcaccctcgcccccaggttctactggga

SEQ ID NO: 272587 - DNA, 1321 bp, Homo sapiens
  chr19:617541-618862
  hypo
aggtagttggggtcagggagcgccttactcagagcagaaccgcttgaccaggaatctggacaggtcctgcaggatgggctcgctgtgcaagcggacaaactgctcccggcacacctgggcaggagtcagaggatccccaggggtgatcaggcaggctctgggcaccacccctacccaacgccccagtgtgggggccccacccatgggtggactgaggctcagactacgggggcacctggttcatgacggagacatcagctgcgtgagtccagtaacagtcgtgcacagagacgaaggtcaggcccttcctgtggcagagcggaggactcctgaagggaggggagctcacagggccacccagtgaccagcatcctggccctgcgctcagccccctccacttgaggtccagggaagcccaccctcctgcaggcctcgccccacccctcgccccgcccctccccaaacatcctgggttaggtatcagtacagggggaggaaatgttcccagaagcctcctcgccccacccctgccgccccccacgctgctgtgggagcctcagctccgagggcggctacgaggtcccctcctgccagggccaccaccccgcatcctgagcattcccagctcccgtggccggtagattctgctggaacgacctccacgtgctccagatctaaccacacatcgcggtgccaagaaatgcccagcaggaaggggcagcgcccatgctcggctctccctgtcgggccacaggaggggagctgccaggaccacctacattcggggcacacagcctcagggcctctacacaggccccacagacacagcagatccactctgcccagtccctgcccccagctagacccagccttgccagctgtgccctgctagccagaagacgcccctgggaggcgagcggcacccacgccgtccggagacgcccacctgtagcagtgcagggcggtgagcatcatgtgggaggagtccagcgagtggatgaagttgggcgggaagccgttcttctgcttacgtgtgttgggctttctgaggacggaacaggtgccggtgggggcggcccagggacacccctaactggccgctgtctccaccgtggctgctctccagacccccggccaggccccagcccgggccccccactcaccggctgatgtctccgttgtgggtgtaggtgatgctctgaattccacctcctatttgctaaaaaggggaaggggccggtgagtcccacccgaggcccagcacggtggtggtacattgaggtggtggtacactggggtagtggcacgctaggatggtggc

SEQ ID NO: 272588 - DNA, 620 bp, Homo sapiens; identical to SEQ ID NO: 218734
  chr19:619067-619687
  hypo

SEQ ID NO: 272589 - DNA, 63 bp, Homo sapiens; identical to SEQ ID NO: 218735
  chr19:623406-623469
  hypo

SEQ ID NO: 272590 - DNA, 275 bp, Homo sapiens
  chr19:623968-624243
  hypo
aaataacaactaaagcctagcgctttgagaatcaaagacgcacgtccacataaaagcttgtacacaaacgttcacagctgcatgactcgcagtcgataagtagaaacagcccaacgtcccataaacggacgaacagacgggcacggcgcggccatccacgcaccggagcatgactcagccctgacccaggtcgcctcccggaggcaccatgaggacgtcacgctcagtgggagatgccaaacacaaaaggtctcgcagtgtgtggtcccatttct

SEQ ID NO: 272591 - DNA, 308 bp, Homo sapiens
  chr19:629529-629837
  hypo
ctgcactcacctgccgcgcccagccaagcatcacggcgttgtacatgtccagcgtgagcagcttccgcttctgccgctggccgtggtggacgaccagcaggtggtgggcgaggggcagctggtcagtgagcaggcagcacttgaagaaggccaggagcctctgctgctgacctgagagctgggcctgcgagtgctgccccgacggggcctgctccacatcgaggctcagcttcccaggggcctcctgcagcagccgggccagctgctcctcccaggggctctcgggggcctggcgcgtgcagtcctcc

SEQ ID NO: 272592 - DNA, 102 bp, Homo sapiens
  chr19:634362-634464
  hypo
gaggagcagggcgggagctttagaatggaacctggaaggtgtgcccacctgtgtcgttcagccggggcagcaggccagaggcgggagcgcctgctgtggggc

SEQ ID NO: 272593 - DNA, 103 bp, Homo sapiens
  chr19:635350-635453
  hypo
cccagaacgaggactcgacctcactctggaagggcctggcagcctccttacagcacattccagacgctgctgccgacgcctgcgtgagcgcactgatgccacc

SEQ ID NO: 272594 - DNA, 326 bp, Homo sapiens
  chr19:638277-638603
  hypo
taataataaaataaaatcactgaactgtacagtgtaagtgggtgaattgtgtggtatatgagtgatgtttccgaggtgtcattaaagaaactcagacgcctggggtggggccagtctcaccgctgtgggtcccatccccatcatttctcacaaggccctcagatcacccttccgcggtggggggcggacactctaagaagggaagacctgggctcctgctggcgagaaggcggtggacatttcttcagtgtctggtgccgcgccctctgcccagcgtgctccgtggagggtctcattgtcttcctccagacgtctctttactggcc

SEQ ID NO: 272595 - DNA, 322 bp, Homo sapiens
  chr19:640785-641107
  hypo
gagtcggtgtccccgccgggcggggggcactgggaagggggcccgggcccgctggctgccgcctgaatcaccaccatcagggcaggtaatcaccccctgtccttcccaccgctttcatctgggcgccaaggccctcattaggccgcacgtgacgagggcggacaggggactggctgggccggtccatccatggcgggcatggccaggcggggtggcctcgggccggggcagaggcctggctccgctgcctgacctggaacagtctctgcctctctccaagcctcggtttccccagctggacggtgatgggggtgagggctag

SEQ ID NO: 272596 - DNA, 718 bp, Homo sapiens
  chr19:646720-647438
  hypo
cacgaccccagagggcggccaccaggagggcccgccacgcgcgaccccagagggcggccaccaggagggcccgccacggcgttgcggcagcagcccagaaggtgccctgcgcacggtccggacaggtgggatccgagttacctggccaagggggctgacgcagacacgtcgcgggacacagtgaagagtgtggtgcagagcggagggcgggagtctttggagaacaggtaggggcgtggggcacgcgcctcccacgcgcaggagccgtctaccgtggagggacacgggtggtcctgctggaggctcctctccgttagctgtctccatcgtctgattcttggatcccaggatggtgggatcatcagcaactgagatgaacccactgccccggccccctgagcccgcaggtccccacgccttgccagctgtgcccgagctggctgcaccccgggccaggcatccagcaaccttgagcagtggggtccggcttttcagaaggggccaggaacccgcgtggctgaggtgtgaccgaagcgtggggcagaggcgctgggccctggcgctttaacgctggtgtttctggttttaaatttcacgacccagtgacactgccaccctgctacctcgccagcagccctcctgggcttaacttcgggagagcagttttgctagccggccctgggtgccaagccctgcaggaggcgcagacccctggaga

SEQ ID NO: 272597 - DNA, 52 bp, Homo sapiens; identical to SEQ ID NO: 218740
  chr19:647728-647780
  hypo

SEQ ID NO: 272598 - DNA, 130 bp, Homo sapiens; identical to SEQ ID NO: 218741
  chr19:651271-651401
  hypo

SEQ ID NO: 272599 - DNA, 506 bp, Homo sapiens
  chr19:688902-689408
  hypo
acagggactttaagcgtctcctccacacagggcaggggcccgagaggcacattcattccatttcagcataaactttgagcgcctgctgtgtgccataaatggccataaaggtgataaaaaatccctgcccgttaggttcagaggaagcgggaatgaggaagcgggtggtccaggggttagcaggtgacaagcaggtgacgacggggccggaagggtggtccaggggttagcaggtgacgacggtgctagaagggtggtccaggggttagcaggtgacgacggggctggaagggtggtccacaggttagcaggtgacgacggggtggtccaggggttagcaggagatgacggggccggaagggtggtccaggggttagcaggtgatgacggggctggaacagggttgcagggagggggtatgtggtccagggcggcctcctgggaaggtaacatttgagcaaagacttgacaggcgtgaggggaaaggctcgcggtgtctggggaac

SEQ ID NO: 272600 - DNA, 49 bp, Homo sapiens
  chr19:696840-696889
  hypo
ttcacctttcagtgggagcgttcttagtggcaaagttcaggtcgtaaat

SEQ ID NO: 272601 - DNA, 172 bp, Homo sapiens; identical to SEQ ID NO: 218742
  chr19:731146-731318
  hypo

SEQ ID NO: 272602 - DNA, 758 bp, Homo sapiens
  chr19:736034-736792
  hypo
cacgcccctgaggacggttgacggctcccccatgatgaaggcaggtgggttggcccccaggctctgggccccagatccagccgctgtcagggaccaagtctcggtccggggggccgggtggggcgggggcgacaccgacctgctctccgcagcgtctgacggggccgtggttatgggggtggcagctggaccgaggccgaggctccgagcctggggtgggggccccctctgctttgttgccctggtcccacgccggcccacgcttccccgagaagacgggccccacgcatggcggctctaaccgacgcgacctcacggctttcattccaccctaatctcacggctccctcctggggcccgctgggggtggcgctcacgcctgaacatgctcgctgcaaatcttacctgctccagtcctcgggcagtaggactggctgccccgggagaaagtgggtgccccgtccctggaggcaaccaagccaggtccccagcaccgctgcgcttccgagaagcaggggaaggtgggggttgacgctgagtgccacacggtgctcaagtcaggctcgaacccctggtctgccgccttgaatttctccgcctgccagaggggtgggacctcagtacgccatcctggggcccggcacaggacaggagcccaataatgagaaatcgtcgcagtgggcaaaaccactgctatgtgagtgagctggaacagcacagaaagaaggcagagggccgggcgtggtggctcacacctg

SEQ ID NO: 272603 - DNA, 37 bp, Homo sapiens; identical to SEQ ID NO: 218744
  chr19:737032-737069
  hypo

SEQ ID NO: 272604 - DNA, 206 bp, Homo sapiens
  chr19:739215-739421
  hypo
ttctgagtctaaatagatgacggcgtgtccaaccgttggctggaaggaggcgtcaagtcctgggagcttggatggtcggggcgggggctgtgggtctgcagactgagccccagtctccgccgtgaccccgggcaaggcaggatctctctgggattcacctgctcctctgagaaaccaggaatggtggggctcgagggctcacgttt

SEQ ID NO: 272605 - DNA, 41 bp, Homo sapiens
  chr19:741879-741920
  hypo
tctgtcgcccggcccgcagtgcagcgatgccatcacagctc

SEQ ID NO: 272606 - DNA, 41 bp, Homo sapiens
  chr19:741980-742021
  hypo
agaccacaggcatgagtcactgcacccggcctctttttctt

SEQ ID NO: 272607 - DNA, 277 bp, Homo sapiens
  chr19:746555-746832
  hypo
catgggttaccagaacgtggaggatgaggccgagaccaagaaggtgctgggccttcaagataccatcacggcggagctggtggtcatcgaagacgcggctgagcccaaggagcctgcaccacccaacggcagtgctgccgagcctcccacggaggccgcctccagggaagagaatcaggcggggcccgaggccaccaccagcgacccccaggacctcgacatgaagaagcaccgttgtaaatgctgctccatcatgtgagccggcccccgagacccc

SEQ ID NO: 272608 - DNA, 279 bp, Homo sapiens
  chr19:748210-748489
  hypo
gagccgcgagccttcgctgaagtgcccttgctataaccccctctgcttctggtgtgtgacgaggcccccgatgttcttgattttcccagagaagcaaataaacagcgtgaacagccccagttcctggagttcttgcctttcaacctggcgaggaaggcgtggccaggccagggggtggggcctgccggcctttgagccattaaagggaggctgagcagggttgcggtgtgctggcttcacctgcctgcacccgctcaccctgagcgccttggggtggtg

SEQ ID NO: 272609 - DNA, 269 bp, Homo sapiens
  chr19:752076-752345
  hypo
tcagacacttgctctgtcatcgctgtgtgacctcagatgagcaggttctcctctctgggtcccagctccctctctcgaaaaccggagtcgaaaacggttccaaggtgttgcaggaagagtctcaggacgccgaggtccttagccaccgccgggccttgcaggggccatcttccgtcctggggctcttcccccgagggcagcgccgctgcccaagaatgccggccatgagagccgccgtggatccaggggtttttttggccgacacagtg

SEQ ID NO: 272610 - DNA, 33 bp, Homo sapiens
  chr19:754570-754603
  hypo
gagctgagatcacgctaccgcagtccagcctgt

SEQ ID NO: 272611 - DNA, 94 bp, Homo sapiens; identical to SEQ ID NO: 218746
  chr19:758091-758185
  hypo

SEQ ID NO: 272612 - DNA, 56 bp, Homo sapiens
  chr19:762948-763004
  hypo
ggcatgagccactatcgcctgacccctctttgagctgaatccgaaatgccaaatac

SEQ ID NO: 272613 - DNA, 85 bp, Homo sapiens
  chr19:776817-776902
  hypo
accaaaccattccacgccgtggtctctacccagagaaaggaaaacacaggtccatacgcgtgttcgaggcggcatgattcataac

SEQ ID NO: 272614 - DNA, 359 bp, Homo sapiens
  chr19:804894-805253
  hypo
ctgctgcagtatgcggaccccgtgagcgcccagcacgccaagctggtgagtggggctcccgggacggcgcccgccctggccctggcccggcgacgtctcacggtccctctcccctcagtcgctggacgggcagaacatctacaacgcctgctgcacgctgcgcatcgacttttccaagctcaccagcctcaacgtcaagtacaacaatgacaagagccgtgactacacacgcccagacctgccttccggggacagccagccctcgctggaccagaccatggccgcggccttcggtaagaggctgcccgacgcggcgccagtgtgcagagtggtctattagggccgctcagtccggagcc

SEQ ID NO: 272615 - DNA, 62 bp, Homo sapiens
  chr19:807308-807370
  hypo
tggctgaggtggccgcgagcggagctgcacgcgcgctcctggggggcgtggttgggatcggc

SEQ ID NO: 272616 - DNA, 319 bp, Homo sapiens
  chr19:813011-813330
  hypo
ggcgaccggtactgcgaggagtcggagctggcgctggacgacgacgccgtctcggccgccttggggcccggcgcgcccggagccttggacatggcgatgacctgcagcagccgcggagggttggccactgccgccccgctcttctcggccatcatgagccacttggcgcgcaccccggcgccgcttttgggggacaggccggcccccgtctgcgcgccctcctccgggatgtgcaccagcggcggcggccccgcgcgcggtgggaggatgacccgaggccccagccccggccgcgcctgcacggtggggtagagcgagg

SEQ ID NO: 272617 - DNA, 32 bp, Homo sapiens
  chr19:814134-814166
  hypo
gaccccttcgggacccacgtctatcccctcag

SEQ ID NO: 272618 - DNA, 271 bp, Homo sapiens
  chr19:814593-814864
  hypo
gagttgaagtacatctggggcatgggggttggggtcagggagggctccccacgggtcagcaagagggcctgggaagggcagtgaggggccggactcaccgacacatagaccgcggcgaaggctgacagcgtggcgtgctgggacgggaaggtcttcctgtaagaggcgtccagcgtgagccccgcccacctggggaccccagctccagtggcctctctgtgtctctgtttccccgcatgttcaccggggcggaagaaggctcccagtcagg

SEQ ID NO: 272619 - DNA, 485 bp, Homo sapiens
  chr19:868909-869394
  hypo
cctccgcaggtggtcgatcttgggctggcctggggccctggcgggagaggggagaacgtgagggaggcctgggcaccacgaggccaggttccggcaggggcatctgtccacaggcgggggtggagggaatggccggcctcacaccatctgccaggtgggcccagatgtctgtgaacagtgaggtgggaggtgcgggaccacctgagacaggcccagtaaagggggcgggaccccccacacggaggagggttggtctcccaggtgcctggggagcttgaggcttagagacccagtaaaggggacggggcccacacagggacgagggtcggtccgccacgtgcccggggagcctgaggtgcagggaaggtgcttgtgacgctcccatttgaggctggacagaagcaggtacatggggacttccacaccacctctgcccagacacccggcctggaggtgccgggacctctgaacgacaagattctggt

SEQ ID NO: 272620 - DNA, 96 bp, Homo sapiens
  chr19:869627-869723
  hypo
ccagggcgccttcccggaggtcccggagccaagccgggggtgccttccctggaggtcctggagccgagccggggccttccccggagcagggctgct

SEQ ID NO: 272621 - DNA, 460 bp, Homo sapiens
  chr19:870962-871422
  hypo
ggattcgggggtcccggggcaggacacggaggaaggagtcctgtgtttggggaccaatgcagggacacacgcacctggcgaggccgtcgagctgcagggtggcagcactgccaggcagcgtgggcgcccggccaaactgcagacgaaggggctgcttgggctgcaggcggctaaccaggccgtcgctggctggcagccagtccaggctggggataagcagctggctgggcagcaggcagcattcatccaccagcgcctcgtccggctcgctcgctgggccctcatcgcgacctgcggagagaggtggcggaagtctcagcacccctgactggggcaccgcccggccacccgggacgtgctgggagcccctccagttcaggagcaccaggtcagggccccagctctgtctgcctggctgggtgaccccggggttctctcaccaggtcggggccccggctct

SEQ ID NO: 272622 - DNA, 180 bp, Homo sapiens; identical to SEQ ID NO: 218752
  chr19:874508-874688
  hypo

SEQ ID NO: 272623 - DNA, 120 bp, Homo sapiens; identical to SEQ ID NO: 218753
  chr19:874808-874928
  hypo

SEQ ID NO: 272624 - DNA, 92 bp, Homo sapiens
  chr19:882615-882707
  hypo
ctgctggagcatgtgcggccagtggacaggccacgccacctcggctgctaaccgcagacacgtgggaaccaggagagcgcagctgaggcagc

SEQ ID NO: 272625 - DNA, 2888 bp, Homo sapiens
  chr19:883423-886311
  hypo
acgtggggcggtgcgtgaagagctgggcatggcggggaccaaagcctggcatggtgggcacgtggggcggtagggggagagatgggggagagatgggtgcggtggggactgtcccagtgacccccagctgccagggatgtgagacctgagaaaggctgtggcatgtgtgtgagacgtggctctcgggcgggtaacagctgggccagcaggtgaggacggctgcaggagacgaggaggagtgtcggagcccaggactgcccagtggcttggctgtgggcagatggtagacacagacgtgcccagcgggggcaccgggcagtgaaggtgcaggtctgtgcagccacacggggtggcgccaggtgctgctgcaggagccagcgcagcccaaactgcctggtgactcaccacgaggcccaggggaaggaatgaggcccaacaaggccctggggaccgggcgaaggaacgagccctgggagaaggaatggcagcagccctcttcacctgcctggtgactcactacaagccctgggggaaggaatggcagtggccctcttcacctttactgcctctgcggccacaatgggcagttgacataaccacctgcaggccccgggagccatcggggcctcttgacacgtgctcattagtggcttctgaggagcgcctgccccacctgccccacgtgcccccacgtctggccactccagggtccattagcgctaatcggcaaatgcctgtgctctcatctaccgggaaaacatctcccttctccagagcggaggccagcctaaaaaccaggcccgcagcctccgaggctctgaaaaccaagcggctgttctggtccccggtcatagcaggcgggcgtccctgcttcgctccagccccaggattttgtgccggaggtggggatgacgggcttggctccgtgggtgcggggggcccatcgggcggatagagatgggaatgggggccccagaagaggctgctggagaggtggggtggggtggggggcgtgttctcagcagcctcagctgacccgctgagccttggcttcctctccctgaaccaggttccggaggattccgtgcaccgcccctgcccggtctggcctgtcccctgctgcccgacggccccacccacagacccacgctccacagccgcccacacgcctgcagcccctcacggtgtccccgctggctgagcaacgacacctctcagcctcggcctcgcacagaatggtggcagccgccgcagcgggcgtggaaggatggaggagtctatacgcctaacacactcagaatgctggcaggcgcgcggtcacacccgagatcctagcactactggagatcgaggcgagacgatcgcttagggccggggttcaggaccaccctgggtgacacagcaagacctgcctccaaaataaaaaccaaccgcccccgagggcaggcccagggcctccgcagccggcgggagactcacccacgggggagatctgctggaagatgttgttcacggggagtccctccttgcgcagggaccagcactccacgatgctgctggtctggctggacgcgcacaaaagcacctgcgggggaggtgggggtgagggctgacccggcactgctgtggtggccacgccaccaccggagcctgagctgcgggaccctggggccacgcactgctgggcctgtctcttcagccacgcctgcccctcgggccctcctggattccagcccaggcctgtccccagagcccaacatccactcacaggaacgcaaatgtccccggatggtgccctcccacagggacagcaaagggacacagggaaccaagtcaggggcttcaaggagtttggggcgttactgattcctaattacaacaggaatccaggcgacctggtgtggtcggctcaacagtggcccccagaacatcccatcctcagccctaggaccggtggctgggccgcctctcacagagaagggacctgcgggtgggattcggttcgggacactgagacgggagagcacgttggggggggtccgggggccccagtgtcctcacagggtcctcaggagagaatgtgggaggttgagattcagagacaggaagaggctgcgctgtggccacgaagcgggaggaaggcgccccgaaccgagggattgggcgcctccagatgctgggaaaggcagaaaatgggttctcccctggagcccccgggagggaccggccctgcccacaccacggtttagcccgtggaggcccgcgcgggtctccacccccaggaccctgagaagcagtgcttcattccaagcctgccagcccacgtgatggcctgcgcccgttcacctgctccgacatgtcccgggccaggaacttgaggtgggtgatggcgggaaacttgtccttgcggttgaggtcggtggtgcagcgcatgaacagggagggcaggatctccgtgtcgatacggcacttctcgctcaccacgctcacgcacaccttgtagaactgcacgggcgacgcgctgctgccgtccgccgtggccaccacgatgttgccgccgccggtgaaggcgatgtcggccagggccacgcggccgcgcagccggcacaggctctcggtggacgtcagcacctgcccgctgggcttcagcagggacacggtgaccaggccgctgaccgtcaccgcgatccagccctccatgggcttgccgccgaacagcgtgagcgacggtgagaacttgactcgggagaacttctccccgaagctggaggcgcccgactgtggagaagggagggagggaggaggggccgctcaggctcatgggggctgccccatgacccccagaaacacgcgcacagaagaaccacgcagaagccaggagtgtgtgc

SEQ ID NO: 272626 - DNA, 153 bp, Homo sapiens
  chr19:891447-891600
  hypo
ggcacagccgggagacgcagcggagggtctgcgctggcccaggtgagtgatgatgggggcagcaagtggacactagctctctcccgaaggaagagcccgcagacaggcaagcggtggggcggctccctgtagccgaggcggggctgagtgaca

SEQ ID NO: 272627 - DNA, 508 bp, Homo sapiens
  chr19:898612-899120
  hypo
accaaccaaaacaaaaaaaaagagccacgtcccatgtgagctccgcgcctcagcagtcccctctgcctgggacccccccgtcctctactccccatcttgctgggacccctcctcttccgtgtcaggaccacagctccacacccaccaagctccaagccccgcacccccagccaaggccggatgttctgagcagaggcaggcatgggggctgcgtctcccacagagggaacagagggaggcatcgtccggttgccatggaaactgtcacctcggcaactccaggcggggcggcagagacaggtgtgagaggctcaggaccagatggggtgcctggggccggcggcgcctgcacagacgttcactacgggggtgagttctgagactgcgccccgttggaaaagtggagcgcaggggccagtagggggtctcgcctgaggtcccacgtgtggtatgtgggaggccttagagttaaatgcaaaccttccagacactgcgtccccccatctta

SEQ ID NO: 272628 - DNA, 532 bp, Homo sapiens
  chr19:899627-900159
  hypo
gcctggggggacacggagaagaaccgaagcagccgctcctcccaggtctccagcgtttcctggggagagcggcccggtggtcagggaactgcgggacctgtgggtggggggccagggaggtccagggcccccaggagcccacagcgctgggctcaaacatgacctctgacccaccacgtgaggctgcttaagtgtctctgaggccaccatgccacctcctgcctgtgccttccgtggaggaaactcctacacaccctgcagtgcccgccttcgttgcccccgccctcctactcagggccctggtgccgctgtctgtatcctgccctgtttcccctgacacgacctgcaccgggtgagaacctgtgcctgggaaacgggccttcaaaaaagaccaggcaggtagaaaagggaggcccggcaatcccccactcaccatggggatgcggctgcgcttgaggacggctcgcagacgccggctgatgcgctggaagcactcgcggggtgtataggcggggtcctctgcaggagtggg

SEQ ID NO: 272629 - DNA, 391 bp, Homo sapiens
  chr19:900863-901254
  hypo
ctccgcgccttgctcctgccctcatcctccaggtagcgaagaacccgctcctgctcctccccggagcggttcatgaaatcgttccagacctggaagagaggcagggaggcaggcttgccatgaaacactggggctgcgctgacatccccgggcaaatgggcacggtaaggccgccaagcacgtggacgcgctcctgcggtcacctctgtccactgaggggccgctgcttgtgtcgggccctgagctgagcgcagggaagcggggaaccggggtgggcccagctgtctcggggtgggggggattgaggtgaaacactcctgcaatcgttggagggttcccaaacgtgttgggcaggtgaatccaggagctcgaaggttccaggggtggggtg

SEQ ID NO: 272630 - DNA, 33 bp, Homo sapiens
  chr19:927379-927412
  hypo
cagccctgacctaggggggaatctgggatcccc

SEQ ID NO: 272631 - DNA, 50 bp, Homo sapiens
  chr19:927524-927574
  hypo
agtggcttcctttggcctcttccttctgtgcccccaaagagggggggctt

SEQ ID NO: 272632 - DNA, 329 bp, Homo sapiens; identical to SEQ ID NO: 218760
  chr19:932112-932441
  hypo

SEQ ID NO: 272633 - DNA, 71 bp, Homo sapiens; identical to SEQ ID NO: 218761
  chr19:932471-932542
  hypo

SEQ ID NO: 272634 - DNA, 587 bp, Homo sapiens
  chr19:938279-938866
  hypo
gctcagaggtgtaggaatgacggcactagccggtatctgttgcttcactgcgtgaagaaagtgactgagtgttttagatgggtcgtctcccagatcctcactggatcccaaggagctgccgttgaacctgttgtgcagacgagaaactgaggcatggggtgatcacatgacttgtgcacagtcgcccgggggacgtgtcagagctggaatttgacccccgggatgcacctgccagagaggacccagcggtgtgtggatggatggcccagggagctgctggtgggacggttttggggaagctcagctgcccctccgtttttctttttgtctggaatgaaagtggttagaccaggccagacctcagtgctgtcctcatatccaggcctccgggcctgacagctgggcgtgtgtgggcactggggcagggacggccaccagcagcctctcaggctcaaggccagacacacctcgctgggcccagccccagagaccgctgggtcctcaccacggtgcctgccaggcagctctcgggagtgaagcgagaccccagcaagaaacgggcatccggtttttggtctttttttggt

SEQ ID NO: 272635 - DNA, 275 bp, Homo sapiens
  chr19:939405-939680
  hypo
cgcgcccggcctctcgatacacttttggttccagaagtaacacttgacactcttcttgcagagaggaagaaaatggaacgtttacagggagccccgagtccctcccttgacctctagggcatgagccgcatgttctccaggcctttctctgcccactcacacccaggaatgtgacctgggaggtatctaacgtgtgatcttccgggcaggtcgggaggttcctcccgccgctgccttcgaggagctgtttatcttgggtgcgttcgcgtcgtaat

SEQ ID NO: 272636 - DNA, 499 bp, Homo sapiens
  chr19:941804-942303
  hypo
gtgtcaggggtggctgcaagcgtatgtgtgtgtgcacgtcgaggctggagagtgtgtgtccaaaagcgtgcctgcttgggctcgccacgtgtgcgcacgtgtgcccgtgacagacgaccttcctgtgtgcctgagcatttgggagcctcgtgctggaccctgaagcatgaggtcgcggtggggcctattaaccattagacccccggggctgctagagagtggcgctgtctgtcttggtcagcagcgcgcgtcggccgcggggcacagatcagcgcctcccctgcccgccatgggctctggagccagcctagccgatgatggagccccagtggccaccgagctatggacagggccgctgggggtgcacccccaccctctccgaccccgaggagctgccggcagagccctgtccactcttgcctcagtttccctgctggacacaaagggctgaagtccaggtcccttcgatggcccaaattacctgactgtcgatcctgac

SEQ ID NO: 272637 - DNA, 123 bp, Homo sapiens
  chr19:942912-943035
  hypo
agggtctctgaagatgttagtttcagtgaggtcctgcagcgtacggtggccccaaatcccatgccggtcggttgtcctctaagggggaggtcacacctgtgatccccgcgctttggaaggcca

SEQ ID NO: 272638 - DNA, 197 bp, Homo sapiens; identical to SEQ ID NO: 218765
  chr19:944444-944641
  hypo

SEQ ID NO: 272639 - DNA, 77 bp, Homo sapiens; identical to SEQ ID NO: 218766
  chr19:944821-944898
  hypo

SEQ ID NO: 272640 - DNA, 132 bp, Homo sapiens
  chr19:945357-945489
  hypo
tagagaggggacggcgtgtggcatggcccctgctgcctgacccagcccacctccgtctgctccctagcggggaggtgtccagggcggccccagcccacctccgtctgctccctgcagcgggtgggatggtgg

SEQ ID NO: 272641 - DNA, 510 bp, Homo sapiens
  chr19:945737-946247
  hypo
tgtggggacggcgtcgacatggccggggcaggcgtgttctggccccttgcactgcccggctcctgctgctggtgctgggctgcgtttctgttcagagaacctgggctgggagtgatgggaccgcagtctcccaccaggtgcctctttccaaatggacactcctgctgggcatgacacttctgaggctttctgggaccgtccaggtcccgtctgcagggaaccccaggacggagttaattgctgagtgcccagctctgggcaaagtgcttggaccctgcggttactccgagcccatttctcagcagggaaaaatgaggctcgcggaggcaggggcccggcgtccaggtgggagcatgagggcgtattgtgggtgggctggccggtctggggggcggggaccctgtacagaacgccccggccgcgtggagtggcaggttcgtcactgcctgggggaggagaacactgggtatttcatttttatttttttgttttttttacttttactttttc

SEQ ID NO: 272642 - DNA, 1013 bp, Homo sapiens
  chr19:955714-956727
  hypo
ggtccaggcagggtagaccccgtaataccgggtcagaatctcagaggagaggaccttccgctcgccctggaagggcccaaggtgtgctggcctctacgtgcggttcttagccggggggctgcgtaacgaaggacctcaaaccgcgggcgtaaaacaaacgaaacctgttctccctccgtcctggagcccagagtccaaaatcgaggcgtccgcagggctgcgctccctccaggggctgcaggaggagccttccgcctctcccagctcctgggggctccaggagtcccttgacatgtggccggcctctgtctctgtgcgaccgtctccagtgcccaccggccttcactgtgactttttctcaatttgatcacgtctgcaaaggccctttttccaaataacgtctcgttctgaggttctgggccgatgtgaatttgggtgggggatggcgttcaccccaggacagccccagcggtgaagtcctccccattccagtacctgctgcctcaggcgtttccctggcaagctcgtcctgtccccctctccgccctgtccccctctccgccctgcccggctcacttttgcagctgagaaaatcaaggttcaagtaacgagcatttattaggcaactgctgtgtgctcggctgattccagactctgggaacaaaacagactaaaccccagatacactcctagatccgtgactcggtgatggacggggtctcggaggaagaacgtggaggggagggggcggcagccgggccggggtcagaggacgaggccgggcgtgtggccatgtgtgcgtgcctgtgctcatgggacccaccggcccggccagccgggtctacctgagggccccacacccctcaggcagctgaaggggaaagggcctccccggccaccataaatcagcgcaggaatgcaggctggccagtctggcgctggccgggttggggcggagacaaagaccaggcagctggacctcgggcagcctcgaccacccagggcagaggtca

SEQ ID NO: 272643 - DNA, 226 bp, Homo sapiens
  chr19:957142-957368
  hypo
ccttgtaccccagacggagcctctttcccctctggaagacgttccggggcctggtgatcttcttcctccccagccaccaccctggcaggcagaggcggtcggtggctcatttcatagctggaggctgagactccaggctccaggtgcggggaagccagcaggagacaggaggaccgggatgggaagcagggcggggctctgggccaagtccccagcagcccccagg

SEQ ID NO: 272644 - DNA, 63 bp, Homo sapiens
  chr19:957398-957461
  hypo
gtttcctcacctgcaaagcagagccagttctcggaacaaatgcgctcccgtccgaccctcagg

SEQ ID NO: 272645 - DNA, 85 bp, Homo sapiens
  chr19:959193-959278
  hypo
ggagcccccagaagccgtgagaggcaggaaggttcctcccttggagacttcggagggaacgcaaccctgcagacatcttttgttt

SEQ ID NO: 272646 - DNA, 325 bp, Homo sapiens
  chr19:959518-959843
  hypo
cacccgcctcccaaggtgctgggattacaggtgtgagccgccaccctgaagagaagttggttttggacttctgggctccgggaccgcgggagaatagatttctgttgctttaagctgcaacgtgtggctgtaagggagttaaggatcgatttgagatgaggtggccctaaaaccagcaggctggtgtcctgagaagaggagagagagacggggagacggtcttgtggagacggaggcagagactggagcgctgcggccacaagccaggacgcaccttgatctggggttcccgggcccctggaccgggagaggacactgtcttgtc

SEQ ID NO: 272647 - DNA, 48 bp, Homo sapiens
  chr19:962810-962858
  hypo
ggcctgatgccgttacttttactttgcaaactctgaggcctaaactgg

SEQ ID NO: 272648 - DNA, 313 bp, Homo sapiens
  chr19:962888-963201
  hypo
ggcaggtttccgggccgatcctgcagctgaaacccggcgcggctcctctcgcccaggctgtaaagtgggtttcaggtgggatcgggtctgaggcccgtcttcctccaacctgggatctcctccattcactgggggttttgcaacctgggaagggcctggaagtggcggagggtggtgggaggtgtttctggaaggtcagacaccgggggttccgggggtagcaggcctcgaccaggcagagggccggctgctcactcagggctgcacccgctctccagccagtcacatcccagaacctcgatgtccacgtccc

SEQ ID NO: 272649 - DNA, 219 bp, Homo sapiens
  chr19:966707-966926
  hypo
cctggaacagctgcgggagaagctggagtctgcagagcctccggagaagaagatggccctggtggccgatgagcagcaacggctgatgcaacgtgcactccagcagaacttcctggccatggcggcccagctgcccatgagcattcggatcaacagccaaggtactgccctcgtgcccagacccgctgtgcttcctgcgtgtgtcacacagtgagggcc

SEQ ID NO: 272650 - DNA, 257 bp, Homo sapiens
  chr19:968535-968792
  hypo
ctcgcctctcccgccgccgtgaactcaggaccctgagttgcgcctggtcccacctgcttgaacctaggtgtgcgggcgagcagggcacggccaggggctttgcaggacaaacagtcaagactgatggagaggataccatcgttcacccggtaccacgctcagcccagagggggtcgtccacagatacatattcagtgtgacgttggatggttcacattcctagttttttgttttaatgagacggagtcttgcacaga

SEQ ID NO: 272651 - DNA, 81 bp, Homo sapiens; identical to SEQ ID NO: 218768
  chr19:994442-994523
  hypo

SEQ ID NO: 272652 - DNA, 573 bp, Homo sapiens
  chr19:1003209-1003782
  hypo
gcctgggaagacgtcggcctggccctgtgccgcactcaggaccccggcggcctggtggccctctggacaagccgggctggccggcccccacagctggtcctggacctaagccggcgggacacgggagatgcaggactgcgggcacgcctggccccgatggcggcgccagtggggggtgaagcaccggtacccgcggcggtcctcctcggctgtgacatcgcccgtgcccgtcgggtgctggaggccgtacctcccggcccccactggctgttggggacaccactgccgcccaaggccctgcccaccgcggggctgccaccagggctgctggcgctgggcgaggtggcacgacccccgctggaggccgccatccatgacattgtgcaactggtggcccgggcgctgggcagtgcggcccaggtgcagccgaagcgagccctcctccccgccccggtcaactgcggggacctgcagccggccgggcccgagtccccggggcgcttcttggcacggtgagtggggaccctgcttcccttaggagggtgtccaggccactgagtctgcactgctcat

SEQ ID NO: 272653 - DNA, 52 bp, Homo sapiens
  chr19:1004379-1004431
  hypo
ggggacaccaggagcgtccacgtttgtcctcatgatacggacaagagcgacc

SEQ ID NO: 272654 - DNA, 57 bp, Homo sapiens
  chr19:1004461-1004518
  hypo
tgagaggatggaggggtgtgaacttcgacacctgacaccccccccgccctgccccta

SEQ ID NO: 272655 - DNA, 1172 bp, Homo sapiens
  chr19:1004548-1005720
  hypo
gcacgggccccgtgtgggtgacaggcagctcccaggtacacatgtctcggcactttaaggtgtggagccttcgccgggacccacggggcgccccggcctgggccacggtgggcagctggcgggacggccagctggacttggaaccgggaggtgcctctgcacggcccccgcccccacagggtgcccaggtctggcccaagctgcgtgtggtaacgctgttggaacacccatttgtgtttgcccgtgatccagacgaagacgggcagtgcccagcggggcagctgtgcctggaccctggcaccaacgactcggccaccctggacgcactgttcgccgcgctggccaacggctcagcgccccgtgccctgcgcaagtgctgctacggctactgcattgacctgctggagcggctggcggaggacacgcccttcgacttcgagctgtacctcgtgggtgacggcaagtacggcgccctgcgggacggccgctggaccggcctggtcggggacctgctggccggccgggcccacatggcggtcaccagcttcagtatcaactccgcccgctcacaggtggtggacttcaccagccccttcttctccaccagcctgggcatcatggtgcgggcacgggacacggcctcacccatcggtgcctttatgtggcccctgcactggtccacgtggctgggcgtctttgcggccctgcacctcaccgcgctcttcctcaccgtgtacgagtggcgtagcccctacggcctcacgccacgtggccgcaaccgcagcaccgtcttctcctactcctcagccctcaacctgtgctacgccatcctcttcagacgcaccgtgtccagcaagacgcccaagtgccccacgggccgcctgctcatgaacctctgggccatcttctgcctgctggtgctgtccagctacacggccaacctggctgccgtcatggtcggggacaagaccttcgaggagctgtcggggatccacgaccccaaggtgggcggcctcggggggctgcgggtggccttggggggctagcggtggccccgggctgggctgtgtggggcaggggtggtcagctggacgtggaggacgtccactaggccaactctggtcccaagagacatttattcaattaatttatttatttaaagaaaaatagcc

SEQ ID NO: 272656 - DNA, 1098 bp, Homo sapiens
  chr19:1007203-1008301
  hypo
gacagagctgcctccgcctggggtgggaagagcgagtgggggcagatcaggagtggggtcatggacatgttagagtggggctcccgtgggacccccaggggagaggcagaggaggtggtgggataggcgtccagcccagggcgaggtccaggtggagatggacttgccggcgtttagaacagagggtctccacccggggtgatcctgccccccgccccaggggaccctggacagtgtgtgtctagagacagctgtggtggtcacgcctggggtgtgctctgggcatggagtgggtggaggccaggaatgcagcctcggcgccctgcagtgcccaggacggccccaccccggagaacggcgcgcccctcaatggtcaggggtcctgaggggcaggcagaggcgctgacggggtcccccgcgcagctgcaccacccggcgcagggcttccgcttcggcaccgtgtgggagagcagcgccgaggcgtacatcaagaagagcttccccgacatgcacgcacacatgcggcgccacagcgcgcccaccacgccccgcggcgtcgccatgctcacgtgagcccgggcgcggggtgaggcgggggcggggcgtggggtgggcggggcgatggctgacccccgcccccggccccagcaggagcgacccccccaagctcaacgccttcatcatggacaagtcgctcctggactacgaggtctccatcgacgccgactgcaaactgctgaccgtgggaaagcccttcgccattgagggtgagaggcacctgggcgaggcggggcgccggggtctctggggacctcctgggggcagtggggagccacggagggttcgaggtgggaaggggcgaaatcccacgtgtgcgggcagagttcccctggggctgtcccacctggccccaccgcctggccccgcgcccccaggctatgggatcggactgccccagaactcgccgctcacctccaacctgtccgagttcatcagccgctacaagtcctccggcttcatcgacctgctccacgacaagtggtacaagatggtgccttgcggcaagcgggtctttgcggttacagaggtggggcaggg

SEQ ID NO: 272657 - DNA, 370 bp, Homo sapiens
  chr19:1009749-1010119
  hypo
actggtttggccgccggcccactccatccccgagtgggactggaccacggccctggctgctgccactgatgttggcgcctgcaccccacgtccctatgcccgaggcgcaagctctgctctcccggggaccccaagcctggcgcacacgcggggagggcggggccatggagaaggcactgcagggagcaccaggcagagccgggctgaggccggccggcactagggcgcgaggccccaccccaagccggcctctcctccacacctccgccttgctcagagacctgcaccatgggaccccactccatcctcaggacggttcactgcagacctaccaagacccctccagaaccttccgcggaaccccaccccc

SEQ ID NO: 272658 - DNA, 173 bp, Homo sapiens
  chr19:1010992-1011165
  hypo
tgcccgcttgggccgaccccacagggcatcctccccggctgcagcctctcctgcctggaaaggcacggctggcctgccccctgcttgccgcccaggcctcacctggatgaagagccaggaggtgaccagggccaggctgctatactgcccattgaagcggtagtgataggcat

SEQ ID NO: 272659 - DNA, 360 bp, Homo sapiens
  chr19:1030008-1030368
  hypo
ttattctccctccagcgtttatctcccgctcccgctacacgacctgcccccatgcttatggccccctatacactttgccgtctgcctcagtgctgtctccgcggtcactagtggctggatagggacactcgaggtccccactggtgcacacccactgcccaggagcacacagcccattccccacggcggtgtctcagagcaccgaaggccaagaaagctggaatggccgggtgcagaaaggtggcagggaatcggtggcaaggagccaggtgcgtgactagaggcggtcagcctcgggggcagctccttcgggagttgctaagaagcaggatgggggccgggcgcggtggctcacacctg

SEQ ID NO: 272660 - DNA, 123 bp, Homo sapiens; identical to SEQ ID NO: 218773
  chr19:1032230-1032353
  hypo

SEQ ID NO: 272661 - DNA, 113 bp, Homo sapiens; identical to SEQ ID NO: 218774
  chr19:1032383-1032496
  hypo

SEQ ID NO: 272662 - DNA, 78 bp, Homo sapiens
  chr19:1033554-1033632
  hypo
aggagaagaatcagacgaatgttgagtgtctagtgatcttcaaacccagaccgggagcgtgggtgggacagtggtgta

SEQ ID NO: 272663 - DNA, 35 bp, Homo sapiens; identical to SEQ ID NO: 218775
  chr19:1035214-1035249
  hypo

SEQ ID NO: 272664 - DNA, 257 bp, Homo sapiens; identical to SEQ ID NO: 218776
  chr19:1047460-1047717
  hypo

SEQ ID NO: 272665 - DNA, 168 bp, Homo sapiens
  chr19:1047747-1047915
  hypo
ggtggcttattcccttggagagaaggcggggcttcttggcacacgcatgcaggtggctgcattggaggggcggggcctgaggcaggtgggcggggtttctgggccgcctcatacctggacgccctgattccaggtgtatggccagaagctggcacagtcgccgggcgc

SEQ ID NO: 272666 - DNA, 181 bp, Homo sapiens; identical to SEQ ID NO: 218778
  chr19:1048856-1049037
  hypo

SEQ ID NO: 272667 - DNA, 212 bp, Homo sapiens
  chr19:1050963-1051175
  hypo
tcatcctgggccacgacgtccgctccagcatggccgccatccggccccacctgggcgtctgtcctcagtacaacgtgctgtttgacatgtgcgtctcggcaggcccagagtgcagcggtgggaagggactggacgccctctgggactctgcctgccatgtgggtcactctgctctgtgcactggccgcaggctgaccgtggacgagcacgtc

SEQ ID NO: 272668 - DNA, 178 bp, Homo sapiens
  chr19:1051443-1051621
  hypo
ccaggtgggatgcaacggaagctgtccgtggccattgcctttgtgggcggctcccaagttgttatcctggacgagcctacggctggcgtggatcctgcttcccgccgcggtatttgggagctgctgctcaaataccgagaaggtaagagctggggattctgctcgaggggccagaaaa

SEQ ID NO: 272669 - DNA, 261 bp, Homo sapiens
  chr19:1055085-1055346
  hypo
ttgtctgcaggttctcggcaccagaagttcctgctgaagtggccaaggtcttggccagtggcaactggaccccagagtctccatccccagcctgccagtgtagccggcccggtgcccggcgcctgctgcccgactgcccggctgcagctggtggtccccctccgccccaggcagtgaccggctctggggaagtggttcagaacctgacaggccggaacctgtctgacttcctggtcaagacctacccgcgcctggtgcgcc

SEQ ID NO: 272670 - DNA, 480 bp, Homo sapiens
  chr19:1077669-1078149
  hypo
ccaccgcgcccggccactcctcctgtttttccgctgccgattgttgtgcagggtcctctgcatgcccagctgggccatggggccttgctgagagagatgggggtggggaggaaaggaggagctggggagactgagtcccatccgaggatagggttggaactggcctcctggctcccacacccacagcaagaggcggagtccaacctgcgcaaggccaagcagggttacgtgcagcgctgcgaggaccacgacaaggctcgcttcctcgtggccaaggcggaggaggagcaggctggcagcgcgccgggagcaggcagcacggccaccaagaccctggacaagcggcggcggctggaggaggaggccaagaacaaggtgagggcgggtggaggcagggctggaggtccctggaggaggagatccaatgcttggtgtgacatttactacctccagacctttgtttttgtttttttgtttttt

SEQ ID NO: 272671 - DNA, 1049 bp, Homo sapiens
  chr19:1079728-1080777
  hypo
acctgcgtggccgacgcgaagacgcagaagcaggagctggaggataccaaggtgacggcgctgcggcagatccaggaggtcatccggcagagcgaccaaaccatcaagtcggtgcgtggggtgctccggccgcccgggcggggatggtggaccgggcggcctcctcctgacccctccgctctccggtgccgcccgcaggccacgatctcctactaccagatgatgcatatgcagacggcgccgctgcccgtgcacttccagatgctgtgtgagagcagcaagctgtatgacccaggccagcagtacgcctcccacgtgcgccagctgcagcgggaccaggagcccgatgtgcactacgactttgagccccacgtctccgccaacgcctggtaccgccacccagctgccctgtccccggcgcacaaggccctgcctgggagccgggcttccctctgtcgggggcatgaagatgaagctgtcttgccccccatcacctcccctccttttcccggtttcttccactaggtcccccgtcatgcgtgcccggaagagcagcttcaacgtgagtgatgtggcgcggccggaggctgccgggagccccccagaagaaggcgggtgcactgagggcacacctgccaaggaccacaggggtgagtgtccggcggggcccaggggcggacgctggctccctgcgacccaccctggcccttcaccagagacgcctctttctccagccgggcgaggacaccaggttcacaagtcatggccgctctcgatctcagactcggacagtgggctggaccccggccctggcgcaggtgagggaggctctctggcgggctggggtgtggagctgcctcctctcctgagcctcagggtttcatcacccaccggggtgatggagggggcccccctggctgggggagtctgaacagtcctgattcccgcccaggggactttaagaagttcgagcggacgtcatccagtggtaccatgtcgtccacggaggagctggtggacccagacggtggagccggggcttcagcctt

SEQ ID NO: 272672 - DNA, 419 bp, Homo sapiens
  chr19:1082938-1083357
  hypo
gccggcaggacggctcggagagcgaggcagtggcggtggccctggcaggtcggctgcgggagctcctgcgggacctgccgcctgagaaccgggcctcgctgcagtacctgctgcgtcacctacgcaggtgagtcccggcatatggagtggagggcgcggggtcccgggagccgctcagcacctggcccctgcccaccccgcaggatcgtggaggtggagcaggacaacaagatgacccccgggaacctgggcatcgtgttcgggcccacgctgcttcggccacggcccaccgaggccaccgtgtccctctcctccctggtggattatccccatcaggcccgcgtcatcgagactctcatcgtccactacggcctggtcttcgaggaggagccggaggagacccccgggggccaggtgag

SEQ ID NO: 272673 - DNA, 67 bp, Homo sapiens
  chr19:1084544-1084611
  hypo
gccttttgaggtgcctaccccgcactcagaaaccagtaacgtgaacgtggggctgatgccttgtgag

SEQ ID NO: 272674 - DNA, 43 bp, Homo sapiens
  chr19:1089505-1089548
  hypo
gatgtacctgccagccgtctcactgggccggatgatcttcacc

SEQ ID NO: 272675 - DNA, 244 bp, Homo sapiens
  chr19:1090868-1091112
  hypo
cggccccacgcaggcgggattccgcggcgcgcgcccacctcgtgctccgtgatgttgatgagcagctcctgctgcagaaactgctccaggatgtacttgggggccatgtcgaccagggactggaagagagcggctctaaggcacggcccggaggggcccagacaaccccaaccccatttcctgcctcaagctacctggggcttactcgtgtgccccaacaacacacccacgtcgtgaatcagaa

SEQ ID NO: 272676 - DNA, 312 bp, Homo sapiens
  chr19:1105541-1105853
  hypo
cgggtgggtgggggtcggggtgggctccagcctggagagggcctgggagtgtgcagggggcccggactgagggggtgccagcccccgactcactcacacaccttggccgccacaggagccagggagtaacgaagagatcaaagagttcgccgcgggctacaacgtcaaattcgatatgttcagcaagatctgcgtgaacggggacgacgcccacccgctgtggaagtggatgaagatccaacccaagggcaagggcatcctgggaaagtgcgtgacctctggggacagtacggctgctggggtgggggtggg

SEQ ID NO: 272677 - DNA, 1522 bp, Homo sapiens
  chr19:1108138-1109660
  hypo
accttggccctgctccccaccgctgctcctaggggagaaacggtccctgtgtcttggggcatgtttcgcctaaaggcgtgtcagagaggagcctgggcgccggggaagggtgggctgaactggatcacgctctgccgctcgggaccaccgcccgccgcgccccccgcccccgcgccctcccccagcgcgccctcggagggcggccccgcgtgcagcgagcgcagcatgtcctccagcacctccttgaagttgatgtcgcagccctggtgcgcgagggccgcagggtcggcctgggcgtcgggggtgcccagcggcacgacgccggggccggcgtccagggacagcggcgccgggaaagagaagtgcgggggcggcgggaaggcctcggccggggggctgtaggtgaggtccagcacctctccggggccgcaaggcagcgccagcgggcgcggggcgggcggggcggggcagcccagggcgggcgcctgcctgcgcttcacgtccgcatccatcagccgcagctcctgcagcacccggcgcacgcagccctcggggatcttgatgcctgcgggcagagcgtcggggtcagggccggcgctgggggctcgggccttcccggggcgcccgccgcccactcacccacttgcttcttcctgtccttggtcttcagccgcacgatctgcaggtagctgctgctgctgacgtcggccatgacggcggcgatgcggccccacacgcgcagcagcgcgccgcacagcatgtagtggtgccgcagccgcagcccctgcaggcagtccttaccctcctgcgccagccggcagtgccggttcctgcggacgagacgggtcgtctcggctcaggcgggtcccaggggcccgcaggctccccaggtgccctgagatctcccgcctcctctcagggtctcgggagcccccgatccccgcctgggtcgccgccatctgccggtttccccctggtccccggcccgccctcaccaggcgctgtggctgcagtgcgtcagcgacaaagcgtagccactctcccagggctccttggcctcctccgcggtgacctagggacacagggccgcatgagcctgggcggggtcagggccggcaacccgagcgaaagctgcgcccggcggccgcctacccggtggaacttgcggcggaggctgtccagggcctccagctggctctgccggccgatgttgggcttgtacaccgtgaagaactggccgcggttctgctccgccagcaggcagctgggcttgttaccgcggacctgcggaggggggcgttgaggccgcgccccggtccgccccccgcgggccctcctctgggggggtaaccccgcccgaccccaccttgtaggagaggtagaagccgtcataggggcccgtcagcgccagcgacttggcaaaggcgtcctcccacttcaggccgcggtccacgctgatctgccacggcacggggtgggggggtgtgagtgtggtgggggcggggtgggcagagtgtgaggg

SEQ ID NO: 272678 - DNA, 184 bp, Homo sapiens
  chr19:1110422-1110606
  hypo
ctgtgcctgcatccgcccagtctcacccagtaccctcgctcacccaggatgcatggcgcttccacgagccccttgcccacctaggccctcgccgtgctcacccacaatgcacggtgttcccacgagccccgagcccacctgggatgcccggcgttcccacgagcccctcgcccacccgggatgc

SEQ ID NO: 272679 - DNA, 362 bp, Homo sapiens
  chr19:1111949-1112311
  hypo
cccctgcccctgccccgccccccaaccctgccttccctgcagtaccttgttctcaaagttgtacttgctgaggtcacgggactccgtggcgcggcggtctccgtgggtcagggccccctgccaggggtggggaggccatcagttggtcacctggggtctggcctctagcaccccacaaagctttggagagccttcctgggcctgtccctggttctcagccccacccccacctgctcaccagactctccaggcgcttggccacgatggaggcgaaccggcgctccccggccagctccgagatgaggaagacatactctggcgcggagacctggttggaccggtgggtgcggcctgggggcaga

SEQ ID NO: 272680 - DNA, 370 bp, Homo sapiens
  chr19:1112391-1112761
  hypo
cggactcaccgaactgctggatggcgcggtcggcgctccacggcagctccaaggtcatgtgcacgcggcgccgctggttctggacacggcggtcggcttggagggagacacccgagctggaggcctccgagatgatggccacgagctagggggaaagaaggggccgggacacggttggtgcaaggcccgccccagcgttgccgccacctcctcacccactaggcccccgctccaggtcaccaggacgtcccggggcagcgagaggcctgcggggcgcggacaccacccgccacacggccactcgcgcccgcacctggcacacacacactccagaagtgcgcgggtccacagtccccggggacccttgggc

SEQ ID NO: 272681 - DNA, 311 bp, Homo sapiens; identical to SEQ ID NO: 218785
  chr19:1117275-1117586
  hypo

SEQ ID NO: 272682 - DNA, 335 bp, Homo sapiens; identical to SEQ ID NO: 218786
  chr19:1128101-1128436
  hypo

SEQ ID NO: 272683 - DNA, 221 bp, Homo sapiens
  chr19:1133596-1133817
  hypo
acacgggtccgtgccgctggggcgaggggcccgcctgccaggcaccccgcccgccaatggaaaacaaccaatggggaagaaacccacggagccgctcaatccggcagccaatcacagccaccgctcaacctagcagccaatcacagccaccgctcaacccagtagccaatcacagccaccgctcaacccagcagccaatcacagccactcccagagacagc

SEQ ID NO: 272684 - DNA, 35 bp, Homo sapiens
  chr19:1133847-1133882
  hypo
accacaagcgctgctgaggacgcggggcagtggcc

SEQ ID NO: 272685 - DNA, 636 bp, Homo sapiens
  chr19:1156123-1156759
  hypo
agcagcaggggccctgagctcgcctgtgtccgagtcccctaggccagcacggtgctcctggcagctcctccctccctacggtctctgagccccccacgtctgtggacgccccttccaggcggcaaccccaggaggctcaggggaccgggttcttcaaggggagggcttcacacatggcatgtgacctggagtccatgccttggggacctggcagggtgtggagacctggaccgggaggggatgggggcaggagaacaatgcggacaccaggcacaaccaaccaagagtcagggcccaaaaccaggaggcggaggcggaggcggatcctcacacacggctgcttggcagtctgggattcctcaagaggctaacgctggagtcaccacaccaccgagcaattccacaccacacagaaacgtggccatgcacgtccacagcagcaccactcacaacagccacccgaggaagcagcccagtgtccacggataggcgagtggaccagcatgtggcgtggcccatccacgtgccagaacacgacacagccatgaacagcagcgaggccgacctaggccacagcgcagacgcaccttgaggacgtcacgctctgtgagagacgccaggcacagatgtgtgtga

SEQ ID NO: 272686 - DNA, 395 bp, Homo sapiens
  chr19:1166850-1167245
  hypo
ctgtcactgcctcacatcagcggcctcaggccacaaggtctccccacctggctccttggggagtgccaagcgttgccagcagccgggctatgctgatcccagacaagtggctcgaccggtcaccactgtccttgagcttaagtccagccttggtgacaaaaatgtcacaaggacctgcatccgagccctgagggcatcaggtcctggaggaggaggaagagtcccttctggcttcgggctgggcttgaggacggcagctccaagaccgcttagagcgagacttcagcgctgactgctggagctacgcaccctgtcctgacaatggccgcacagttaggcgctgctccacgcctggaggagggaactgagggcccgaaatcacagaagcaggaact

SEQ ID NO: 272687 - DNA, 50 bp, Homo sapiens
  chr19:1167628-1167678
  hypo
atttgtgacgatgccgggacccgaggaatccaggacgacccctctgcaga

SEQ ID NO: 272688 - DNA, 748 bp, Homo sapiens
  chr19:1169515-1170263
  hypo
tgcagcattccctgcccctccgaagcagtgagtggttcaggggcagagctgggcctgggcgaggggcccccggggggtggggtgatgccatcactgttgccgtcctacgggttgagacaggacagctgcccatcaccccttgatgcaagctggctgcaggctgcctgaccagttcccggggacaccgtgctcaaccctgtggtgacaactggggattccgaaggacagggaggtcttactttctgttaaacacttttattttccctgagatacaatccacaccaggaggggcacctgtccggagcatatgactcaacggtttcaacgtattctaaggcagaccaccacagcttctaattccaaaacattccgctcccccaaaacacagccgtgtccccaacagcagtcactcccccgcctctacagcccctgcaaccacacgcccacttctcttctgtggactggcctgctctggacacgtgaccacacgtctaccccccatctgtggactgccctgctctgcacacgtcacatgaacggagtcacgtgccgtggccttttgcgtctggcgtctctccgcaagcacgtctccgcagagcatccatgccgggcgcacagacgacagatctaatctccgcctcctcacggggcccaggaggcccagggcgagagctgatggggcccacgcatccgaaatccccgtcttggccagaaccccaggtttgccttcgcccgcagggctgagccc

SEQ ID NO: 272689 - DNA, 36 bp, Homo sapiens
  chr19:1170705-1170741
  hypo
ggtgcatgagaacacgcagcacgcacacaacacaca

SEQ ID NO: 272690 - DNA, 899 bp, Homo sapiens
  chr19:1170965-1171864
  hypo
aaatacacacacacaacatacgaggacaggcacacaggcacgggcaacacacaaaatacagacacacataaccgactcatgaacatgggtacacacaggcacacacacaacacaaacacgggtgcacaggcacacacaacacacaaacacggatgcacagacacgcacacaatgtgcacccataaaacacacgcgtatgaaacacacgagcaacacacacatgcacaggagcacacagccacaggcacgcacattcacacacacacaacgcacccacatccgtacaacacacacacagaacgcgcacacgtccgtacgacgcacacacagaatgcacgtgcgtacgtacaatgcacacaaagaatacacacatccatacaacacacaggcacacaacacacatgtgcatgcacatggcgcaacatacagatacacaaagacacgtgtacacacacatgcagagtccccagggcagcgctggcgtcatggggggctgcctccacaccgcctccaggagtgtttacagctgtggattacatgataccgcccccttcccagagctgatcccaccccccagcatgggggccccctgggagggggcctctgggagccggactggttctgtcgacacagtcgcctctttgttcggggcagagctcactctggcggtgttggcgtttccgcatgggccctgccggaggggcatccgtgactccgctggagccgggttgggccaagcccaagctggtcacacccctcacacccctggggttgggggaggccttaggcagcaagtgggtggggggtctaggggtggctggcgcaacctctctccacctcggtttccccgccaggtgagagggcagtgactgcccatggtcacgcggctggagaacatg

SEQ ID NO: 272691 - DNA, 225 bp, Homo sapiens
  chr19:1172305-1172530
  hypo
ccagatctcaaattcgccctttctcggcaagaactctgaaggtggcccggagcaggccactgtgagaagccatcaccccacgaccagggtcacccctgggaaaatctggggccgggcagccagatccctgaaggccagaggatgtctgggaagaaagggcgtggacggcacctgctgggcctgccacaaactctctgggtcccatgtccccgctgctcctcttcc

SEQ ID NO: 272692 - DNA, 267 bp, Homo sapiens; identical to SEQ ID NO: 218795
  chr19:1178810-1179077
  hypo

SEQ ID NO: 272693 - DNA, 103 bp, Homo sapiens; identical to SEQ ID NO: 218796
  chr19:1179315-1179418
  hypo

SEQ ID NO: 272694 - DNA, 95 bp, Homo sapiens
  chr19:1182347-1182442
  hypo
agtcagactgaggccggaggaggctcaactgccccgaggatgaagaaaggagccaaacttggccgggtgcagtggctcacgcctgtcatcccagc

SEQ ID NO: 272695 - DNA, 76 bp, Homo sapiens; identical to SEQ ID NO: 218797
  chr19:1213519-1213595
  hypo

SEQ ID NO: 272696 - DNA, 124 bp, Homo sapiens
  chr19:1220618-1220742
  hypo
agccagggctccccggctttccagccgcccgagattgccaacggcctggacaccttctccggcttcaaggtggacatctggtcggctggggtcaccctgtaagtgccccgcccccccgggcact

SEQ ID NO: 272697 - DNA, 309 bp, Homo sapiens
  chr19:1223561-1223870
  hypo
ggtccagtggccctccctcccgtcgtccctgaggcctgcccgctggccctgatgccggccgcccttcttccctaggtggcgaggaggcgtctgaggcagggcttagagcggagcgcggcttgcagaagagcgagggctcagacctttcaggagaggaagcctctcggccggcgccgcagtagtgcctgaggaggagctcagggccttagcgtaggggcggcccacattggcagccagcccctccccgccatgctcccggcttggctgtgttcggcccagggctgggccgtgtcataaagagttttgcag

SEQ ID NO: 272698 - DNA, 686 bp, Homo sapiens
  chr19:1226470-1227156
  hypo
aggccagtcacaatggacagcgccggggcctccccaaggccgtgtgtatgaacggcacagaggcggcgcagctgagcaccaaatccagggcggagggccgggcccccaaccctgcccgcaaggcctgctccgccagcagcaagatccgccggctgtcggcctgcaagcagcagtgaggctggccgcctgcaggtggggcgcggcggggcccgggtggggcatgtggggacaacgcctggatgccacagccagccgtgagcatagcccgcgctagtcagtcatggtgaccgtcacgtggctgcgcgtggttgccatgtggcctttgggtggcttggccacgtagcgatccccgtggagggtgccgtctcggggcctggtgtctggccagcgtgctggtcatggaggcctacgtgtggcggggctctgggggggcgtgccgtcctcacagccacctctcagagtgggtgcattccgaggaccctgccctgggcctggcgccccctccccatgcccgcgccgcttccaggaaaggcttatgctgggctcagcccagaggcttttgagcaccagtgggtggtgggtggtggggaggggccgcggcctccatggctctgccggggtgccgcaggctctgagccagctgccaagtatggctgaggctgagtcgtgccggacgctgccctgtc

SEQ ID NO: 272699 - DNA, 2321 bp, Homo sapiens
  chr19:1227511-1229832
  hypo
tctccatcctcccaggggcccgcgggaggcggagaaccggtgcccaggctgacctcttccgtcttccttccaccctgcagcccgtgtccaggagccccgccaggtgcccgcgccaggccctcagtcttcctgccggttccgcccgccctcccggagaggtggccgccatgcttctgtgccgaccacgccccaggacctccggagcgccctgcagggccgggcagggggacagcagggaccgggcgcagccctcccccctcggccgcccggcagtgcacgcggcttgttgacttcgcagccccgggcggagccttcccgggcgggcgtgggaggagggaggcggcctccatgcactttatgtggagactactggccccgcccgtggcctcgtgctccgcagggcgcccagcgccgtccggcggccccgccgcagaccagctggcgggtgtggagaccaggctcctgaccccgccatgcatgcagcgccacctggaagccgcgcggccgctttggttttttgtttggttggttccattttctttttttctttttttttttaagaaaaaataaaaggtggatttgagctgtggctgtgaggggtgtttgggagctgctgggtggcaggggggctgtggggtcgggctcacgtcgcggccgcctttgcgctctcgggtcaccctgctttggcggcccggccggagggcaggaccctcacctctcccccaaggccactgcgctcttgggaccccagagaaaacccggagcaagcaggagtgtgcggtcaatatttatatcatccagaaaagaaaaacacgagaaacgccatcgcgggatggtgcagacgcggcggggactcggagggtgccgtgcgggcgaggccgcccaaatttggcaataaataaagcttgggaagcttggacctggccgtctgggttttgttcgcgtctcaacgtggatggggcggcagcggggcgggcgccgttgacatgcggagggcagtggggactcggggcgcgggagggccggggccggctccctcagggccggcggcagcagcggtggcggcgcggttattgctcggaggcggcgcgggctgccgccagcacacgccgcagtgaggtaaacggtctcggaggtcggcagtcacggtgttgagccgcctcccggcccagggcggcgaactcgtctgcgaccgttagcgccccgcggcccccgcccgggcgagctcgcgcacgcgcccggcacgcggcggctccatcgggcccagtgggctgcgcgaccctcgggtggcgggccctgcgactaagcggccgccccgtccgggactgagggcgagtgatcgttgtcctcaggagcccgaagctgagagccgttcacgccccttccttcccgcccagccggggtctccgcggcccgcgcctcacgacgcccagcacccggcaagcaccggaaagagcagtgcacacttcggcggcgcgagggcggccggggctctgcgcctgcgccctgaagcggcgagcgcgcctccgtcgcccggcgcgtgcgcgaagggcccgcggtccccgcgcattcgcgtcggggcgtcgcgcccccacgtctctcccgccgccgaggccccgtgcggcgccggagaagctgccagagagatgggcccaggacgcgggacttaggccgggctgtggtcgggggacgtgggggcggcggcgaccaacgcgggagtcgccacgacgggctcggcgaggcgcggcggaaagagtctctcgtcgaggccagccgccagcttgtccagcaccgacccggatggtaggacgcacaggcccgagccggggcaccccccgccgcccggctcctcctcgatgacggggatggcggggtcgtcgccggcgccgcccagggtgcgaccgtcgggcgggccgtccacgctgtcgccgcgccgcaagggcgcacgcgcgggtcgggccgcgccggcaggcggtgccggggttccggccagggccggggccgcgcgggcgccggggtcgctgtgctgccggccacgctgccactgtttgcgggcgtgcgggtgcgcgcgggcgcggtgtcgcgcggcagccggcgtgtcgtcgaagtgcgggtcgtggcgcaggaactcgtggaacagcgcgtccgtcttctcgtcgatgctgtagtcgcggcgcgggcggcggggccaggcgcgcgggctgcggggccgggcgggcgcggcaggtggctcggtgtcgtcgcctgcgccgcggccctcgatgctggcgtagccactgtccatctgcagcagccggcgcgcctcgccgtccttgggccgc

SEQ ID NO: 272700 - DNA, 45 bp, Homo sapiens
  chr19:1231262-1231307
  hypo
gcttgggggaacctgcgcacgggatgtgccgtaagcgtcagccgg

SEQ ID NO: 272701 - DNA, 977 bp, Homo sapiens
  chr19:1234516-1235493
  hypo
ccggggctgcctcccgtcccccgaggaaccggggctgctgcccataggctcacctggaagatggccagagtggccttgggagaggtggccgggtggggcgtggtggctgagctggcctcgcctgagtcacactcgtggatggtgacaatcttgaggggcggcaggtgcaggtgcgtgagccgggcattcttcaggtggtggaagtccccctccgtcagtgtgtacctgcgacagcatctggccatcagagcccgcccacctcccatgcccgatgccccagctgccgtgctctgccatccaccctgccggcctgggcaggggcaggcgaaaggggggcaactggccaaggccgccccaccccacggtcccagtccaggagcctctgccttggtccctgcagcctccgcacccagctcctcccccgtcccggcggccaggacctcagacaggccctggggtgcctcccaacgccgccccgcttaccggcgacccttgtcctgcgtcttgcggctctgctcaaacagcgccgcctcattgaaggagacccggcggcccgtggagctggtggacaggaagcgttcggtctccgcatcctggcactcggggtcctctccccggaagtcggggtctgcgtggagaggcaggagagggtgggccccgggcgggccacgccaggcgcctggtcccgggagggctgctcctccgggcggccacggcagggagggctggggccgcggcacgggcggccgggctggcggggcgagggacactcgtccatccgctcacacactcactcgctcagcacgcgcctgggcccacctacgcctgggcgttaaggaaacagagatgagtcggaatcgagctgcgcccagtctggtgggggagacagacagacacagacggtcaggcagcccgagggggcggcgggtggccgaggggcggatggacaggcgagcgcacagccaggctggccagca

SEQ ID NO: 272702 - DNA, 122 bp, Homo sapiens
  chr19:1236403-1236525
  hypo
tgtcctgcaaggtagcgccaggccctggagctcagcgctgggcagggcaagcactcggaggaatggggacgccaaggcggtgcagccggctcgagaaggactccagacgccctgtccgcccc

SEQ ID NO: 272703 - DNA, 824 bp, Homo sapiens
  chr19:1254899-1255723
  hypo
gcagatggactgctcccccacggccagcagcagtgccagtcctggtgccagcaccacgtctaccccaggggccagccctgccccccgctcccgaaaacccggcgccgtcatcgagagctttgtgaatcacgccccgggggtcttctcagggaccttctctggtaggtgtcacagcacatgtgtgagctcacgtgtgtcccgtgaccctgtgcatttggggtctacatccacccacaggcgactccacatattctgggcatacacaggctgtgtccgtctgctcacttcacatgtcccccaggaatcccccacacacacgcctggccctgcccggggggccgcgggtcaccaggcgcctgcatactggggacgtgtcccgctcccgccccgtggtccctcgtgcacatcagcccacatgtccacgccattgcctgagctcatgagctcacacccgtggacgcccgtcctggacatgcgggactgtgcccgtgccgggcactcacggccacctctgcccgcaggcacgctacaccccaactgccaagacagcagcgggcggccgcggcgtgacatcggcaccatcctgcagatcctgaacgacctcctgagcgccacccggcactaccagggcatgcccccttcgctggcccagctccgctgccacgcccagtgctccccggcctcaccggcccccgacctggcccccagaactacctcctgcgagaagctcacggctgccccctcagcctccctgctgcagggccagagccagatccgcatgtgcaagcccccgggtgagtggccaccctcgggggtcctacctt

SEQ ID NO: 272704 - DNA, 90 bp, Homo sapiens
  chr19:1256137-1256227
  hypo
ctgcccttgggctctgcacccgtcgcgggggctcctcccagctcagtttaaaagtgggaaactggccgggcgcggtggctcacgcctgta

SEQ ID NO: 272705 - DNA, 105 bp, Homo sapiens
  chr19:1274636-1274741
  hypo
cctccttccaggaggcgcttcgccagtgaggtgcgggctcagggcctcgagtctctcctggagcacgggctgcggtgcgccggcagcttacggggcggccagtcc

SEQ ID NO: 272706 - DNA, 36 bp, Homo sapiens
  chr19:1277515-1277551
  hypo
ttgaggtggagtggcgcgatcccaactcactgcaac

SEQ ID NO: 272707 - DNA, 42 bp, Homo sapiens
  chr19:1280525-1280567
  hypo
tccttcactttgtctctgtccgtctctgtctccatgtctgac

SEQ ID NO: 272708 - DNA, 291 bp, Homo sapiens
  chr19:1288527-1288818
  hypo
gacggggacagccgcgatggggggcagacagcagcgtgggcaccaggggaccgtgtgctcgatggggcctgcaggcccgggcagtgccgcagcgtcgccggccgccccttccgcccattggcctggcacctgtgcccaggcgatgactgtgtggtctgtctccacatcacaccctctctgctgtgagaggcgatgcctgcacccaggggaccccgcacccacctccttgggccgctataaggtggggccccgttgggtggtctggctggccggccccgccactcccaccgg

SEQ ID NO: 272709 - DNA, 291 bp, Homo sapiens
  chr19:1289082-1289373
  hypo
cctggagtcgcatccggctgcaggttacatgtgtctgtgtgtggcaggaggctgcgtgaatccacagggcacagctctggcgtgtttgcacatgtgtctgcgtgattgcatatgaggtgcatgtgtgtgcatgagtgtgtctgtgcgtggcacccgcgtttgcatgtgcgtgcccttgcacgggatgtctgcagtgtccgaggtccctgtgcgtgtctgcctgtggcatgcatgcgttttgtctgtgcgtggagtgcaggtgtgtgtgcgtgtctgcgtgtggggtgcatg

SEQ ID NO: 272710 - DNA, 51 bp, Homo sapiens; identical to SEQ ID NO: 218805
  chr19:1296939-1296990
  hypo

SEQ ID NO: 272711 - DNA, 218 bp, Homo sapiens; identical to SEQ ID NO: 218806
  chr19:1297597-1297815
  hypo

SEQ ID NO: 272712 - DNA, 180 bp, Homo sapiens
  chr19:1304765-1304945
  hypo
ccgccgggtgtgggcgctccttggggaacctggttacccccgaccccagccccagtgagaccccaatgccggctcctgccagccctggacggccattggtacgctggtcccgcgcagagtcttttccgcccagaggatcctgagggaagtcatctccctcctgccggccagttactgccg

SEQ ID NO: 272713 - DNA, 283 bp, Homo sapiens
  chr19:1308051-1308334
  hypo
gtcctcctgcacggtcgcctggtggagcagaaaccaccgccagcggctccccgtctatttgtctgtgcacattcctgggctcagacggtggcttccgaggccggaacttcggagtcacctgctccgcacttgagtctggaacgtctcagaccggacccctccctttacagcctgagagagggagagaccctgcccaggcctcccaggggcctgcccacccgacagctcctgactcccccaccctcattggtccagaaatggaaggcttcggcccaggagcgat

SEQ ID NO: 272714 - DNA, 188 bp, Homo sapiens
  chr19:1310928-1311116
  hypo
ggcggagggggcggcgggcagttttcaattacggagcagctaatctcccagtgagggccgttctggggcccagtaaatctattatgaaaagcctctaaatgtatgtaaaaccggcctccgacaatccggggattaggccgccgggaggggaaaccgaggcgcaggccgcctggcggattagcgcagcg

SEQ ID NO: 272715 - DNA, 94 bp, Homo sapiens
  chr19:1311324-1311418
  hypo
ccacaaggtggactcggtgggtttgaaagatggggagctggggacccctggacccggcttaaggctccgtggcccggcccgcatctcctgccgc

SEQ ID NO: 272716 - DNA, 414 bp, Homo sapiens; identical to SEQ ID NO: 218808
  chr19:1312701-1313115
  hypo

SEQ ID NO: 272717 - DNA, 50 bp, Homo sapiens
  chr19:1325876-1325926
  hypo
gtggttcacaccagccgggcacggtggctcacacccgccgggcacagtgg

SEQ ID NO: 272718 - DNA, 600 bp, Homo sapiens
  chr19:1333757-1334357
  hypo
ccagatcagcagcgctttgcacgttgtgcctgttggcctcggtttccccggtaaaacttgtgatggttgcatgaagcccagatccatgaataaaacacgaggtctggagttagtgcttcctctcctacagcgaatgcataatcagcccacaactgcggcgacgaggcgtccgaggcggccgcaccccagcagcgatcggtgattcatggctcgatctgctaattgcctctcgggccggcttcgggctgatgcgtttgacaaggcgaggaggctgagacgtgcattaggcactcagccgcccccgccgcccatggagggcgcgactgctgctccctcttgggggtgatccgtcatttcatccacgggggagttggggacctggggggcaagagagaggctggatgcctgggccctgtttgtaaacagcgttgatttctgagctgagatgtggcgaccaggcccggagcagggctgtattcacagtcgtcgaggggtctgccggccgtggccctgctatggaaccttgggtggggctggggaacaggacctcctgcctcacctcagacagcccctcctgggccaggcaccgtggctcacacc

SEQ ID NO: 272719 - DNA, 105 bp, Homo sapiens
  chr19:1334648-1334753
  hypo
cctgccaaggagaacgccagctgccggccgcagtcatttgtctgtcacttggatgcatgcagagcggggtctccggagggtggctggtgccggaacctgctgcca

SEQ ID NO: 272720 - DNA, 270 bp, Homo sapiens
  chr19:1340766-1341036
  hypo
gtctcaaaaacaaaaacaaggaaaacactccagcccccacaccagcacggggactgcagcgcccgcgagacttgggtcacggtgactcctggaggctttgcacgttaagccgccgcctgcccagggacactgtggtcaccttcccccgccggagccctgcgtacctctcctgtctgtgctttgagagaggagtttttttcccgttgcttctggaaccctgggttgtcctgcagaataggacaccctccttcattacgatagaggatgcag

SEQ ID NO: 272721 - DNA, 120 bp, Homo sapiens
  chr19:1357653-1357773
  hypo
gacagcaattccgacgccccagtcagtcctgcgtgattgtggcgagggcgcgtctggcaccgggaaggtgtagatcatctagaatgacggcgattccgacgccccggtcagtcctgcgtg

SEQ ID NO: 272722 - DNA, 268 bp, Homo sapiens; identical to SEQ ID NO: 218809
  chr19:1360025-1360293
  hypo

SEQ ID NO: 272723 - DNA, 730 bp, Homo sapiens; identical to SEQ ID NO: 218810
  chr19:1370778-1371508
  hypo

SEQ ID NO: 272724 - DNA, 180 bp, Homo sapiens
  chr19:1373035-1373215
  hypo
tgcctgctgctattgagccccgtgccctctcacaggccatcatctgtgcgatctctgcggtggacgaggtggactacaagacggctgaggagaagtacatcaaggggccttcgctgagctaccggtaggccgctcccggcgctatctccagccacttgcgtctctgccttgcagtttcta

SEQ ID NO: 272725 - DNA, 453 bp, Homo sapiens
  chr19:1386825-1387278
  hypo
aaaagcagtcacattctgaggtcctggggttagggcttcagatgcaggtcgggtggagggtcacagttcagccgtcaccagcaccaagcctgcctttctggattcttccttgtgagccaggattcctggcacctccaggtttcctcccgctgagtgccccgggcgtggcaaggccctgctctggccttagtcttcgcctcgggaaggctctcccaggagacttcgtgcaggcgcgttccctcctctgcgcttcctttgaggctggctcctctaggggtgcttttctgtgtagattgacgtgggcagcgccctccccgcttagcggactgcagattcctgcaggatggggcctgtgctcagctgcgtgggaaacgcccgagcagcagccagggcctggagcacccagcacacgcttgtcaggcacagctgaggccaggacgagcactgggtgcc

SEQ ID NO: 272726 - DNA, 358 bp, Homo sapiens
  chr19:1388331-1388689
  hypo
tctgggccatcattgggggtcggggcgatggccgcatggctccagcggctctggccagtggcccaagtgttgacaggcagaggtgagaacagtctcgcagcagggaggggagaggcaggacaacagtgagtgcggctgggggagctggaggggcctgggacagccactgacccgcgttccatctcccggcagctccagcgtgggcccggctgtgcaggcacgaggtgtccatcagagcgtggccaccgatggcccaagcaggtgaagctggccttctgggggaggtcgtaccccctcgccccacccccatcccttccttattttctgcatcagtgccgcagccactgaggtgcatgga

SEQ ID NO: 272727 - DNA, 331 bp, Homo sapiens
  chr19:1393938-1394269
  hypo
actcttgcacctcacgtggtcccacgagggccatccccccgggcgttcaccttgacagtggtccacggtaggcaggcttggaggtggcgctcatgtgggacaggggacagagtcctgttcttggccaccctgtgctgcgtgcggcattagctcatgcgcagagagcccagccctgagtcccgagtctgggggtttgggcaagcgagaggcacatcctggtgcctctcaaaagtggaggaacaggctctgactttggattccgcttccctggaaagggcgttgatttgttcagcgttctgcacggttcaggtcaccccgggggcagtggaga

SEQ ID NO: 272728 - DNA, 141 bp, Homo sapiens
  chr19:1403846-1403987
  hypo
actctcagtgaaataagccagtcgcaacaggacaaatcctatgtgagtccactcctaggaggtccctggagtcctccgatccacagagacagaacgtaggatggcggggggggggggtgccaggggctggggaggggacag

SEQ ID NO: 272729 - DNA, 161 bp, Homo sapiens
  chr19:1416664-1416825
  hypo
ggccctggggccacctggagcggcagtgaggtggaaaggtgagtgggcccttgggcgtcgctgcagggtcgatggcggacgccttgggagagctccagctcttctgcccggaggagacagccccaggacgggggtggcgcgggtctttggtgggggcaggc

SEQ ID NO: 272730 - DNA, 195 bp, Homo sapiens
  chr19:1423006-1423201
  hypo
ctgtgccccttttccgtggctgctgctgtctgtcccgcccgcccgcatggttttggttcatcagctgcttttggccggccacgtgagcagacctgcagcctgggtctgcccgccacgtccgtgccgcccccgcaccaccggcccaggtcagtcggggcagccccgagcgccaggtggcgccgcagcatgcccacc

SEQ ID NO: 272731 - DNA, 250 bp, Homo sapiens
  chr19:1423980-1424230
  hypo
gagagacgctgcggcgctgcttagcgggtcctcccagagagtgtgtccccttcccttggcctttctgcatcttctgagacgggtctgtgtccccctccccgccacctcctccctcttcctctccactgactgaaggtcatggccatgtccctgtcagggaccccgcctgtgtctcgggcacacagtgtctgtgcgggtccctgcttggccctcccacgtctaccctcggcccgcccgctccagccgctgc

SEQ ID NO: 272732 - DNA, 327 bp, Homo sapiens
  chr19:1424660-1424987
  hypo
tcgttcacgcctcacgcccgtgctgcgctgtcccctgctgtgtggtgccttgtcacgcaccctgtgcctctggcgcgggcagcccatcttcagcccggtctcagctcttcccatgtccatctttgttctgtgaggtcttgggcagctgtctgccgggcacttccatctggggaggggctggtgccgcctgggccccgcctcgggaggacggtgtgctttgcggtgtcacgctccacctagccggggaggcctggagagcccggcgcactcctgcgcctagaggaggagacccgccccgttagccgggggccgcgcccaccccagacc

SEQ ID NO: 272733 - DNA, 413 bp, Homo sapiens
  chr19:1425396-1425809
  hypo
gatggcgcattccacgcgggcccccggcctgcagggttcactggcaatctccccacaggcgagagccagaatattcaagcacgggcctctgaccctcccctggggggcgctttgtctgccagtagcgatggaggccctcaccgttcccctgtctccgctgctgttttataagatgtgctccttgttccaaatctttgtgacacggagccccagcccggggtgtctggggcggaggcttgactcaggcctcagtcagcagagccgtcaccgggagtgcggacgtcaccgtctgtccactccgtgtgcagtcgagtggtggctcctggggagggaggcagctgccccaggggcccgcagcgccccacacacagcttagctgaaacccaaggtcgatccctcggcccgtccctaat

SEQ ID NO: 272734 - DNA, 151 bp, Homo sapiens
  chr19:1430408-1430559
  hypo
tgccaggtggtgggcggggtgatggggagtcttgtgttacacgtctggcctcagccacaggtggggtgccggctggtcagcaggtcacctgccaccaggcccttcacctgcagatgggctccatcgcctgtggcctcgctggttaggctaa

SEQ ID NO: 272735 - DNA, 215 bp, Homo sapiens
  chr19:1432575-1432790
  hypo
caccagccactcccggggcagcacctctggctttcccaccgcctccgtctcaggctgccccggacatgagcaagcccccgacagctcagccagacttcccctatggtcagtatggtaagtggtctcctgccatgccgcgtccccgctggccccaggaccctgggcacggcctgccttcttctgcttcctcccctgctggacgctccccagccttt

SEQ ID NO: 272736 - DNA, 327 bp, Homo sapiens
  chr19:1461033-1461360
  hypo
aggtggtgtccagcatccttcggaacttgtcctggagggccgacatcaacagcaagaaggtgctgagggaggcgggcagcgtgactgccctggtgcagtgtgtcctgcgggccaccaaggtgggcacccggtgggcggcagggatgcttcttcagtcactggaaggagactgctggcggcagcgggcgagctctccgacttgggaggaaatcaagttgaacagctcactgcttagcgggtggtccagcctcagaccggctggggctcactcctcatgtcactgctctttgaaagcaaatgtgggctgggcgccgtggctcacttgag

SEQ ID NO: 272737 - DNA, 893 bp, Homo sapiens
  chr19:1481987-1482880
  hypo
gctgctggtccagcgtggaggatgggggacaggaggtgcagtccctcggggagccgccgcggcaggtgtagcaggaggcatggcagctggagcagaccctcagcgcgggcgccgccgtgtgcccaggcccagcggtcaccagccttgtgtggttgaagaaccgcggggggcagtaggccaggcagagctgtcccaggatgtaggcggggccgtcacacgctgctcggggacacgcacgcaaaggcccgtcagcttgccacccgcagcctgttactcgccacccgcccgcctggggccacatgcacgctgcccacggtggccgccaccgcctcccagcagtgggccctgccccgccggcactcaccctggcacagcccctctgtgtcccgctgcacacacgcgctgctggtcacctgggggcctgtaggccgcgctgtcatgtcctcggccgtcccatagagcagcagcgtgtagcggtacaacgtccctggacaggggtcgcgggtgggcacaggaggaaaaggaggctctcggcagcctggtcctggtagtccccgggctccctccccttcagctcccacgcggggccctggactggttcacatctctcagggaattgcacacctactgtgcgcctgtcactggacaccgacatctcccgggtgactgcacacctactgtgcgcctgtcactgggcacctacatctcccgtgttaccgcacacctactgtgtgcctgtcattgcacaccatctcccgggtgactgcacgcctactgtgtgcatgttctcttggagaaggccactgggaaccccttttgcagtgcggtcaccaaggctagctccagagcccctggggggaggttggagagccaagccccgcccaccacagccc

SEQ ID NO: 272738 - DNA, 668 bp, Homo sapiens
  chr19:1482910-1483578
  hypo
gcccttgttctctaggcccagggtccacacgccctgtgggttctcatcccagaagtgggtggacatgaagacccagttgttgtagccttcagtgctgacgtccaagggtctgggacagaagggtgggtgggggtgggggtgtcaagagggatggctttgtgaagccggcagagccccatgaagtgtctgaccgcacgcgctggtggccgcgtgtcctctgggtgtgggtgagggtgtgactcggggtcccaccaactaggctgccgtgtgactcctatgggcctggcccctccccgtgaggacactccgggtagatggcagcgtttaccgacagggcatgaggccgccccctctcctctgcgggccgctcaccgtatggccacgagtgtggagcgcgtgcccatggggctggtgagcgagatctccaggtctccgcgccggctgtaggacagcgtcagctgcgcctgcacgtgctccagcgagcggatggagttgtggaggccggcgcaggccgatacgttttccctgatgtagatcagcggcaggatggggctgagggggtcgaggggtgaggaccctcctgcggcctgctggggggtgggtgggcggccagcaggcgaggtcggggctcagaggtcacggggtccagccctcgttttacagatggg

SEQ ID NO: 272739 - DNA, 624 bp, Homo sapiens
  chr19:1494954-1495578
  hypo
ttacaggtgtgagccaccgcgcccggctgcaaacacttcactgggcagctattccgcacccacccccactgcccagcgtcgagctcctgcctgcccttggggagctctcaaccccggtgggggacatggacacgttgaccagttacaggcacaaggctcagggcctagaggcacgatgggggatgtacaggcacatcaggggcagtggacatatcctggaggcggctcctgggaggaggtgacggttgcagtcttcgtcgactgaaaggcggcctgggtaccgtcgtgggggctcagcgggtccccagccctggcacaccaccgcctctctccggcaggagccgtcactctgctaagcctgtatctgctgttcggctacggagcgtctctgctgtgcaatctcatcggatttgtgtaccccgcatatgcctcgtgagtgcacggctggctgcccacgcggggggttctgggggctccctggcagcccctgaccctgctgcaccctccctgcagaatcaaagctatcgagagcccaagcaaggacgacgacactgtgtggctcacctactgggtggtgtacgccctgtttgggctggccgagttcttcagcgatctactcctgtc

SEQ ID NO: 272740 - DNA, 509 bp, Homo sapiens
  chr19:1496401-1496910
  hypo
acgacctcagcgggcgagccctggacgcggcggccggaataaccaggaacggtgggtgctcgcaggcgcctggctgcctcaggccatctcccgggtctggacctgtctctctccaccttgcctccctttctgactttggccgccccctctcactgtccgcctctctctctcacgcttccgggaaccagtcttgcaggtcctggcccgtagccgggcaggcatcaccccggtggctgtggccgggccctccactcccctggaagctgaccgtacgtaaccgctgtggggagataggagctgtgtgtgtgtgtgtgtgcgcgcgcgcgcgcgtgtgtttgagcgtatgtttgctgtgtgcacatgtattattgtgtgtgcatgttttgtcatgtgcaagagggtgcgtgtgcatgggctcaagtgtatgtttggtgtgtgagtgagcaagggagtgagcatgttttctcacgtgtgcatatgtgtgtgtgtgcccacgtgtgcatgtgagt

SEQ ID NO: 272741 - DNA, 243 bp, Homo sapiens
  chr19:1506027-1506270
  hypo
gccgggcagtcaggcgtatgcggctgtcctccgcagggctccagggccgggcgtagccggcgtggggcagcagcagctggtcctgtgtgccgtcggggctgacaagacgctggacagccatcaggtagtcccggtggggtgccagcatcgggcaggggcagtggcctggcgcccacacgtactcgcgtgcccgcagtggcgagcggttcttgtagacgagctggatgcgcacctcatagcggg

SEQ ID NO: 272742 - DNA, 48 bp, Homo sapiens
  chr19:1533726-1533774
  hypo
ctacatgcccaactgcgggaggctggaagccttcgccctgagggatgt

SEQ ID NO: 272743 - DNA, 57 bp, Homo sapiens
  chr19:1546766-1546823
  hypo
cagcctacccactgtgggctttggcaataaggcgctcaatcaattataataaacacc

SEQ ID NO: 272744 - DNA, 33 bp, Homo sapiens; identical to SEQ ID NO: 218819
  chr19:1555127-1555160
  hypo

SEQ ID NO: 272745 - DNA, 239 bp, Homo sapiens
  chr19:1565849-1566088
  hypo
tctagaagctctcagcctgacgctgattcctgccagctccccatgtggccatagcctcgctcaaaggcccttgggtgccaggacaagcgcgttcacaaagaacacagccacagcctccaccacctggaggctcaggctcgtgcctttggtcacttggtccccaggcctcggcttggacgcctgtctccacaggctcccagacactccgcacagggcagctgtcccgttctaggccctgg

SEQ ID NO: 272746 - DNA, 1418 bp, Homo sapiens
  chr19:1577427-1578845
  hypo
cgaggcaggggggccggctggcagtggagcattctggcagcgccgggcgaccaagtcccgactggcagcggctggagtttggttttcagaagcgaaggctggcgttggcacacagggaaggctgcccgatgacgtgcctcgactgtgttacatttactgaaggagagcggcctcctgggcatgccactcaggcacggtgaggctctgtggcaccaccagccgcatggcagggcagagagtggcgccgtcctgcatgccccccacagcagaccagagtcccgtcctcacgctgcacagtgggtgatgtgagtttcaaaactacgcctccagaccgagaaaccctcccagctgtcagcaagccgtggcgccgagctgccgggcacctgctggctgctctccagtctcaaggagctgggacagcgggcatggggaggagctggcctcgagcccaaaggtcgtagggagccaggcagggcccaggagcacccggcacttcccgaagccggactctgtagaggacgagcgtggagggtctttcgggtgggggcagccccagctgtgtgccccgaggccccgggaagtggggacgggccgaggagggagccaggagcacggccttcctcctgggtgtctccaaggctgggcttcgccgccgagcctggttcacgtggggccgaggaccgcgtctgcaggcggctccagcaggcagcacgggctctcggcagggcctctggaaaggacagggagggctggctttagcgactccacgggacggggacgcttgggctcttctagggagatgggaagctcttgggaggcacccgtcatcccaagcacatctgtgttcaccaggcagtccccactgccaggacccgactccagggagcccccgtggccccgcagcacctgccctagacgtgctccatctccgggtccgggtcgggctcctcctcctcctcctcctcgtcttcctcgtcgtcgtcctcagcgcaggccttgtccagcggcgcctccccgtcacgggccagctcctccacgtgcgccagcatgtcggccatcagcgcctcctccagccgcttccgcacctgctgcaccagctcttcctgcttcctggggacacatggaccttgcgttacaccaaggtgagcggccagcaggacatggacacaggatgaacgtggggacctcagctgggaggggaggcccgagggatccacaggcacccccccaggaccagccctggcccgtgccacccctcccttcacaatccacgcagagaatgaccggctgccgctggccatcgccagcgtccgccaccctcccagatggcccccctgccacctctactgggaccaagggaggggcctgacccttcagtccccagacttggccctgagcctccccggggctcagctgtg

SEQ ID NO: 272747 - DNA, 68 bp, Homo sapiens; identical to SEQ ID NO: 218821
  chr19:1579338-1579406
  hypo

SEQ ID NO: 272748 - DNA, 51 bp, Homo sapiens
  chr19:1579659-1579710
  hypo
cctggctcacctactcgactgcagccaccacctgctcgtcatctttccaga

SEQ ID NO: 272749 - DNA, 165 bp, Homo sapiens
  chr19:1612194-1612359
  hypo
ggggagcctacctcgcacctgctgctccagccccaggatgacctgcacggcctgctgcaggatgagcagcttggtctgcgctttgtccgacttgaggtgcatctggcacatgcgccccagctcccggaaggcctcgttaatatcccgcacgcgcacccgctcccg

SEQ ID NO: 272750 - DNA, 170 bp, Homo sapiens; identical to SEQ ID NO: 218822
  chr19:1612624-1612794
  hypo

SEQ ID NO: 272751 - DNA, 262 bp, Homo sapiens; identical to SEQ ID NO: 218823
  chr19:1617230-1617492
  hypo

SEQ ID NO: 272752 - DNA, 391 bp, Homo sapiens
  chr19:1638548-1638939
  hypo
aaagtagcaatttattggtagcaaataccagcagggaagagaaatatacaggctcaattttcaccttctcacagaagggggcagatgcgatttcacttcggacgttgagagcgcgagaaacggcgtgtttaaacgtgttcttcacaacgcagaatactaaccgctattcaatcacggccttaaacgtgttattcaaaactagaaaagaaccactggcagagccgcaaagcggtacagagcttcagaaaacacacaccgggggaagcaatccggagttgggagcacacagatggaaaaacaaaataagacgatggaaggaaaagctgagaacgaagatggacgggtgcttaacgtctttaatctgaaaacacggtgccgaccaaagacagtt

SEQ ID NO: 272753 - DNA, 90 bp, Homo sapiens
  chr19:1665100-1665190
  hypo
gatgaataataattgttttccgatgaacaataataataacgaattaaggccgggcacagtggctctcacacctgtaatcccagcgctttg

SEQ ID NO: 272754 - DNA, 145 bp, Homo sapiens
  chr19:1673002-1673147
  hypo
cttatgcgtgttctcgcatgctcgtgtgcattctagcatgtgtgctcactcctatacacaggtttgcatgcgtgtgctggcatgtccgtgtgggtgcacacagaggctgtgacatgttcgctcgttgccacgagctcaggtgtgt

SEQ ID NO: 272755 - DNA, 783 bp, Homo sapiens
  chr19:1729049-1729832
  hypo
tgtgtgcgcctgtgcgtgttcgtgtgtgtttgtgtgtgtgcatgcgtgtgagagggtgcactcagcggctgtgcctttgtacacgtgtgaatgtgggtgtgagtgtgtaagtgctttgtgtgagcatgtggggggaaggacgcagaggcacgccagcgtctgactgtgtgtattgttaagagtgttgtggggtacacgtgtgtatgtgagctcgtgagggtgtgcaagggatacacgcgtgttgtgtgtatatgtgtatgtgcatgtgtgtgtgcaggtgtgtacatattagtatgtgcagatcagtgcatacctacgtgtgtgttcctgtgtgcagatgtgcggccatttgagggtggcagtgcgcctgtgtgagtaggtacctaggacagcgtgcctgtgcatttgtatgtgagtgtgtgtgctgtttttgcacgcatgcaccggtgtgagggtgtgtgtgtatcggtgcacatctatgagcatgtcagtgtgtgtgagtggcagaaggtacacgggtgtgtacgtgcgtgtgtatacctgttcgtgtacctggcagtgtgtgggcatgtgcgggtgtgagggtgtgtgtgccggtgcacaccagtgtctgcacctgcgaccaccccgaccccgtgcccagccccctgaccctctcctgctgttctcactgcggggaaacgggtccaaccccaccactgaccccagctcatctcaggcctcccgtccacagccacttcctcaggagccctcctggacccgccagcccgggtctgaccccgg

SEQ ID NO: 272756 - DNA, 385 bp, Homo sapiens
  chr19:1785294-1785679
  hypo
acctggacaggcagcggtggggtaaatccggggcctagcggggcttgcaccaggacaccagcccctggggtccaggaagggcacctggcaatgcccccaaagcaggggtccccaggggaggaggcctccataggccatgtccaaggccccggggaggtgaggaccttgcccacctccatggtgatggacagcaggcaagacagggccaccacgaccgcaaaggactggtggtcgctgaagctggcgggtcccgccgtgtcgcggctgatccacagtgtcatgaagaagttgaccagagaggtggtcacaccatgggcgatggcttggacgaagacccagtagttgaagagctcgtccttctgccccaccacgtacagctccggct

SEQ ID NO: 272757 - DNA, 578 bp, Homo sapiens
  chr19:1799799-1800377
  hypo
gaaaccaggccatctggctacggttccctggttcagattcgggcggaggtgctgggcatggggccagacgtggctctggttctcaggcaccctgagccccttgaagatcgaggacccagctgggagctcaggtgtcggggccgcaccatagacgcggccgctgatgcagcacttgttgaaggtcaagatgttctgcgtgagcgtgcccgtcttgtccgagaagatgtattccacctggcccaggtggtcgttgaggctggtgctgcgggccttggcaggcacgtcctgcggcttgtagtacatctgcacgtcccagtcgatgaagacgctgttccccaggtagatgaactcggacctgcagaggcactcagggtcacggtcagccccgcctgctgtgtgccatccccatgcctccccgttccgcgtttgcaccggggacgcagccggcggagactcacaggatgaacatggacatcgggatggtgacgctgagcaggatgaggaagctccagaagacgaagaaggactctgcggccacgctgctcccatgcacccccgagaggtagtagtggtggtct

SEQ ID NO: 272758 - DNA, 569 bp, Homo sapiens
  chr19:1805820-1806389
  hypo
gaagggggctcctccgggccatgctccccaccccccagggtccccagcgatgccacagctcctcacccgtcaatgtccaccgtctccacatagcacaggctgctgggctccgtgctggccagcaagagcatgtcggcctggtgtggagtggggggcagcgttgcaagaggggatgcaagacaaattgggggtgcggcagccctccccaccctgggaggggtgctctcggtgagggggcgcgtggttctgggacctcggggtcaaccccagctcactgggacgatgttgtccttgcggagacagaccacatcccccacgcacagatcctgccatttcttctgcttgaagctgcggggagagggggttgtgaaggaggcccctccctctgcaaaccctccccacaccgggagaccagaggcacgggatgacggggggcccgcagctgcagtccccacctccgggcctttgccccctcaggaagccttccccgggctcccaccccactccccgcgggtccacgctcccacccagtgacctccagggtcctgcacccacgtcctcttcagact

SEQ ID NO: 272759 - DNA, 636 bp, Homo sapiens
  chr19:1807804-1808440
  hypo
gaccacccaggtaccgggaagtggctccacaggtcctgagaacatgctctgggctcctccttccccctcgcctctgaggtcagctgggagggcgggggccaggggagctgcgtggccgaggccgtttaggctggggaacagctatgcctcccgatgcccagccctgcccagcaggaaccagcggggcgtggagagggtgccgtcatcagacctggagggtgcatccatccacctttgtcattcaacatgtactgagcgcctcttgtgtgccaggccctgggcagggtagtagggactcagcgctgagggtcccagtctgtggggagtgggacgtgaacccacccatcacacagacaaacacatcgatgctgccaggtggctaggggggacttcctggaggaggcaacacgcctcacctgcaggatgatgatgatgaggaagaacaggttggacacgcggtggaactgctcgtacaggttcagcggcaggaacgagtagaagttgtacttggccgtgcggatgacattggtctggaacgagagccgcgggctgcctggcagaggggtgccatccaggccaggggatgggggtgcccgaggccagacctgcctcacttggcctcgcccagcatcctct

SEQ ID NO: 272760 - DNA, 141 bp, Homo sapiens
  chr19:1809734-1809875
  hypo
tgcagcgagagagccgggcgtcgctggagctcgaggcccaggacaaacacccctaatgaccgcccggaggagggctcatggggcccgtgggacccaggcactggggaggcccgagatgtcagagcccgtaaacagacagtc

SEQ ID NO: 272761 - DNA, 154 bp, Homo sapiens
  chr19:1810562-1810716
  hypo
agccctgaacttcataatccctcccacctgcaccgccccctctgcccaggatcagcacctgagttcctgtcctcatcttggagatcttctctctggccgaggctgcccatgctggtggggctgtgggagagaagggccccgggtcacagcagtg

SEQ ID NO: 272762 - DNA, 64 bp, Homo sapiens
  chr19:1810965-1811029
  hypo
tagaaggactctaccgccagccatgccagcctctggccatgccagcctccggccactgctcccc

SEQ ID NO: 272763 - DNA, 517 bp, Homo sapiens
  chr19:1815903-1816420
  hypo
gggctgggctgggcgttctctggccgccagctcatcccgctgctctgggctgcctcggccaggtggacgggttaccggagatttattgcactgttttggaagaggcatggggctaaggaccagcgggacggcaggagaggcgggtgggaggcgggcaggcgtcatcgcttggtcttggcgtcttctcgaaccttccagatcaccaggtgcatgcaggcgccggcgtcctcgctggagctgtgcccatccactgcggggcagatgcggtgagcacccggcccctgcgcagggacggccccagggcaggcaccggcactcaccattgtcctggatgatctgtctgaggtagtcggccatgaggttccgcagggaccgcttgtaggggaggcccaggcggtgggggaagagcacagacgtgtccaccacggtgctgtggatgacctgtgggcagcggcagagatcagcgcacgtggggcctgcgcaggtcctgctggagaaccgcgcgggacccgggccg

SEQ ID NO: 272764 - DNA, 363 bp, Homo sapiens; identical to SEQ ID NO: 218830
  chr19:1818538-1818901
  hypo

SEQ ID NO: 272765 - DNA, 175 bp, Homo sapiens; identical to SEQ ID NO: 218831
  chr19:1822372-1822547
  hypo

SEQ ID NO: 272766 - DNA, 238 bp, Homo sapiens
  chr19:1827067-1827305
  hypo
gggaggccttgagccgcttgggcggcccctgcgcctccgggaagcccaggctggagtctgagtcggagtctgagtccgagctgaggctggggagggcagagggccacacgctcggcacccctggccctgcggcctcgtcctcactctcgtccccaaagaggtcggcgtggctcagggcccgcttcttcagcttgggggcgtcctgggaggcgccctcgtctagtgagcgggctttccg

SEQ ID NO: 272767 - DNA, 530 bp, Homo sapiens
  chr19:1827338-1827868
  hypo
cttcctgtcgggcagctggagggggcggggtgggcctctgccggccgccggtcgggagtccccgcttgtggggctcggccgccgcgctggccggtcaggcctccctttccctgaggtggccacaggagtggccgaagatggcttcttcttggtcccttccggccgctctgccttgcgccgggggctgctggcctgcgggcccttcttgtccgcacggggcttctccacaggccgccctcggcccttgtccttggtcttgtccttcccctgggccccgtctttgcagctgggggcaggtggggccccggtttttttcttcttgggttttccctccttggggcagcccccatcctgtgaggactggacctgggctggggaggcgggcttggctgggggcggctggaggtcccccacgtcgcactgcacggccgtctccttggtctcccgcaggccgcccccctcggcctccaggccctctttggagggtggctgcccggtggccttgatctcagggtcggccctggctttgg

SEQ ID NO: 272768 - DNA, 57 bp, Homo sapiens; identical to SEQ ID NO: 218833
  chr19:1882112-1882169
  hypo

SEQ ID NO: 272769 - DNA, 205 bp, Homo sapiens; identical to SEQ ID NO: 218834
  chr19:1907661-1907866
  hypo

SEQ ID NO: 272770 - DNA, 1601 bp, Homo sapiens
  chr19:1911825-1913426
  hypo
tggtaggtgaattatatcttcgtttttaaaaaccaatggctgtttaaactctgtgcacaccaggggttagcaggacatgagggagtgtagctctgatgcggtgacctgggccggagccctcggactagcctcagctttggtggcagcacgccctgccttgtggagccacggcctcccgggacggactccccggctctcccccagccgcccgcagccgccggatgatcctctgctcccgtctctgtctcccacagtcggcctcgctgaggatggagcccgccccgggcctcgtggagcagcccaagtgcttggaggccgggagcccggagcctgagccggcgccgtggcaggccctccctgtcctgtccgagaagcagtcaggggacgtggagctggtgctggcctacgccgcgcccgtcctggacaagcgccagacctcacgcctcctgaaggaggtgtcggccctgcacccgctccccgcccagcctcacctcaagcgggtgcggcccagccgcgatgccggcagcccccacgccctggagatgctgctttgcctggctgggccggcctcgggcccgcgctcgctggctgagctcctgccacggccggctgtggacccccgcggcctggggcaacccttcctggtgcccgtgcccgcccggccgcctctgaccaggggccagttcgaggaggcccgggcccactggcccacgtccttccacgaggacaagcaggtgaccagcgccctggctgggcggctcttctccacgcaggagcgcgccgccatgcagagccacatggagcgggcggtgtgggcggcccggcgggcagcagcgcggggcttgcgggccgtgggggccgtggtagtggacccggcctcggaccgcgtgctggccaccggccacgactgcagctgcgcggacaaccccctcctgcacgccgtcatggtgtgcgtggacctcgtggcgcgcggccagggccgcggcacctacgacttcagacccttccccgcctgctccttcgccccggccgctgccccccaggccgtccgcgcaggcgccgtgcgtaaactggacgcagacgaggacggcctcccctacctgtgcactggctacgacctgtacgtgacccgcgagccctgcgccatgtgcgccatggccctggtgcacgcacgcatcctgcgcgtcttctacggtgcgccctcgcccgacggcgccctgggcacccgcttccgcatccacgcacggcccgacctcaaccaccgcttccaggtgttccgcggggtgctggaggagcagtgccgctggctggaccccgacacgtaggcgccgccctcctgcctccggacccttcccgctcccggccgtggggcgcccctcctggacttccgggcctcgatttcttccgcacaagcctgaccgtggatttcagggacacataccgcctccagcggggagcacgggtgctgccttccgtgcggatcgagctttcctggactcggtcattggggccaccccgtgccagcggtgcccttctgcggccgcccttgctgcgtttgtgtcccctctgtctcgcgggccgggaaactgctctgatgggaa

SEQ ID NO: 272771 - DNA, 815 bp, Homo sapiens
  chr19:1913964-1914779
  hypo
accactgctggccaggagcccgccaggcctgcagtgggggagtccgtgcctgggggtgggactgaggtgggctggagggtcccggatggggccagagccacagcgtggagtgaggaggtgggagccgcagaggcgtgcccagttgagtggtagaggcagcatttgggcctccttcatgctcaggtgctcagctccttcccctgaggggcaggaagtcagggaggagggagtgagaggtgggaggtggcaggcgggcggaggggaagatgtcctgtcccaagagccaggggtgccccaccccacggtgacatgttcctgaacgggttgtgagtggagggctcagttcctgggaactgcctcacctggactgtgggcgggaggcagctcctggccccgtgcccgccccctcgggcctgttcccctgccaggatctgggatggttcacaccccactggtctgtgatgcccagtgggcagcaggcatgcccctgctgggctggcccacctcccgatggcaggtccgcccccaggatcacggaagcagctagatccactcagtcgtgggtggatgtcaggccaggtggggctgctctggtgggtgagctcatggggttccctttcagaacggccagggtgccatgcggatgcgatggggtcttaggccctgcagcgttcaccttgtggcgcccaccccttgtgggctgaagccgggatttgggggacgcaggggcctaggacagcggggaaggggcatcctggctggggcggtgggtgggaggggctgcggccagccctgcccgttttgccagcatgggt

SEQ ID NO: 272772 - DNA, 305 bp, Homo sapiens
  chr19:1914809-1915114
  hypo
ctgtggggtaacacattgggtcgagtcaggcctgtggctcccgcttagcccactgctgtttccagagcacagggcacgatgaagggcttttcagccacggtgggtgggtggttagcgctctgcccagggcagctcagggttccctgactgtggttgtcttccttccaggcggctgcaggcttcagcctgcgctggttggtgaaacagagatgtcaggtgagtcctgcctgcctgggagcctccagcagcgtgggcgggagggagatgccagcagttcccacaggagccctcggtcctggccgttg

SEQ ID NO: 272773 - DNA, 88 bp, Homo sapiens; identical to SEQ ID NO: 218838
  chr19:1918818-1918906
  hypo

SEQ ID NO: 272774 - DNA, 92 bp, Homo sapiens; identical to SEQ ID NO: 218839
  chr19:1920122-1920214
  hypo

SEQ ID NO: 272775 - DNA, 799 bp, Homo sapiens
  chr19:1920872-1921671
  hypo
cagagacctccctgccccctcggccctcgtgcacgtgcggcagcagcgacttggctcttctcattggagcctgggtcatctcccgcaggtcacgggagaagctgagcatgcggtccctgcccgaggtggacagaaggtgaacgctcttgagaaagaaacccagcgggtcttaggagagcccggccccccttgtaatgagagaaatcaaaccacagcgcacagcgacttcatgtccaccgttggcttagtgaggccccacgctcagtgcgctgctgtggggcgagaggggacagccccgctctccctgtcctgggcggcttcaccagcgccacctccccacacactctgtgcactgctgtggggcaagaggcgacagccccgctctccctgccccgggcagcttcaccagcgtcacctccccaggggtgacgcatgcccgaggccatgagccacggcagcatctgtggtggcagaggactggaaactccagagaaatgacccccagcggggcctagctgtgtagatggtgagggtggccacatggcggcagccaggtactgaggacacggtgcagcaggggcccccggtgggccccgccaggaatcggacatcagcgggcgccgcagcctctaagcggagcatgcagcccactgacagtgtgctgggtgcctccctagacctgacacttgcatgcgggggcgtgcgatgctggccagtgggaagctgcgggggcggcggcaggagtcctcaaatgcctttgccgcttttcataaatctaaaattacatccaaacagaggt

SEQ ID NO: 272776 - DNA, 221 bp, Homo sapiens
  chr19:1955298-1955519
  hypo
tgctgctgctgctgctgctgcgagggcctcaggcgcaggcggtgactctcggggccactcctgaggtgggggatgtgggctagcggccaccgtgggcggcaggtgtgcaagcagtgctcccgttttccactgggctgcccttcaccggctgtgggtcagcgccccccactgaggctcaggctgaggcgaggctccgcggggtgggcgtgtgccagggtgag

SEQ ID NO: 272777 - DNA, 748 bp, Homo sapiens
  chr19:1960885-1961633
  hypo
tcaaaacaaaacaaaatgcaggcacggacgtttcagccccctcttcctgtggatgctgagagggtttccagaagaaggagaatgtccccgtgctggtggctcatccaggtgtgggccggtgtgcggcggggcgtgggcagaggagaggcttcgggctccggtttcctctcctgtggatgcgtcgcccccgcatggtggtcctctgcggaagtccccctgtccgtcccgttggcagccgcagtggaaagacggatggacgggctgtgacagggacagcccagtgtgaccccagccctggccgtcgcggttgtggcattctcgctgtcagggggctgttcccgtggctctcatggctgtggaggggcgtggagggggcggtccccatggccagaacctggccgtggcgggtggaggacttgaggccggctcagtggtcagcgctgctgcttgttcccctacacagaggcgttgggtggagctgcctcaggtatccctcctggctggggtgtgtgcgtcaccctgagtctccagcccatgctgaggagcctcgcaggcagggcccagcagcctatactccaggccattgctgtccgtttctccagaaggccctgctggtgggtggtcccaggagctgggcctcagtgggggatcccaggacagtggagcctgggaggggccccagtgttgaggcgtgaggtactgtctggaactagggggtgcccccaaagcggcacggcgcccagtccct

SEQ ID NO: 272778 - DNA, 902 bp, Homo sapiens
  chr19:1969652-1970554
  hypo
cccgcccaccggccgcagtgatgttctagccacagaggagccaagacctcaggtttccagagacttgggatttgcacggcagcagagtcaccgtggagaggccagggtatcacaaacttatggattttgacaagaaaggagggaaaggggagacggaggagggccggagaatgtccaaggccggcgggggccggagcagccacggcatccggagctcggggaccagctcgggggtcctgatggtgggccccaacttccgcgtcggcaagaagatcggctgcggcaacttcggggagctccgcctaggtgaggccctgctcggtggtaggtggggtcgggaggctgctggcagggccgccccgagtcaccggagcctctggtggggccgcccggggtcactggagcctctggcggggccgccccatgtcactggcaggtgcgttgaatcatcagtccgtcgtggtgcgagtgccacttcccttcgaggaggttctgtggggagagtgggtttctggccctgtcaccttttcgggaaacagttctgttgggaggcaggtggcccagagcaggccaggccacgccgcaaggagcccgatgttaagttgtgaatgactttcatggcccatgtgcacgctgggcgaagccccggctttaacggcaggtgcctgcccggcactcagctcgtgggaggtcttggccagcccggagctggcgtcaggtggctggagtgactgttctgtggtgatgatactgctgtgtgccactcccagcttcaccatgtaaaaggccgcacctggcccacctggctccgtcccttctgctcacaccaacctctcccgggtcggggtctgattgcccgggcaggcgtgaggagcagggccgaggactgagcctctcattgg

SEQ ID NO: 272779 - DNA, 182 bp, Homo sapiens
  chr19:1970824-1971006
  hypo
aggatgggcaggtccgagaggccacggcagtggatcggcctcacgtgggcacccatggcaggcggtgcccatggcacccatggcaggcactcagcccgatgaggttgtcagatgagggaaacaggcccacgcagtggtcatgatgtggctgcatcttcaagagcggccgcccaggggcgcag

SEQ ID NO: 272780 - DNA, 318 bp, Homo sapiens; identical to SEQ ID NO: 218842
  chr19:1977028-1977346
  hypo

SEQ ID NO: 272781 - DNA, 621 bp, Homo sapiens
  chr19:1978009-1978630
  hypo
gacctccccagtgccgcttctgtcctgggctagggaggtgggggggcgggggaggaggagtggcagacactgaggcggtgaccacacgggcagggtgcaggtgtcgggatgacttggcaggccatggtgcagtgctctggcaggctgggcccaggccctgctgctgggcagtggtgtcatttggagggtggtccttcagggaccccctcctgcctcctgcctcgggggtgggctggggaggtcggggctaggtgggccctgcgctggcggtgctgatggtctctgtccccgcaggaaagaatctctatacaaatgaatacgtggctatcaaattggtgagtcggcccctccaccccacccccgctgacgtgccccccagggatttcagggcagcgacccggtcccctggtgactcgctcttgtgcccccaggagccgatcaagtcccgggccccgcagctgcacctggagtaccggttctacaagcagctcagcgccacaggtaccgggcggcccgcgggtggggcgggggctgcgcaggggcagggagggggctgccgccgcacgcccgtgcgtctgtcctccgccgcagagggcgtccctcaggtctactacttcggtc

SEQ ID NO: 272782 - DNA, 283 bp, Homo sapiens
  chr19:1979736-1980019
  hypo
tccctcacccacagccgacccccatcggcaccgtccacaccgacctgccctcccagcctcagctccgggacaaaacccagccgcacagcaaaaaccaggtgaggcccgggcgggaccgaccgccccagggaggggcatgggcggccagcgtgaccccctactgcccccaccaggcgttgaactccaccaacggggagctgaatgcggacgaccccacggccggccactccaacgccccgatcacagcgcctgcagaggtggaggtggccgatgaaaccaagta

SEQ ID NO: 272783 - DNA, 152 bp, Homo sapiens
  chr19:1980883-1981035
  hypo
gtgggcgctgccaggcgggtgcttctcgacgcacttgctcccggaggctgcgccccggcgcctggaacccgaggtgggaggaccggttggtgtcaccctgctcggccctcagccctgccgcgtggggcgcgtgggcacggagcttcctgcct

SEQ ID NO: 272784 - DNA, 329 bp, Homo sapiens; identical to SEQ ID NO: 218845
  chr19:1985877-1986206
  hypo

SEQ ID NO: 272785 - DNA, 67 bp, Homo sapiens
  chr19:1992864-1992931
  hypo
ccggcccaaaacacattttactaccaggcaggagcctgctgcctcccgggcccgcccccggccccgc

SEQ ID NO: 272786 - DNA, 527 bp, Homo sapiens
  chr19:1992961-1993488
  hypo
cggccccgcctccagccaggcctggccccgcccccgcctcgtaccggccccgcccacctgcgtgagcagcatgaaggcgttgtcggctcgcaggttcttcttcaggaactccacgcaatgggcctcgagcgctggcaccgcgtacttcttggcggtgtatagcgtggtcatcaccgtctccgggccaatctgcacctcgtccgagtagagaaacctgcagaagcaacgcgggtggccgtgaggtgggaccgccatgcccgcccccaggggagagcgtcaggggaccactcagaccgttagactcggccaccggcccttgagctggcaggacccaaacacccacatcaggttccccgaggaaccttccagaattagcccctgtccgttgccctctgacatagggacacgacttggcaaggtggtcacccatgaaaacgagcaagaggctgaacccatctacacagcacacacccggaagcgtctatatggcctgtcttgttctgcccgggatgccccaggagagggca

SEQ ID NO: 272787 - DNA, 268 bp, Homo sapiens; identical to SEQ ID NO: 218846
  chr19:1999991-2000259
  hypo

SEQ ID NO: 272788 - DNA, 374 bp, Homo sapiens; identical to SEQ ID NO: 218847
  chr19:2000538-2000912
  hypo

SEQ ID NO: 272789 - DNA, 99 bp, Homo sapiens
  chr19:2005108-2005207
  hypo
gcgcccagccaggaattcttttgactgccaaattccatggaatctgtgaaccgcggtttgtttctgcactcactggctggtctgcgggttttccggttt

SEQ ID NO: 272790 - DNA, 90 bp, Homo sapiens; identical to SEQ ID NO: 218848
  chr19:2038525-2038615
  hypo

SEQ ID NO: 272791 - DNA, 175 bp, Homo sapiens
  chr19:2041006-2041181
  hypo
cccctcctgccgcccgtgcggctggtactcaccccctgaacccaggggtgctgcaggacttgggcggcactcagcctctgcttggcgtcacggaccagcagcttggagatgaggtctttggcagcgcaggagatgtgggcccagtccttgtcggggaactcgtacttgccctcct

SEQ ID NO: 272792 - DNA, 247 bp, Homo sapiens
  chr19:2046071-2046318
  hypo
acacgggtcttcccggctgtaggacggacagccggaatgccacacactgtttccacccccgctcaacaccgatcccaaggcgctgggttccccagggcgcggcgcgggcccaccttgacggcgtactcctggctggtgatcaggttgatgcaggtctgcactcgggcatgagcgccctcccccagcacatcttcctgcagctggtagacgtctgccgggcagcggggcgggcgtgagagggaccctg

SEQ ID NO: 272793 - DNA, 516 bp, Homo sapiens
  chr19:2079596-2080112
  hypo
gagggacccagccccgcccacaccttcgtctcagacgtgcagccccagaactgagaatgagtccctatcgtgtcagcattctccccatgttgctgtgcccaagtcactggtcactgggtcagggaccccacgattgggtgacccctcttcccttgatttcatccacaaagacccccttccaggtcgggtcacatggcgagatgccgggtgattccaggggcagctgtccaccccaaggcaccgtataaatgaggaagcctccaggagccggcccaagtctcatgcacgcctgagcggtgacttgtgagacacccacgggttgctctggggtggggacccggcgtcctcctactcccctgagaattctcaggggacagagacagagtccatcccgcacagggcggaggggcgacctggatcacacaccgcgcgtgtgccgggctcacgctcaccacgcagggcctgtcaccgccaacaccgttattgtcactgccaggacgccggcaccgtggcagg

SEQ ID NO: 272794 - DNA, 42 bp, Homo sapiens
  chr19:2080626-2080668
  hypo
tggcctccaaagtgctgggattgcaagcgagcaccaccgcgc

SEQ ID NO: 272795 - DNA, 40 bp, Homo sapiens; identical to SEQ ID NO: 218850
  chr19:2088265-2088305
  hypo

SEQ ID NO: 272796 - DNA, 272 bp, Homo sapiens
  chr19:2097985-2098257
  hypo
tgccggtggcagctcggggccctggaggctgaggggagccctggcggctcttgtacgtgtttcaggcatcttccagtacgagaccatctcctgcaacaactgcacagactcgcacgtcgcctgctttggctataactgcgagtagggctcaggcatcacacccacccgtgccagggccctactgtccctggggtcccaggctctccttggagggggctccccgccttccacctggctgtcatcgggtagggcggggccgtgggttcaggggc

SEQ ID NO: 272797 - DNA, 107 bp, Homo sapiens
  chr19:2113981-2114088
  hypo
gccggggcacagggcgaggcggctggcactcgctgcctgactcagactcacagccatttcccctgagctcaccgctgtctcctgggagttcacggcaagggagggga

SEQ ID NO: 272798 - DNA, 114 bp, Homo sapiens
  chr19:2115182-2115296
  hypo
gacatcctaggaccgggacctccagcgaggctgacctcaggcatctcctctgtgacgatgtccacctgctgggcaggggcgatgtcctcgtcgctctccgtgggcagcgagctg

SEQ ID NO: 272799 - DNA, 264 bp, Homo sapiens
  chr19:2116558-2116822
  hypo
aggagggaggagacgagggctcgccaggggcagccagcagctcacccgagccagctcttcctcgtccgcctccgacggccggtgcttgggacgccgctgctcctcctcgtggaagacggccctgggcctctcgtcctctgactcgctgtccgagagtggctcattgatccaggcgtccaggtccaggctgcaccggacaggagggccacacaaggcagtgtgtgaccgagcacgcgcctgcaggcgtccgccctgagcaggctc

SEQ ID NO: 272800 - DNA, 49 bp, Homo sapiens; identical to SEQ ID NO: 218851
  chr19:2120004-2120053
  hypo

SEQ ID NO: 272801 - DNA, 47 bp, Homo sapiens
  chr19:2122386-2122433
  hypo
acatactgccatccacggtggctttcaggccacggggcagcactgag

SEQ ID NO: 272802 - DNA, 31 bp, Homo sapiens; identical to SEQ ID NO: 218852
  chr19:2136920-2136951
  hypo

SEQ ID NO: 272803 - DNA, 333 bp, Homo sapiens
  chr19:2140169-2140502
  hypo
aacaaaaagaccatcccaggcgtggagaggtcagaccctcacgagggcaaaggggatgtcaaacggcgcggctgctgtggaaagcagcctggggttcctccacggttccatgtggagttaccgccccagcaattccacttctgggcgtgcacccgaggggatggaaaacaggtgtccaaacaaaaacaagcacacgaacacacagggcagcaccatttctagtggcctgaaacaggaacagcccccacgctcgccgctgatgaatggatacacaccatgtggtgggtctgctccagtcaacttgcttgactttttttttttttgagacagggt

SEQ ID NO: 272804 - DNA, 200 bp, Homo sapiens; identical to SEQ ID NO: 218854
  chr19:2148550-2148750
  hypo

SEQ ID NO: 272805 - DNA, 31 bp, Homo sapiens; identical to SEQ ID NO: 218855
  chr19:2160536-2160567
  hypo

SEQ ID NO: 272806 - DNA, 315 bp, Homo sapiens
  chr19:2176355-2176670
  hypo
atgaggcacaaggacgaaacaggcgtggggcagagggcacggctcgcgggagttgcagagcgagttcaccctgctactgcttctgcggggcactcatttttagaagtacacttacgtggcccccaaaataatgtcacgctgccaaggagagcaggcaagggcaggtgacaccgctgtcaatcagagcatttccagccctcacacctgtgagtcatctggctcccaggaacattctctgttccagtaaggcctgcgcctgtgagaagcgcttggctgaatcctaggaagggggacttgggccgacagccccctcca

SEQ ID NO: 272807 - DNA, 405 bp, Homo sapiens; identical to SEQ ID NO: 218858
  chr19:2182517-2182922
  hypo

SEQ ID NO: 272808 - DNA, 253 bp, Homo sapiens
  chr19:2191533-2191786
  hypo
cctgtgcaccctctactgctcgctcccagaagctgccactcgctagcctgggccccagcccgggccccacccacggctgcagcctgccgcagtccttccctgggcacacctgctccctccacagcggctggaaaggtcccccgcggaggaagaccccaggtccctgggctcccggaggccctcgcgccctccctgcatccccagtctccctcggcacccctgcgtctgggccgtgccctgcccctcccaggtt

SEQ ID NO: 272809 - DNA, 117 bp, Homo sapiens
  chr19:2204158-2204275
  hypo
tgtgtgtctgttagcgtgtctctgtgtgcgtgcctgtgcgtgcctgtgtctgcatgtctgtgcctgtgtgcatgcctgtgtgtgtgcgtgcccgtgtgcctccgtgtctatgtatgt

SEQ ID NO: 272810 - DNA, 230 bp, Homo sapiens; identical to SEQ ID NO: 218859
  chr19:2213811-2214041
  hypo

SEQ ID NO: 272811 - DNA, 294 bp, Homo sapiens
  chr19:2214071-2214365
  hypo
ggaaggcccgcctctgttgtggggtttgttcccagacgaattgcgccacctgtgaaagcttgtcgagcgcgtcacagcaggcaggcctgggcccctcggctggatggtttctcagcggccctgggtgtcatggagccacactctggcaggctcgaggtgtggggtcatgcgagcatcccaccatcgtggtgtgggtgctggagctgcctcatctgtccgtggggggccccagtctccgcgtgttccgcatcctcagcctgctattccagaaacggggtctgtgccctaagcaca

SEQ ID NO: 272812 - DNA, 139 bp, Homo sapiens; identical to SEQ ID NO: 218860
  chr19:2215593-2215732
  hypo

SEQ ID NO: 272813 - DNA, 576 bp, Homo sapiens; identical to SEQ ID NO: 218861
  chr19:2216069-2216645
  hypo

SEQ ID NO: 272814 - DNA, 283 bp, Homo sapiens
  chr19:2219731-2220014
  hypo
ctcctcaccccacccgactgctggcatttgtgctgcttggagaacacagccgcttcccggtgagggcgggctgtgggttgcttgggttgtgcccagtaccccctccccacagctggaccccgggacccccgcctcctgacctccctgcctcaggcccgctgcccattcacacgcaggcaccgcgcactctcgctgcgccactcgcctggggccccgctcaagttcccccgctgccctcttcccacgcggtactggacggtgaccccggcggcctcccccagcc

SEQ ID NO: 272815 - DNA, 44 bp, Homo sapiens; identical to SEQ ID NO: 31774
  chr19:2222843-2222887
  hypo

SEQ ID NO: 272816 - DNA, 144 bp, Homo sapiens; identical to SEQ ID NO: 218863
  chr19:2224700-2224844
  hypo

SEQ ID NO: 272817 - DNA, 192 bp, Homo sapiens
  chr19:2229560-2229752
  hypo
tggagcttggccggcgtgtccaggtgtcaggctccctggtctgtcacggggcacgcccgtcgtctgttgtggttagaggagctggcactatgcctgtcatggtgctggccccaggtggcgtgtgtgctcgtgggaggcctcggtccccagcctgggtgagtgttgggctcccccaggcgcgatggtaacctc

SEQ ID NO: 272818 - DNA, 132 bp, Homo sapiens
  chr19:2232597-2232729
  hypo
ttcttccaggtggcatgaggcgtctcctggcggccagtgagaggccccggctagtgtgtcatcgccgaaacggggagtggagggcctaggggtgctcctagcagaagctccgggggctgacaccaggacacc

SEQ ID NO: 272819 - DNA, 620 bp, Homo sapiens
  chr19:2243435-2244055
  hypo
cccgggggcaagaccgggagcgggggcgtggcctcctcctccgagagcaaccgtgaccgcagggagcgcctccggcagctggccctggagaccatcgacatcaacaaggtgggccagccaccgtgcagctgcctgtggtgggtgctgggctttccagggcagccctggagagggtgccagaggctcttcttgggcctccgcccaggctgggcgatgcagccccgtgtccagacgctcccctgttgcccccgagcagccacagctcccatctgtccaccccagagagcagaccctctgtggctctgagtcccatgtggacatgttttgttctgtccacagccttctgttttgcattatttaattttctgggagtggggagagctgatgtcagtccagccagatgtggtgaagggcagcctttgattttagcttgtgcagaggcaggggtgagccgagtcccctcagcaccgtggacatcggggctggagcactctttgtgtaccctgacatgccccacgggcctggcctatggcaagggctctgttaccgtccccgtcttccagatgaggtcatgggtagagggggtgccacagccgcagatggtggagttagactttgaa

SEQ ID NO: 272820 - DNA, 775 bp, Homo sapiens
  chr19:2244085-2244860
  hypo
cggctgccccagcttagggcctgcagatgggcgggtctttgggtcttcagtgtagcccatttgcttttcttgtgcctgtgtctgccttgtgcctactgctggcgtggtggcgtgggcagtggacggctccctgcctcgggagtgaccggcggtgctgtcctggctgtgcctccctctgactcagaaccaccaggaaggtggtgtcgggggctccctgggaacccccactgctcgaagcctggcccacagccccaggtggtgacacccgtgctcacgaaggcctcccgctggatcccccgttttcagaaatgcttgaccactgtcagcggtagccatgcctctacagaaggggggttctgcctccatgcctctacagaaaggggatcccgcctctgagggccttgacggcagcaggccgcgatcttctgtctaacgggcccctgttcttcccctccaggacccgtacttcatgaagaaccacctgggctcctatgaatgcaaactctgcctgacacttcacaacaatgaggtgcggcctctgcctggctccgggcggctcgcggcgggctgagtggctgacgtcagggggacctgcctgtgtctgtccgcccggcctcgagtcatgcgtgtttcctttccactccaggggagctacctggcacatacgcaggggaagaagcaccagaccaacctgtgagtacctcatgtccctttgatgcctggtgctccagcagccgttggctcaagtctctgtgagcctcgcgggccactgctc

SEQ ID NO: 272821 - DNA, 297 bp, Homo sapiens
  chr19:2247479-2247776
  hypo
tgggctcccagggtagagtccgggctggggaggctagtgcctcgggctccctgcctgatggtcgccctgaggtcacagggaccaggagccctctctgtcccccgccctcccaggtgccgagcagagagatcgacaaggcggagggcaagttctggacacactggaaccgggagaccaagcaggtgagtggctcgccccgagcctggctccttcccacccagccctggcggccctagccctgccctagccccacccgtgcctgctgaacctttctccgtctctctagttcttcctcca

SEQ ID NO: 272822 - DNA, 268 bp, Homo sapiens
  chr19:2255405-2255673
  hypo
cctggaggttctgcggacaccaactaacaggccccgtcctcccacccctcctcactcggcaaattcatactcatgccaggcatggcccggcgcccactccaggcatctctctgaccccgcatgcctgccctgggacccctccctaccgcccagcctcactggggtccagtatccatcagtacagtagcccaggctgctctggcccagagagggcgggagcccctgcaggacaacacagcaatgagtcccagacgcaccccaaaccgaa

SEQ ID NO: 272823 - DNA, 895 bp, Homo sapiens
  chr19:2275595-2276490
  hypo
tggctatcatggagacgctgacctcagccccagccctgcctcctgggcaggcctggaccaggtgtgttcgccctgggttggggtcagtcccacagcagcgccagggcctggcccatcgaggactcggtggcctcggccaggtattcgcaacacagccagtcctcgaggctgggagcttccccacctgcggcccgctctgctaggcgcaggaccagcagcccgcggcgcacccgcagccagggcccgagcgctcggagccagggaccaagcggtgctccgcggccgcgcagctcaggcccgggcccccagagcagcgcctgcagcgcgccccgcgtccgggacgccgagggccgcaagcgggtcagctgtgctgccaggagctccaggcccgcggccaaaggcgtggtcgagggcgcagcaaggctgagcagcgctcggaggaggctgcccagctgcggcgcgtgggggcccggggatcccgggggtccagggggctgcagacagacgcggccaaagtcagtgaggagcaggcgtgggggccccgtcgtcgcacagccccgaggtgccaccagcagcaagttctccggccgcaactcgactagggccgcgccccacgcctccaggaacttcagggccgcgctcagctgcagcagcagcagggccacagcccacacgaactcctccggcggctgcgtgcaggcctccgccagccactgcgccaccgtgcgctctggaacctcggctgccagcgccactgcgcctctccagggcgccccgggcagtgtgccttcaggcaccaggccacacagcccctgcagattgaagtgtggagacagggaggcctgcagctccaggccccacgggtggggcacgtccgccccgggcttgggcacct

SEQ ID NO: 272824 - DNA, 205 bp, Homo sapiens
  chr19:2278466-2278671
  hypo
ttctttacagcagtgtgagaactgactcacagaaaggccaaatgaaacaagccctgggttatgtctaagatggggcactggggacacctcagagagggtggggctgtggggctcaccttggcgaccaggatgtgccaggcgtcctcgtgcgcgcgcaccacgcggtaatacagggcgtccccgctctctgcgcagggtgagctgt

SEQ ID NO: 272825 - DNA, 157 bp, Homo sapiens; identical to SEQ ID NO: 218871
  chr19:2321612-2321769
  hypo

SEQ ID NO: 272826 - DNA, 83 bp, Homo sapiens
  chr19:2330387-2330470
  hypo
acaggcgtgagccaccgtgcccggccccgaggcaggtgttctgaatgatgagtaggagtttgccgggtcggcaggaggggaag

SEQ ID NO: 272827 - DNA, 344 bp, Homo sapiens
  chr19:2331161-2331505
  hypo
gccctggctggacccggcccggctcctggaactcctcagtcttcccagaagggaggctctccccgcctggactcactggcctgtttcaaaggcccttgatgtggatgctttcacagtcacttggaagcggggtttctaagcctagtagtttctgaacctgtgtgcggttgcaaagcgtttgtgctgcaattgtgaaggatttggaggtcgaggcttgggctttgagcctgtccttgtagcctgagctttttctgctcctccaaatttcggtgggcctgtctagaactcagggccctcttagagctgtggcctttggaagaattgttccccgttcctttaactca

SEQ ID NO: 272828 - DNA, 175 bp, Homo sapiens
  chr19:2334601-2334776
  hypo
tggcctgtgagtacggcatggtgcacgtggtctcccaggccgggggccccgaaggcaaagactactgcatcctctacaacccgcagtgggcccatcttccgcacgacctcagcaaggcagtgagtacccgctggccgggcgccgctgcggaggagaatgcgggggccccggggct

SEQ ID NO: 272829 - DNA, 258 bp, Homo sapiens
  chr19:2339495-2339753
  hypo
cttcctgctgagccgcctgggtctggggaggccccatgtccagggctctttatgcagatccaagctgcggttgctgcccacacgccagcctctggcccggcctagtggccaccccagctcaacccagggacgcgggccctgccaccctctgctgtgtggtctcctctgccctggggacgttcggggcggttccttgcacttcagtcccccccgggtcccctcctgctcccgggttttctgccccgttcccccgggtgg

SEQ ID NO: 272830 - DNA, 491 bp, Homo sapiens
  chr19:2358667-2359158
  hypo
ggcgactggggaaacgtggacccaggagctggatcctccaggactgctctccctccagcaccaggcgtggctccccgggacttgcggcacttctcaaaagcaaatcaccaacaaagacgctctgccaaaggtaataaaatggggctggtctctaaaggcagttccaaaaaaaatttccgcaaagtctcttgagataagagaggagacagtggttctaacgaagtgcaccgtctccttcgacggcacggaggaacgtgaacaacctggtgacctaagcaggaggggcggccagcgtggcagcgggtggcgcgtcaaaactgaggccacccagtctgaccatgagggagaaaagcaccagacaaacccacttgaggcgtgtcctgcaaaacacctgacctgccttccccaggagcgggcagggtgtcagaaataggaatgtctgggaaactgcgacagcccagagagatccgaggaggcgtgacgcctaaatg

SEQ ID NO: 272831 - DNA, 110 bp, Homo sapiens
  chr19:2360642-2360752
  hypo
tgtggacgcaggtgcggcgtgtagatgcggcaggggttgtgtggacgcaggtgtggtgtgtagatgcggcgggggttatgtggacgcaggtgtggcgtgtggatgcggcc

SEQ ID NO: 272832 - DNA, 176 bp, Homo sapiens
  chr19:2363009-2363185
  hypo
ggatcagggtcccagcgctcaggctggcctgaccgtggggtaattgggccctgcagagcctcacgccgcctgcttgtcctgccacgcggaatgggagtccgtgtgtgccccgctgcccacagcgtgtgaacgtgagttggggaccatgtggcccactgcgcgctgggtcccgtccc

SEQ ID NO: 272833 - DNA, 49 bp, Homo sapiens
  chr19:2376999-2377048
  hypo
aaactggagtggccacgggtgggcggctccctcacgctggcttctcctg

SEQ ID NO: 272834 - DNA, 85 bp, Homo sapiens
  chr19:2399106-2399191
  hypo
ttgcagcgagggatccgggcaaggctgcgggagcacggcatctccctggctgcctatggcacaattgtgtcggctgagctcacag

SEQ ID NO: 272835 - DNA, 189 bp, Homo sapiens
  chr19:2408350-2408539
  hypo
caggttccaagacccgacgaagtgggtggcctacgtgggtgcgacctacctcagcggctcggaggccagcaccgtgcgggcccaggtggtccagatcgtcaagcaccccctgtacaacgcggacacggccgactttgacgtggctgtgctggagctgaccagccctctgcctttcggccggcacatcca

SEQ ID NO: 272836 - DNA, 329 bp, Homo sapiens
  chr19:2413709-2414038
  hypo
ggacccctggtctgcgaggagccctctggccggttctttctggctggcatcgtgagctggggaatcgggtgtgcggaagcccggcgtccaggggtctatgcccgagtcaccaggctacgtgactggatcctggaggccaccaccaaagccagcatgcctctggcccccaccatggctcctgcccctgccgcccccagcacagcctggcccaccagtcctgagagccctgtggtcagcacccccaccaaatcgatgcaggccctcagtaccgtgcctcttgactgggtcaccgttcctaagctacaaggtattttcggggcagaaaggta

SEQ ID NO: 272837 - DNA, 92 bp, Homo sapiens; identical to SEQ ID NO: 218875
  chr19:2434913-2435005
  hypo

SEQ ID NO: 272838 - DNA, 173 bp, Homo sapiens; identical to SEQ ID NO: 218876
  chr19:2441909-2442082
  hypo

SEQ ID NO: 272839 - DNA, 196 bp, Homo sapiens
  chr19:2449202-2449398
  hypo
tgtttaaatgctcacatacttaccattgtgtaaccggtgcccacagcattccacagaggagcgggcggtgtgggtctgtggcctaggaggccacgcccaagcctgggtgtgtggtggcttccaccatccgggagtgtgggagtgcactctaccatgcccacacaaggggcacgtctcctaacgacacgctttccac

SEQ ID NO: 272840 - DNA, 40 bp, Homo sapiens
  chr19:2509906-2509946
  hypo
gctgtcacgagccactgcgcccagccgccaaaacactttc

SEQ ID NO: 272841 - DNA, 241 bp, Homo sapiens
  chr19:2511249-2511490
  hypo
attcacgtggtatcgacaactccacacaatattaaaacactgcgagaaagtgggtgcggcacacctggaattttaaaaaagtcagaaataaaaacaaccagacatcccaatgcagatggcatagaacctgctagaaccacaggcggcggctggaaacaggagacaggtctttacgaaggttagatgggcagcggttccgtggacagaggaggaggcgcggctggccggcatatggcttctg

SEQ ID NO: 272842 - DNA, 699 bp, Homo sapiens
  chr19:2513207-2513906
  hypo
gggatccccgcctcacgggcctgcacggaggacctgggcggccgtccaggaaccctctcggcacgggttcttagacgcctgtctccactggggccggagggacaggactaggctagttttattctactacttgcttctaggccagccccgtggagggggtcggggcggccaggcctcctgcgatcagggctgcgtggggtccatctcaggtgtggccgcaggtgatgccggcaggccctggaagatgtggctgcacctgctcccgtccgtgccgcagaggaggacgcagtcatctttcagaagcctccccccgaccccatgacatcttcgatttccacttgccgctgggaggagtggcccatcctgcgtctaaggcatctcccggcctcagacagccgtcctgggttgcacgggggtggaaaagcaaaaagatcgggttcgagcgacagggtaacgttttgagcggacgttttgatctccgggacaacgtctcacctcccagagtccttcagagtcactccaagatcatggaacaattttgtacacacagcagcacagggtagccccacccgccctgccgcggctccccagcctgcattttctgtttgaaaaacgtctatggtggatgccagagggtaggacaacctggaagagccaaggatggtcaaagcctctcccagccacgcggatgcctcatgc

SEQ ID NO: 272843 - DNA, 149 bp, Homo sapiens
  chr19:2518480-2518629
  hypo
ctactggttggatcccggccagcagcagcgtgatggggtctgggagggctcagagctgcgctggagggagactcaccggccgatcagaaccacctgtgccacctggccagcagggacgactctgtccgcctccccgctgggagcaaagc

SEQ ID NO: 272844 - DNA, 314 bp, Homo sapiens
  chr19:2524628-2524942
  hypo
tgagtgcatgtacacatctacgtgtgtgcgtctgcatatgagtgtgtgcataggtgcatttgcatacgtgcatgtgtgtggacatgcatgccagtgtgcacgtgtgtatgtgcacgtgtgtggacacggcactgcatgtgcgtgtgcgcacacgtgtgtgggcatgcatgtcactatgggtgtgtgcatgcgtgttggcgtgtgtgtacgtcactgtaggtgcgtggatatgtgcgtgcgtgggtgtgtacatgtgtctgcatgtgtacatgcgtgtgcgtgtgtgtgcgcacgggagtgcatgtggatgcttg

SEQ ID NO: 272845 - DNA, 336 bp, Homo sapiens
  chr19:2573860-2574196
  hypo
aagtgggattggcatttccctcccgtggtcatatgcgaacgggtgaattaaattctttctggaagaggctggaaaggcactgcatgaatgggacataccgtgggtgccacggaccagctgctgcgaggtacggccggagttctgccgcctcggggaggcctgggtatcccgagaccagagatgctgccttctcaccttgggtgcctgggtctggcccagagcccgtcacacctgggctggtgcagtccaggtgaaacccgccctgccagccacccccaccatctcccggggtgtccctgctgggcctgcattctgacatcacgccttcaaactcaa

SEQ ID NO: 272846 - DNA, 154 bp, Homo sapiens
  chr19:2672826-2672980
  hypo
caccaccagtgtggacgtcacgtgcccctgatgtgttctccccagagccctgaaccccagactattcaagagcaaacatcatggaaactcacgttgggggacattttacaaaactcctgacgagtcctcctcaaaaccactaggttggccgggt

SEQ ID NO: 272847 - DNA, 34 bp, Homo sapiens; identical to SEQ ID NO: 218882
  chr19:2682927-2682961
  hypo

SEQ ID NO: 272848 - DNA, 209 bp, Homo sapiens
  chr19:2683833-2684042
  hypo
tgccgggaggtacccgtgcagaaacaagaaaggagctcctgcaggggctggctagggagctggtggacagcatcggccagaggagctcaaatccgccctcagccccagggggccgagctgcaaaagcgacgtcaaatggacaaaaatcccaccgggcacagaagtgcgaccagcaagtctatgggtttaaaaataaatgatggggccgg

SEQ ID NO: 272849 - DNA, 76 bp, Homo sapiens
  chr19:2733948-2734024
  hypo
cataaagagctgcactggccttgcgtgttctgccgcggggcctcctctctgcttccctgaccgacatgcctgggcc

SEQ ID NO: 272850 - DNA, 275 bp, Homo sapiens
  chr19:2753323-2753598
  hypo
agtggctgaacctgaaacttcgcccctgcagatctcggttcttcctgctattgcaggggtggagaaggtgggtgcttgagccagggtcctgagccagagtccctgccagggctccgccaggttcagacgctcacgggtggggtgacctcgggcctgatagccaggcctcggtttctctgtctctagcatgagggtgccggtgcccaaccttggcttgtgggaaacaggaattcacagtccacaaaagcttagaggactttcagggagttgttctt

SEQ ID NO: 272851 - DNA, 583 bp, Homo sapiens
  chr19:2754375-2754958
  hypo
tgaaagtctcaaaaaaaaaaaaaaagcaaagcaaagcaacagacaatacgatcactctctgctgaggaccgaggcatctcaccccaccctggggtgaccctctacaccgggatgcagctggggacggaggcggagggaagggagacagcagagggtagaggctgactgtccgaaacctcccatgacccgtgacccgtgacccaagaagtgcggctccggcgtcgcggggattcactcacaagcagcccagctgatccacaaactccgcgtcgggggttttctcgaggtttggggttggagggtatcggtggcgccaaggtcaacacgaagacagacagaggtcacaacgcctatttattccccacacgtcacgccctgcaccccgggtgggcttggcacacacctcaccgccatgagcggctgcagggccgcggcggcccccgttcctactgctacctacgatacacggtactgcgcctacctcacagacggccaggagccagggagccccaggatgctccgactgacaaccctgctgctgggaccacggcgccgtgggctcgtctgccacccccaggcctca

SEQ ID NO: 272852 - DNA, 181 bp, Homo sapiens
  chr19:2761827-2762008
  hypo
ccccgcacagcgcgaccgcccggggacggcacagtctatcatcccgtgtttattccccgtacagcgcgaccgcccggggacggcacagtctatcatcccgtgttgatttcctgtattctgccgctttgacaccttggggccttgctggcctggcagagccgccccctcctggagtagccaa

SEQ ID NO: 272853 - DNA, 164 bp, Homo sapiens
  chr19:2789345-2789509
  hypo
atagtcgcccttcccgcagctgctctcgctgccaggagcccccgcctgccattcttgttttcaggctccatttacccgtttctcagagaggccctggtgtgagtggccgggccacatatgactcgcccgtagcacctgtgggtctggcacgaccacacgccagg

SEQ ID NO: 272854 - DNA, 386 bp, Homo sapiens
  chr19:2795261-2795647
  hypo
atgtgcactttcatttcctttcctggccatcctagtgtgacccaaacaccccatccccacatggcgtgagctggcagggcctggcggcatggctgcgtgggctcctgctcccccggatgctcctcgcagtatgcagtggggcctttgctgttgatgtcacatgatcaggagagacccagagaccctcctgctgctgttcatcctcttaggcgaggacccctgggaatgtgctgatgtgtcccacagtctcaggatcatgcagccctagtgctttggtaaatccagatcagggtgacccatgatagccgtggattgttatttctttttatttaaatacagacagggtctcacaacgttgcccacgcttgtctcgaactcctgggccc

SEQ ID NO: 272855 - DNA, 599 bp, Homo sapiens; identical to SEQ ID NO: 218887
  chr19:2796368-2796967
  hypo

SEQ ID NO: 272856 - DNA, 187 bp, Homo sapiens; identical to SEQ ID NO: 218888
  chr19:2812073-2812260
  hypo

SEQ ID NO: 272857 - DNA, 87 bp, Homo sapiens
  chr19:2881140-2881227
  hypo
ggcgtgagccaccgcgcccagcctaataaattcttgtttattcataatgacaaaaacttacgtaacggttttataaatttaagtatt

SEQ ID NO: 272858 - DNA, 180 bp, Homo sapiens
  chr19:2899803-2899983
  hypo
caatgtccaacaaaaaaacaaatccagcgaggccagacaggataggggctccctggggtccgcccattttcgggatcaggtgactcgaggtttggtccttattttagtgcaggctcagatgtcgggggcgagccaaagtgcaggggcctgtgggaaggacaggaggctgggaaacgtttg

SEQ ID NO: 272859 - DNA, 37 bp, Homo sapiens; identical to SEQ ID NO: 218889
  chr19:2908411-2908448
  hypo

SEQ ID NO: 272860 - DNA, 97 bp, Homo sapiens
  chr19:2908688-2908785
  hypo
ctgcgcccggccattggtttttacagtcacagaatcctgcaaccaagaccacagtcaacttgaggacatttccatcacctcacgaagaaacccccag

SEQ ID NO: 272861 - DNA, 146 bp, Homo sapiens; identical to SEQ ID NO: 218890
  chr19:2919931-2920077
  hypo

SEQ ID NO: 272862 - DNA, 33 bp, Homo sapiens
  chr19:2927484-2927517
  hypo
tagggccgggtgtggcggctcacgcctgtaatt

SEQ ID NO: 272863 - DNA, 88 bp, Homo sapiens; identical to SEQ ID NO: 218891
  chr19:2934502-2934590
  hypo

SEQ ID NO: 272864 - DNA, 37 bp, Homo sapiens; identical to SEQ ID NO: 218892
  chr19:2938054-2938091
  hypo

SEQ ID NO: 272865 - DNA, 77 bp, Homo sapiens; identical to SEQ ID NO: 218893
  chr19:2938994-2939071
  hypo

SEQ ID NO: 272866 - DNA, 69 bp, Homo sapiens; identical to SEQ ID NO: 218894
  chr19:2941878-2941947
  hypo

SEQ ID NO: 272867 - DNA, 208 bp, Homo sapiens
  chr19:2956972-2957180
  hypo
tgctgggattacaggtgtgagccaccgcacccagcccaccactttgctgttctttggaaatgttcacagaaggcaaacaatgctgtttgctctgagttaagggggagaatatgcatatattaaatacgcatgtccatacacacacagagaaggataaagcaacagaaggcacaaaaatagcatgggggaagcgcggggaaagatgcgt

SEQ ID NO: 272868 - DNA, 92 bp, Homo sapiens
  chr19:2995961-2996053
  hypo
cgtttccgtcctcgttctctgggaatctagtcacagccacagactttgctgttggggtagcagatctccacctccgccgcccggagcagctc

SEQ ID NO: 272869 - DNA, 61 bp, Homo sapiens; identical to SEQ ID NO: 218898
  chr19:2996848-2996909
  hypo

SEQ ID NO: 272870 - DNA, 224 bp, Homo sapiens
  chr19:2997566-2997790
  hypo
catggttgcctcccagtaaccgtgcccaagaggaacaatgatcaccggttccccagcccgagagagaagtgcggatgtgatagatacattttatttccaccgaggtcccctgcccatcggcccccacatgcagcaggggaaggtgtgaagccgttggccagagagcagatgggatgtacggttcctaggcagggctgggaggcggctgctaggatgtctgtcct

SEQ ID NO: 272871 - DNA, 92 bp, Homo sapiens
  chr19:3006699-3006791
  hypo
gggcaccacgcccccgcacccgcacctgggagggcagggagacgcctttgtcctgcctggcaccctctgatgtgttttttattttttgtttt

SEQ ID NO: 272872 - DNA, 143 bp, Homo sapiens
  chr19:3053351-3053494
  hypo
ctgggacccggggtcgggggagactcggggtgcccaggacgggaaaggggcagctagcattgcgtgcatgcagtaccagggtgagagggctgtggcccaggcagactgtcggttacacatgttcaaaacgggggaagggccgg

SEQ ID NO: 272873 - DNA, 114 bp, Homo sapiens
  chr19:3055115-3055229
  hypo
tagctgcacattcctgcatgcgtgtccctgtgctgtctgcacacacgtgtatccgtgtctgcatctgtgtatctcccgtgtgttgatgtgctcgtgcctatctgtgtggctgtg

SEQ ID NO: 272874 - DNA, 672 bp, Homo sapiens
  chr19:3055432-3056104
  hypo
ttccagagcagggtgaggcccgccccccacacgcctgcacccctggagtgtctctggcccggggattcttctgcacaggccggctctggtgttcagagccagggaggtccagagaggggaggcgtgtgccctggggcgcccagcacaccacccaagatggctgcagtggacaggggctgggcaagtgcggggccccctcacaacccctccccaaggccctggctcttacctcttgggagaggtagggcaggacctgggcacaaatcccgttcagccttttgacgatctcagcctggaacacacagatgaagccggcttcagtcctgggcgggtggcaggtgcaggctagccacaggaggcctgcgcggggcccggcccagccctgccacttgcggcttctaagaggggctaggtctggccagggtgggatgagcaaagccgtgttcgggcccgagggcagccagtcagtggcaaaggtggggctggacaccggctgtcgcctgcagcttagagtgaggtaagtgcaggatgaggccagactgcacattcctcgggggtcggccactcaggcccctggcaggtagtaagcgcttgtgcgaatgtagggagggctgggggccgtaggctgtggggaaggtctctgcccctccccaccaccgggagaaacactcc

SEQ ID NO: 272875 - DNA, 289 bp, Homo sapiens
  chr19:3056309-3056598
  hypo
ctgtttgtgcatctcgatgttcaagccgtaggacatctcgtagtactgtatgggggagagagagggggagcgggagatgggggtggggaaggatggggggacacggagacaaagagataggggagtggcagagacagacaaaggggggagacagcaagagacagctgagggcaggaaagaaaggagaggcaggtgggagggaaagaggagggagagacgcccacacccagcatcccagcccgccctggagaggggcagggggccgctggggctgcggatggagactggg

SEQ ID NO: 272876 - DNA, 814 bp, Homo sapiens; identical to SEQ ID NO: 218902
  chr19:3105564-3106378
  hypo

SEQ ID NO: 272877 - DNA, 111 bp, Homo sapiens; identical to SEQ ID NO: 218903
  chr19:3109616-3109727
  hypo

SEQ ID NO: 272878 - DNA, 340 bp, Homo sapiens; identical to SEQ ID NO: 218904
  chr19:3113301-3113641
  hypo

SEQ ID NO: 272879 - DNA, 347 bp, Homo sapiens
  chr19:3114746-3115093
  hypo
gaggctcgtatcccgaccccagggtctccattggcccgagccctccgggctgcttcagacactgccgtaggtggcgcagtgcgcggtccaccccctcctggtggctttccgtcctcccgctggtttgggtgctgtgtccctgtcctgcccccccacccccggcagccggcctgagcacccaccgctgtgttgcagctacctgaccgacgttgaccgcatcgccaccttgggctacctgcccacccagcaggacgtgctgcgggtccgcgtgcccaccaccggcatcatcgagtaccctttcgacctggagaacatcatcttccggtaccgcccgggccacagcaggc

SEQ ID NO: 272880 - DNA, 80 bp, Homo sapiens
  chr19:3117184-3117264
  hypo
aggatacagctgaggcgagccaggcataggccaggttgtggcatgaatgtcccctcacagccccacgctggcctcttaac

SEQ ID NO: 272881 - DNA, 212 bp, Homo sapiens
  chr19:3118890-3119102
  hypo
gtggctgagtcctggcgctgtgtcctttcaggatggtggatgtggggggccagcggtcggagcggaggaagtggatccactgctttgagaacgtgacatccatcatgtttctcgtcgccctcagcgaatacgaccaagtcctggtggagtcggacaacgaggtgggccctgccctgagcaggggcagcgttgggggccgggccttccccacc

SEQ ID NO: 272882 - DNA, 140 bp, Homo sapiens
  chr19:3135020-3135160
  hypo
ccaccaggcccagcctaaaatttattttattatctgttctttaactagaaccttaggtaaggaggtctgggatctgtgtctcttggctaccgtgcctggcacacagttggcgctccatgaatgcacgcacaatgaaggga

SEQ ID NO: 272883 - DNA, 670 bp, Homo sapiens
  chr19:3148406-3149076
  hypo
ggggaaaccaaggcacagagcggcaaagccgctagcctagggtcactgagtgaggtcccggctgcaccggggtttgaacccaggaggcctggcgtggagttgggggtgtctgacgtggggttgggggtgtcgggggtgggagtcccgtggagggctgagcggttctgctgctccatccccaggcccaggcgagagcgggaagagcaccttcatcaagcagatgcggatcatccacggcgccggctactcggaggaggagcgcaagggcttccggcccctggtctaccagaacatcttcgtgtccatgcgggccatgatcgaggccatggagcggctgcagattccattcagcaggcccgagagcaaggtgagccgccagggcaggcaggggcccagggcaggcaggggcccagggcagggttccccagaccccggagcagggccaagttccccagacttcagggcagggcagggcagggcagggcaggcagggaagggtccccagaccctggggcaaggccatgtcctccagacatatgtgcatacatacaagtgcacacacaagtatacacgcataaatgcacacacgcacatgtatgcacacgcacagacatgcacacaaggacacacacgtacatgctcacaaagatacacacgcatgcccacatgc

SEQ ID NO: 272884 - DNA, 52 bp, Homo sapiens
  chr19:3151442-3151494
  hypo
gggacaccactcctcgatgaggccattcctcatgtcacgccatccctcgggt

SEQ ID NO: 272885 - DNA, 117 bp, Homo sapiens
  chr19:3151729-3151846
  hypo
accgaggagggctacgtccccacagctcaggacgtgctccgcagccgcatgcccaccactggcatcaacgagtactgcttctccgtgcagaaaaccaacctgcggtgagcgctccac

SEQ ID NO: 272886 - DNA, 210 bp, Homo sapiens; identical to SEQ ID NO: 218909
  chr19:3155758-3155968
  hypo

SEQ ID NO: 272887 - DNA, 39 bp, Homo sapiens
  chr19:3170964-3171003
  hypo
aaaatcccaacatgtcccggcaagcgctgcgttccattc

SEQ ID NO: 272888 - DNA, 565 bp, Homo sapiens
  chr19:3196028-3196593
  hypo
gcatcctgtggtatcgaaatctgctggtcacgtccccacacccggctggttggctctgcccgagcccccaacctggggtgtcagtgctggggatgccccctggctggggccctggctgggccaaggctgatgcgccctctccctctccctagtactgctgcgcacggccactgccaacggcttccagatggtcaccagcggggtacagagcaaggccgtgagtgactggctgattgccagcgtggaggtgagtgccgcctgccccggagccagccccacgtccccaggggttcctgccatccgcctggctccccggctcggccgtactagaggggagccgctgatgggaaactggagtcggatcgcccccctgcctggctgaaaacctcctgtggctccgctggcagctgcaggaacccaaactcctcacatggccggggagtcgctctgtggagtgcccaggcccctgccagcccccggcccatctccttccttccatcatggacccccacacaccaagccgctgcctcccaccccagggcctttgcaccggctgcccctccca

SEQ ID NO: 272889 - DNA, 360 bp, Homo sapiens
  chr19:3214890-3215250
  hypo
gccgggattacctgtgtgagccaccgcgcccagacttgggtaattgcttttcagatgctcatgttacagatggtaacatggaggccgagcacaaggggttcagacgtggattggacgaatctgagggccacgccattagccacatactgagtggagtgggcgaaaagggcccaggtttaggtcaccgggataaccagtgtccagagatggacggcacttacctgaggccacagagcaggtgaggatgagccccagcgggagcgagtagccagggagccggcctgcctcctgggctggggagaagacactggaagagcctggagaccgcccagcctccctgattccacgctagacatttaa

SEQ ID NO: 272890 - DNA, 215 bp, Homo sapiens
  chr19:3219525-3219740
  hypo
gtcgccgcgccctgccactcccacgcgctttacttcctcagtaacatccatggcacgggcatcctgcagtgaccgatgcccaccagactgcatccgctaacaagacagggagaccggcctgtggtacccagatgtgcccaagctcacagcctcactattctccgtgctcacagcctcgctattctccaggctcacagcctcgctattctccaggc

SEQ ID NO: 272891 - DNA, 411 bp, Homo sapiens
  chr19:3296495-3296906
  hypo
tcttctgaaccaacttgtttcgatattccagagtttgataattgtttcgagactctcctctagcgtgcctgtgttccgtgtgtccccgtgtgcaagcgtgtgccatgccaatctgcctcgagggggcctcacccgtgtccgcggcgcccgccgaggcccccgagggcctgcttgggagtgtgtgccggtgtgcagttgtacgtgtctttctggtccatgtttactggctgtaaataccatttttatactccacatcgcagacctgcgtgatttgtacaatgtactttatttctgctacgagtaatttcatgaagtttcaacttgcaaactgacttttgggacaaaccaacacacacacagaagagaaagcaaagaacttggaactttgggttgactcggtttgagttttgt

SEQ ID NO: 272892 - DNA, 34 bp, Homo sapiens
  chr19:3308018-3308052
  hypo
tgagccaccgcgcccggcccggcagttccattct

SEQ ID NO: 272893 - DNA, 90 bp, Homo sapiens
  chr19:3381003-3381093
  hypo
aacctcagttttacccgtctgtacaatgggttgtccatgagcctccacctggcccccttagcttgctccatctgcatgctggggttcaac

SEQ ID NO: 272894 - DNA, 749 bp, Homo sapiens
  chr19:3381393-3382142
  hypo
aaaaaaaaaaaaaaaaaaaatgatcctccacaaacttccgccttgatttgtgcctctcacatagtccaagtctgtttgctcatctgggcgatgggttcttgcaggtccctgataaacttctcctgggtcccccgggccttttgcgtgcctccggcggcgtgcacgggtccgcagcgaccccctgcccacctctgcccagcccctcccactctgcgggtctgttcagggcccctccgacctcagccttcggggccgggcagtgggtccgccctctgcgtccctggcgctcctgacctctcgcctctccggcctgcaggatgagttccacccgttcatcgaggccctgctgcctcacgtccgcgccttcgcctacacctggttcaacctgcaggcgcggaagcgcaagtacttcaagaagcacgagaagcggatgtcgaaggacgaggagcgtgcggtcaaggacgagctgctgggcgagaagcccgaggtcaagcagaagtgggcgtcgcggctgctggccaagctgcgcaaggacatccggcccgagtgccgcgaggacttcgtgctgagcatcaccggcaagaaggcgccgggctgcgtgctctccaaccccgaccagaagggcaagatgcggcgcatcgactgtctccggcaggcggacaaggtgtggcggctggacctggtcatggtcatcctgttcaagggcatcccgctggagagcaccgacggcgagcgcctggtcaaggctg

SEQ ID NO: 272895 - DNA, 53 bp, Homo sapiens
  chr19:3410578-3410631
  hypo
gggccttgtgggccacgggaagaaggtgggcttttccccgcaaagaaggtggg

SEQ ID NO: 272896 - DNA, 120 bp, Homo sapiens
  chr19:3422335-3422455
  hypo
tgctgagattacaggcgtgagccactgtgccactgcccctggcttaatcatcatctcattttgcggatgaagaaactcaggccttgaaaggaaagtgaggccgggcgcggtggctcacgc

SEQ ID NO: 272897 - DNA, 146 bp, Homo sapiens
  chr19:3424687-3424833
  hypo
cattttacagatgaggctcagagaaggcaagcgacttgctcagggtcgcacagcaagaaagcggcacagctgggatttgaacatcagtctgttaagattccaggtgtctaagttcttacccacgactgagccgcccctgcagaagc

SEQ ID NO: 272898 - DNA, 90 bp, Homo sapiens; identical to SEQ ID NO: 218916
  chr19:3449010-3449100
  hypo

SEQ ID NO: 272899 - DNA, 32 bp, Homo sapiens
  chr19:3453421-3453453
  hypo
tgaattaggaaaaacgcggagaacctgctgtt

SEQ ID NO: 272900 - DNA, 137 bp, Homo sapiens
  chr19:3453941-3454078
  hypo
tggggcggatgtccgcaggggggcctgtcccctccccagccccactgccaggtcagaggtcaggcccgaccctgcagggcctggcgagtttggtgggtctccggaaaacagcccagtggccacgtggttgggcccat

SEQ ID NO: 272901 - DNA, 195 bp, Homo sapiens
  chr19:3456283-3456478
  hypo
tcagcagacaccccgcccacctgggcgatctcagccgtgacccccgggcccctcgagtcaggatccccgcctcccaaggaccttgggcctttcaggggggcccggttcaactgggggtagggcggcaggctcggaggccccaggcactgggtgcagaggcccggctgtgtgacgcctggcggtggccaccctctc

SEQ ID NO: 272902 - DNA, 139 bp, Homo sapiens; identical to SEQ ID NO: 218918
  chr19:3464751-3464890
  hypo

SEQ ID NO: 272903 - DNA, 34 bp, Homo sapiens; identical to SEQ ID NO: 218919
  chr19:3465695-3465729
  hypo

SEQ ID NO: 272904 - DNA, 1050 bp, Homo sapiens
  chr19:3490842-3491892
  hypo
tccatctgggcagcgctctgaggtctgcttgtccctccctggcccctgtgccctacctgacccactcagggaccaccaccctgtccctacccaggcctcggggtgggggagtcagaggcccccagaccctgtgtcccattcctagtgaagctgaagccaccataacgtcagcctcttcccagagccccagctctgcccctggcttccctcgcgatcctcccctggctcccctcgcgatcctcccttggcttccctcgcgatcctcccctggcttccctcgcgatcctcccctggcttccctcgcgatcctcccctggcttccctcgcgatcctcccctggcttccctcgcaatcctcccctgtcctgagccgggcatcccagagcctcccgcagagtcccaccccaagcctggaaacttccacgctacagccctgcgccaggccccgaggagcagtcaggggactcagggagtcacagcacaacggcagctcctcggtcccagacggaggagggggacagcaaccatgcgcccagcaagacacaagcgatgacaccgatttacacacacccggtttagacgccaaagctctgcgggggaggagcggccctcaagagtcctccgggagctccgggtgagggtggggccctaggagggggccccgcgcagctgctccaggccgtccgcgtactggaaggcccgcccggtctcgtgctcatacatgtccagagccacctcgcagctctcacgcaccacgcgctctgggtcgtccgcgtgagcctgcagcgcggccaggcaggcgggccgggcaatggcgcccagggcctccgcgcactcgtgccgcaccatggggttctcggtgcatcgggccagggcggccgccagctggggcaccgccgcctcgtgctgcagctgtcccaggacgtagccgacctcgtggcggaagagggcgctcccacagtgcagacctgcaggggagagggacactcgctggggccaggaggggtgggaaggggagctctgtcttttcgaagacatggggtcttgctat

SEQ ID NO: 272905 - DNA, 83 bp, Homo sapiens
  chr19:3494337-3494420
  hypo
aatggaccccatcccggcccgtaccatgagacagggagacaagtatatccctacaactcgggatcacagctgacaagcagctc

SEQ ID NO: 272906 - DNA, 83 bp, Homo sapiens
  chr19:3494540-3494623
  hypo
ggcctgccggctggagactccagaatttggggccactggggctacacttaggtgggttcgggtacaggcgcaagtgcaggcgt

SEQ ID NO: 272907 - DNA, 104 bp, Homo sapiens
  chr19:3494900-3495004
  hypo
cccagtggcacagacgcaccaactacctgcctcactggtctccttcgctgtctaggtccctcgctacaacagtccattttttttttttttttagagcttcgctc

SEQ ID NO: 272908 - DNA, 69 bp, Homo sapiens
  chr19:3509503-3509572
  hypo
tcactgctttagagcgtgcagttccctggtttttatatgttcacaggctcgggccgccatcacctctgc

SEQ ID NO: 272909 - DNA, 92 bp, Homo sapiens
  chr19:3522932-3523024
  hypo
ctcctgcccttcccgctgcaggctaaccttgccgcgggccgagccctgcctcgccatggaccaggactatgagcggcgcctgcttcgccaga

SEQ ID NO: 272910 - DNA, 381 bp, Homo sapiens; identical to SEQ ID NO: 218921
  chr19:3531590-3531971
  hypo

SEQ ID NO: 272911 - DNA, 210 bp, Homo sapiens
  chr19:3548039-3548249
  hypo
gcagaagcagtcagtggtggcgggcccagcccccgcccctggctcgaggacttcaggcgacccacccggactccagctcacccggaacacgggcacgtcctggccccccagctggtcgctgatgctgatgtcttgggtgggctccacccgcgacgagccctgcaggtgcagcaggagccaggcggcgccgtagacggtgatgttggccac

SEQ ID NO: 272912 - DNA, 174 bp, Homo sapiens
  chr19:3562276-3562450
  hypo
aaggaaactgagtttcacaaagacgggcatgggcatgggactgtggcgggcatgggactaacaagaggcagatgtgggatttgaactcagctccacgtgacctctttatgtgctggctgcggaatgccacctgagtgtggaggaacaggtgcctcactgtccactgctttttca

SEQ ID NO: 272913 - DNA, 96 bp, Homo sapiens
  chr19:3562480-3562576
  hypo
atcccgcctccctttggagaagatccagcggaggaggcagggtgtggttaaagcgccaacacatctctgcattcttgtccttttgctgttgtggtg

SEQ ID NO: 272914 - DNA, 240 bp, Homo sapiens
  chr19:3565326-3565566
  hypo
actcagtctttgccaggaccctcctggcctcaggtcctgttcagtatctggtctaccattgccagaaggagcgcattctgtgagtcttgtgatttacgttttaacgttgatgctggtcagtccttgcgctgagagcaaaacggggaggagctgtaacgaagcgcggtgacctcctggcacggcagggcctggaactcggagctttttgttgttgtgttgtgttttgagacggagagtcgc

SEQ ID NO: 272915 - DNA, 42 bp, Homo sapiens
  chr19:3568766-3568808
  hypo
tctttattaggaatacgcacatgtgtacgtgtgtaggcatgt

SEQ ID NO: 272916 - DNA, 155 bp, Homo sapiens
  chr19:3571351-3571506
  hypo
gattacaggcgtgagccactgcgcccggcccatggcggataatattctgttgtaaggatatatcccgtcatcgatccatgcatcattagcagacgtttgagttgttttcactttttggctattatgaatcacgctgctaccgacgcttgtgtaca

SEQ ID NO: 272917 - DNA, 496 bp, Homo sapiens
  chr19:3576061-3576557
  hypo
tcccgtgggttgggcgggggaaagatacatagccagacaggagtgaagggggctcactcggtacagcgatgggggatgcccagacgcggggcactcaagtggggagctggagccggctgagcagcgctgacctagggtgcagggcgtggtccctggaggcctgggaggctgaccctgcccttcccctcccccgccagaagactcgagctctgggctcatgaacactctcctgaatggacacaaggtaagcgaccttcttcctctcaaagcacctgggggagaaaggtctggaggcttctagaaccctgagtcagagccagtgctcgcccagatgtgtgcaagcaggggcggtgccactgcaccgtgggatcgctgttgattgtactcccaccggggtgtcccaggagaccctcctaggcttggggcacacccagagagcgtggctgcctcctaccaccagtaaattgccaccttgtcccttcgtcttagggtgggg

SEQ ID NO: 272918 - DNA, 1002 bp, Homo sapiens
  chr19:3577496-3578498
  hypo
accggccccaccgtcgctggcccctctccctcgccagcccccgaccagcctgagcactgacccagcctccccgctcgccacgccacgttcccattcaccccacctccccacgcccccgtcacccatccctccccacgccccgctgacgcctgagccccctccaccaccccagtcacgtcccacgcgaccccagccccccggtgtcatccccacctccccgacctcgttccctccgtccgtgactgtcctcagcggaccctggacgcccgccgctctagccccgcgtccccaccctgtccccgtcctcgccatcctcctgccccggcttaccttagcccaccctgcgccgctcctgcgctggcggtgtccggacctctgagcgcccgcgcgacccgccctgagtcaccccctaccgctgcccctggagcccccgccccgcgactccccggcaccctcgcctgaccttcccgcctgtcccccaggcacgggcgaaacgcccacgctgggcactctggacttctacatggcccggcttcacggagccatcgagcgcgaccccgcccagcacgagaagctcatcgtccgcatcaaggaaatcctggcccaggtcgccaggtgtgtgccgggcgaggcggggcggggccggggttcaaggcccggatgtgcccgccctggggttccccaggtccgcgagggctgctgggtgggactccgcagcttactagagatcacctcccggaggggcctacctgcggtcgcccctgatgcaccagtgctaggatggccatggagaaccccgggccggcgggacccactcgggggcaccagaacttccctaaagcttctcagggtggatcccagcgcccgggttagataggttcaacgcctgtcccccaaccctggcatctgttggagcagctgatgggccatggtctctggggttccccagggccggggtgggggccagagatgatgagggcctcatcccgggccctcctctct

SEQ ID NO: 272919 - DNA, 82 bp, Homo sapiens; identical to SEQ ID NO: 218926
  chr19:3600528-3600610
  hypo

SEQ ID NO: 272920 - DNA, 123 bp, Homo sapiens
  chr19:3624529-3624652
  hypo
aggcagagcaagagcgagggcctagaggcaggcactgacctgccacattctaagaacaacaaggaggctgtatggctgagacagagtgtgggggagagggaggaggcgcgggcagggaggtgg

SEQ ID NO: 272921 - DNA, 122 bp, Homo sapiens
  chr19:3630283-3630405
  hypo
tggctgtatggtttcagaggcgcccaccactctgggtttgagggacacagcaccctcgtctcggcgctttggattgtcacgcaccagaccacggggcggaggaatggagtggcatccctggg

SEQ ID NO: 272922 - DNA, 163 bp, Homo sapiens; identical to SEQ ID NO: 218927
  chr19:3638707-3638870
  hypo

SEQ ID NO: 272923 - DNA, 133 bp, Homo sapiens
  chr19:3642943-3643076
  hypo
agatacagcaaacacgtgacacccagaaagagagtggcccgcctgctcagtctacctgccttgcctacccgcctgcctacctgccccctggcagccctgcccacctgtacatatgctcctccctcccacacat

SEQ ID NO: 272924 - DNA, 427 bp, Homo sapiens
  chr19:3643106-3643533
  hypo
agtgtatgtacatccaccgtacatacgatgctccacccacatgcacagcggatgccccgcccacatgcagtgaatgccccgcccccacgcacagcggatgccccgcccacatgcactgcggatgcctcgcccacctgtaccgcggctgctccgacgtctccgagggggaccgctcaggaatggagagggatgtggatgacagagtcgtggcaatggaggctgtagtggcttcttcgaaagaaggtggcgtgcagggcaggaggtcgggccggcctgaggggagaggactgtgggcaccttgcggagcctccgagcccccaaacacacagtcgattctccctgaggcttggctcaccctgggaacccacagcccagtgcccgcccgcctcccagacactcccacctccccacacggcagggaaggacg

SEQ ID NO: 272925 - DNA, 160 bp, Homo sapiens; identical to SEQ ID NO: 218928
  chr19:3648545-3648705
  hypo

SEQ ID NO: 272926 - DNA, 231 bp, Homo sapiens
  chr19:3651844-3652075
  hypo
tccccgcgcgcggcgccaccctggatggactccatggccgtggagtagagcgccttctggcccacaggccgcttctcatctgaggtgctctgggcgccctgcgcctgccgctcgcgctcgtgctggtcgatgttgtgcacgcccagcagcaggctgtagtccatgatcttgaaactttccaggacctggcgggatcgggcaggaacacgccacgccgtcagccgtctctat

SEQ ID NO: 272927 - DNA, 222 bp, Homo sapiens
  chr19:3669699-3669921
  hypo
atcagccctgccagcgcccctcggcccccatgggcactgtgctgctctcggtgggtgcacgggagacccacgtgtgtcccatccagaggctgcaccccggtgaccgccctgccgtctgaaaacacgtccaccgcgggcactgaaggcaactgaatgcgacttggtggagcagcccatagctttgctctgctgccgggtcagaactgccggagacaagacgaa

SEQ ID NO: 272928 - DNA, 192 bp, Homo sapiens
  chr19:3676226-3676418
  hypo
tgatggtccccaccgggaagtgatgagagatgtgaactcaggtacctgcccggccctgcagccccaagcccagcgagtcgccgtaaactgtcacccggtacatccgcggtccccggcacccaccactcccagcacaccctggtgagtggcccgcccgggcttggttctgagccctgcggtgtttgggttcgg

SEQ ID NO: 272929 - DNA, 34 bp, Homo sapiens
  chr19:3680259-3680293
  hypo
gacacaccactgaggcggccggctctctgtctaa

SEQ ID NO: 272930 - DNA, 44 bp, Homo sapiens; identical to SEQ ID NO: 218929
  chr19:3691224-3691268
  hypo

SEQ ID NO: 272931 - DNA, 87 bp, Homo sapiens; identical to SEQ ID NO: 218930
  chr19:3694859-3694946
  hypo

SEQ ID NO: 272932 - DNA, 395 bp, Homo sapiens
  chr19:3709474-3709869
  hypo
agagaggggaggggtcggcagcaaaagtgtttttctgggtcatttgctcccaaatgggaagaccaagggagcttcctcgtgagccaagtgtccgattgcatctcaagtctctctccagaaccaagagggtcccccggggccgaggaggcatggatgatcgcatagtgggggacagagcggcccggcatttggggtcaccttgtggctgtgtggctgcagagctcccagggagcaggcttgcttgagattcgggagtccgtgggggtgggcgacatggatcccaccttgcctgggttttgagagcaaacccgtggactcagttagatctggcttccacacctcccttctctccgggcctctgtttcctgctctgtaaaatggggatattgagggcc

SEQ ID NO: 272933 - DNA, 160 bp, Homo sapiens
  chr19:3728587-3728747
  hypo
tcatcctctctcaggacccccgccggggctttggcattgcgatctctggaggccgagaccggcccggtggatccatggttgtatctgacgtggtacctggagggccggcggagggcaggctacagtgagtatccaggcagctgggttctggcgggggagg

SEQ ID NO: 272934 - DNA, 212 bp, Homo sapiens
  chr19:3730410-3730622
  hypo
cagggcgccaggactcggatgaagacgatgggccccagcgggtggaggaggtggaccagggccggggctatgacggcgactcatccagtggctccggccgctcctgggacgagcgctcccgccggccgaggcctggtcgccggggccgggccggcagccatgggcgtaggagcccaggtggtggctctgaggccaacgggctggccctggtg

SEQ ID NO: 272935 - DNA, 95 bp, Homo sapiens; identical to SEQ ID NO: 218932
  chr19:3739005-3739100
  hypo

SEQ ID NO: 272936 - DNA, 398 bp, Homo sapiens; identical to SEQ ID NO: 218933
  chr19:3740455-3740853
  hypo

SEQ ID NO: 272937 - DNA, 327 bp, Homo sapiens
  chr19:3747812-3748139
  hypo
aacctagacctccctcaccacggcctggccgacagctccgctgacctcagctgcgacagccgcgttaacagcgactacgagacggacggcgagggcggcgcgtacacggatggcgagggctacacagacggcgagggggggccctacacggatgtggatgatgagcccccggctccagccctggcccggtcctcggagcccgtgcaggcagatgagtcccagagcccgagggatcgtgggagaatctcggctcatcagggggcccaggtgcgtcggacatggggggcaggcctgggaagggtctccggaggggatgccagcacagag

SEQ ID NO: 272938 - DNA, 42 bp, Homo sapiens; identical to SEQ ID NO: 218936
  chr19:3754228-3754270
  hypo

SEQ ID NO: 272939 - DNA, 307 bp, Homo sapiens; identical to SEQ ID NO: 218937
  chr19:3767181-3767488
  hypo

SEQ ID NO: 272940 - DNA, 401 bp, Homo sapiens
  chr19:3770613-3771014
  hypo
caggctcaggctggcggccaggccctgtccagagcctgtgcatgttccttggccagcagccgcagggacgcctcctccagggcgaagccatctgcgaaggtgggagcaaaggcatgaggcccgaaggacgcttgcagccccgggcccgggcccaggaggcgggggaggcctggcacggccggcggtccggggcccaaccagggctccaggggcagcgacatggccggggggcgggcgaacggcagcgctggggcctcggggagtctcggagctgccacggcacccgagcctgactccagccgctcctggcggcgccacttggcccggcggttctggaaccacacctggagggtgcgagagggaaggggggttgctgtgagctcagccgctccccgccaatc

SEQ ID NO: 272941 - DNA, 141 bp, Homo sapiens
  chr19:3771587-3771728
  hypo
gtagtgagaggcctcgaacgcccgctccagctggtgcagctggtaggtggtgaaggtggtgcggttcctccggtgcttcttcttgggggcctcctcgcccggccccagacccccaccctcggttgccggcccctcgcccgg

SEQ ID NO: 272942 - DNA, 565 bp, Homo sapiens
  chr19:3777968-3778533
  hypo
gagtccttagaatccgtctttatcgggcgatcatccttcgcaggtctggggtgtccacgggccgcccagagccccctacgtgggccagcccctgctgtgggcaccaggaggatgacttgcccgcctggaccctccttgggcctggtcagtgcccccacgccgcactctccactctctcggtcctctggggccaagggccccaccgggtggggtcagggctcctggcttcggggcgaggtggagccgtcggcgtcctgccctgagacggaggctggggcacctgcactgcgtagctcccgggccagcttctcggccagtttgcggaagggtggccggcgggcgggctctgcctcccagcagctgctcatgaggacgtgcacggggcctggacagccctcggggggttccatgcggtaccccttctccacggcctccgacacctctttcagtgactgcggacagcaggcgtgggcaggggtcagggccacagcctctggacctgcccggaacccagtgcctccctgggacccccgctcaccattttagggtacggagcccgtccata

SEQ ID NO: 272943 - DNA, 495 bp, Homo sapiens
  chr19:3778991-3779486
  hypo
cgtgtttgagagcctcgggcgccgtccacttgacgggcagccggcttgagtctagccccttccgctcggctttggccaggccaaagtcgctgaccttggccaccaggtcctctgagaccaggatgttgcgggcggccaggtcgcggtgcacaagcttcttgctctccaggtactccatgccctcggccacgtgcctgggggtagtagggggcagtgggggctcaggtgccaggatgcccacattcagggctcagaaagctcggggtgcctggggccacaagctcacaaagcctccctgccccgtgcctcagtttccccttgatggatcttggaatctgcgccccgacgaccccagtgccgcagcaccctgagagtcccacttacagagaaaactgcaggagctgagcggtgttcacgagggctcgaccccgggtccgcagaaagttcaccaggttgccctgttgggggtgggagatggccgcgggatgttggggc

SEQ ID NO: 272944 - DNA, 385 bp, Homo sapiens; identical to SEQ ID NO: 218941
  chr19:3792900-3793285
  hypo

SEQ ID NO: 272945 - DNA, 39 bp, Homo sapiens
  chr19:3807698-3807737
  hypo
gtgtccatgcatgcacggtgtgcccgtgtgtgtgtgcat

SEQ ID NO: 272946 - DNA, 303 bp, Homo sapiens
  chr19:3816598-3816901
  hypo
agcgcaaggggctgcggggagagggctggcagccagacgccagaagcagcgatgagcagggccctgaccttacctggagctgccggggcagctgctgggcgatcctccgcagcaggctgtgcgtgggcttctcggagcagagcagagcgaggcgcacgttcctgtccccacgcaggaggaggcctttcgccaggatgcctactcgcatgacgcctttcaggacccgagtctggggggcaacgctgctgtggggacaaagccacagacgtgcgccatcagcggagagacgcggggtaccccagc

SEQ ID NO: 272947 - DNA, 135 bp, Homo sapiens
  chr19:3823138-3823273
  hypo
gggtctgtaaatctcgctgggagaagccgggtgaggtctcgaagcctgatccatgggaaggtccttccctgaccggggcaccaggacttgacagcctcgacttacctcctccacatattccgggcccaccggctg

SEQ ID NO: 272948 - DNA, 286 bp, Homo sapiens
  chr19:3827473-3827759
  hypo
ggtgcttggatccccggatgtgggccgcgtaggcgtccgccccggtgcaggacacggcgcacaggtcgcaatgcagctgcgcctgcaccccgcgcgggctcccgttgggctgcacgcctgtcttctgggccgcctccttctttctgtgcttctgccctcccagatgttcccggtaggtctgcggcaaggggtgagaggcagcctgggcgggggtttgcacactggccactgtcccctcccctgcaggcccccggcttagcgcgagggaactcggtggtaacagagg

SEQ ID NO: 272949 - DNA, 845 bp, Homo sapiens
  chr19:3855407-3856252
  hypo
aagtgaaagcagtcccgggcgatccggcggcagattcattgagtcattggataaatacttcctgggtgctagtggggaccagctgctgtcatgggcgctgtcacagcagcggggaataaccagaccaaagtcccgtcctccaggagggtgctgcgcgatagtccagggagacacggggtcagcaaaataattcaacgcgatctgatggttctcatgccgccgggaaggacgcggcaagggggtgtgagcagggggttgcactttctcacgggctggtcatggcgggcctggtgggtgaggaggagggtgaagacacaaagttggggaaacagggcagcgcatttgagcagagggaattgcatgggaagggcctgagggtgaagtgcccggaacctggattggtccagaaggcagcgtgactagagcggaaggaatgaggggagatggggtcagagaataaagggtgtggaacagggggcagaggacaccatgatggatgtcacaggccatcgtaggggctccagcttgtcccctgagaccccacgggggtttccagcggaggagggacatgggctacgttgtgatggggcctctttggcgctgtgcgcggatggaaatgggggcgagagcagaaggaagcgtgaaggtccaaaatacagacgaggcaggctggtgcgcggtggaggcggtgcgcgtgcaggggcgtgcgctcaaggtcagaagaaggaaaggaggccagcctggcttcccattttgggatctgcacgaaggactgccggcggccctgcctgccgcggggaagccagcaggatgaaggggttttggagaagcgtgcaggcgcttgg

SEQ ID NO: 272950 - DNA, 31 bp, Homo sapiens
  chr19:3885951-3885982
  hypo
cctggttccatctccgcgtcctcctctcccg

SEQ ID NO: 272951 - DNA, 601 bp, Homo sapiens
  chr19:3907669-3908270
  hypo
gcaggagggcaggagatatccggactctggcgtccatgcgactctccgccacctgcttctagacgacacccccgtggccaccgccaagaacatgcccggggacagcgcggatctatttggggacggcacgacggaggacggcagcgccgccaacgggcgcctgtggcggacagtgatcatcggggagcaagagcaccgtatagacctgcacatgatccggccttacatgaaagtggtcacccacggaggtgagacccgccccccggtgcccccttggggctccagcccggcccactgggcaacagggggttcgtcagtgcccctctctgatgcacggggatgttaagccgtcaactcgcttcgggtggacggactgtgggcaaggcgtgcatggtcagggaggcgcactgggggcccctgatggtcgctgtcactcctcagcgaaggcagagactggctaaggggtcgccggctgctgtggctcggagccatgccctcccgagcgtgtgggcaccgggacgtggtgggtggtgcgcgggaggcagctcagggctgggagaggactctgacgttgccgatcggctgcctctcctcagggtac

SEQ ID NO: 272952 - DNA, 35 bp, Homo sapiens
  chr19:3942203-3942238
  hypo
agggacccggacgcggatgcggccacagaacggcc

SEQ ID NO: 272953 - DNA, 431 bp, Homo sapiens
  chr19:3966072-3966503
  hypo
atctggccagtatccgcattttaaagaaaccaaggctgagaaaaggaaagcaactagcccaaggtcatgcagtcagtcagtggcgggaggattcaaaccttcaaaccaggtgctgcaggctccagagcccaggtgctctaacaggaagcagacagctgctgctgggtaccgggttcctgcgtgcctacctcccggctccacgctgtctcctgctaacagacccagctgtcccagggcagcctttgccgctcactctcagtctgtgggactcagtggcccaggaaaggggtggaaggggacacgactggacctgggcaagcagaaaaccacgccttccagcccaaagagaccggtccagtccacagggctctgaacgcctgctgggaagagaggatctctctctccctctgctgggcttggatccaggctcg

SEQ ID NO: 272954 - DNA, 419 bp, Homo sapiens
  chr19:3966533-3966952
  hypo
aagaagcctgcctaagaacagaccaggccaggagaggggagccaccaggcactgcgggtggcacataagccccgtcattcactctgccagggcgcctcctccatgctggagtggacttcggccccggggacacagggcaccatatgcaccagcacccagtcacacctgcggccgctgcacacctggacaacctggttctgtaaaccacgcctttccctgttttgctattgccaaccagatttcaggttctgccactgagtcctcctacagcaacagcagaccacagccgcccacctccagacagcccccggtctcactggccacagacttgctccttagaggcaaggccactggcaggctctcagttcctctacggaatgtgaaacgtgcctcatctccccagccgggaaagaaactcc

SEQ ID NO: 272955 - DNA, 149 bp, Homo sapiens; identical to SEQ ID NO: 218949
  chr19:3978025-3978174
  hypo

SEQ ID NO: 272956 - DNA, 76 bp, Homo sapiens
  chr19:3979328-3979404
  hypo
tgatggggatgcaggcgtggtcctcctccaggtccttcaggcagatctccaggtgcagctcgccggcgcccgcgat

SEQ ID NO: 272957 - DNA, 107 bp, Homo sapiens; identical to SEQ ID NO: 218950
  chr19:3979896-3980003
  hypo

SEQ ID NO: 272958 - DNA, 920 bp, Homo sapiens
  chr19:3982274-3983194
  hypo
ctactttcttggcccgctcggcaggccccaactggccctcccccttggcggcgaacttggccacatacatctcggcaaactgcttcagggtgaaggcccacccgtggaggccagacccaaagcccacggtaccgaggacaggatcgatctggaagtgtgagaaacgagaagcagccgtgagggcccctgcgcagagcctgaagctacgggctgggcgccttgggcatgggcctcagacgcaggctttcttcagtagacatctggtcaaagtgaagaaatgatcagtcatcacgaataggggggccagcccctccaccacccagggcagcgttccctgagctcgtctcttccagctgcccaaagatcaagggctgggtcaagtcggatgaaaacattccagcccccttctctgtcacccaacattcctggcaaaaacacacttccagtccccctcagctcaactccactccccaccggctcctgcagatcccgctgcggcaagcccaccacccagctagggagggccgtaccatgatgttgcccatggggccgctctcgccctcgccgtaggtggagatgatgacgttcacgttctccacgatgcgctggaaagtctggtagagctcctcgggctccagctgcagctccagcagggcgcggtccatcttgttcatcatcagcacaggcttgatgcgctcggcaatggcctgccgcagcactgtctccgtctgcacgcacacgcctggggacacgggggacagggcggcgctgtcatcctcaagcaaggatggcccccggttccaggccgtgcctcagggggacccactgcttacctgacacgcagtccaccaccaccaatgcgccatcggtgactcggagggcagcagtcacctccgaggagaagtcgacatgcccggggg

SEQ ID NO: 272959 - DNA, 40 bp, Homo sapiens
  chr19:3994550-3994590
  hypo
gggagcgtgcaggccgggcgcggtggctcacgcctgtaat

SEQ ID NO: 272960 - DNA, 39 bp, Homo sapiens
  chr19:3994890-3994929
  hypo
ttcaggttaggctatacaagacatcgtggcaggtcccag

SEQ ID NO: 272961 - DNA, 33 bp, Homo sapiens
  chr19:3997224-3997257
  hypo
attacaagcttgagctaccgcgcccagctcata

SEQ ID NO: 272962 - DNA, 675 bp, Homo sapiens
  chr19:4032609-4033284
  hypo
gtctgcaggctgccttggggcggtgctggggctgggcggcagccgcttgctggctcacagccaggaagccccaggatccgtctcccaaagagtccctgcctcattccccgctgtggccttggggatggtgcttcggtgacagaatgaagtcacagcaatgactctttcggtggctgtgttgcatgaaacttgccagaaaagtcccatgggtcatagtccacgcagggtgggggaggccacataggccacctccgtgtgggggcttcggctgggtctgtgctgtgcccaggttgtggtcaaatctaatggtggttgccacccggctttctccaatccctcacggccccgagccacacagcgaagcttgggactcatcgtcaggggcctgttctgggaggtggacgtcagtgccggagagaactcgaatcacagccccgcgccctgctgttcccaccctcctgacggtgtcttccgttccctccccacagtcaaggagaagctgcgccttgatcctgacagcgagatcgccaccaccggtgtgcgggtgtccctcatctgtccggtgagtcggggcgcggtcccctcctcgaggcctctcctgcggccggccttcccccctggcggccctgggcccggggcggcttggctgggccgtgagcctgcgggggcgaggct

SEQ ID NO: 272963 - DNA, 283 bp, Homo sapiens
  chr19:4033314-4033597
  hypo
tgagtgattggagcgagccacaggatggagctgggggtgaggggcaccgggcaggcgggcacaacaggaggggtgccctgctcacgcagcccctcccccacagctggtgaagatgcggctctccgtgccctgccgggcagagacctgtgcccacctgcagtgcttcgacgccgtcttctacctgcagatgaacgagaagaagcccacctggatgtgccccgtgtgcgacaagccagccccctacgaccagctcatcatcgacgggtgagcccggggccccggg

SEQ ID NO: 272964 - DNA, 37 bp, Homo sapiens
  chr19:4033627-4033664
  hypo
gtctcggtggcaccccgcttcctgcagaccacatggt

SEQ ID NO: 272965 - DNA, 369 bp, Homo sapiens
  chr19:4037867-4038236
  hypo
tgctgaccccggccgcacactcgactttcctggtgctcaccacgcagaggggcacgggccagcctcgggcgcagagggaggagtgacctttctttttctttttattgtcgttcgttttgtttttccacccttttgcctggctcctggcacctgtacctctggactctcctatcgggggattaaaaaaaaaagtaaaatgacaaaaaaagatacaaaaaagaaaaatgaaacaaaaaagtcaaactcttaaaaacaaggccggccacccacacagccgcctccccggctggagtccgagccgggaaggggtagtgggcgggagggaccaggacgccgccccgcgccctcccctccggatgccccgccgcc

SEQ ID NO: 272966 - DNA, 61 bp, Homo sapiens
  chr19:4042780-4042841
  hypo
ccccgcctggggcctcgggaaagcctggagccagtggtgcccagggcccagccctggattc

SEQ ID NO: 272967 - DNA, 817 bp, Homo sapiens
  chr19:4042871-4043688
  hypo
gctgcccctctggccttatcctgtgccagctgcctgcccgcgccaggggctatgggtcaccttccccgcaagaggggcctctggacctgggtactcctcggacactcacccccaccccggtgctctgggtcaccatccacacccagcctctctgccacgcgacagacggaccccagagagatgggcctggcttccaaggccgggcaggaagagcaggaagggtcggggacctggggcttctctccttgggacccaggatccggtcaccctgggcccaaaggtgtggtgtggacgaggtgctcaacccacccagtctcttcagggccaaaaggggaaaagggggaccccccccaagccccccatccccgctccccagcctcccccgaacaaaacacagagaacatcaaatgaggcgactgaggcggcagcggtcgtaacaggctgcgtttagtggttctttttttttttttatgtacaagaaaaatgaatttttttgttttttcatcttttgtgtttttgtttgttttttattacttttaaagcttctccctccccactcccaaaaagtgcatttttatcagttttttttttttttaaatctcccacactttataaagactctcaatacagtctctggaatgtctatctgtctgtgctctgtaccctgagggcgccgccccgccccccattcaccaggcctggcccctccaaagtccaaggcacctcgattctgggcctggggtggggtggggggcgggacctgggcatcggatcctggtccacagcctccaggcagccccggcgagggatgggggtc

SEQ ID NO: 272968 - DNA, 125 bp, Homo sapiens
  chr19:4044504-4044629
  hypo
gcagacgggggctccggcccggccacctccccggcccccgggcgcccccgcctgaagccccccaaccccagcctggacctcactcccgctctcttgcacacacgcacacacgcgtccacgcaact

SEQ ID NO: 272969 - DNA, 132 bp, Homo sapiens
  chr19:4044933-4045065
  hypo
acagtatgtgattgcgcggagtctggggagggcggggctgggctgggggggtcccggctctgggcccatgcagaggctgtggcccccaggacgggcgggtagttaaggcaaagtgggcgggcaggacaggcg

SEQ ID NO: 272970 - DNA, 188 bp, Homo sapiens
  chr19:4046238-4046426
  hypo
caaacacctcggggcgtctcccaggtcccctgcgatggcttcctcctgaaccccccttctcgctttttggggaacagaagtggattctacgtttgtggtgggtttttttttttattattttgtacaaaaataaatcgacttttaggaatttcttctgctctcgctctctctctcgctctctctctcgc

SEQ ID NO: 272971 - DNA, 47 bp, Homo sapiens; identical to SEQ ID NO: 218954
  chr19:4047771-4047818
  hypo

SEQ ID NO: 272972 - DNA, 82 bp, Homo sapiens
  chr19:4050362-4050444
  hypo
tctcttgtttctgttgatttccttgtttctcctctgtctccctgattggattgtgagccccgagaaggcaggggttgggtgt

SEQ ID NO: 272973 - DNA, 339 bp, Homo sapiens
  chr19:4054574-4054913
  hypo
aagtctaagccgttgcagtcgcccgcggccacggcggccacagcggcggccacggcctccttggtggcatccaggtcatcatcggacgccccaaaggcggaccacgggaagctggcagcggcggcggcggccgcggggggcaggctgttcatggggttgctctggaagaactcgaggtactccttggcgcggaggaggttgcgctgatcaatttgatctacaaggtccagctgcccggcgtcggcgcccgcgtcggccgccaggatctgccggtccaggaggtcggcgcacacgtggctcacggcggggatctccagcaggcgggcggcgctgaggatg

SEQ ID NO: 272974 - DNA, 305 bp, Homo sapiens
  chr19:4055153-4055458
  hypo
tcgttcagcccactcaggatgtcgctgctgtggtcggggaacgggatcccgatggggccgtccacgccgccggccatcttccgcgccgagacctgcagcagtggggaaggagagggcgctcgtgagtgggggtgcgggggttcctgtgcccactgacaagggcccgaggcccttgagaagcagcgttccaccctgctcccccagcctcacattcccacctgcacgtgaaggcggtcagatgtcgcgcctttccagccccagcttccccagctgtgcaccaaagcgatacatgccctgcctccagc

SEQ ID NO: 272975 - DNA, 236 bp, Homo sapiens
  chr19:4062303-4062539
  hypo
aggggcgccttctgcgctttggggctctggactcggcgctcggggcccaagggccagagccgctcctcggagcagctgggggaggctgggccttgataatcgccccagagacccacggtacgtgacggcacccacagcgctggaaggcaggatctgtgtctgtgccccattttgcaaacggggaacgggatcagagagggggagcagcttggccagggtcgcgcagcagaactgga

SEQ ID NO: 272976 - DNA, 39 bp, Homo sapiens; identical to SEQ ID NO: 218961
  chr19:4093667-4093706
  hypo

SEQ ID NO: 272977 - DNA, 599 bp, Homo sapiens
  chr19:4094512-4095111
  hypo
gcaggaccgggaggcggtggaggagacaagacagggcagtcagctggtggccccggggcacccgcgtgtgggccgtggtcggagggggcctggatctctccgaccagagagagtggcacagagtggctgctctgttctgcctcctggcagaggacgagggatccacctctgcactttggtgccaggggcaggacaccccccagcgggagggtgagagggaaagagggtgggaaaccccgcctggtgggtcagaagcctggacgcaaccccagctaactgtctaataaaaccccaggcccggggcaacatcgccggagcgcacgccaagggcccggggcaactccggcaccaggagtgcggtgccgttccacggcgtcccgagctcacacacatggaccggccctgtgggcagcggggtgtccgcagctccttccccgtggtctgcggcacatgcctgtgaagcccacgccacaggtgctgctgggtgcttgggggcaggagaatggagtggggctggcgaccctcccagaacctgcgggcggatcccggggagcccacagtcagcacaccaggggtccggggaccagacagaggcttct

SEQ ID NO: 272978 - DNA, 631 bp, Homo sapiens
  chr19:4096065-4096696
  hypo
cccggccaaactgggtccacagttttaagcccaagcactggggagcctggcctgacacacgtccccggagcgggagtggccgtgtaagcggtgccagcagggcaggggcaggcctttcccgcgcaggggcaggggcgggaagaggcgggggagaggtcgggggatgtgctcactgggcatgggtgtggctgctaggtgcagggagagctgggtcaccagggccaccccacctggctccgtcatcatctcgccacccaaccccaggcctagcccagtctgcaggcagctcaaatgcccgtttctctgccccagctccaaagggccaccaaagacacagaaacccacagaaggcccagggaggtggcccggcctggtcacgtggccaacaggaccttggggtgcagtcctgtgcctccctgacagctgcaggcctggaaggaggccgcgtccctccttgtgccttgttttactcatctgggcggtggaaaccctcatactgtggctcactgggttgttatggggactgacggagcaggagccaccccgggacctacaggtccttctaggctctctgggcctccttccaagaggcaagggccattcctgtacctttctccgtggaagcggggtg

SEQ ID NO: 272979 - DNA, 240 bp, Homo sapiens
  chr19:4116487-4116727
  hypo
actgcactccagccaattccttagaataaatctctctctacacatacactcaagtatcattaaggacagggatacactgagaaatccctctctgggcgatgtcgtcactgtgcaaacactggaaagcccattccacacccaggctcccatgctctgtacagcgcagtgctgagctgctgtctgtttatttaaatatagagaaccgaggcaggcggatcacctggggtcaagagttccaga

SEQ ID NO: 272980 - DNA, 189 bp, Homo sapiens
  chr19:4116974-4117163
  hypo
aacatggcctgatcatcttacgtcgccaccgctgcgtaggcggtctgtcactggctgagccatcgccctgaggtggctgtacacataggcgcaaacacacacacgcttcgtcttcatcgcttgtttctctggagaaccataacacactcgcatttctgaaacccccacgtgctagctttctgggaatat

SEQ ID NO: 272981 - DNA, 143 bp, Homo sapiens
  chr19:4168249-4168392
  hypo
cctcccaaagtgctgggattacaggcgagagctactgcccccggactccaagtggggactttctggcctgaaaccctcctccccatttcacttggcagtacgaggagcgagtgctgaaaaaaatccgccggaaaatccggaac

SEQ ID NO: 272982 - DNA, 377 bp, Homo sapiens
  chr19:4175003-4175380
  hypo
ggggtaggctcagacacctacgtgcttggtgggctgcaggttgacgatgaccaggcggcctccccggcgcttggtagccagcggcaggttcccgctgggccggatctgcagcgatgtacccagcgtgatggacaggtcggcgttcctggggccggggagcgtgggctgagcctgatgccctgctcctgccaacatcccgagccagccctgggggccggttcacacctaggccatctgtgctcaccggggcggtcaaggccagccccactcccgagtcagcctttgggatcccgccctgccctcctctgcggtccgttggcggggtcattgatctgggcgggcccttagacacttccggggagtatcacagtgtggta

SEQ ID NO: 272983 - DNA, 173 bp, Homo sapiens
  chr19:4236966-4237139
  hypo
gggctgtgcggccccgagccaggtactacgtccaagtggcggctcaggacctcacagactacggggaactgagtgactggagtctccccgccactgccacaatgagcctgggcaagtagcaagggcttcccgctgcctccagacagcacctgggtcctcgccaccctaagccc

SEQ ID NO: 272984 - DNA, 136 bp, Homo sapiens
  chr19:4290463-4290599
  hypo
atctgaagttcgcgcggacccgtgagaaccaggtggtgctgggccaacacagcgggcccttccccagcgtgcccgagctcgtcctccactacagttcacgcccactgccggtgcagggtgccgagcatctggctct

SEQ ID NO: 272985 - DNA, 102 bp, Homo sapiens
  chr19:4292187-4292289
  hypo
tctttttagcactcccaaatcgccacaaacaccagctttgctttttcttcacaagcctttattaggttcttgggggaaagtgggagcgagatccatcattac

SEQ ID NO: 272986 - DNA, 331 bp, Homo sapiens
  chr19:4311899-4312230
  hypo
ggtgtggcgcatgccggatgaggacagcaagattgaccactacgtgctggagtaccggcggaccaacttcgagggcccgccccgcctcaaggaggaccagccctggatggtcatcgagggcatccggcagacagagtacaccctgacaggtaagggcagtgtgtgccagctccgcccagctgtgaacagccacctcttccagcctcccgtctcgccatcagtcactgggggccttggggacgatccccaaagctcatggggtctggaagcagcctggggaggtggatcagaaatatgagacagtggccaggcgcggtggctcatgcctgta

SEQ ID NO: 272987 - DNA, 114 bp, Homo sapiens
  chr19:4322986-4323100
  hypo
cacgctgatcgacggcggggagcattactgggaggtgcgctacgagccggacagcaaggcgttcggcgtgggcgtggcctaccgcagcctgggccgcttcgagcaactgggcaa

SEQ ID NO: 272988 - DNA, 42 bp, Homo sapiens
  chr19:4360669-4360711
  hypo
cccacagggtgaagtggcagcggctcagcaaggggagcctgg

SEQ ID NO: 272989 - DNA, 753 bp, Homo sapiens
  chr19:4361147-4361900
  hypo
agccaccccatggggaccctcgatcccatcctgttaaggctgcgggactcgagggtaggcagtgggccgggcccccgtcgggtcaggacggaggtgggggctgccccagaggaacattagtgtttctaagagcaccttagtgttgccccgcctcggccagctgggcgagaagttggggagcgggggaggaggctggcgccatggagtggggaagggagccgtcaccgttgggagtcagcgctagtgtaaacaggcatccccacccacccagataagcccccccacccaagtgtggggtcctgctcagggagtacctcaagggccggggcccaggtggcgccggcaggctcagacaccgccctggcagcaggggctccgtggaatgcaggagacccagcagggggtgccggccagtgtggacggaggggcggggcggggacacgggtgagtcactgcggcaggggcacaagcacctccacgtagctgagcgggaagaagcccgactggccgtccagcatgccctcgtaccagttctcatcgatctggttggtcagcgtgatgacgtcgccctcatggaagcccagctccccgtcgttctcgggctcgaagtcgtacagcgccttgcagctcggctggtccaggggcgctgggggcgggagcgggctgtggggctggggctgctacgcctcaccccgcccagtctggggtctcagacctgctgtgacctggagcgtgtgggtgggcatgggcctc

SEQ ID NO: 272990 - DNA, 393 bp, Homo sapiens; identical to SEQ ID NO: 218967
  chr19:4371567-4371960
  hypo

SEQ ID NO: 272991 - DNA, 48 bp, Homo sapiens
  chr19:4419788-4419836
  hypo
gaacctccgagtcccgcacaccgggttggggagcggagaaagtatcca

SEQ ID NO: 272992 - DNA, 61 bp, Homo sapiens; identical to SEQ ID NO: 218968
  chr19:4429586-4429647
  hypo

SEQ ID NO: 272993 - DNA, 185 bp, Homo sapiens; identical to SEQ ID NO: 218970
  chr19:4442913-4443098
  hypo

SEQ ID NO: 272994 - DNA, 415 bp, Homo sapiens; identical to SEQ ID NO: 218971
  chr19:4446322-4446737
  hypo

SEQ ID NO: 272995 - DNA, 237 bp, Homo sapiens; identical to SEQ ID NO: 218972
  chr19:4483097-4483334
  hypo

SEQ ID NO: 272996 - DNA, 37 bp, Homo sapiens; identical to SEQ ID NO: 218973
  chr19:4544028-4544065
  hypo

SEQ ID NO: 272997 - DNA, 188 bp, Homo sapiens
  chr19:4547998-4548186
  hypo
cttgcttcccgcccacggctggcctggggtggacactcacttcatacaccccgagtactgctggcagcgagccacaggcactcggaccacgcagcgggggaaggcagccagcaggccccccgaagctgcgtccagctccaagctcagcagccgctgccctgtctcgccaccgccgggccgtccacacc

SEQ ID NO: 272998 - DNA, 152 bp, Homo sapiens
  chr19:4550224-4550376
  hypo
tcatccggcaaggcgctggaggcattgtactgcatcccgggggctgcgcagcacccgggcctgggggtgacaagggtgtggtcaggacgaacgtaaaggttctcataaaggggcctgattcaccagaggtacccattgctttgcccaacgac

SEQ ID NO: 272999 - DNA, 296 bp, Homo sapiens
  chr19:4550712-4551008
  hypo
tcagcatcagctaaataaccacccggaagccccagccctcggccctggggatcaggacctcatccgggcatgtgactcaggatggagggggttctcaccggggtcgaggcacctgatcctccggcaccggcgtccagatggactcgggggacttctgctctcggaagcggccttcaaacacagctgccacctgtgtcaggtcaaaggcgcagacagccgagccagggatgctgaggggttgggatgaaagagtttggtgagcccggtgggaggccccatctcggacaagtgcgtgc

SEQ ID NO: 273000 - DNA, 38 bp, Homo sapiens; identical to SEQ ID NO: 218975
  chr19:4554410-4554448
  hypo

SEQ ID NO: 273001 - DNA, 62 bp, Homo sapiens
  chr19:4554999-4555061
  hypo
tggagtcatgtttcacggtgcgcagggtgggcctgtccccgaggctgcggtagatgacagca

SEQ ID NO: 273002 - DNA, 196 bp, Homo sapiens
  chr19:4555921-4556117
  hypo
aaaagccatggccagcggaggtcgggcgagcagaggcctggaggttggacctggggcgcagggagtctgaagactcacgctgtagttggcgcacaccgggttgaaggcgttggaaccgcacacaaagagcgtggactcgtcccgaaggagcagcacctttacgaagtttcgacactcgccctgaggtggggacagg

SEQ ID NO: 273003 - DNA, 458 bp, Homo sapiens
  chr19:4556913-4557371
  hypo
atgccagggctgattcgcaggggccgggaccgagccagggccaactcacctcctgtttgcccttcatccgacacacgtttatgtcgctggggttagatctccaggtcagcttctgcagacagagagagctggtgagggggtaacgggtcccagcagccctgagtgaccccgccgtgctgggccgaatccacccagctccccggcgcagtgccgcgtccccctggccctacccctccactcccacctgcaccccttcctcaccctctggtaccgcagctccgtggacgtggggggctccagctctacgcggtagaggttgtccctgggggaggggcatagttagtgagaactgggggctccgccaccctctcccgttccatccttcccactgccaatgtggtgtgcacacgggggcatgcagggccatgccaatgcctctgacacgagcaactctagcg

SEQ ID NO: 273004 - DNA, 207 bp, Homo sapiens
  chr19:4566461-4566668
  hypo
ctggggttacccgacgcctgtgcgcctccccctatccccaagaccatctgcttctctccgtgaaactcgaggagcctctgccagcagccgctcggcgcctgcctgctcagaagcggccccaacacctgccacgctgcggctgccggacacctggtcacagggagccacggggctggcgggtgcgccccgtggcgtgcggggttctcc

SEQ ID NO: 273005 - DNA, 35 bp, Homo sapiens
  chr19:4578035-4578070
  hypo
ggatcacaggcgtgagccaccgccactgtcttact

SEQ ID NO: 273006 - DNA, 78 bp, Homo sapiens
  chr19:4627183-4627261
  hypo
gatcttacacattacgcagaaaaggcgcttatcaacattcttttgccagtcattaaaacaaccactcccacgataaca

SEQ ID NO: 273007 - DNA, 138 bp, Homo sapiens
  chr19:4670740-4670878
  hypo
cgaacttctcataatcgttgcagccaagatgtgtgtgcatcgatattcaaaattagcagagggaaagtaggatgagaagcaggatgcttgcttttgtttccctcttgttgcccaggctggagggcagtggcgcgatct

SEQ ID NO: 273008 - DNA, 109 bp, Homo sapiens
  chr19:4672875-4672984
  hypo
atggccgagctctgcggctaacaaggaatttcagttgtgagctgttgggagtctgctacggaacccaggcaggttgtgcgtatgcgtgtgcatgcgtgtgtgtgttctt

SEQ ID NO: 273009 - DNA, 158 bp, Homo sapiens; identical to SEQ ID NO: 218976
  chr19:4675504-4675662
  hypo

SEQ ID NO: 273010 - DNA, 641 bp, Homo sapiens; identical to SEQ ID NO: 218977
  chr19:4676079-4676720
  hypo

SEQ ID NO: 273011 - DNA, 207 bp, Homo sapiens
  chr19:4678845-4679052
  hypo
aagatacctcctgaatctcccgccggtacaactatggaccacgtcccactgtcccccacaggccatccacaaagcagccagagaaatgtgggtcaaatggcaagccgcccaactctatgctctgctcacaagcccgagtcacctcccaccaccctcagttgaaaatccagccgaagccccgcccccgctgaggccccacccctctat

SEQ ID NO: 273012 - DNA, 222 bp, Homo sapiens
  chr19:4679434-4679656
  hypo
cagggaatgcttggccccagcgccttaggaaggagcctgctagggccttcagcactcagcggtttcttctacgcaatttctcagtttcaaataaagcccgtctgcggggcaatttcggtaagggttcctccctccattaggcccggagcaggggtgggtgtggcagcccccgatcccgtgcttccagcaccgaaggcaggcggaaccctgagctgtcaagac

SEQ ID NO: 273013 - DNA, 74 bp, Homo sapiens; identical to SEQ ID NO: 218978
  chr19:4683997-4684071
  hypo

SEQ ID NO: 273014 - DNA, 141 bp, Homo sapiens
  chr19:4687368-4687509
  hypo
agcccagcagtgtgctgacccgctggttttcatcccacactctgtatatacagtttcgttgataaagaaacacttcatggtgatacgctgatgtgtgtgacggagccagcactggaacccggagtcaccaatgcagggtcc

SEQ ID NO: 273015 - DNA, 121 bp, Homo sapiens
  chr19:4697634-4697755
  hypo
accagctccttctcctgggtcgagacgatctgaagggaaacaaacaggtgtgggtcatgccctggcctgcccggcgctgctcggaggagaaggccactgcgctgggtcccatcatgtcccc

SEQ ID NO: 273016 - DNA, 284 bp, Homo sapiens
  chr19:4714199-4714483
  hypo
ccgtggatgatgctccggagcccgtcccacgagtgcttctgcacctggaagcgggcggccgggtcatctgtggcggctgcgtcgcctcggtcggccgttggggtcccggtggtggccatcctctcagccccctcggaattcagcgagaagctgcggggaggaagcaaagactatgagaaaggagaactgttttacctacgagctgccccaatgctgccccttgcgaggcactcaggttcttccagacgagccccacccctgccgctttccccactccctaaaca

SEQ ID NO: 273017 - DNA, 32 bp, Homo sapiens
  chr19:4755951-4755983
  hypo
aaaaaagggccgggcgcggtggctcacgcctg

SEQ ID NO: 273018 - DNA, 300 bp, Homo sapiens
  chr19:4789386-4789686
  hypo
cagaagtttatagcagctttatttgtaatcatctaaaactggaaagaaccatcacgtaatggataaaagaatggtggctcgttcttgccatggaatacagctccgtaataaaaggcaacgaactgctaatacacgtaacagcatagatgcatcttgaatgcattgtgctgaatgaaagctgcagaccccagaggccgcatactgcatttttccgtttctgtgctgttagtatgaaacgcagagaacagatcagcagttaccagtggctgcgggtggacaaaggcgttgatcaacagggca

SEQ ID NO: 273019 - DNA, 478 bp, Homo sapiens
  chr19:4795048-4795526
  hypo
gtacagtcttaatgcgataaatccactagctaagacgtcgagtgccaagaccagccttccagccgaggtttggacaaagtctcaggttcccgtgactcagggtaaggtgctggggctgccagaggacctgccccagcaagatttttgtcaagagcgagactccatcagcccaggcagacgggagcaggttcttggccagcgtagacagcagcaaacagcagcagggaagccattctcactgcatcctccctgcagtagccacggccaggcccttaggaggagcagtgaccgggggtgtccagaaatatcctgtccctggatggaaactaggtctcgtttggatttttttttttttttgccgtgttaggaaattatttattaatttacaagacaggttttaactcagccgaggtgggaaatggtgtccctgtccctcccaaagcacagagcacagaaatgaggccgtttacatggcgag

SEQ ID NO: 273020 - DNA, 120 bp, Homo sapiens; identical to SEQ ID NO: 218979
  chr19:4798239-4798359
  hypo

SEQ ID NO: 273021 - DNA, 159 bp, Homo sapiens
  chr19:4798599-4798758
  hypo
cgacagagcacaagactccatctcaaaaaaaaaaaaaagaaagaaaaatgcctaaggacacagcgcatgaaggaagggtcgagattggaacccaggaccgtcagagttcataccttgtgctgattctccatccgggacgccagacacatggatcccttt

SEQ ID NO: 273022 - DNA, 726 bp, Homo sapiens
  chr19:4816440-4817166
  hypo
gctgctggctgtggggagggcggtgggggggtgccagcctgccatgcgtgcaggggtggcggctgcgggcaccccggccaagtgggaaagggtggcggggctcccaggggcacctggcccccaaagggcattcgagccccatagggcgccccagtcccaaatgacatgtggctcccaaaagccacctggagctgctccatctgtgcctggtaggacaagtagctctggaggtaggctgagtaggctgcgttcagtgccgccgcctgcatccgctcaccgtccaggtgttggctctgttcccgcagggctcgggtgtcctgttccttcctccacatggcctttcgggcctgaagcctgtggggcttgaaggtgttggccaccttcctggcgaagatctgggagtgttcgtccagccgcaccagcccggagagcaggctggccgtgtcggagctgagctgggccggggagctctccaggggcaggaaggggatgacacagtctggcgacccctgtcgcgtgaggttgctcatcatggcttggttcacctggtgcaggctcaggcgacagtcgaagttggaggtgagaagtaggatgatgaaagctgagtggtctatggcgtcctgcaggcagctcagctccccgcgccccggcacctggaaatcctcgcagaaggtggccccgtcgggcacgccaagggcctccagcttctcccgaacccgcagggcg

SEQ ID NO: 273023 - DNA, 605 bp, Homo sapiens
  chr19:4817458-4818063
  hypo
ggcctgcagacccctcggtgcactccactgggtagttggtgctggtttctggagctgcgggggtatcagggaggccagtggaggttgcatctggggccacttcgggaagcccaggaggtgggctgcttggcagctctggtgggctggcaatctcccccgatggcggccagctcatctcctcaggctcctggcagccaccggggacaggctcgggcaccaagctggcctgggggtcgtcacagagcttgctgggcccatgtgggctgcggtgcaggctgaggaagggcatggtaggggactggctgatttccaagttgctggccagggaggcagggctgccagtggatcgcagggagcacccttggctccagtccgaaacaccgtcaatggggcgtgggaggctcctggtcccagagggcaaagccgaggatggtgggaggcagcccagattggactggagcgtccggatgctccctggatccccagcaatgtcccacccacaccggtttcgggcctcatcctgaagttcccccagccggtggtcgtccctggagctgagggtgcggacggcttcctggtaggccacgtcccgcagcgaggcgggg

SEQ ID NO: 273024 - DNA, 80 bp, Homo sapiens
  chr19:4835678-4835758
  hypo
tactgaatattcttcgatctgattttcctttttaattcgcataggccagagttcagcaaactgtttgttgtaaaggacca

SEQ ID NO: 273025 - DNA, 145 bp, Homo sapiens; identical to SEQ ID NO: 218982
  chr19:4851495-4851640
  hypo

SEQ ID NO: 273026 - DNA, 166 bp, Homo sapiens
  chr19:4851997-4852163
  hypo
gtcccagagcagcccgctggccacacttacccagttcggcatccgtaaggggcaggtggttgtccgcccactcctccgacttccccagcaccgtgtcgaccccactcaacaccatctggcccaagcgggagcccatgaccgattggacgccgccggtcactacgga

SEQ ID NO: 273027 - DNA, 34 bp, Homo sapiens
  chr19:4902800-4902834
  hypo
cgggcagcactaattcgatcgacttcaccacaga

SEQ ID NO: 273028 - DNA, 219 bp, Homo sapiens
  chr19:4914580-4914799
  hypo
cgcagggagctgatcgagggcagtgactttgggcagacggcccagcctaggcaacgggagaggcatctgcggcccccacccctcaatcttttttttttttttggctgcacatcaaaataacaatagctgtcttttgcggcacctttaacctgctcgggtacaacgctctgcactgtacataatcttttcagcatccctggcccgcgactcgccagctcc

SEQ ID NO: 273029 - DNA, 68 bp, Homo sapiens
  chr19:4930783-4930851
  hypo
ggtggtcagggtgacgcggaaggccccctcccgggacgagccctgcagctccacgtccaggccggcgc

SEQ ID NO: 273030 - DNA, 150 bp, Homo sapiens
  chr19:4934647-4934797
  hypo
ctcctttttgtggccgagtgatagtacgtgacgtgttgtctataaacacgagcatcttggcaacggcgttccaagtacaggtacagcaagcacgcagaggtcctgggctgggacatttatggtgcatctgtggcccggtagggaggtcag

SEQ ID NO: 273031 - DNA, 191 bp, Homo sapiens; identical to SEQ ID NO: 218983
  chr19:4941804-4941995
  hypo

SEQ ID NO: 273032 - DNA, 129 bp, Homo sapiens; identical to SEQ ID NO: 218984
  chr19:4944359-4944488
  hypo

SEQ ID NO: 273033 - DNA, 205 bp, Homo sapiens
  chr19:4962295-4962500
  hypo
agacccaggagatgacggtgacgggctgaggtcctaaccgcagcctgggaggtgctgggctgttcactttgcagcgtcaagttgcaggggtcagcaaacgacagccaatgggacccaagtcaggacactgcctgtctgtaaataaagttttattgacaccaccacacccatttctttatgtatatagtggcgtttacgctaccat

SEQ ID NO: 273034 - DNA, 81 bp, Homo sapiens
  chr19:4973466-4973547
  hypo
tgggattacaggcatgagccactatgctcggccaagttgcacatacttttactaattcgcgttcaaatgagcttaaccact

SEQ ID NO: 273035 - DNA, 469 bp, Homo sapiens
  chr19:4986364-4986833
  hypo
gatggcggagtaaacgggtgatggccactgagcgctggccgtggggactcttggtcctggctgccaagtagaagcttcaggggtgctcttcacagtcagctgactctgctgtccctgatagcagaagacagcgaaggcacctgccccctgccatggcaggtcggcgggcacagaggagggctcgggaggctgtgtcctccagcgtctccatgtttactgtgccaggccaggtgctgaggggccggcgaggaagacgtgaggactggagagagcctggattagggccctcgaggggcggcgctgctttagccgggggaacagggagggcctctcccagcaggtgacattcagtcagagacctctgagcgactcacacctgcccacctttgcaggatttgggacaagagtgctccaaagaagtgcaggcagcacgtgcggaggccccaaggcggaacgaggcgcagctcac

SEQ ID NO: 273036 - DNA, 81 bp, Homo sapiens
  chr19:4988235-4988316
  hypo
tgtcctgagcttctgctggacgcgctggaaaccagccttctcatgaacccttctttttttttcttttttgagacggagtct

SEQ ID NO: 273037 - DNA, 282 bp, Homo sapiens; identical to SEQ ID NO: 218989
  chr19:4990572-4990854
  hypo

SEQ ID NO: 273038 - DNA, 42 bp, Homo sapiens; identical to SEQ ID NO: 218990
  chr19:4991094-4991136
  hypo

SEQ ID NO: 273039 - DNA, 221 bp, Homo sapiens
  chr19:5013968-5014189
  hypo
cacaggggaagaggcgcagcccgtggcccggcagtccaggacctgctgttcccttcctacccggggcggggcctgtgggaagatatggaagtcgggtgaatgagccgtgcccagtgattttaaaaagcagattaaaataacatagaaaatgtcagagctcattgcgtgctctagggcatttgtgaaacttgcattatttatttttttgagacagggtctcg

SEQ ID NO: 273040 - DNA, 151 bp, Homo sapiens
  chr19:5022644-5022795
  hypo
tctgtgaccatgcgcggctgttcctgctccacctcttggagtgccgcctctgtctgttggtgttgcaggggagctgggttgggagagctcactcccttgtctgattttctggaaactgtgctcctgtctgagtgagcgcaggcagaggtgc

SEQ ID NO: 273041 - DNA, 674 bp, Homo sapiens
  chr19:5023035-5023709
  hypo
aaagggacttttcgcgggtgggactgagtgaaggaccctgagctgggagatgaccctggatgatctggggagcccgatgtcctcaccgggtcctcatgagaggaggcaggagggtgagagtcagagagaggctggaagaggctgtgctgtggctgcggaggtggaggaagggccttgagctgagggaacctggcacgcgctggtgctctctggagtaggacgaagcagagaacgttctcgtgccaaggttttctctttcctgcctgagggccctttatgtagatcagaccagagacaagtgaatcccggtcttgccaggggaggcatttggagctgctcgtgggacgtggtgatgcggtgccaggccacatgcccggggctggggccgagtggcgttctcgtgctgcctctgtggccaggtttcacttgggaacctggctgcatcgcgggttcctcctgggccttctggtggcttggggctcctctgtcctcggtccctgctgggaaccgtgctttggcagcaggaaccagcgagatggcagcacaggggctggaggccggctgggactcactggggccgcatggggcttcacctgatgcccagccctcctgggacagggaccagtgggagcaggaggtgggacaagaggacgagggctcgagggagcccccac

SEQ ID NO: 273042 - DNA, 134 bp, Homo sapiens
  chr19:5031056-5031190
  hypo
acagtggtccagctgcggcctctgctccctctgagccggtggctccctggggacagtgcgcaggccctgggtgaacactacatggccacatctgggtgagagcgggagggcaggtgcagcgttggggggatcct

SEQ ID NO: 273043 - DNA, 523 bp, Homo sapiens
  chr19:5035321-5035844
  hypo
ttctggcttgggatccaaggcgtcctgatgtcaggacgttgaggggaatcagcatctcagaccgccctgcgctcttccgaggtgcctttaaatgcccgccccgtcacttcttcctcatccctcacctcccaccgggctccatgccccggtgtttccggctctctctgccctccacgtggcggccttgggtgcagcctgggttcccgggtggcctgtcctcccccgcgctggcacctccgcttcgtccctccctccctctgcctccttggctgccgcctctttgagccctcatgtcgctgcttcaggtttctgcactccccccaggccagttcccccgagattcttggcaccggcgtcttaagccagtgtggggagtatggtttccctgccttgcgttctgcgtgttccttcccatgcctctgcagcggcagctcccatgctgcttctccttgcaccagtgcagagaatcctttctcaaacccgtggagggggctgggcagtagggggccgtccgggtcccatg

SEQ ID NO: 273044 - DNA, 447 bp, Homo sapiens
  chr19:5037562-5038009
  hypo
tctccagaaagagccggcgctaagctggactgtcctttccttgggaccggcctcatcttggtttaactctaaattagtgtttctcttcgcttggcactgtggacttggggccgcatcgttctctggggtggcgccatcctgggcattgcagggtgctgagcagcttccctggcctccatctacctcatgccaggagcaccctcagtcgtgaaagccacagacatccccagacatggccaggtgtcccctgggggacaagaccccccctcagttgagagccacctgctcgctgcggctgctgctgctgttactgcttttgctaaagaaacctgtgcatgccggccacggaggcagcaccttcctgtcgttaacaggcacctggaggataagtgttttcattgccaagcaaaacagtttcttcactgatgtgatcgctgggtccttggg

SEQ ID NO: 273045 - DNA, 335 bp, Homo sapiens
  chr19:5038229-5038564
  hypo
tggcagccccggagcggctgggagggcctgcacagaagggtgcctggcacccagaaggcccgtggtgcccaccggcagtctagaatctggtcttgtcggcccataggctcacccccaccagaggagggaacatgaggctggggacaaggccaggagcccagggtgaggcgtgtactccggatagccctggtccctcagctcctggatgtctccagaaagagccggcgctaacctggactgtcctttccttgggaccagccttgtctcggtttaactctaaattagtgaaggcaccgggttccggctgcagtgccgcctctgacaggtgctggtcc

SEQ ID NO: 273046 - DNA, 40 bp, Homo sapiens
  chr19:5049196-5049236
  hypo
ggactgacagggatgcgccaggagccgagggcctctcctg

SEQ ID NO: 273047 - DNA, 418 bp, Homo sapiens
  chr19:5058359-5058777
  hypo
gagcagtgccaggcccgggagcccttgggatggaggcagggagaatggggggctctgaggactgagggaggaggggagcccggtgaggggaggatgggtgaccagctcaggagcaggggcgggaagggggcatagaagcttcctaagcaggggagctactactcttggccatgttccaggaggatggagtggctgtaggagcaggctttcgggccagggcctgggtgtggtgggagccggggctggctctggaccctgcaggggctgccttagcctcacgctgtctgaccagcccctgcctcacgtcgtgtgctgagtcctgtctgcggcccctcgctcacccgctggcttggtctggcaggagcagatggccttcattttggagtcttttgttcaaagcgggcgcttcgggttggag

SEQ ID NO: 273048 - DNA, 268 bp, Homo sapiens; identical to SEQ ID NO: 218996
  chr19:5060971-5061239
  hypo

SEQ ID NO: 273049 - DNA, 544 bp, Homo sapiens
  chr19:5064005-5064549
  hypo
cccaccctgtagccggcttgctctccttcccggcctgtgccagccacagggcagtgcgccagagccatcttgctgggtcacaggccggggccaccatagggctttgttgcgagggtggcggtcaccatggcttttccgttctgtttgcaacttggggtcccgggggcgccactggcgtttggatctgccgtggccctcctgggcttgcgtgggtggctcactctgccaggtggcctctgtccaacctgacacctggtctcgggtacttccagcgtgacgtgcacgggctctgcctccctcattctgtgtctgcgatgatagcgcattaaatggcgaaggcccgtctgcccaggcctgtgcagacactgtgaaattaactttctcaccctccagcacgcattgggctgtgccgacatctctgaagggctcttggtcggacctctgctcttggcacacattcctcggcggcgggggtggggggtagggaggagagcgttttcatccctggcacctaattgccgagagcttccgctggcaggagctg

SEQ ID NO: 273050 - DNA, 517 bp, Homo sapiens
  chr19:5068442-5068959
  hypo
cctggggttggtcccctaagcgaacgcaagcgtgctttcagccctgtgtggacggagcgtggcgcctccagcctcactcagttctgtgtgtcctaagccgtgtcctggcactttctcttggaaactgaggtttttcttccgcctgtgtccttgggggtggccgggaggcaggtctgccagcatcaggtcttctggtccccgaggccgtcgctgggttgttccgagtggcgggaggtgcagctcgctgttgggcactggcggtggcggagcccagaagtctccgtggctgcccggcctcttgtccaagagtcctttgtgatttctgtgggggctgctcctctgaacgctgggcctgcgtcccgcagtctgtgctttctgataacgccagagccacgttccagtgtattaaacttttaacattcgccagattcaattaatcttatctttacaactcccaattacaggcagtaattaagtggagcagcattgtaggctggggatacggcattaatcatcg

SEQ ID NO: 273051 - DNA, 100 bp, Homo sapiens
  chr19:5079967-5080067
  hypo
cccagagaaccccacgtcctgcacagtgagggccagcccttggggaccccatgtcctgcacggcgggggccaggccctggggccacgtgtgttccccccc

SEQ ID NO: 273052 - DNA, 657 bp, Homo sapiens
  chr19:5080389-5081046
  hypo
agataagaaaacaaatggcccgatgaattcggcgtgaggggcttgagcagacgcgttacgaaggagctgcaggaacgaaagccatggttcagtgcccagcatcggtagaagtcagaggcagccagctgggagacaccgccagccccaggacggccacgtcagaacaccgccaccagatgccagtgaggagggcgcagctgcacgctgctcccagccggggtggatgcagggcggtgccatggccatggaaaaccgttcggcattttcttggaaacggaagcatgtaccctgtgccccagcgatgccactctgtgcatatttactcaggagaaatgaaaacatatgtctccagaaagattggtacataagtgttcttagcagttttcttcacgagagccccaaactggaaacagcccgcacgtccatcaacaggaggatagataaataaataaccatagatccacgcgcaaccgagtactgtttagaaatgaaaaggagcggtcgcctggtgcacaggacagtgggaacaaatctcagaaacgcacgccaggtggaagacaacaggcacgtgtccctgccgtacaacgccattcatgtgaaccactaggagggaacgaggtctgtggtgactgagagcgcgtgcgtggttcggtgggg

SEQ ID NO: 273053 - DNA, 157 bp, Homo sapiens
  chr19:5083118-5083275
  hypo
gatttttttctggtgattctcgttcctggtctcagaaggccgattattggccagcaattggcgtctgaactgagcgcttgttccccactctcctaacgccacgtacagccatctgtgtggctgttctcgaccatgcggagggtgtgggaggctactg

SEQ ID NO: 273054 - DNA, 148 bp, Homo sapiens
  chr19:5087015-5087163
  hypo
tccagggccctgcgcgcacacacaggaggcagcctggggctctcccctcccgtcttctgcagagcagggctggcgcctgcctgagctcacaggtgggatggagcagcccaggccggcacttgtggcctaaacacggcctcattcactc

SEQ ID NO: 273055 - DNA, 96 bp, Homo sapiens
  chr19:5092021-5092117
  hypo
cttagggggtgtcacagtcacgcagaagcgtggggagaatctgcagctaagaccaggcggagcggatcccgggccgggccagaatgagtgggtccc

SEQ ID NO: 273056 - DNA, 316 bp, Homo sapiens
  chr19:5102567-5102883
  hypo
ggggaggaatggggccggggccggggtggcatctggggccactcccggtctcttgctgttggcgttgggagggatctcgcaccacagcagggaatcgaggccccggctcccctcaggctctcccttcaccggcaatgggcggcgggcgacgggtgacgggtgacgggtgatgggtgcagcacccgccccgcccataggagagccctggtccactgtggcctgtggatgccgcccctgacgtcagcatctctctctggcctccctgggagcagtctcagagcagtgaagagctcttcacgtccggtgctgtggcgat

SEQ ID NO: 273057 - DNA, 79 bp, Homo sapiens
  chr19:5110734-5110813
  hypo
gtgctggaccacacgcggcccacggcgctcaccagccccgagctgagctcctggagtgcatcccgggcctcgctgaagg

SEQ ID NO: 273058 - DNA, 331 bp, Homo sapiens
  chr19:5132561-5132892
  hypo
gagggttctagaagcgcgtgggatcacagggcgggagctcccaggagtggaggaatcggcacggggacagaggaatgaccaggggcccccgcgggctggcttgggaaggggtcttgccttctacccaggtatccttccagaaggcatctctggggcctccgtggactcccccactccccacaccccactgtgaccctttggtgagaccggagcatttgcctgtgagaccatcacggccccagaaccccaggcattctggggttgtgagtgacagacgcagccagtggctctgttctcatccccagggcctcggggccgcttagggccttcc

SEQ ID NO: 273059 - DNA, 203 bp, Homo sapiens
  chr19:5144146-5144349
  hypo
agtcggggggtcacgctgtgagtgcctgcccgcctccttgcccccagcccctggctcccgcccccaccgacacccgcgctgaccgccccccacaccctccgcaccctcccaggtccaactcctgagggccgtgtccctaggccaggtggtcatcaccaagaaccgcaacgggctgtactaccgctgtcgcgtcatcggtgccg

SEQ ID NO: 273060 - DNA, 382 bp, Homo sapiens
  chr19:5148669-5149051
  hypo
gagcctccaaaacccgctgctgcccttggcaaagcggagcctccaaaacccgctgctgcccgtggcaaagcggagcctggccacgccgggggtggaaatcgctttccggggtgctggggctccgacactaggactccttcacccagactctcctcaccggacagacgctgggaaggggccttctcccggtggctttcctctacaaatgagatgggtaggacggggcagagggtggcacccatgtccttggttcccagcaggctcctccacacatccccgagagatgtgtgctgtcgtcccaggacacggcccagaggcaaccggccatctgagagtccacactgggcactcccagccctgcttctcccgccgcctgcgccgg

SEQ ID NO: 273061 - DNA, 36 bp, Homo sapiens
  chr19:5154721-5154757
  hypo
agcagccagggctcggggggacgcggccaggccatc

SEQ ID NO: 273062 - DNA, 384 bp, Homo sapiens
  chr19:5155022-5155406
  hypo
ctgctgcgatttcccgacaaagactgtgtccctcttttctccatctcgaaagccttccctgtgtgcggggacagacacagcctgaaaccaaagcctctggggtgcccccccgcccgccctaggccctgtgaggtcagcgtccctgggcctccccaagctggcagaggggccgtggcaggagcaggtggtgcctgcagcgtcctttccattgttctccaaaacgctctaaaacgggaaggctatttgggacaggctgttgctgtctgccgagcagagtaaagatgagtggataggtccccaaaagtgtcaccgtgcggagccgatgaggtctgcactcgggccggggtgggtgccccgatgccgaggtctcgtatctcggggcag

SEQ ID NO: 273063 - DNA, 173 bp, Homo sapiens
  chr19:5210689-5210862
  hypo
ccggcccatctcccgcagcttggtcagcatcaccacgatcgtcgaattgttctcccacagcatgcgccagaagtcttccgtggtctccgccagcggcccctgtgtcgcgatgtaggccttctgctgcctgcaggcgttgggggtatgagcccagggccggcagggagacccgg

SEQ ID NO: 273064 - DNA, 175 bp, Homo sapiens
  chr19:5218522-5218697
  hypo
ggttctgagtccttgcgtttactttaggagaagcaagcggaacagtccagttagtagtggcacatgttcatgtgtgaacacaattcaggccccaggaatgcatggtaagaaaaggaccatggacccgtatgactagggtttccaggaccaagtacagctacgtgtacaagctgtg

SEQ ID NO: 273065 - DNA, 73 bp, Homo sapiens
  chr19:5223285-5223358
  hypo
cgacagggttgggcggcccagcactgcggggatacggggcaggtgtcagggtcccagcgccatccgccagccc

SEQ ID NO: 273066 - DNA, 364 bp, Homo sapiens
  chr19:5231254-5231618
  hypo
gaaggcttcgaggcgggggccgggctggggcctgcggggggtcccgggcctggggcaggtacttaccatcctcgtcggtgcggacgaccacgggcgagctctcgggccctggtcccacctctgtgtgagcgacagtcgtgatgcggtactgggtccacttctccaaggcctccagcaggatctgagtggtggtcggggggatgccgttcacctccttgggttccgggtcctctgagcccagcggtcggtagcggacgctgtagcccaccagggccccgttgtgcgtttccggcggcggcgggcgccaacttaccaaaatggccgtggagcgcacgctgacacatttaacgtcttgagggggggc

SEQ ID NO: 273067 - DNA, 988 bp, Homo sapiens
  chr19:5237605-5238593
  hypo
gccgtggactgtccgttcagcccagagtggctggggcaggcgggggggcacgcggggtgggccgtttttgtgaacctgcttgagaccagcgtgtactcaccttcaggacacctcagccagtctctcaggtggctgcccaagccacaggccaccctcactgactccacctcacacagacgcgcccagacgccttggagccgccaggtgctcagctcggcttggtttgtggggagcaggaaggagggaagggggccggcgggggcaggggggttgtgtctccgaggcgccccacccccccgatcccagcggctcagatgccccggctggagttgatgttaacccttcgactgatccgagatgcccctgtgtacacacacccagggcgggccttgaaggtttgaccatcatgactgattctggaagaaagcctggggtggctacgccgtgactgactgggtgaagggagggaagagggggaagcagggggaggccacgacagagagaccacgccggtggaggccacaccagggaaggccacgctgggctgagcggagccagggaggcaggtgaggtggggagacggcagaaggggcctgtccagctccgagtttagagaagtcagggagagagggtggcggtgacccacagccaactgccaggtgaagggtgactcgctccaaacagggaggccgggccggcacagcagagaactccagagatttgagccccgagtggggacctgcatgcccccacgaaacctggcctcggctccgattccaccccctccccaccctcgggaactgggacctcgtcctggggtcttgagagccaaggctccctgcccgggggaggaagaccgacggggaaggtgggttcgtctctgtgtcctttgctctgagaatgatggggtgcgagccgtgaccacagcctcacggtaccctcaaaatgcctgggaaatgggcacaacgtggcccttcaatcagccccc

SEQ ID NO: 273068 - DNA, 419 bp, Homo sapiens; identical to SEQ ID NO: 219000
  chr19:5245671-5246090
  hypo

SEQ ID NO: 273069 - DNA, 69 bp, Homo sapiens
  chr19:5251285-5251354
  hypo
ctcccgcctctcccccccaccgccagctccctccgccactgaggtagcgtgcaaggcccggagggacct

SEQ ID NO: 273070 - DNA, 426 bp, Homo sapiens
  chr19:5269159-5269585
  hypo
gggtacatgtgtgccgcatgtatgtgctcacgcttgcccgtgcccacgtgtccacacgtgagcaattcccgtgtgtatgtggccccgcaggggtccccataagcgtgtgtggacagcagccagccagggtgcagggggaggtctcggccgcctgacgctaccgagaacacctaattaaacaaaaacgtacatcgcgaaccacactctgcccagttcctcggagtttaattaaaacaacagtgcaggaggcgtgtgtggggtccacaatcagatggcagaggaggaggaaggcagggagtggccctggcagtccagatggtcccccaccaactgccagggactggccggaggtgcccggagctcagggctggtggcaaggtgggtgggatcgggtcagggtatccaaggccccgggccccagcagga

SEQ ID NO: 273071 - DNA, 100 bp, Homo sapiens; identical to SEQ ID NO: 219001
  chr19:5274368-5274468
  hypo

SEQ ID NO: 273072 - DNA, 410 bp, Homo sapiens
  chr19:5307584-5307994
  hypo
caagggaatataaatccagccgcctactaaatgttcacagaagatttctagataaactgcgctcttcaaaaccgtagccacgagccgtatgtggctgtttaaatttaaacggaataaaatggaataaaatttaaaattcagttcctcggttgcactggacacatttcaaacgctcaatagccacattcggctcagggcgactgtaccacggtgcgtagacggagaccatttttatcatcgccatatcgggggccaaatccggcccaccgtttgtttttataaataaagctttattggcacatagccacgcccaccagtttacgtgtttgtctatggctgctttcacgctccaatggcggggttgagtagtagacagagatcatccggccggcaaagctggaaagatttac

SEQ ID NO: 273073 - DNA, 184 bp, Homo sapiens
  chr19:5312165-5312349
  hypo
acaaatgggcatgtccgtcaggaggggctgggcatgtagatggcatactacacagccctgaaaaagaatgcatagtacgcagccctgaaaaagacatccctggctgtgtgcgtcctggtactgtcagtgaaagagcatggcagggacagcgggcataggatgtgtgggacgagaaggtgagcac

SEQ ID NO: 273074 - DNA, 409 bp, Homo sapiens
  chr19:5334919-5335328
  hypo
cagagggcctggcacggggcgccaactctaaatagtcggagcagctgttattatccccccgacatcccctcatttgctgatcacgggggttaattataagcggcattaaattatacacacacagacgcgccaacctcgcttccccagaacccctgaatttccgcaaactctcaattacccacgtgacagcgcgacgatgggccatcctcccagcctctctccccacagcctgcctcatccgagggtcccaggcttccagagccatggcttctccgcccgccggatacccctctgggtgtccaggagcggaaggaaggatgcatgcgactgactgcggacgcgttgagagccaggggaggcatgtttacccacagcatctcatgtcaaggctcgccgcgacgcagactgc

SEQ ID NO: 273075 - DNA, 223 bp, Homo sapiens
  chr19:5455292-5455515
  hypo
cttgcccgggtaccggcaaatcacagacctaggaatgatccattggccacaggcccaggcagctggcagctcctgggacagaatgtagcagggcgatgtcacagaagctgggggcatctagaaccctggtgactcctggtctccatgtcatctgccagaaaggccacctgcgccagcacctcctgagaccggccttcaaagacacgacgcatgccgctctgcc

SEQ ID NO: 273076 - DNA, 407 bp, Homo sapiens
  chr19:5507154-5507561
  hypo
tgcccacctttctgcctccccgcctgccaaatacatccacagcacttgtgggaagatccgtctgagaccatggattccaggctgggctgatgccggcacgcaggaggcctcgcgcaagacggctggtcccagccagacccagaaaaattagattaactcggagaagctcgccaagacgatccgtcaggccgcctgaaggacagcgtattgatttccacgttgcgaaaaaattaaatgatatccctttttgttatttaaaacgctgcttaagcaattccctaatggaacggcccggcccgggtccaggaactccctggcccggccggcagcgtctccggatcgggtggaggacgagggaatgcggacacggccctgtcttcccctccgggtaattgatgacctcagga

SEQ ID NO: 273077 - DNA, 35 bp, Homo sapiens
  chr19:5577528-5577563
  hypo
attacaggcatgagccaccgcgcccggccgaatat

SEQ ID NO: 273078 - DNA, 111 bp, Homo sapiens
  chr19:5582381-5582492
  hypo
gggtgccctgacaaccggggaggctgaggagaagggacctcgggctgcagcctcagctccatggctcgctacctctgggcgggtctcagcctccctcgggctcagaacctt

SEQ ID NO: 273079 - DNA, 1057 bp, Homo sapiens
  chr19:5587166-5588223
  hypo
ttaaaaagatcccccaagttcgagggaaccctggctaccagattcaacagtgcgtctgcccacccgaaaactcgcagcgagtgggacttagtagcggcgggtgaagtgggggtacggggggggatgagggtgtgggtgagggactctgctgccccggtcctggctggccactccgccaccttccagtccgccacctggcaccacgtggccctgggaatgtccaccttgtgcaaagccgcctcgcctaggaacaaagtcagacaatttttttccccttgaagtgctcagcgttttcatcgtaacatgggttcagtaacggtcccgcagcctttagagcgcttgggttttttttccaggtgagaaaaatcatcatcgcacattgtattccaggtaactcaagagcgttatttgcataaattgcaaagagctgctttttgctttgttttcataacatccaacccagccagctgatcaaacatgcaaaaaagggagaggaagtgaggagcaggagtgaaccaccgtcctccacggacgacacaccttaccccgccactccaccgcggcttgccatgtgccccggccccgagggcccagacaggcccctctcgccacctagaagagaagaagggtctgcaaacactccgttcctggggaagcccctggacacatgtgggggccacagccaccctcgtccctggagccagccccgtaccttgccacctggcgtgctcccggctagccgcgcctgcgtccatggcaccctgccaggcgcgtgcctggtgctcctctagccgctggttgtgctctccccagtcacggccacccctttgccaaaagaaaaagacatgcagccatctaatgagcctccagggttgtgtcggcagcaggcgcacccaccctgacctcagctgcatggtgggtcatgccacacaacaagggctgcatgtcaagtgggcaaatcaagggaagggacatttccccaaagacagatgtgctagtaagcacgtgagaaggtgctcaacgccacccagaaatgccaatccgagccacaccgaga

SEQ ID NO: 273080 - DNA, 634 bp, Homo sapiens
  chr19:5608171-5608805
  hypo
tgagccccacaggtaaggccaactctgtcactcacgcctcagctgaatgtcacttcttcagcgagctctgctgaagctgcctcccaaatctaaacacggcctccccaacacactgacggcgtgctctaatattccttaatacgctcatcacaacacatcatatgtgtttatttcttaaatggtctttttcccgccagactaaaaaatctgtgatgacagtgaccacgtatgtttacctctgcttaatcatcagtgtccgagtgaagtcaacaaagtaactgaataaacaggttattcatggctataagaatttcctaagcccttgctgaacacacagactgttcagagaaaaattgaacagcacgctttctccgggtcctgtccgcttcttaagcaatgaaacattaaccaacacctgatcgggtgacacagacctagacaaaggaacggcttctgtagccagaaaactgtgtcagacagggcccactctgcctggaatcagggcaccctccagacactaaatggtccgaaccttgtcccttggaagccactccccagaggcacccaggagaccagggcagtgccaattgcttaccagaagactcttggctaggcgcggtggctcacgcctgta

SEQ ID NO: 273081 - DNA, 35 bp, Homo sapiens; identical to SEQ ID NO: 219007
  chr19:5609545-5609580
  hypo

SEQ ID NO: 273082 - DNA, 98 bp, Homo sapiens
  chr19:5630434-5630532
  hypo
tagattttatgttacgctttaaaaggacttctttgcttttaaattattaaaaatatgactgtaaggccaggtgcggtggcacacgtccgtaatcccac

SEQ ID NO: 273083 - DNA, 41 bp, Homo sapiens
  chr19:5641156-5641197
  hypo
aggcgtaagccatcgcatccggcccttcttttttcttttta

SEQ ID NO: 273084 - DNA, 275 bp, Homo sapiens
  chr19:5661522-5661797
  hypo
gtgcagcagggtgcgtgaacgcagtgaacgcgaacaacgcatgcaggcgcagtgggagcgcgaggagcgtgagcggctggagattgcccgagagaggctggccttccagcgccagcggctggagcgggagcgcatggagcgggaacggctggagcgcgaacgcatgcacgtggagcacgagcgcaggcgcgagcaggagcgcatccaccgtgagcgcgaggagctgaggcgccagcaggaactgcgctatgagcaggagcggcggcccgcggtgc

SEQ ID NO: 273085 - DNA, 103 bp, Homo sapiens
  chr19:5667770-5667873
  hypo
tgccgtgggttccacgccgtgtgcgcaagttccctgtgtgaaagcacgtctgtcttccaggtggcgagagaagcatgtccggtcactccgggcctggccacat

SEQ ID NO: 273086 - DNA, 246 bp, Homo sapiens
  chr19:5668103-5668349
  hypo
ctgtgcaggctgggatgggccggggagcaggaggacttcgcagtcaaaccaatgtgaatttgttcctaggcgcggcagctttgccccaggcggggcctcccggggccaccccatcccacacggtggcatgcagggcgggtttggaggccagagccgggggagcaggcccagcgatgcccgcttcactcgccgctactgagtacttggaatcctgtgtcctgtctcgtggcaacaaggctatgttct

SEQ ID NO: 273087 - DNA, 102 bp, Homo sapiens
  chr19:5676232-5676334
  hypo
ccagctaatcacctccatttctgctgcacccaccattccttgggatggcgagttagcactcactccaggccagggccgggcaaagtgcgctcaaggctggag

SEQ ID NO: 273088 - DNA, 238 bp, Homo sapiens
  chr19:5694369-5694607
  hypo
tggggtcttctcccgccaccacgctcacccattgcggtccaggccagccccatgaccacgccgggcggtgtcacgtcatacatgcgctccacggtgaacacgggcttccccacgaagtcctgcaggttctcgggcgtcacctccacggactcggcctcgccgctgacaatcttgtaggccgatttccgtaacacctgggcggtcagggcaacacaatgggcacgggaaggtggggtga

SEQ ID NO: 273089 - DNA, 366 bp, Homo sapiens; identical to SEQ ID NO: 219010
  chr19:5695870-5696236
  hypo

SEQ ID NO: 273090 - DNA, 57 bp, Homo sapiens
  chr19:5703577-5703634
  hypo
gaggaagggccaggcggccccacgagcagacaccgtcagggcgcactgccacccaac

SEQ ID NO: 273091 - DNA, 222 bp, Homo sapiens
  chr19:5711861-5712083
  hypo
gggtgggctccatcgccagctccgccgggtgcctggcgctcagctcgtcctccgcctccttcttgccccgctttgacttcctgcggggcttgtgcttgttctccgcctccggctcctcgggctccacctccagctgtctgctgatatggactctgacacgggagcaaggcaggtgtgaatcagccgctgaggctgggagctggacccggctgaggcctccct

SEQ ID NO: 273092 - DNA, 44 bp, Homo sapiens
  chr19:5722397-5722441
  hypo
ctgggcttacaggcgtgtgccaccgcgcccggccaacaccctta

SEQ ID NO: 273093 - DNA, 240 bp, Homo sapiens
  chr19:5759561-5759801
  hypo
atgaaactccagctccaaaaaaaaaaaaaaaaaaagcaaaaataagccaagtgtagtggcgggcgcctataatcccagctactcagggagatatttgcacacctgtgctcacagcagcgtgattcacaacagtcaaaaggcaaaaatcaacccaccggtccatcaccagatgaaaggatgaacacagcgtggtccatccgcacatcgcaatatgactcagacttaagaaggaagggagtc

SEQ ID NO: 273094 - DNA, 37 bp, Homo sapiens
  chr19:5776294-5776331
  hypo
ttctacatttcgatcgtggatccgtactacaggtgag

SEQ ID NO: 273095 - DNA, 94 bp, Homo sapiens
  chr19:5784778-5784872
  hypo
ttactcggggcagcgggttccagcctgcagcgcgcccactggttggggttctgggtgttgggggcaagcaggggcagacgttggcagacatggt

SEQ ID NO: 273096 - DNA, 40 bp, Homo sapiens; identical to SEQ ID NO: 219012
  chr19:5785227-5785267
  hypo

SEQ ID NO: 273097 - DNA, 198 bp, Homo sapiens; identical to SEQ ID NO: 219013
  chr19:5785480-5785678
  hypo

SEQ ID NO: 273098 - DNA, 1121 bp, Homo sapiens
  chr19:5789244-5790365
  hypo
gaccacgtcctcatccgtcaggggcccgcaggtccgcacggggctgctgggaggggtgctagtgcccggccctgcggggacctgctgggcaccacagttttcctgcctgggagcgccctcggctgccgtgccctcggggacagcggcagcgggtgtggggccctggctgaaccggcgcagggcctgctcagctcgctcgaagcggacctcgcgcttccgcagctgctgctgcagggctttgtccaggccgttgcggatggacgggggctgggtcccgcgggccgccaactcctcctgcaccaggttctgtccctcgggcctcaggtgggccccagcgaagcggcaggtcacgccgtaggggcaccggccgaaggtctcgaagagcacgcagcgggggcccaggtcggccggcttggtctccaggtagcgccccacgtcgtgcagaaagcggcagcgatcaccgaagaaacacttagcagccgactcctgcgaggaaacagggaagcagtgagggaggacagggagaccccggggcagcccagcagccagggttcaaactctagatcacccctcctggctcttgtgtccctgagcaagtcaggcacctcaccgtgcctctgcatctccatttatacaatgagaacaatgacaagccctacaatgtatcccgaggagaatgaagacggaatggcatcagagcaagctcactgctcgttgctgaaggcccaggagctttctaacaattacccgctgccaggaaacacaccctgctcctgcctgccccggcaggaatgctcacgtggccgcacttgcctggattagggagggacacagcctgttcttgtcgtagttcgtgggcttcacatggggccggcccttgttttgtccccgggccctcttctgagtctgtagctgctccccgggctctgctgcctcctccgtctgcccgtccgccgtctgtccatcctccagtcggatccgcttagcctcaggctcagccagctcattgccagcagggtctcctacctcggtttcccggcaagtcttctcctgccctttggcttccaggaattggtgaaactgctccttggtggtgaggtatctgccgacagaaagggaaa

SEQ ID NO: 273099 - DNA, 332 bp, Homo sapiens
  chr19:5792486-5792818
  hypo
aacataatactcctcggaattttggagattggttccaagaccgcatataccaaaatccgcgtatactcgtcccccagttgcccaacagaatccctgtataggaaaaatccgccctttgtatccgcaggtttcccatcctgcctccgcatttggtaggggttaaagaacccgcggatacggatggccaactgtattttatttttcgaaggccacttataagtggatggatgcaattcaaacccgcgttgttcgcgggtcaactgtacataagtaaattaaaccgtaagtgagtaggtaataaagcagtaaggtggattgggaatgccaccctt

SEQ ID NO: 273100 - DNA, 159 bp, Homo sapiens
  chr19:5797827-5797986
  hypo
gggattacaggcatgagccaccgcgcgtggcctgggctctgcagctttctgaatggccccccatcagggccccggcaggactggggatgcctggccacatgcccgtctttcccactggacgatgagcccagagagggtgggaaacgggcttagcttagt

SEQ ID NO: 273101 - DNA, 46 bp, Homo sapiens
  chr19:5824983-5825029
  hypo
ctggttggcccccgcggcgcagcagggggggcggtgggaggagaga

SEQ ID NO: 273102 - DNA, 620 bp, Homo sapiens
  chr19:5825264-5825884
  hypo
aatgcctgccccaccgcaggtgctgtggggtgagggtggtgcgtgggccctgacccctgtgcccacgcacatgtccatgcgtgcgcctgcgcgggcatctgaggcgtggatgccggcagggtgcgtgtgcagcgcctttgggtgtgggccacgagtacgcccatgtgcgcgtctgcgcccgcccctgccagcccacacaatcctcttttcttgtccttacaatgcacaagggtggcctccagcacgagctccacttctgtcctcccaccacttccctctctgcaagcggcgtgaagtccttcctaggactctgggacagagacccgggcgggacccccaaaatccagtgctccaggacttggggtgcggggggcaaagcacgaatggaggaatttcaggcactgcggagggtcagggcccatgggcgggtgcctgtctgccctactgcaaaaagcgagtggccactgactccccaagtccccatgttctaggctcctggtggaatttcaggctggggaccttgtgttctagcccctgtgcaagcagccagccccgctgcagggaggcagggacagacatcctaaaagatgattcattgttgccaggtgcggtggctcacg

SEQ ID NO: 273103 - DNA, 199 bp, Homo sapiens
  chr19:5826124-5826323
  hypo
gacagagcgagactccgtctcaaaaaaaaaaaaaagattattcattgtttatatggaattcagatttagccgggcacctgtattgtatcgggcaagcccacaaatgtctgcttcgatgcacccctctggggttgggtgtgccccctaaccccccagcacagtcctggccactccagtcctgctccggggcttaaagaac

SEQ ID NO: 273104 - DNA, 38 bp, Homo sapiens; identical to SEQ ID NO: 219022
  chr19:5834509-5834547
  hypo

SEQ ID NO: 273105 - DNA, 358 bp, Homo sapiens; identical to SEQ ID NO: 219023
  chr19:5844274-5844632
  hypo

SEQ ID NO: 273106 - DNA, 106 bp, Homo sapiens; identical to SEQ ID NO: 219024
  chr19:5844662-5844768
  hypo

SEQ ID NO: 273107 - DNA, 117 bp, Homo sapiens
  chr19:5846506-5846623
  hypo
gcctgctttctctgttggaccgaactggtctaagccttgcagtgtcgagcggagctccctgtaggtcacctgagtgtgacgaaaagggatcccgacgccaagacctaagttcacacc

SEQ ID NO: 273108 - DNA, 75 bp, Homo sapiens
  chr19:5858550-5858625
  hypo
aagcagaggtccaggcgcattagaggagctgaaggaaactctaggctgggtcttcacaagcggaagatgagacag

SEQ ID NO: 273109 - DNA, 390 bp, Homo sapiens
  chr19:5867192-5867582
  hypo
agggcgtgaagatgtcggagtcgctgcggtaggacatggtgagattgaagtatccgtccagggcttccaggtgccggcagttgctgggggactccatgctgaaccagatccagcgctgcccctgcggcctggtggggggcgggaggttggcactggggttgtacatgatatcccagtggtgcacgatgaccgcgtctgcctgtgggtacacactggagtcggcagtgatgttgcagtcggccgcgccgggcaccatctctgagcagcggggcagagccacgggtgtgttaaaaggccacgtccacagcaggatcagtagggtggggtgggcaggggtcgccatgctgtcctggcagcgggacccattgggagccccggtgacaggttcca

SEQ ID NO: 273110 - DNA, 120 bp, Homo sapiens
  chr19:5878604-5878724
  hypo
gagccaccacacccggcccaatgaaggtatttccgagaacgaaaacggttaggaggtggtctgttggaacctggaggtgaaaagtataattttctttcctttttttttttttttccagac

SEQ ID NO: 273111 - DNA, 419 bp, Homo sapiens
  chr19:5896607-5897026
  hypo
caagggcctcgagacgggcacagcaggagcctcttgggcgctcactgccagtgtctggatggagagagatgccacgagtcggctgctcgctgtgcatggcagcctcctggccccagtcctggagctgttctcctgggcctccccaccctacatgtattcctgataaaggaacaccccactttctccggatggccagcactgtggacacgggctggggagtcagagagaagaggcagccgtcaaatgtgctctgagagctggggctgtgccaggagagggcccagccatgcccagcccagcgtgctcacctgcagtgaacgtgtattgtccaaccttagccactccttcaaggaaggtgcccggaggattgagtgtgactctgtaggcagcggcggtcaggcctgcgagacagaggaggg

SEQ ID NO: 273112 - DNA, 399 bp, Homo sapiens
  chr19:5897316-5897715
  hypo
caccggccggcagacggagactcatccacgtggtggacacaagaacaggcctgagacctcagttctgcggctgcttccagcctcacaccgccagctcagcggcgccccccacgggccctggcaccagggccccagctccaggttcccatcaatggctctattctcctgtggggcccggggctcctgggcctaatcccccttggcagtggctctgcttccctgcctggctgccaacgcctcctccttgccactctcgaccccctcctgctggcagctcgggcctgggctcgtcctgcacacctggctgtctggctgccgcccccgccacccagcctcgccactccggtcagcttttccatctctgccatttcccaggccgcctggcccctgacattggct

SEQ ID NO: 273113 - DNA, 660 bp, Homo sapiens
  chr19:5909794-5910454
  hypo
ccggccctagcctagcttttgtagcatgcaactgtctcctttttatacgccctaaagaatatatttttgaactccttgtttctgcgctgtccttcttagcccaggacattcagggtgctttgcttgttgtcaaaccagggaaaggagaaaactcctgtgcctttctgggccagcctgtcaccctggcctggtcggcagccattcccctacctcctcactcaggaactgtcacaccaggaaccggcgaggggcacagcctgtttcagaccagaaaggtcggaggccacccacggccttcaggatggcgcccgcctgcctgcctggcaacagtgacccctcagtgcagtaacaatgggcccattttctcctctggatgaacaaggaggggggttgtttgtacaaaggaaaggcaggctggggcctgtctgtgctcaagaataaaccggatgatttcctggcctgggggcaagagggaggccctctgtgttatttgtgcctcctggtagggtcctgctgggccaggtagaatctagggagtgtaggccaagcactctctacagcgattgcatctaatcttcgagtttccctgtagacacaggctttgtcctcattttacagctgtggaaagtgaggcccaggccgggcgcggtgtctcacgcc

SEQ ID NO: 273114 - DNA, 159 bp, Homo sapiens; identical to SEQ ID NO: 219026
  chr19:5914411-5914570
  hypo

SEQ ID NO: 273115 - DNA, 1525 bp, Homo sapiens
  chr19:5914782-5916307
  hypo
ccctgggcatggggcgacagaggatgctgagatgcggagacggggactcctccctaagagctgctgttaagaggcgcctgctggggcatacagccccagtgctctgcacagcgtcttgggggtttgggtgtgctacccaccacccccagtcaccacctcctgtcccagccccccatgtcccaggcccgggaggctgtcatcgcagctgcatttgccaagctggaccgcagtggggacggcgtcgtgacggtggacgacctccgcggggtgtacagtggccgtgcccaccccaaggtgcgcagtggggagtggaccgaggacgaggtgctgcgccgcttcctggacaacttcgactcctctgagaaggacgggcaggtgggtggctgcgcggggggccccctccccaggcagttcctcggccgtgccccctcacggccctctgttcccaggtcacactggcggaattccaggactactacagcggcgtgagtgcctccatgaacacggatgaggagttcgtggccatgatgaccagtgcctggcagctgtgagcagctccggctcagccctgctgccctggcctgtcactccccacccctgccggagacctcccttccctgggccccttctctcctgggcagccacaccacagagcggggaggggcaggtgggggaatggaggctgcaggactggctagaccaggtccctgccggtccaccaggcggaggtgggacaaaggtcctaacaggagtcactggctcaggaccccagggagaaacgctctccccacccacgccatgctgaccagagatcttgcagcccctgtggatgcccccgccgaggtcccccgatccccgcacccggactgctgctccctgcccctcccttgcgggtcccccaggaagccaggtgaccccaggtgggaggctgtgtgtggaggccatcctggaaggaagtttagacctgcccaggtgtggagcgaggggcacaggggcatcctaacctcagaaactgaaataaagcctttgaaaaaaaaatctgtaaaacatcaacccccaatcagaagatggcaaatggggaataaaaatagcaggtaacatgtccagcgggcccagtatctacattctggtgagcggcccgaggctgggagctctgggcgggggcagaccggcggggccttgcagcaggggtgggggtaaagtgcgggtggtggtggagagaacagggctgtggctggaccccagcactggtgacacgctgggtgggagcatgaggccccaggctgctggaggtcctcgcccggggaggtggaggccgttcctggtcaggggcttcctgaggcccctggggcatgcagaggccagggttttagttaaaagtttaatgtagttcccaaatacatttcatatgacaatcttacataaatgttccaaaacacatgggcgttatctcgttgtactcgtcactagctggctaaggcttaaagcagagacgtgtgactgggtctctcgggagggcctctgg

SEQ ID NO: 273116 - DNA, 225 bp, Homo sapiens; identical to SEQ ID NO: 219029
  chr19:5925831-5926056
  hypo

SEQ ID NO: 273117 - DNA, 150 bp, Homo sapiens; identical to SEQ ID NO: 219030
  chr19:5927750-5927900
  hypo

SEQ ID NO: 273118 - DNA, 326 bp, Homo sapiens; identical to SEQ ID NO: 219031
  chr19:5938101-5938427
  hypo

SEQ ID NO: 273119 - DNA, 158 bp, Homo sapiens
  chr19:5957316-5957474
  hypo
aggctgccagctcatcgccatgaatcaggcgaggtacttccaaccacactgcgacccagacaccctgaatccaagggagaagcagcctcatggacacgggataaatatataatgcaaacaaatgaacaattactctaaatgcacgtacgcccagctcg

SEQ ID NO: 273120 - DNA, 157 bp, Homo sapiens
  chr19:5957770-5957927
  hypo
tccctccaagctcaacgtgaaagtgtaaaggcctctgcttaggtctccccgtctgtgggcagaagtggccttggcaatgcgacctggaaaagagactctcagtaaagagagaacaaattagagtaacgaagtgaagagagaacgtaccggcccctta

SEQ ID NO: 273121 - DNA, 137 bp, Homo sapiens
  chr19:5960699-5960836
  hypo
gggagaggagtgcgcgctggtgttgagaaccgtgtcggtggatctgcaggtgcacggaagggactgcagctatttgagtaactatgggaggcctgggcaggctgtggtgccaaggtgctgcccggagccttctggac

SEQ ID NO: 273122 - DNA, 162 bp, Homo sapiens; identical to SEQ ID NO: 219032
  chr19:5985339-5985501
  hypo

SEQ ID NO: 273123 - DNA, 956 bp, Homo sapiens; identical to SEQ ID NO: 219033
  chr19:5994753-5995709
  hypo

SEQ ID NO: 273124 - DNA, 519 bp, Homo sapiens
  chr19:5995925-5996444
  hypo
gggtgcggctgctccgggttttaaggtggcatggaagagccgtgggccaaattatctttgctccctgaagtctgtacacagcaggaaaaccactccttggctgccccaaagcccggcgttcacgccaatgtgcagagaacaggcggcttccacagtttctgtacacgttgcggggccctggccaccgactcttagagtgctgtggcttctgggtagtaagagtgcagggaccccgccattcatcaagcatcatctcgtttcttcctggaggccatcccacgcagcccagcaagtccactccaaggtgtggaccccgaagaactgaacacaggagtgcacacaaacacccgcccacacacgcccacgcagccccgttcacgacggccacagagagggagcgaccgtgcagcacggagggacgagcggtcagcacagcgcggccagccacgcaccggaacacaactcagccaggagaggaaccaggctttgacccgggccgcagcgcggatgtcatgttcc

SEQ ID NO: 273125 - DNA, 53 bp, Homo sapiens; identical to SEQ ID NO: 219034
  chr19:5996649-5996702
  hypo

SEQ ID NO: 273126 - DNA, 522 bp, Homo sapiens
  chr19:5997028-5997550
  hypo
gcccggccaagccccggccgtcccacccaggagggtcctcacctctcccatcacagcgatcggcgtctctccggtggcctccgcgacgcggtgctccaccaggtagaacatgtactcgtcgtagagcaggcggatgaggtggaaggagccgaagctggcagcgctgcgcagggtcaggtcccggatcaccatggagctggggacaagcggacagaggctggggaccctcaggggagcatggaacccgggccccaggccagacttcatggcagcaacacaccccctgctctacgttccctggggaacccagaggctgagtgatcctaagacgtgcaggcctacgcgggggctgacgggctgccgagaccctgggcccacgtgacggacaggtggggccggcctgcgcgctcagttccagagaccacctggggaacaggagagggagatgggcagtcagccccaaagcgacaggctgcgggaaacaactgtggctggtgctagcgcaggcgctagatgggatct

SEQ ID NO: 273127 - DNA, 571 bp, Homo sapiens
  chr19:5998429-5999000
  hypo
atgcccaactgccccggctcgaagtatactttcataaactctgttacgtctaatcggtatcgagcgataaaaagaagacacaggcttgagaaaggcaaagacagccgcactatgaagaccaccaaagctgtctatccttaagtgtcaagcatagctgcaaagcccccagccccctcctgttcctccgggcccacccaggttggcttccaagccccctttccccaaaggcctcccccacgcagatgaggtgctggcactctgcaaccagcttccccacagccccggtgtctggtgcgatgcttcagtccaaagtatttccagaacatcgcctgcggtcaccccggtatctctgggttcccaaatgggctcgcagctcccagagagtaggagcatcggccgaccaccaccaagggaggcccagccagagcttggggatgaccagccaaggcctcagtccacatgctaccattttctagtgggtgctacagaaataaatcccgtaaacctaatttttattttttatgactgcactgcacgtgcataagaatgaagtcagaccaggcgtggtggc

SEQ ID NO: 273128 - DNA, 450 bp, Homo sapiens
  chr19:5999240-5999690
  hypo
tggtgacagagcgagactctgtctcaaaaaacaagcaaacaagagaatgaagtggaacagtgtctcggtctcccttgtgaagagcacccccaccttgcagacgtgaccccgatcccctccagctctgagctgtgctcttctctggctggcaggcacctcagtcctgcgctcactctgctcttctcaattcttccgcttgcaaccttccctctgtccatggagactggcatcggcatccctacgctgtctcttcccttgctcttcctccctcattatcccagtgtggctttattgtaatttctggctacactggtgtttctgttatgtggcagtggtgtgctaggtccatggcagagccgcatagtctattaggcgtgtggttcctctcattcattcactgagccagcatttaaacagaagtgaggtcccggcactcgggtagcgtgcctg

SEQ ID NO: 273129 - DNA, 515 bp, Homo sapiens; identical to SEQ ID NO: 219036
  chr19:6001733-6002248
  hypo

SEQ ID NO: 273130 - DNA, 654 bp, Homo sapiens
  chr19:6002450-6003104
  hypo
tcaacgtggtgccacgatcctggaagctgggggcctttgtgaggaaaatgagcagaagtgttggccacagcgcctggacgccagagggccctgagagatgatggagtggagagagctgggggctgtgggtgggctttggcctgggacccgtgtcatgcaacagaaccgtggccaggctcggggcaggggccaggttgtgccacgggctccacttggtgggtttgctggttttgctggagggcgggaagcccgggccctggggacggtgtggaggaagtcacctgcacgttggcaaagtccacgcggttgaggtcgctgagcatctggttgatctgggacgtgttctgcagcaccgcccgggccgcctgcgccaggtggttgagggacgtgtagcgccgcagcgtctgggcgaaggcactgacgacgcccacctgtaagccagggctcgtggtgagcaggggttcgcagggagagcctgttccgctgcgctccttgcaggggtgtgtgggctcagggacaacacagggaggagggagcaggaaacagcaacctgggcagggaagagggaacctcctgctattcttaaggacccagtgtgtgagaatcagtgaagaggagacctcgccggcacatcacacacgtcgctaactgagg

SEQ ID NO: 273131 - DNA, 99 bp, Homo sapiens
  chr19:6003433-6003532
  hypo
attccgaagagcaggcgggtgccctgcagctgcctcctctcacccaagagcccttcaggaaatgctcatgatggctgggtgaggtggctcacacctgta

SEQ ID NO: 273132 - DNA, 256 bp, Homo sapiens
  chr19:6003832-6004088
  hypo
gaacggtgggtaatcactctcttttccacaagtcggccaaggttctacatttcaaattcgactgatttgtggccaagattgcagcaataagggtcacagcaaggagattaaatttcccgaataagatgagcacagaaacacgcaatctgttctgaattgacccaaagatgtgacatcaaatgacatcttctgttgttccccttcctgccagcactgacgcgtcaccggcagtgtgctcagggcttcctgaagggat

SEQ ID NO: 273133 - DNA, 472 bp, Homo sapiens
  chr19:6004118-6004590
  hypo
agcgctctctgggacacagtggtcctcatgctgtcctggactggagcccctcccagccatcgttggggagcccaggccccaccccggacgcaccttggtctggatgacctgttgtgggaagtcactcatggcatttgtcaaccagccttccaagctcttggcaaagttacggatggcctgtgtcaaggtacctgggggatacagaccatgatattaccagggagaaaggcagtgactggaccctggaaatcagcattcagtgtaagagctggcccaagtgcgatgaaaatgaccaccatgaagaacgagccacacaggcgacggggaaccgaggacacttagaaacgggaagaaccaggcatggcccagcgctgctggtcaccacccactgcctatgcgggtctcacaggggcgattctgccccaggggacactgggcaatgtctggggacgttaatggtggtcatgactgc

SEQ ID NO: 273134 - DNA, 403 bp, Homo sapiens
  chr19:6005135-6005538
  hypo
aatattttaaaatgcaaaaggaaagataccccaaactcccaccataacatagaaactcagacgaggcattgccctgaacagttttcaggcagacaggcaaggccaggccaaatgagaaatgcaatacttttgctgtttcccatcttccagcaaagggagcatagagtttactcaacaggacggagagctgcctggtactaacgggcatgcatatttgtggatggcctgaggggcacggtccatgggcccggatgtttgtggatggactgcggggcatggcctgtggtcctgatgctgtgatttatgaagagaggcctctgtgcccagcttccttgacgacccccagggttttggggagcttggcacgggcctggcccgagggctccctcgtggtgggtgctgt

SEQ ID NO: 273135 - DNA, 199 bp, Homo sapiens; identical to SEQ ID NO: 219040
  chr19:6005978-6006177
  hypo

SEQ ID NO: 273136 - DNA, 482 bp, Homo sapiens; identical to SEQ ID NO: 219041
  chr19:6006879-6007361
  hypo

SEQ ID NO: 273137 - DNA, 567 bp, Homo sapiens
  chr19:6007827-6008394
  hypo
accggtgagacagacgggtgcgtgcgcccatcacgtgcactcagcacacgtcaagtgagcagccgtgatccgggctacagcggggtgccctggaatcccaagggaggccacagagaggagaggagcaggcgatggacatggatgcggaggggctgctgcttcagagaggatgcttgttggggggctcggggctccagctcctcagcgtcacccggggacgcctggcctgagcgctggcggttcccgggagggacacgcaggagctgcctgcctgggctggggcggtcacctcgcagtgccgtctgtacaccagctgcagggccttgacgtcgtgcagtgtgacgccgtcctgcagcaggaagctgcccaggtcgggcgctgggaactcggggaagacgtgggagacatctgggggaggaacacgggaacatcagaaatggcgaggctcttaggacaccgtggacaactggaaggccacggtggatgggggcccagaaacagatgttctgccccaccccatgcagtcagggaatttgttttttctttctttttctttttctttttttt

SEQ ID NO: 273138 - DNA, 94 bp, Homo sapiens
  chr19:6010177-6010271
  hypo
ggccatggtctgttccggagtgctgtgcaggccgctgtgggagccgctgtccccgaggctgtccgtcttctgggctggccggtacctaggccag

SEQ ID NO: 273139 - DNA, 92 bp, Homo sapiens; identical to SEQ ID NO: 219043
  chr19:6012586-6012678
  hypo

SEQ ID NO: 273140 - DNA, 46 bp, Homo sapiens; identical to SEQ ID NO: 219044
  chr19:6013009-6013055
  hypo

SEQ ID NO: 273141 - DNA, 278 bp, Homo sapiens
  chr19:6015901-6016179
  hypo
ccggcttctaaagccgacaccgtgggctacacctggccacagccaaggctgccgccaattgaaagtaactgcaagcactccagaggtggctgcgaatcaggccacctggaaaggaggaggaagcctcgcattttcccaaaagctccatttcttgggaaaggaagaggaagaacaggtgggctggggatcgtctacccacctggtgcccagccgccgcgttctcagccccataaacacagaacggatcagtttcccgaaggaggcggcgttcactgggt

SEQ ID NO: 273142 - DNA, 398 bp, Homo sapiens; identical to SEQ ID NO: 219045
  chr19:6017220-6017618
  hypo

SEQ ID NO: 273143 - DNA, 76 bp, Homo sapiens; identical to SEQ ID NO: 219046
  chr19:6018261-6018337
  hypo

SEQ ID NO: 273144 - DNA, 135 bp, Homo sapiens
  chr19:6019758-6019893
  hypo
agtgtgggccctgaagcttttcttcccagtggcttcaccgtccggatttgtcatgtgtgctgattgatttatcgcctgttccccgcagactatgctctccctgagggtggagacggagccaggtttgcccatgtg

SEQ ID NO: 273145 - DNA, 141 bp, Homo sapiens
  chr19:6020514-6020655
  hypo
tctgttcagggtctacgcctcaccagcaggctgggagccacttatgcaccgggccttcccatccctcggtgctggagcccacacctggcggcacgtcagactgcggcaagcatcacaggtcagttccgtgaaaccgaccac

SEQ ID NO: 273146 - DNA, 390 bp, Homo sapiens
  chr19:6021709-6022099
  hypo
ggagtgggagagagcgggtcctgcagggccttgtgggccattttgacaacactcggttctacttggagggccaaggggagccctggaggcttccaagcagagcagtgtggcgatctgacctgggttttagcaggatcactctggtggctgctgtgagaaggggctggaggctgggtaggggtgggtgctgacggctggctaggaggtggccgaaagaatccacagggacagtggcggctcgggaagtagtcgaagtggaggaggtggggggtgccacctggttctggatctttcttgaaggtgaggttgaagagcatctgggggtgggcatgagaggagcaaggaggcgaggacgcagtggggttgggggccgagcgcctggaagattgg

SEQ ID NO: 273147 - DNA, 136 bp, Homo sapiens
  chr19:6024058-6024194
  hypo
gggattacaggcgtgagccaccgtgcccagcccattttcccatagacattttaactctcccgtggacttgctgcctgtccaggctctgcacccccatcctgcctgggtcacgcagccctctcgcccagggctgata

SEQ ID NO: 273148 - DNA, 521 bp, Homo sapiens; identical to SEQ ID NO: 219047
  chr19:6024682-6025203
  hypo

SEQ ID NO: 273149 - DNA, 685 bp, Homo sapiens
  chr19:6026055-6026740
  hypo
aaagtgctgggattacaggtgtgagccaccgcacctggttgccttcatttgtcttaaaaatgtctatgcaggttacaagcagagcagggacaggttgccaggtcagacgcacacttacatggctgttgagtaaaccgcttttgtgtgatgtgattccttcgcttttttggaggttttcaatcgccatttcaagctaaagaaaatgtgtgcagaaacaaaacaaaacaaaatggaaaaaaaaaaaaaggaaatcagatggttagcatcagccaagatttgtttttattaatatccaaataatgattcgagctcctacaaaataaaaatgaggctccacgcaggcagggcgggggtgagttaaattgtgcatgaaagctgcggtagggagtgttgcttcgcacacgtaggtaagcccgagagcccgtccaacagaagcagcagaaatcatgttgtaaaaacttgctactgaactttaacctggcatatgtgtgtgcacgccgtagcattaatatgcagccactgcatccattccagtgtcagccaagccagcatcatagtcacctgctcctttccccacgccacatcgatggggaaccagaatgaaagcaaggagagatggcagccttgactccccagccaggctgtcctgtcgcaaatcccagggtctccccgctgctggaggctt

SEQ ID NO: 273150 - DNA, 580 bp, Homo sapiens
  chr19:6026959-6027539
  hypo
gaggtggggagggaggtgggcggcaggtccacgcgatggaggaggcacacagctgtgcgtggccactaaggcattcgcacgcatttggtttgtcctagactcgcacacggaaaacagcgacgtaaaatctgctgcagcccaccctgacgaccagaggactgaagcgggaggagatgaacttgaagtatatgcttcctttcttaaggaggccaaagacttgacacttctgcaaagagcaggttgagtgtgtatttcagagagcaggcgagcggagctgagttcaagaatgagagggtaactgcttctcccacggcctccgaccacggtggttctgccttctctcattagctacccttgcttcaagccaaggaggacgtcagggtcacctttaagaagtgcagaaggtacactggaggaccaggggaaagtaggatggtgagacctctcccacccatcagcctcagggtgcaggcgatgagaaggcaatcgccacctctatgatagaaaaaacacacatgccacccccatgtcttggggccattctgatctgcagcttgggcagccacgtgagtactgccct

SEQ ID NO: 273151 - DNA, 149 bp, Homo sapiens
  chr19:6033077-6033226
  hypo
agtgtgagccaccgcgcccagcaggaccgattcttagagccactgggatgacaggcatcagccaccacactcagcaggaccgattcttacagagccactgcgcactcttaacttcaacactcttaactaatccacggacgttatagaat

SEQ ID NO: 273152 - DNA, 164 bp, Homo sapiens; identical to SEQ ID NO: 219050
  chr19:6040234-6040398
  hypo

SEQ ID NO: 273153 - DNA, 342 bp, Homo sapiens; identical to SEQ ID NO: 219051
  chr19:6044407-6044749
  hypo

SEQ ID NO: 273154 - DNA, 686 bp, Homo sapiens; identical to SEQ ID NO: 219052
  chr19:6044993-6045679
  hypo

SEQ ID NO: 273155 - DNA, 137 bp, Homo sapiens; identical to SEQ ID NO: 219053
  chr19:6046169-6046306
  hypo

SEQ ID NO: 273156 - DNA, 181 bp, Homo sapiens; identical to SEQ ID NO: 219054
  chr19:6062926-6063107
  hypo

SEQ ID NO: 273157 - DNA, 153 bp, Homo sapiens; identical to SEQ ID NO: 219055
  chr19:6064108-6064261
  hypo

SEQ ID NO: 273158 - DNA, 36 bp, Homo sapiens
  chr19:6076061-6076097
  hypo
aacgaggttgggggcggtggctcatgcctgtaatcc

SEQ ID NO: 273159 - DNA, 96 bp, Homo sapiens
  chr19:6076337-6076433
  hypo
gagagagactctgtctcaaaataaataaatacataaataagaaacaaacgttcatcaactggaataccattaactaccttacggtgcatcctagct

SEQ ID NO: 273160 - DNA, 32 bp, Homo sapiens
  chr19:6083195-6083227
  hypo
gcatgagccactgtgcccggccttcatcatga

SEQ ID NO: 273161 - DNA, 286 bp, Homo sapiens; identical to SEQ ID NO: 219056
  chr19:6105444-6105730
  hypo

SEQ ID NO: 273162 - DNA, 38 bp, Homo sapiens; identical to SEQ ID NO: 219057
  chr19:6107003-6107041
  hypo

SEQ ID NO: 273163 - DNA, 267 bp, Homo sapiens
  chr19:6215002-6215269
  hypo
caggtctggctcacgttgcccaggcgacgcccctgcctgtgctcctgccggcctctgccccgcatcccacaggtgactgggatgacggctgggcaccgctgcagactgggcttcccaggcagcagaccagggtgtgcagaagctccgacggtgtggcctgggcgctccctgccccggcaacgcagggacaaggccggcaagccctcacccagggcccacacaaacgttccgggaggaatcaaaaggcgcttcgcgtgtggctcggtc

SEQ ID NO: 273164 - DNA, 213 bp, Homo sapiens
  chr19:6226063-6226276
  hypo
ctgcctgggtgctgcggttcttctcccgcatggctgacggtgagtctgtgaggcagctggagagccctgcctgtcctgcctgggatggctgggcccacacgcagggcctggcagacaagtgaggtgaggagaaaggagaggaccggtggagagatgtgtgggtggcaggcaccgggcagctgccccgagggcccgtgccgctcagcctccagg

SEQ ID NO: 273165 - DNA, 235 bp, Homo sapiens
  chr19:6230445-6230680
  hypo
tgctgggtgctgccgtgtgacctgcgccttgggtctcggcccccagcaccgacacctctggctgggcacagacggccgcagcaaagtagcctcggtggagcggccccttggcgggcaggggcggggcacactcaccccgccggcccgcaggagcttgtaccggaactccgtggtggggttgttgaaggtgagcttctcgcagcgcaggtggttcacgggcgggttgccttccagg

SEQ ID NO: 273166 - DNA, 113 bp, Homo sapiens
  chr19:6236570-6236683
  hypo
tagaggtcacgccccgaagcaccctgcggccagcaccctgggattgagattggctgctggaagcggccagtgagtcacgggcactgggaatgactaaacggcatgccctctac

SEQ ID NO: 273167 - DNA, 219 bp, Homo sapiens
  chr19:6241968-6242187
  hypo
ccagaggggctgcccgcctcctgaactctgcaaggccctgggagcctgggagccagggagggagttgcttgcagaagcgttgctccgcttctgcgccagcaggtcaggggcaaggggagaagacaatgggggctcagagggggctccctgcctcccagcctccctgcctcaagacctgctctccccagtctcaaactgagcgcacgcaggggcagccca

SEQ ID NO: 273168 - DNA, 164 bp, Homo sapiens
  chr19:6249578-6249742
  hypo
gcatgcagaagcctcgaggccgcatgtgatgggagggaggccacccggatccccccttgaagagctggagcccccagctcagggaagttcccatcacacatccagtctgcccagcaagcgctttactgtcaatgcttaaaaataggcacttatccagaagatat

SEQ ID NO: 273169 - DNA, 224 bp, Homo sapiens
  chr19:6333455-6333679
  hypo
acccacgcactcaccgtgttgtagaactcggccaccagctccgagtactggaagttgctctcacaccagtccacctcggagctctgataggcgaagatgctaggcatcttgtctcagtggccaccaccagccggctgcgcccggcagagagaaggcgagcttgggaaggctgggccctgatgaggcggggagaggacagcccggtgccccgcggcaggcagact

SEQ ID NO: 273170 - DNA, 141 bp, Homo sapiens
  chr19:6345241-6345382
  hypo
atttttattggcacacggtcacacccatttgtttgtaagttgtctatggctacttttatgctataatgcagcaatctgcaagctttttgtcacccaggaccagttttgtgcaagacaattttatcacggaggtgtggaatg

SEQ ID NO: 273171 - DNA, 423 bp, Homo sapiens
  chr19:6374177-6374600
  hypo
tgggagctcccaggcttaaccgagctctctgtgcaggccatccacggcttccgagagacagagaagtcgcgctggtcagaagccagccgggccatcctgcagcgcgtgcaggcggccgcctttggccccggccagaccctgctctcctccgtgcacgtgctggacctggaagcccgcggctacatcaagccccacgtggacagcatcaaggtgggcagaggacggtgccttggcactcccagccagggggtaggcaggcccggttagatcctgacccatccccacgcctcttttgcagttctgcggggccaccatcgccggcctgtctctcctgtctcccagcgttatgcggctggtgcacacccaggagccgggggagtggctggaactcttgctggagccgggctccctctacatccttag

SEQ ID NO: 273172 - DNA, 143 bp, Homo sapiens; identical to SEQ ID NO: 219061
  chr19:6414854-6414997
  hypo

SEQ ID NO: 273173 - DNA, 100 bp, Homo sapiens
  chr19:6417746-6417846
  hypo
gaccttgcttgaactgtatccgcacgccagcatcattctggatcttcttgatcatctctccactccggccaatgaccacgccaacagaatgcctgggcac

SEQ ID NO: 273174 - DNA, 148 bp, Homo sapiens
  chr19:6425751-6425899
  hypo
agcgtccagttctcttgcaggactcaaggaaccagccccactcacgagtccagaaccgttccaacaaccgggatcgagggatcacagcctcgatcacacccctcacttcacacccctcactcccttcgcctaaggccctgggatccaa

SEQ ID NO: 273175 - DNA, 118 bp, Homo sapiens
  chr19:6433456-6433574
  hypo
ctgaccagaggtgccgggacactggtgtttcctaaactcacctgctgtgacgggagatgttcaaggttgttgtcatgcatgtggccaaacgcgtacccatacacgtgtgtacagccag

SEQ ID NO: 273176 - DNA, 120 bp, Homo sapiens
  chr19:6461712-6461832
  hypo
cgcgcccggcctggcctaattattctttaatcatcacttgtcacccaagggtcctcaggagggggtcttgttattatcatcatcctttatccaaagatacagcattggccggtctcggtg

SEQ ID NO: 273177 - DNA, 141 bp, Homo sapiens
  chr19:6541535-6541676
  hypo
atctcacttatatgcggaatctaaaatagtcaaacacatagaagcagagaatagagcggtgcttgccaggggctgtgggtggggaaaacgaaaggtgttggtcaaaggataccaacattcagttaagaaagatgaggccga

SEQ ID NO: 273178 - DNA, 323 bp, Homo sapiens
  chr19:6664836-6665159
  hypo
caccacgcccagcctctgcttcgtgagttttctttcccctgaggcaccctctgagttctccacgtgtcagacccatgtccaatgcaccacgctccttccttcacaccatgaaagccccgaagtaagaccgggtaccatcacgcagtcgaaccaggcgttcatccagcacacggacgaccaccttctccccagcctccaggtgtaccacaccacccaggaagctgctgtcccaccagacccgggagctgctggtggcccgtccgcagggtgactgctggctgaccaacagctccagctcctcggggtagcggggtgtgcgcttg

SEQ ID NO: 273179 - DNA, 378 bp, Homo sapiens
  chr19:6744347-6744725
  hypo
accccctaggcacgcgtccccctctgagatccccctggccctgtgtctcttccccaaccacagtgggctggagtctctcttcccgactctgtcttcccctccagactggcttggggctggggccagcgtggagcgcgatcatatttgcagagtgaatcactgtgcttctagtccctctgttagcacccctgagccacccttgtccctgtccttacagaagctccaagacatggatgaacgcagggccacccgcctgggtgccgggtatgggctcctgtcggaggccgagctggaggtggtgcccataatagccaagtgcttggagggcatgaaggtggctgcaaatgctgtggatcccaagaacgtgggtgcctggtc

SEQ ID NO: 273180 - DNA, 236 bp, Homo sapiens
  chr19:6750239-6750475
  hypo
ggtccaaagtgggctgaccccggagctctgccctggaacgattttcctgtcccctcctcccaggcgtggctggcagaagctgaaagtcgagtccttagcaaccggggagacagcctgagccggcacgcccggcctcccgacccccccgctagcgccccgccagacagcagcagcaacagcgcatcacaggacaccaaggagaggtgaggggtgacgtcagagtgggtctgttccca

SEQ ID NO: 273181 - DNA, 270 bp, Homo sapiens
  chr19:6829821-6830091
  hypo
ctactcatctgtaagcgcaggggagactcctatgacctcaaggactttgtaaacctgcacagcttccaggttcgggatgactcttcaggagaccgagacaacaagaaggtggggctttgacgccggaactatggggtcctccacgcagtcggcagcttagccctctccacttgggcatgtgcctgtttgccagactacatctacatggaagtgtgtgttaatccactcaacaggtgttttttgtttgtttgttttgttctgttttttaag

SEQ ID NO: 273182 - DNA, 120 bp, Homo sapiens; identical to SEQ ID NO: 219063
  chr19:7100509-7100629
  hypo

SEQ ID NO: 273183 - DNA, 38 bp, Homo sapiens
  chr19:7103100-7103138
  hypo
gattacaggcgtgagccaccgagcgtggccgtaaccag

SEQ ID NO: 273184 - DNA, 165 bp, Homo sapiens
  chr19:7116309-7116474
  hypo
aggagagagggggatgagctcgcacccttgagaagaaccttcatgagccaattcccaaagcatcaactccgcatggatactttgcacacacatcagccgtgtctaatggacacacacacgtgcatacacacgtgagcacacgccgggaccacagacccttatcca

SEQ ID NO: 273185 - DNA, 180 bp, Homo sapiens
  chr19:7135548-7135728
  hypo
atggtggcggatggcgggcctgggtgacacaccatgactctgtctctgaaaaaaaaaatttttttaacgggagatactgaaaatgcaattaaatagctagaggtggctttgtttatgaaactagcaaaagaaaaaaaaaataccttccaccagctgggcacggtggttcacgcctataat

SEQ ID NO: 273186 - DNA, 89 bp, Homo sapiens
  chr19:7141680-7141769
  hypo
gccttacctcatcaccatatcgccgataactcacttcatacagcacgatcagaccattgggctccttcggctcctgccacatcaagtgg

SEQ ID NO: 273187 - DNA, 83 bp, Homo sapiens
  chr19:7157583-7157666
  hypo
aagtaccgcagctggtcatgtcttaagccccgaagtcaaatcccagggttcttgtgacccacggtgcaagcacagttatgcct

SEQ ID NO: 273188 - DNA, 43 bp, Homo sapiens
  chr19:7158216-7158259
  hypo
atgaagcataatgggccaggcgcggtgactcacgcctgtaatc

SEQ ID NO: 273189 - DNA, 103 bp, Homo sapiens
  chr19:7169226-7169329
  hypo
gccctatcctccctccttcccgctctctgttcacagaggtcagacacacgctattgtcaaaaggctcttcatggctgagcgtggtgactcacacctgtaatct

SEQ ID NO: 273190 - DNA, 96 bp, Homo sapiens; identical to SEQ ID NO: 219066
  chr19:7194737-7194833
  hypo

SEQ ID NO: 273191 - DNA, 34 bp, Homo sapiens
  chr19:7196503-7196537
  hypo
agagaaataggagacgcagcgctgcattgttaaa

SEQ ID NO: 273192 - DNA, 81 bp, Homo sapiens
  chr19:7236595-7236676
  hypo
ggcaccatggctcacgcctctaatcccagcgctttataaattacttagtctcactcttatcctaagtgaagtaaatcagga

SEQ ID NO: 273193 - DNA, 42 bp, Homo sapiens
  chr19:7245761-7245803
  hypo
ccacttctttaaaaacaaaacgacaacaaaaacaaaactaaa

SEQ ID NO: 273194 - DNA, 42 bp, Homo sapiens
  chr19:7256901-7256943
  hypo
ttcaagtgggccatcattcacgttacatgctctaccctacct

SEQ ID NO: 273195 - DNA, 84 bp, Homo sapiens
  chr19:7265367-7265451
  hypo
ttagctatttgggagagaaacgaaacgcccgttgagtcacacacacaaacagatctcaagtagtgaggatgaatttttttagat

SEQ ID NO: 273196 - DNA, 668 bp, Homo sapiens
  chr19:7267299-7267967
  hypo
aagctttctagaacaaggcacgagacactgcttagaaccctgtatccccggcgtacctttctggcagtgactatgagtccaacatcgttcgacaaactgcccgttgatgacggtggcggggcagttggtcttgcccttcgcggtacccggacagatgtctccacactcctcgttgtcatctttgttcaacacgatgtaattatcctccacggaatccaggatacgggaccagtcgatagtggccaagtaacagagctcattgttcttctcgatgcggacagaaccccgggtgatgttcatcaggttgtagaggccgagttccttgaggtgaaccatctcgaagatgaccagcgcgtagttaaagaacagtcgtgatccccggatgaccgtgaggttggggaacaggtccttcaggctctcgagcccatagacccggaagagcagcaagtaatcagtgatcatgatgagtttggggaaactgaggtctcggaaatcttcgggcctcgttttgaacatcaagagtatctgcaagtgtccttcgatgacagagcaattctccagctcatgcaacctagtgaggttgttccggatatccatgccgggacacactacaagagaaaatgaacagaaagcaagacaggtgagcagacgcacggtggatgcatcag

SEQ ID NO: 273197 - DNA, 120 bp, Homo sapiens
  chr19:7274391-7274511
  hypo
gtctgtggcctaagggttggggatccctggtctgcaggatttttttcccatgacgcctacgagatgtggtgtgtgctttaccctggcagcccatctcgaaacggaggctcatttttcttt

SEQ ID NO: 273198 - DNA, 188 bp, Homo sapiens; identical to SEQ ID NO: 219070
  chr19:7484059-7484247
  hypo

SEQ ID NO: 273199 - DNA, 179 bp, Homo sapiens; identical to SEQ ID NO: 219071
  chr19:7484791-7484970
  hypo

SEQ ID NO: 273200 - DNA, 96 bp, Homo sapiens
  chr19:7487170-7487266
  hypo
gcctgccttttaatcttcatctctggccacactcttctagcactgcctgtctgcccagctcccgcccatgcccccccgccccgcgcagccttctgt

SEQ ID NO: 273201 - DNA, 100 bp, Homo sapiens
  chr19:7489520-7489620
  hypo
gtaagagtgctggtcgattttaatttaattttaaattttagttcactcttgtactattcattaagaaggctcaaatttagactgggcgcggtggctcacg

SEQ ID NO: 273202 - DNA, 39 bp, Homo sapiens
  chr19:7489860-7489899
  hypo
agagtgagactacgtctcggggaaaaaaaaaaaaaaggc

SEQ ID NO: 273203 - DNA, 273 bp, Homo sapiens; identical to SEQ ID NO: 219072
  chr19:7493740-7494013
  hypo

SEQ ID NO: 273204 - DNA, 42 bp, Homo sapiens
  chr19:7524840-7524882
  hypo
gtggtcgaggcccgcgccacgagactccgggactttcaaggt

SEQ ID NO: 273205 - DNA, 201 bp, Homo sapiens
  chr19:7525505-7525706
  hypo
ccacataaatggagtcacaccgcgcggccttttgggtctggctcctctcgaggtgtggtattaaggttcgcccgcgctcagtgagcactttgtcaagaacaattcctggtgccctgtagcctgcggcaagctcccttcttccctttcactgtctgtatttttttttattttatcttcttttttttttttaaacagagcctc

SEQ ID NO: 273206 - DNA, 220 bp, Homo sapiens
  chr19:7531952-7532172
  hypo
gcagcttgtccagcggatccagacactgtcccagctgctcctgaaccttcaggtacaggggcggggtggggccggccacgcgtgccctttcctggttggctggggcgcaggtgcggctctcactcgcctggccctggccctccgcaggcggtaatcgcccaccaggacagctatgtggagacgcagcgggctgccatccaggagcgggagaagcagttcc

SEQ ID NO: 273207 - DNA, 316 bp, Homo sapiens; identical to SEQ ID NO: 219073
  chr19:7535298-7535614
  hypo

SEQ ID NO: 273208 - DNA, 183 bp, Homo sapiens
  chr19:7543282-7543465
  hypo
ggaggatgccccggcggggagcaggagggttagctccacaacgctggccccggacatacagtctgggacaggtgctgcatctcggataaacggcctgccctctccctgcccccacagtcccacaccctcctggctgtgcctcatgctcccggggactcatctctaacacggccccgtcccacc

SEQ ID NO: 273209 - DNA, 180 bp, Homo sapiens
  chr19:7555031-7555211
  hypo
ccgcacccggcctcaatgtccttttccttcgtcttgtcacttctccaaaaatttgctgctatatgttgaaggtgctatataagcaggagttatataagctatataagccacctcatttctcttggcatctcccatgtacacataaggtacacatgttaataaatttgtttttcccttgtt

SEQ ID NO: 273210 - DNA, 663 bp, Homo sapiens
  chr19:7619582-7620245
  hypo
ggggaccaggagcctaccctcggccaggtcggaagcccgtgccccctgatctcacccacctcgggtcccgtcctttgccctcccgtgcctgcaccaggccacgtgcaccctcgccatgggggtaggcgatcagggacccaggtgtggccaggtggtggtggggcggctggtgacctcagccgtccgtattccgcagctggagcagatgctggagaacacggctgtgcgcgcccttaagcagctagtcctgctccaccgagaggagggcgcgggccccacgcgcaccgtggagtggctaaatatgcgcagctggtgctcggggcacctgcacctgcgctgtccgcgccgcctcttttcgcgccgcagccctgccaagctggtgaggagcgggccggcccccaccttctaggggcgtggctggtgggcgaggcttgggagactggggcggggcctgggagggctgaggacaggctcgaaggtcagggtacccctgggggatccgccggaccccgccctcatgctcctgggtcgcgactatctcccccatcccagcatgagctctacgagaaggttttctccaggcgcgcggaccggcacagcgacttctcccgcttggcgagggtgctcacggggaacaccattgcccttgtgctaggcgggggc

SEQ ID NO: 273211 - DNA, 232 bp, Homo sapiens
  chr19:7621735-7621967
  hypo
accgaccactaaccgccacccactaatgccccggagaccccaggtacgtccgtccttgggggaggggagcagggagactcgtcggacgccttacccccctcacgccatccccgcaggctgtgtgtggcgttacgtccgggccagcgcctcctactgcccctacctgcccccactgtgcgaccccaaggacgggcacctgctggtggacgggtgctacgttaacaacgtccca

SEQ ID NO: 273212 - DNA, 172 bp, Homo sapiens
  chr19:7626304-7626476
  hypo
gggtgctggctgacatgtgacgcatcagtgtcccgtgctgggtgacgtgtgtgtgaccttccctcgcaggaggaggagaagtcgattctccggcaacgacgctgtctgccccaggagccgcccggctcagccacagatgcctgaggacctcgacaggggtcaccccctccct

SEQ ID NO: 273213 - DNA, 92 bp, Homo sapiens
  chr19:7646040-7646132
  hypo
cgtgcgcagatgttcgcgttaatgcatgcaattctgtgggtattactggttacctttgtaaatatttgagtatgtatttgtggatattatct

SEQ ID NO: 273214 - DNA, 159 bp, Homo sapiens
  chr19:7655856-7656015
  hypo
cactggcccctttgcgcacccacacccactcctgcacgggcacatccagacaggagggcccacgccccagctcccctccctcggcacacccacccccatgcctgctcacatgctccggaccatgagacccacgccccaaacacacgtgccatttcaaca

SEQ ID NO: 273215 - DNA, 284 bp, Homo sapiens
  chr19:7676864-7677148
  hypo
ctggcctccccctacctgcccgaggggacctccaaaccactgtccgacaggcccaccaaagcaccagtgtacatgccacaccccgagaccccctcgaaaccatctccctgtctggtgggggaggcatcgaaaccgccagccccatccgaggggtccccgaaggcggtggcttcgtccccagcagccaccaactccgaggtgaaaatgaccagctttgcagaacgcaagaaacagctggtgaaggcagaggctgaggccggagcggggtcccccacgtccactcc

SEQ ID NO: 273216 - DNA, 613 bp, Homo sapiens
  chr19:7680032-7680645
  hypo
agggggtggctggctggactcggcgtctgtccccaggatgaagacaagcctgaggacgagatggcccaaaagcgggccagcctgctggagcggcagcagcggcgagcagaggaggcgcggcggcgcaagcagtggcaggaggtggagaaggaacagcggagggaggaggccgcgaggtgaggccgggcctgcccgggacgcccgctccttggcctgtctgccaccgcggaccccgtgagcggttctgatgccgattccctgtgatctgcaggctggcccaagaggaggccccgggcccagccccgcttgtgtccgcagtcccgatggcgactccagcccctgctgcccgggctccagccgaggaggaggtgggcccccggaagggggacttcacgcggcaggagtacgagcgccgggcccagctgaagctgatggacgacctcgataaggtgctgcggccccgggctgcggggtccgggggtccaggtcggggcgggcggagggccacccggcctcgctcgggttgctgtgacgactcagccctggcacgaagcccagcccgcggcctgctgggtgaggacccttgggggacggggcctgcccagtgcccttt

SEQ ID NO: 273217 - DNA, 99 bp, Homo sapiens
  chr19:7681577-7681676
  hypo
atctgggtgaacctagagggcggtatggctcgagtttatggatacgccatgaagagatggagggacgcgtgtgggcacgtgtgcatggggcatagtctg

SEQ ID NO: 273218 - DNA, 121 bp, Homo sapiens; identical to SEQ ID NO: 219078
  chr19:7682207-7682328
  hypo

SEQ ID NO: 273219 - DNA, 90 bp, Homo sapiens; identical to SEQ ID NO: 219079
  chr19:7682911-7683001
  hypo

SEQ ID NO: 273220 - DNA, 284 bp, Homo sapiens
  chr19:7685294-7685578
  hypo
tcaaagtccttccacgtctgccagaacgcgccggtcgtctgcgtggggggcagggcaggggtgggtgtgtgtgcccgtgagctggctgactccgccgcagcccccaaccctgatacccgtccctccccacagccctacccgggggtcacagatctgggagcagaagctgtagatggcccgggcgcggtcaatctccccgagcttgcactccatgtctgcaaaccgcaggcacatctcacgcgcgtgctcgtccgacagcacctggacaccggggttggggaggc

SEQ ID NO: 273221 - DNA, 109 bp, Homo sapiens; identical to SEQ ID NO: 219081
  chr19:7701077-7701186
  hypo

SEQ ID NO: 273222 - DNA, 259 bp, Homo sapiens; identical to SEQ ID NO: 219082
  chr19:7711957-7712216
  hypo

SEQ ID NO: 273223 - DNA, 61 bp, Homo sapiens
  chr19:7747699-7747760
  hypo
ccgctgaccctgccggagataaaggatacagagagcccctccccacgtgtgtcttgtgtct

SEQ ID NO: 273224 - DNA, 100 bp, Homo sapiens; identical to SEQ ID NO: 219083
  chr19:7838387-7838487
  hypo

SEQ ID NO: 273225 - DNA, 44 bp, Homo sapiens
  chr19:7862879-7862923
  hypo
gctcccgccgggcgcggtggctcatgcaggtaatcccagcactt

SEQ ID NO: 273226 - DNA, 336 bp, Homo sapiens
  chr19:7914804-7915140
  hypo
cccagggccctgatgagcagcgagatgcccctccccgctgcgctgccctgagcccccccacctgcccgtcccccctagatgcctgaggaggaggccttctgtgtgttcgtgcggctgatgcaggagtaccggctgcgggagctcttcaaacccagcatggccgagctcgggctctgcatctatcagttcgagtacatgctgcaggtgagcagggccgcaggagagcagggctgcaggagggcagggccacaggtgggcagggccgcaagggagcaggatcgcagaagggcagggctggcaccctagaccatacccgggcacctcttggactgaaaa

SEQ ID NO: 273227 - DNA, 196 bp, Homo sapiens
  chr19:7917147-7917343
  hypo
ccctgccccctccccgcgtcctccagctggtgcttcagggaagaatgcacaaaggccacggttgtgtccgtgaacatgggcaggcattgtccacagctaccagagggggccagctgggccgggtgcaggagctgtgtcccccctgggcttaccttaaccctttgcacaggcccgaggcccccggcatacccatcct

SEQ ID NO: 273228 - DNA, 312 bp, Homo sapiens
  chr19:7920730-7921042
  hypo
ttggccctgttttctgaaatcgctgacccagaacgtaagatgctggctgtgccctgcccggaaaagtggcctggccctaaggggactgaccccggcagtgggtaaatgaggggtgcatgtagacaggcgtggggggcgggctatgacgtgatctccccccacccccatagagacttcggacggagaaccggctcctgaaacagcggattgaaaccctagagaaggtgaggggcgtggccactgtgaggacatggtcgccatggggtgtgacccaccatgcggggcatggccgctaacctggggtggactcct

SEQ ID NO: 273229 - DNA, 372 bp, Homo sapiens; identical to SEQ ID NO: 219084
  chr19:7972036-7972408
  hypo

SEQ ID NO: 273230 - DNA, 50 bp, Homo sapiens; identical to SEQ ID NO: 219085
  chr19:7989496-7989546
  hypo

SEQ ID NO: 273231 - DNA, 389 bp, Homo sapiens; identical to SEQ ID NO: 219088
  chr19:7991810-7992199
  hypo

SEQ ID NO: 273232 - DNA, 145 bp, Homo sapiens
  chr19:7992972-7993117
  hypo
caatgtctaggatgcgagaatggaactggagacccagtgccttggcctgctggatggggtgggccagctggctgtaagtctgcaatgagaggccgacacgcctgcgtgatgccacccagggtgggcaccacgccacacagagctg

SEQ ID NO: 273233 - DNA, 58 bp, Homo sapiens
  chr19:7993373-7993431
  hypo
acttccatattcgccgcactctgaatcttggcctgagatcaaacgcctcttctaggat

SEQ ID NO: 273234 - DNA, 439 bp, Homo sapiens
  chr19:7993744-7994183
  hypo
gctccctggcaaagcgagtcagctgtggcgtaatggtcccaaggtaaaaacaaaacaaaaaaccaaaaaaaaaaaaaaaaaaaaaaaaatccacatcgaaactcataaatgcctgctggattagtcaccatgcaggggagtatttaaaaagaaaatctgacatcttctcctctgctttttccaagttgtttatgagctgggtgcagaatagaattagccaagaacgattctggatcgcttaatacgaagaagccaggggaaagaaacacacaggtcggggagcgaatagggtgagatgaggtggcctgaggagatgagagctgggagccccacagggatggactcgggcagggacagggaggctgccagggatggggcagacagctagaccagaccccaggtacgcggtgctgctggtggcccccgaaccccaagcttt

SEQ ID NO: 273235 - DNA, 133 bp, Homo sapiens
  chr19:7997639-7997772
  hypo
cagggagcagagccgggagttcggggggaaggccggggaccccgccccaccaccagcctgcgaggtccagggatgactcactcacccagcaagtcggtgaccttgtccgtaagggcccgggatgcccggatga

SEQ ID NO: 273236 - DNA, 486 bp, Homo sapiens
  chr19:7998974-7999460
  hypo
tgggagagggctctgaaggccgctgtcctgcccagcttctccccgcctttggataccgactcggccgactgcttggccgtcttggctgcttcctccacgccctccttgattttccggccgagatcacttttactgacttcgtgaaggctctactgagacagacacagagagggggcgttggcaccggccctggcggccggggggcggggcaggaggaatgaattcctgccggagagaagggcggatctggttccccgaggccggcagaggccttctgtgctcctgtggtacgcggcacccccagagccatgagcacaacggcacccccagagccacgagcacaccgccacccccagagccacgagcacaccggcacccccagagccatgagcacaccggcacccccagagccatgagcacaccgccacggcttccgggatgctggccctgggctctgggtgagacgctgggtctgctggccccttt

SEQ ID NO: 273237 - DNA, 97 bp, Homo sapiens; identical to SEQ ID NO: 219090
  chr19:8004778-8004875
  hypo

SEQ ID NO: 273238 - DNA, 206 bp, Homo sapiens
  chr19:8028628-8028834
  hypo
gcgtttcctggcacgttgacgccagagagcccgctcatgtgatcgacgcccatgggggagaacctggcagacagagagcaagcgtcaggccacggtcagcgcaggcggcctggggatggggcaaggcctggacgcatgctgaccatggccgctgggccccatcccgctctgcgcagccacgaggtgctcacggttgagacacctgc

SEQ ID NO: 273239 - DNA, 235 bp, Homo sapiens
  chr19:8052094-8052329
  hypo
aaagccttgggcagcggtgtgggctttaacccgaccagagatatacagcaagacagaagccgtgaatggggctgcagcctggtggctccggcatgacaggtcatccatgagggtagagggctgactccttctgatcccccgagggacatatggggccactgtggagagaccagacactggggcagggctgcccaggaaggcagcgggcaggaccaccgggcgctgcagtggcctc

SEQ ID NO: 273240 - DNA, 89 bp, Homo sapiens
  chr19:8052777-8052866
  hypo
gaggcctccttaagcaaacacgaccaggacctgaacggtttgaggaggggagtgacagggtcacatgcgggctgtcaaacaggcccctc

SEQ ID NO: 273241 - DNA, 99 bp, Homo sapiens
  chr19:8057697-8057796
  hypo
taataatgggtgtggcggcgccatcacagctcacagcagccaaggctcctgggagatcctcaagcgatcctcacacctcagcctcctgagtagctggga

SEQ ID NO: 273242 - DNA, 147 bp, Homo sapiens
  chr19:8082469-8082616
  hypo
attaatccatgaggaagggtcggctaggcagagaagagaggtggggagttccagacagagggaccgacaggagtaacggcacaaatttgtcagggaggatcattcagggagcaggggtgccggttcggaggggagatcacagtgagg

SEQ ID NO: 273243 - DNA, 175 bp, Homo sapiens
  chr19:8127043-8127218
  hypo
agttactattattttacagccgtcaattttacttcggcctctctcattgcttctgcaggactgtgagccggctcatttctgggctccatcggcacaggaggggccggatctttctccgataaaaccgtcgccctacagacccagctgtccccacgcctctgtcttttgggtcaag

SEQ ID NO: 273244 - DNA, 191 bp, Homo sapiens
  chr19:8148277-8148468
  hypo
atggggctggctggctgcttcgcgcctccaccgaggaatgtctccttctctctgcccagcagccgtctcctcggaggaaagtccagcctcccttccacaccggccactgcaccccagcccacgtggaccccatcctcaggctgcggatgacacctgagcccgcaggacacgcccatgaagcttccagggaa

SEQ ID NO: 273245 - DNA, 604 bp, Homo sapiens
  chr19:8191121-8191725
  hypo
cgcctggttgtgtgcgggctctggagtagggggtgagctggacacgggcaggcagttaccatcgcaggtgacacccgtcatccgggcaaagccccgggcacaggcagggtctgcaactgggagaacaagagtgaagagaggagtcattttctcatgccagcccaaggggggacccgccccatggagggcttttcccatgggtgcctgggaggcctcaaggaggatactaccgatctcgcagcgttcgcaggggctcccccaggctgccccgagggtggcgcagcactcagaccgcaggctggctccctgaaggttcacctcacagcggctctcctggatcttcagccagcaggtgcccttggtgctgtctggggagaagaggcgggtcacctgtctcacctgccggccctacacctgcaccctgacccatagacgcccagcctctggaacgccgtcgggctccggggccgctcacctagacagaaggtaccagaggggtccagccggctgccagggccacatttgcaggtgtaggagccggccaggttccgacagacgccactcacacacgggctggacaggcattcgtcgacatctgtgggga

SEQ ID NO: 273246 - DNA, 99 bp, Homo sapiens
  chr19:8201335-8201434
  hypo
cgtgggcaggcagcggccattcagacacaggttggtgaagtgtcggcagatgtcaatggtctggttcagggtagcagtgcctacgggtggggccggcag

SEQ ID NO: 273247 - DNA, 37 bp, Homo sapiens
  chr19:8203390-8203427
  hypo
aggtctccagcacagcggcccccgaaaagcactgaga

SEQ ID NO: 273248 - DNA, 240 bp, Homo sapiens
  chr19:8253593-8253833
  hypo
tgggattacaggcgtgagccaccacgtctagtcgactgggtggtgatcttatcgcttctaagggaatatttggcaatgtctagcgatgttttgcgttgtcagaaccgaagggaggagtgttactgtcacgctgtgagtagaggcctgggatgccgctaaatacatacaatgtgtaggaacaaagattattcagctccaaatgtcaacagcagttgagaaaccttgctataccaaatggca

SEQ ID NO: 273249 - DNA, 45 bp, Homo sapiens
  chr19:8440196-8440241
  hypo
gcactttgggaggccaacgagcggatcacccgaggtcgggtgatc

SEQ ID NO: 273250 - DNA, 76 bp, Homo sapiens
  chr19:8463148-8463224
  hypo
tgggctcaggcccccgtccctgggtgctgttgcccacaaaccctcatctctgttctgtccacgctgcgctgactcc

SEQ ID NO: 273251 - DNA, 253 bp, Homo sapiens
  chr19:8468435-8468688
  hypo
cctgtgacccctgcgcctccacccagcgtgcgtgcacgtcctccgcccgcccccgccacggtatcctctggcccctccctgctgtccctctgtggccggctcgttccagccctcccagtgagctctgcacggccgggccggggcccaggaaggacaggagccagtgctaccccgtcctgcccggggaaaagctagaagccccggtttgctgcacccatgaaactcgggtccccacagcgtcttggcggggtgg

SEQ ID NO: 273252 - DNA, 120 bp, Homo sapiens
  chr19:8472051-8472171
  hypo
cctgggattacaggcgtgagccaccgcgccagggcaacaggaggatttcaagtagaaactgccaatgaaaaaagagagagagagaaggatcacttgaacccaggagttacagtccaacct

SEQ ID NO: 273253 - DNA, 120 bp, Homo sapiens
  chr19:8474998-8475118
  hypo
aaatgaaccagggctcttcggaaaaatggttgagtccaggcctggggcaggcaaaagacaagacaagtcagcctggaagagtttgttgagccagttagtaaggaaatgccccaagatgga

SEQ ID NO: 273254 - DNA, 147 bp, Homo sapiens
  chr19:8475418-8475565
  hypo
atctcaaaaaagaaaatcaccatttggttgctattatggtaataactgactcaggcaagggtcatcaattgatattaagctcttggaaacggcgtgtgttgaggaacaggctatttaattactttcgaagtatctccccagaaagca

SEQ ID NO: 273255 - DNA, 228 bp, Homo sapiens
  chr19:8495657-8495885
  hypo
ccaggaccacctccggctccacagccagctggaggccgtgggtctcattgccctcaccatcgccctcttcaccatctatgtcctctggacgctggtgagtggctgtggttgtgcagcacgcgtctcgagctctgccgctgggagcagcagggccaaggatttggcccctggcttgtggggcacggggctccctggctgcctctgtctatggccgtgggtggaagagag

SEQ ID NO: 273256 - DNA, 159 bp, Homo sapiens; identical to SEQ ID NO: 219095
  chr19:8526868-8527027
  hypo

SEQ ID NO: 273257 - DNA, 195 bp, Homo sapiens
  chr19:8528372-8528567
  hypo
ctccaaagggatgtgcgtaagtatcgtctagttacttattggtatttgagccttctaacttgtaggactggtttcactcgactcgtttccttttgactctatagtgttgttgaattcaagatggaagagagcatgaaaaaagctgcggaagtcctaaacaagcatagtctgagcggaagaccactgaaagtcaaa

SEQ ID NO: 273258 - DNA, 97 bp, Homo sapiens
  chr19:8535012-8535109
  hypo
ggctcttggtctcccggccatttcggaggcttgacttcaaagccttcagtgctttgggagagtaagtcaccgtggcgatctcttgctgctgttgcta

SEQ ID NO: 273259 - DNA, 38 bp, Homo sapiens; identical to SEQ ID NO: 219097
  chr19:8539870-8539908
  hypo

SEQ ID NO: 273260 - DNA, 118 bp, Homo sapiens
  chr19:8546611-8546729
  hypo
cagaacaaagcaaagtaagacgtgttggacaagcttggtctaggtgctggaaagccagcctcggctcaggcatgccgggcaggatcgcaggcgtcccgggagaatgagctgtacctgc

SEQ ID NO: 273261 - DNA, 37 bp, Homo sapiens
  chr19:8547111-8547148
  hypo
attacaggcatgagctactgcgcggccgggggacagg

SEQ ID NO: 273262 - DNA, 164 bp, Homo sapiens
  chr19:8554605-8554769
  hypo
cttcccccagtgaagcgctctcaggatccactcaggccaagcaggtgtgcatacctggcaaggaggcctggctgctgctgttctgttggctgtggaggggcgcgtcctgcccggctgcctgcctggtagcacatgctgttctgatcacccggagccccccttgc

SEQ ID NO: 273263 - DNA, 293 bp, Homo sapiens; identical to SEQ ID NO: 219098
  chr19:8554978-8555271
  hypo

SEQ ID NO: 273264 - DNA, 188 bp, Homo sapiens
  chr19:8575552-8575740
  hypo
cccacccccaaagcggcgggattcagagctgcgagaacactggaagctccccctctgacagcagcggcgacaccttgggtgcaagcggggccggatctgggtggggcagaggaggggggcgcctgagcctcagcgccttgggcccccgcccccctctccacccgcgcattcctcggccttacccgcgg

SEQ ID NO: 273265 - DNA, 1074 bp, Homo sapiens
  chr19:8576017-8577091
  hypo
atcagcttccgggcgcctagttcagtttctcccgggtctgtctgcccctagagttgggggcacccaacttggcttctccgcgtcccctactatcatccccagattcactgttggggagaagcccgctccgaggtgaacggtgaaaggggcgcaaggtttatacgggaacgccggcgcagatgaaggcgcaggtgccagtcatttttaaggcaaaaatcctgtatttcgggacggtggcatttgtgccccctgggaaggggatgagcactgctgcctcctggtatccaccagaccccgcagggcgcaggaaagaaagcccctccacccctccctggtggtcacctgcacgcacctgagggcgcgtcggagccgccctggggtcttcgggggctgctgccagcacctgcggtaaaggggcgggtcaagttcagagtcagggcgagcccagccagccctcctggaggcccccgaccccacactcaccttggctctttttccagacggcggcgctggaagccggcggcccgggtgcagcggccaggaaggggcgcaggcgcggggggcttaggccaaagggcgcagggttcaagtagggcaggaacggtccggtgggggcaggggcgggggtcgtgaagggttccagcagcgggaacggcaggcccggcgctgatgcggggtcaacctccggggggcgctccggcgcgggcggctctcggtccagggccgggggtggcggcggggctgggctctgcgcatgctccgcgcaaacatgcaggtgcttgaagagcgagcggtgcgtgcggaagcgcaggaggcagttctcacacctggaggtgggcagagggctgggctgggctgggcctccaggggcaccagggagagtgtcctgtgcaatgccacccgcccttcgagcgtgggaacggagcctgggcactaatcacctccccgctcctgtacaactgtggcagcgacccttcctgaccacttcgggtgggaacctggggaaacccggaaagaagtctcaattttaagttaggcggccggttttccacttgggaggtaaagcctggctgg

SEQ ID NO: 273266 - DNA, 74 bp, Homo sapiens
  chr19:8577121-8577195
  hypo
atccagggagttgagggcggggcttccccaaaggcccacccacatcaagtcccgccctccaacaccctgaccag

SEQ ID NO: 273267 - DNA, 204 bp, Homo sapiens; identical to SEQ ID NO: 219101
  chr19:8587385-8587589
  hypo

SEQ ID NO: 273268 - DNA, 179 bp, Homo sapiens
  chr19:8604833-8605012
  hypo
gatcttggagccggcggtgctggggcgccccttcttgtctccatccagcttctcggggaagagcatccggaggaaggccctgggtaggaaaggggagaggaggagttggaggtatggctagactttcgggtactcttcctccaggggtggggcagcctcaatgccgcaacgcaaaatat

SEQ ID NO: 273269 - DNA, 209 bp, Homo sapiens; identical to SEQ ID NO: 219102
  chr19:8606638-8606847
  hypo

SEQ ID NO: 273270 - DNA, 228 bp, Homo sapiens
  chr19:8618012-8618240
  hypo
agagacttacaaagcggctggaattgttgttgcgcacagtcttggcgttgccgaaggcctcgagcagcgggttggactgcaggatgatatctttgacgtgctggggcagaggcaggtggagtgggaagaagtcagactgaggcaggagtgcagatgggtggggctgcactaccatgcaggtgagggcgacccagcttatccttctgttttcctcgtctcacctggacc

SEQ ID NO: 273271 - DNA, 55 bp, Homo sapiens
  chr19:8934836-8934891
  hypo
cactacagctgcttccgccttggtctcctggatgttgctctagaggacaccagtt

SEQ ID NO: 273272 - DNA, 355 bp, Homo sapiens
  chr19:9128987-9129342
  hypo
accctcctccagttcccctccgcccgcccagccaacagagtgacctttcaaaaatgcaacaccggccatgccccgccccggtccgaattcttcagtgccttctcaccgccctcgggaccaagtccaaacgctgcagcctggcgttgaaggcccaccttgagccgggacccggcctgcattggactaacgtatgacttcgcttctcaccccgaagcctttgcctcggccgttccctgtgccggaattaccctccttccctttacctgattctgtgtcccctaattctctccaggcctcccctacctccctccccagacagaaagcagagctccccgccctgttcccaaagcacctt

SEQ ID NO: 273273 - DNA, 157 bp, Homo sapiens
  chr19:9130022-9130179
  hypo
gcatggagcccggccgccgcagcacctctgctccgcgatccgtgggcatcctcttcactgtgtccattggatgtttgcctcccagactgagggggagctcagaatgacccaaattctcaaaacaagtttcctcaccgggcgcggtggctcacgcctg

SEQ ID NO: 273274 - DNA, 223 bp, Homo sapiens
  chr19:9204274-9204497
  hypo
gcttatgaccggttcgtggccatctgccacccattgcactacgccaagatcatgagcctacgcctctgtcgcctgctggtcggcgccctctgggcgttttcctgcttcatctcactcactcacatcctcctgatggcccgtctcgttttctgcggcagccatgaggtgcctcactacttctgcgacctcactcccatcctccgactttcgtgcacggacacct

SEQ ID NO: 273275 - DNA, 86 bp, Homo sapiens; identical to SEQ ID NO: 219103
  chr19:9343354-9343440
  hypo

SEQ ID NO: 273276 - DNA, 44 bp, Homo sapiens; identical to SEQ ID NO: 219104
  chr19:9371593-9371637
  hypo

SEQ ID NO: 273277 - DNA, 37 bp, Homo sapiens
  chr19:9459898-9459935
  hypo
atagacgtgagccaccgcacccagcttctggcagctt

SEQ ID NO: 273278 - DNA, 91 bp, Homo sapiens
  chr19:9845537-9845628
  hypo
tatgttgcccagattggtcttgtaccccgggtacgagaccccgtaccccgggtgggcccctggtttgttcgtttgcttgggttttttgttg

SEQ ID NO: 273279 - DNA, 105 bp, Homo sapiens
  chr19:9894646-9894751
  hypo
gggactgcaggcactagccatcgcgcctggccagataatggtgattttttttcctaaagaaaaaaagtccaggcccatgtagatttttttcgtattgaagggggc

SEQ ID NO: 273280 - DNA, 38 bp, Homo sapiens
  chr19:9921966-9922004
  hypo
catccagccctgtctcggtcacacggtaggtaccaccc

SEQ ID NO: 273281 - DNA, 216 bp, Homo sapiens
  chr19:9937315-9937531
  hypo
ataaataaataaataaataaataaataaaattaaaaaaaaaacagtaaaaatcccacggccggggaaatcaggaccaaaccagtaaggagcagctctttaggcataagcacgcgcattaaagacaaaaagtatccttaacatgataaggataaccagctcattagcgctcatgcatatggacggcatatcatgaatggaggcggctctcaagcaca

SEQ ID NO: 273282 - DNA, 249 bp, Homo sapiens; identical to SEQ ID NO: 219107
  chr19:9960939-9961188
  hypo

SEQ ID NO: 273283 - DNA, 86 bp, Homo sapiens
  chr19:9961443-9961529
  hypo
ccgctgcccccacccgtgtgtatgtgtgtctgcgtttgcccaagaatgtgtggggccatgtgactggtcgtctctctgtcctgtgc

SEQ ID NO: 273284 - DNA, 135 bp, Homo sapiens
  chr19:9961559-9961694
  hypo
tccggttctgagtgtgaccacctgcccctccaggtacccccttcccttgtctgtctgtgcagtggccaaaacccaaatgagaatgtcgctgttaggtaaacatgcctccagagcccacttcggggccggtgattc

SEQ ID NO: 273285 - DNA, 226 bp, Homo sapiens
  chr19:9965157-9965383
  hypo
cctcgagggtgtgcgggtccagccggctgaccacgatgttgcccgcgttctggttggtggtgtacacagcccagagcccgctctcgtccaccatgaagtccatgtcggagaagccgccccaggagtaggggaaggtgttgttgtaaccggcgcccgggaggctcctctgcaccagcacagagcgcgagcggaagtggtatttgaccaccacgttgctctggtactt

SEQ ID NO: 273286 - DNA, 91 bp, Homo sapiens
  chr19:9967993-9968084
  hypo
caggtcctcatacccgtaggcacccatctcctcctgaatggccgccagactgccggagagattcctcacctcctcccgcaagcgtacaatg

SEQ ID NO: 273287 - DNA, 170 bp, Homo sapiens
  chr19:10016590-10016760
  hypo
gcatggctttgccacgctcagacattccgcacacaagacacgctctcattcactccaacacgtcccttgggttcagacacaactgatggccatcagattccccttacacgatggggcgtgcttgccatgaagacacgctcaaacatgctatgacacgctctgacacacag

SEQ ID NO: 273288 - DNA, 300 bp, Homo sapiens
  chr19:10142026-10142326
  hypo
tcagggagtttcgggtttgagctccaggagctccggcagtggcgataagagtccgacagtccgacttccagtgagggcccgcacagaccgggcatggcttggaaggaatgccgggctgcgggcattccttggcccatggccaggttttcaacccttgaagcaaggtcctggagcggggatttggacgtcttgaggttcttacacgtaggcggtgcagctggggtttgtcttagggcagaggcaagcctctgcagttctgaaatacgccgctgccaggcagcctcttccctgttattgaac

SEQ ID NO: 273289 - DNA, 33 bp, Homo sapiens
  chr19:10171191-10171224
  hypo
gccaccgtgcccggccaaaaaaaaaaaaaaaaa

SEQ ID NO: 273290 - DNA, 42 bp, Homo sapiens
  chr19:10204397-10204439
  hypo
tgactgaaccatcttgcctccgctggatcacagtccagcctc

SEQ ID NO: 273291 - DNA, 114 bp, Homo sapiens
  chr19:10220395-10220509
  hypo
gcaggatgggagacgagggggtgccgggtgggggcctccacatgcggctgatgacagcacttctgctgagacgctgtgattgctctgtccaaagtaaacgccctgacgcactgt

SEQ ID NO: 273292 - DNA, 180 bp, Homo sapiens
  chr19:10231205-10231385
  hypo
ctggggctgcagagtgagactccgtctcagaaaaataagtaaaattaaaataaataataataatcataaagctcacttattgagtgcttattgtatatgaagcatggtgaggaggatattacttccattttacagctgaagaaactgaggctcagactgggtgcagtggcgcctgcctgt

SEQ ID NO: 273293 - DNA, 886 bp, Homo sapiens
  chr19:10246096-10246982
  hypo
tagttcatttgaacctacagcgagtgagctgtcgccaccatgggttttagcctgctcctttagcgcgacggactgtccttctggctcaatctctgcctcaaaaacaaacagtaaggaaccagcatagggacgcagcctgactcggatgtctcagcactgtccctcctgtgggccgtcttcccactgagagtgatggggctacccggcagccagcaggcgtcctcccggaagtgactgcgctggccccagccccacctggtgacaggcacagaagcctccttcctgtccagacccagcgggcgccgccccactgacctgccggtgcttgtccaggatgttgccgaagagccggtaggtgtcagggaagccctgggagcgggcacactcccgcacgctcaccacacggtgctgctctgggtggagcacgcggccctgggggaaagaggcgcggtgggcgagggcagtagcacccaggccgggtcaccgtcggggacagggagggaaatggcactgtgacagcatacggccatggccttggcctatgagcttgtcccgtggacgtggaggggcaggaggcagaggccaggtgcctggggtcctggggtgctgtcccccacttggctaaacccacacttccacctagttaggccgccaagtacagggcctgacccaggccctcggatgccccctccccacctacctgcttgcccatgggctcggggttggtgacggttgtgctgaagaagccgtcccactcgagccttccatagaggccagcccagtggttgtgccggttcccggtgtggggcaggcaccaggggatgagggtgttgaactgcctggctgcggggtcgcaggctttgccggctggaagacaggacagtga

SEQ ID NO: 273294 - DNA, 105 bp, Homo sapiens
  chr19:10253434-10253539
  hypo
agggaactgcaaggtagattcgcccccaattagggaaccacagggtagagaccccccaaccattaggtcagcttggctgcttgctctgcacgcctggccctgccc

SEQ ID NO: 273295 - DNA, 90 bp, Homo sapiens; identical to SEQ ID NO: 219114
  chr19:10253815-10253905
  hypo

SEQ ID NO: 273296 - DNA, 32 bp, Homo sapiens
  chr19:10295209-10295241
  hypo
gtgccgcggtgctgcgtgcctgtaaccccagc

SEQ ID NO: 273297 - DNA, 31 bp, Homo sapiens
  chr19:10295301-10295332
  hypo
aacatagggcgatcctatctcttcagaaaaa

SEQ ID NO: 273298 - DNA, 145 bp, Homo sapiens; identical to SEQ ID NO: 219115
  chr19:10295674-10295819
  hypo

SEQ ID NO: 273299 - DNA, 114 bp, Homo sapiens
  chr19:10338378-10338492
  hypo
ggtccagttgggggcgctctacggccagccctaccgatggggtcctttataggcgacgggagctcaggctttctgaggatagagttaatgctatgtggacgtccctagggggag

SEQ ID NO: 273300 - DNA, 146 bp, Homo sapiens
  chr19:10350517-10350663
  hypo
cgcccggccaggaagatttttattgtatctaaattgtgcaaaaaaagcaatacttttgtttaaaaaattctcacagcagccttattatttgtgtgtttgtttatttgttttcttgatcttagccaaaaggccgagaagcgatttat

SEQ ID NO: 273301 - DNA, 432 bp, Homo sapiens
  chr19:10370252-10370684
  hypo
gcctgaccggccccccgccccgcccccaccccgcccccaggcctaaatgtgcacagcatgctcaagcaccagacgctggtcctgacgctgcccaccgtcgccttcctggaggacaagctgctctggcaggactcacgttacagacccctctaccccttcagcctgccctacagcgacttcccccgacccctaccccacgctacccagggcccagcggccaccccgtaccactgttgatgtgaagcacctcttctgagccaggccgagcccctggccgacttgggagcctcaggcccacgcccacccttcgaggaaggtgtcacctggaccccttcattccacggaggaagctgaggccacagggagcggccatcgccattgggaaggggcgactccacggaaagcccagacgggcttctgcatccattccct

SEQ ID NO: 273302 - DNA, 42 bp, Homo sapiens
  chr19:10385884-10385926
  hypo
aagtatttacaggctgggtgcggtggctcatgcctgtaatcc

SEQ ID NO: 273303 - DNA, 42 bp, Homo sapiens
  chr19:10394496-10394538
  hypo
gggtggggtatcctgcaatgcggtgcctgtggccacaggatc

SEQ ID NO: 273304 - DNA, 499 bp, Homo sapiens
  chr19:10395580-10396079
  hypo
ggcactttcccactgcccatcggggaatcagtgactgtcactcgagatcttgagggcacctacctctgtcgggccaggagcactcaaggggaggtcacccgcaaggtgaccgtgaatgtgctctgtgagtgagccggcgggcagagctgggtgggggcaggggccatggacctaatgcaatcctcaccgcctgttgtatcctccccacagccccccggtatgagattgtcatcatcactgtggtagcagccgcagtcataatgggcactgcaggcctcagcacgtacctctataaccgccagcggaagatcaagaaatacagactacaacaggcccaaaaagggacccccatgaaaccgaacacacaagccacgcctccctgaacctatcccgggacagggcctcttcctcggccttcccatattggtggcagtggtgccacactgaacagagtggaagacatatgccatgcagctacacctaccggccctgggacgcc

SEQ ID NO: 273305 - DNA, 306 bp, Homo sapiens
  chr19:10420150-10420456
  hypo
tcggcctccattgcgccccagcccagccccctccctaatttcacccggccctgtcccgctgggcccacccgatgaaacccacctgggaggggcgggacctgtgtggtgggagcgctcttggtagaggatgcgatgagccccagctgagagcgaccagcctcggcggcacctttcctctttctggcttttttcaggtcatccgcgcacccctgcgtggcaagggcggcctggaccccaccaaatccctccgcagctgccggggcggggccttccacgctagccctccccctcggaaatgggggctcc

SEQ ID NO: 273306 - DNA, 329 bp, Homo sapiens
  chr19:10432996-10433325
  hypo
ctggtgcccagcagcggcgctcccagcccacacccagtttcaggctgtaaatgggcgtgtccaggtcccctgaccccaccccaggcaccaagtccaggggcgctctcagaatggagggaaagatggcgaaccatcatgagcaattgccagagggggatggggatgtgggtgggaaaggcaggggtttgggggagtcgccctcaccctggttctgcgcccccagggcacagccagaggtccccccaccccaccgatcgcaccagctgtgttgaaaagagcctgtaggggctgtagagcagtgggtgagggggatgcgtgtgttaccttct

SEQ ID NO: 273307 - DNA, 100 bp, Homo sapiens; identical to SEQ ID NO: 219120
  chr19:10464757-10464857
  hypo

SEQ ID NO: 273308 - DNA, 65 bp, Homo sapiens
  chr19:10562154-10562219
  hypo
ctacgcatttgcagcgctggggtgttgggaatagattctgaagagtggcacgccagtgtgtactt

SEQ ID NO: 273309 - DNA, 326 bp, Homo sapiens
  chr19:10665638-10665964
  hypo
cccaggtctcagagcggggggcgctgcattcccaaagtcatgcaacaagaggttgacggagccaagactcaagcctgggcctgacaggctccccacccacgcttccccagccagcactgcttactcttctcggcagagtgacttgaagacctgccgctttttccatgagttctgggccttctggctgtacgcccgcttgtcccgcagctcctcctgctctgacctgcagacagatgcccctgtgttgggtgctctgggaagtgcccgaggctgcccgccctgccccctgcgcatgtggccccgccgcgccccgccccatcacctgt

SEQ ID NO: 273310 - DNA, 116 bp, Homo sapiens; identical to SEQ ID NO: 219126
  chr19:10685492-10685608
  hypo

SEQ ID NO: 273311 - DNA, 120 bp, Homo sapiens; identical to SEQ ID NO: 219127
  chr19:10687540-10687660
  hypo

SEQ ID NO: 273312 - DNA, 207 bp, Homo sapiens
  chr19:10687720-10687927
  hypo
agcctctcaaagtactggcattccagtcatgagccatcacacctgactgggtctctgatttgttctctgccttgttctcatggctcctgggcagcccccacactactccagtcccctccacccccagatcccccgccagtccctggtacttaccgggaaagacttaatactccaaatcacgacgtttctctccggcacatacttggc

SEQ ID NO: 273313 - DNA, 42 bp, Homo sapiens
  chr19:10689002-10689044
  hypo
ggagatggaggcaggcgtggcggcaggagcctgtaatcccag

SEQ ID NO: 273314 - DNA, 145 bp, Homo sapiens
  chr19:10732739-10732884
  hypo
ggtgatatttcaggcaaggcctgaaggcaacggagctgtatggatgtctgagagaagagcattctaagcagagggaccgagcagctagtgcaaaggccctgaggtcagaccatgcctgctgagcgtgggacgtacccaggaggcc

SEQ ID NO: 273315 - DNA, 104 bp, Homo sapiens
  chr19:10742231-10742335
  hypo
aggctcaggtggtgacggggaggctctgcagaggctcagcctgactggtgccatcctctgctccatgcagtggcccggagatgcttccccgctatccacgccta

SEQ ID NO: 273316 - DNA, 108 bp, Homo sapiens; identical to SEQ ID NO: 219130
  chr19:10747314-10747422
  hypo

SEQ ID NO: 273317 - DNA, 94 bp, Homo sapiens
  chr19:10762082-10762176
  hypo
aggcgtgagccaccgcgcccggcgtctttggcacatttgacgtatcatgtgactatgctacctattaaaaatccacagtaaaatgtaaataaaa

SEQ ID NO: 273318 - DNA, 544 bp, Homo sapiens
  chr19:10792601-10793145
  hypo
ttggcagagctctcgtggagacctgccatcgtgctgatccagagccaccttgctattctctctgtagaggagaaggcagagcccccccaggctatgaatgccctgatgcggttgaaccagctgaagccagggctgcagtacaagctggtgtcccagactgggcccgtccatgcccccatctttaccatgtctgtggaggttgatggcaattcattcgaggcctctgggccctccaaaaagacggccaagctgcacgtggccgttaaggtgagtgtggccagcatcactgtcttctaatagcagaaccatggtctttgttttgggccccttctgagccattgtctctcagggagggcatgtagattctaaaaatacacatggttagatggcgagtatttgccaagtcacgtggcaagaacgccttcccactgtggctggcaggcagaggggtccccaaacatgattggggcattagggcctcctgggagcaggagctgaaaggaaacagccctcctccagatggcttcccgggtgggtgcctgta

SEQ ID NO: 273319 - DNA, 36 bp, Homo sapiens; identical to SEQ ID NO: 219132
  chr19:10794362-10794398
  hypo

SEQ ID NO: 273320 - DNA, 83 bp, Homo sapiens
  chr19:10817621-10817704
  hypo
gtgctgggattacaggcgtagtcactgcgcccagtcagcagagccctgctgatggacgtttggtttcccggtcttgctgtggc

SEQ ID NO: 273321 - DNA, 317 bp, Homo sapiens
  chr19:10818162-10818479
  hypo
ggccctgttgcaggtcaatccgctggctggaccggtgcattgcagcccatcagcggccggacaagcagaacctcttcgccattatccagggtgggctggacgcagatctccgggccacctgccttgaaggtagagccatgcgctggcaggcccagggcttggccatcgcggaggtccccacatgggcctggcgtatggcgggactggattgctaatgtgtagaagggcactgcgctagaaaaaatagccggagcaaaggctctcgggccacgtgcagtagaatgtattgagagaatggccatgattccagtagttaa

SEQ ID NO: 273322 - DNA, 147 bp, Homo sapiens
  chr19:10822778-10822925
  hypo
gattgaagaccaggcgcatttcctcttctgtggccctcaccttaccctgtaccctcagagatgaccaagcgagacgtgcctggcttcgccatcgggggcctgagcgggggtgagagcaagtcgcagttctggcggatggtggcgctg

SEQ ID NO: 273323 - DNA, 666 bp, Homo sapiens
  chr19:10823268-10823934
  hypo
gacatgttcgactgcgtcttccccacacggacagcggtgaggctctggcagaaggaggtcagggcgggagacgggtgggggactagggaggcaaggttaggggtggggggtggggagaatgaagccctgggtgacgcccctttccctgcccttcctctcccacagcgctttggctctgccctggtgcccactgggaacctgcagttgaggaagaaggtgtttgagaaggacttcggccccatagacccggagtgcacctgccccacgtgccaaaagtaggcaggatggcactgggagctggggcagggcatggaggggacagggcctggccgtgctgagctgtcccctgccgctctacaggcacagccgcgccttcctgcacgcactgctgcacagtgacaacacggccgcgctgcaccacctcacggtccacaacatcgcctaccaggtgagccagtgcccggggcaaggtgggcgggggtgtcctaggtgcgtatgccccacgctgacctcccctccccgcagctgcagctcatgagcgccgtccgcaccagcatcgtggagaagcgcttcccggacttcgtgcgggacttcatgggcgccatgtacggggatcccaccctctgtcccacctgggccactgacgctctggcctctgtgggaatc

SEQ ID NO: 273324 - DNA, 31 bp, Homo sapiens; identical to SEQ ID NO: 219136
  chr19:10824430-10824461
  hypo

SEQ ID NO: 273325 - DNA, 164 bp, Homo sapiens
  chr19:10848455-10848619
  hypo
cggcctatttgtttgatttctctttctgtctccccccactagaaggggaatgccccatggtagggcggtgcccctggctgtagcgcagtcccttgcatggtgcctggcatgcgataggtaatcggggcacccatctccctctcgggatgcactcattgatgtac

SEQ ID NO: 273326 - DNA, 322 bp, Homo sapiens
  chr19:10859009-10859331
  hypo
aaaccagcaggactcgcggctggacaaggcgggtgggtgagggccaggggagccccaggtctgcagcctcgtgaggggtttctcccctccctgccctttggggtgaccacagggatgcagtggcacctacctgcggacactgtgtgggccgagcactgtaaggcttgggcgtccttgctgggtgaccaatggctattgttggaaggatgaggcagggaccgaggtgggcagaggagactgggcatgggtccccacttctgctccaacagagcgacagagaagcccctgaggtgggtgcgggtgactgcgggtctgcctcatt

SEQ ID NO: 273327 - DNA, 224 bp, Homo sapiens
  chr19:10872393-10872617
  hypo
ccaggcagatctgacctcaacgccagctctcagcttggcctcccaagactcctcactttcgtcctctggccccgcccaacctggcaagaaggcgtgtctccagtgagagacagcagccgatgggcccaccacctcttctttatgagctctgctatttcgtacgccaccgatgggccaatgggctgccacctctgggttcaggcgtccaatcagctgtgccagga

SEQ ID NO: 273328 - DNA, 400 bp, Homo sapiens
  chr19:10874561-10874961
  hypo
agaggctggcatggcgccaggcaagaggcaatgggggcctggccctggtggtgcgggcagatgccaggcagtctagactgtcttccaggcaaggcattaagcagcataggcacccttgctgggggaggtgggtgggaggtaggacgccttactaagaggagaggaaaatgaacacattgcgggcatcagtgattgctggggccggcggggccttgtggggtatacaccagaccacgtggctcctagggattggcagctggctctctgtgaccaaactcagaaccaggctgccaccctttactggcccgggacttgttaaagtgacttccctctctgtgccttggtagcttcatctgtaaaatgggggtgatggtggcgctgccatcgtggccatggcacc

SEQ ID NO: 273329 - DNA, 155 bp, Homo sapiens; identical to SEQ ID NO: 219138
  chr19:10875504-10875659
  hypo

SEQ ID NO: 273330 - DNA, 155 bp, Homo sapiens
  chr19:10875959-10876114
  hypo
cgccagcacacgagaacaggcatgcagatcggctctgcccagcacagggcctggcgccgagcaggtgctccgcatgcacggccgagtgaacgagctcaaagggctggtgctgtgccccttcttgcctactgggcgggaagtgatgggggttactt

SEQ ID NO: 273331 - DNA, 207 bp, Homo sapiens
  chr19:10881732-10881939
  hypo
tgctggataataggcgtgagccactgtgcccagccatttcccccttatttttagcatcactacagtagctgtgatctctgagctttggggatatcccctccccaacattttactctgaaaattcgaacatctggaaacgtcaaggctttgtacagtggacacctgtgtactcggcagccaccttccgtgatgaacatgccttatatt

SEQ ID NO: 273332 - DNA, 298 bp, Homo sapiens
  chr19:10907904-10908202
  hypo
ttccggggcaaatgcgggcgcaggctcccccatgcatggactaatcagatgactctcgtttcttctcttctctctgtctcctgtcctgcgtgtgtggcctgcactgtccctgggtgtctttctgcctcatcctgccctccgcatgacccaggacggggctcttcacccccgacatggcctttgaagccattgtgaaaaaacagattgtaaaactcaaagagccgagtttgaagtgtgttgatctcgtggtctcagagctggccacggtcataaaaaagtgtgccgagaaggtaacagg

SEQ ID NO: 273333 - DNA, 90 bp, Homo sapiens
  chr19:10927555-10927645
  hypo
aaagccagagcccccgaccctcccgtggagccccacactggagtctggagcagcagtgggagaagggccgggcgccggccgtaatgagaa

SEQ ID NO: 273334 - DNA, 57 bp, Homo sapiens
  chr19:10928043-10928100
  hypo
cactcacctgccggcgagtttggggggcctgtctcgacgagccgctcacccaagccc

SEQ ID NO: 273335 - DNA, 129 bp, Homo sapiens
  chr19:10928842-10928971
  hypo
ccttgggtccgcagcggcatccctccctccatggccaccgggcccctctcctatgctctgctccctccatggccaccgggcccctctcctatgctctgctccctccatggccaccgggcccctcttcct

SEQ ID NO: 273336 - DNA, 74 bp, Homo sapiens; identical to SEQ ID NO: 219139
  chr19:10941838-10941912
  hypo

SEQ ID NO: 273337 - DNA, 117 bp, Homo sapiens; identical to SEQ ID NO: 219140
  chr19:10949225-10949342
  hypo

SEQ ID NO: 273338 - DNA, 550 bp, Homo sapiens
  chr19:11001589-11002139
  hypo
gtgctatgactgggcgggccattgcactccagcctgggtgacagagggagaccaaaactgagtcagtgttcccaagcagtgtgtgaagctgattctctgtcagccacgtgccagatgggttgggtcccaggggtggccacctgggggacagggccagacacttgttctgggcccaatatggccttgtgtccagaactctctcggtggctccttctctcgaccctttgccttgagccggagcactgtggggacacaggaaccaagactggtgttttgtgccaatgccacactactgtgtgcccgtgggtcttgggccgggcatgggtgggttcgtcctcatggctacacagtgaaccatgtgttattttatttttctagacactaaagctgaggtgtcgggaggtgatggtcccttgcttgcaggtggcagagctcaggttcaaacctggatcttactgcacctggctcgtttgggaggcctcccttgctggaatgcaggtcagggagccccgatgcccttgggctgactgccccacgtccatcacaccca

SEQ ID NO: 273339 - DNA, 400 bp, Homo sapiens
  chr19:11002341-11002741
  hypo
acttgcgtagacgccggccctcccgcccccagccttcgccattgccttttgtctggctatctttcatgtacaagggagaaattcaagccactcaggagggtgtaacatgaaaagtcagtctctccttctctccgcactgcccgtgacctgtggtttctcaggcacatacaagcgcgcacgcataaatctctcctccaacctgctgggcttcaagttatgcacgttcacacaatggcaaaggagggtgcggattgaaaagtatgacttgcttcccggaggcagcactgaagtcactttattgtgtttccagacaagccccatgaatgcagtgtgcactgcccctcctccctctgtcccttccccgcccatctgtacacctgtggtgcgtaggttttacacc

SEQ ID NO: 273340 - DNA, 291 bp, Homo sapiens
  chr19:11002987-11003278
  hypo
tgatgtgctggggaagtgcccgttcagggccatggctgcagggctcctggacacccagctccggtgctggagtggggttgggattcgcccagaggccagggctgcgccagaggagcccagggtgacctcatggtcctcagatacccggggctgggcagcacagtggaacagctgctccagagcttctccgaggacgacatcggaggatccgactcaggttacggcaggagagggaggccaggccgggttagggttctggggtttgggattctcttccgaggctggcattga

SEQ ID NO: 273341 - DNA, 446 bp, Homo sapiens; identical to SEQ ID NO: 219142
  chr19:11004769-11005215
  hypo

SEQ ID NO: 273342 - DNA, 197 bp, Homo sapiens
  chr19:11008196-11008393
  hypo
ccccagagcttcatcagggccgactgcagtgtggcaggccagcgagtagccccaggctgggtccaggggtggccaaagcgtaacactcagtccgggtttgtgttctttacgttccccgttggagactccacctggagatcccagtccctttccttttactgcagggtaaagaaatgctagctctgggccgggcacgg

SEQ ID NO: 273343 - DNA, 45 bp, Homo sapiens; identical to SEQ ID NO: 219144
  chr19:11017077-11017122
  hypo

SEQ ID NO: 273344 - DNA, 263 bp, Homo sapiens
  chr19:11026626-11026889
  hypo
gcctcaactgaggtccccagcggcgttggggtagcccggggcccaccaccctccctctgtccagagcaactttgctatgctttcccggctgcacacatgcacagacggcagggcctgagaggcagcgcctggccacatcccgggcactgcctgcttccccgtgagtctttggcaggtccctcacacctgccaggtctagtaataggacataaagatgagccaccagcctcccagtctcaggtggaattcgtgagctggtgcag

SEQ ID NO: 273345 - DNA, 682 bp, Homo sapiens
  chr19:11029954-11030636
  hypo
ggtttccagtgtgtcgctaccacggacaatctaattatacatgtaagtttgttgatgtgttcatgtatctggaggttaaactcctgtagtgccaaatcttttatgtggataaacacttgtcatttggagagctgtcacctgattgccctcggtggcgttgtgccggtcccctcctcacggcgtgtctgggaagagcaagctcgttttagctgcacagcctagaagccgtgggcagacctgggggaaggggcagggctctcccctcccatgctggccctggcgtcagatgccacgtcacacctgtggtctctcccaggacacatttgacatccggatcctgatggccaagtctgtcaagtacacggtgaacttcttagaagccaaagaaggagatttgcacaggtactggcacccacactccatcctcccaggcctggctcaggccgaaggtcagggccacccctggctcccgccggcatcctgccgtcccagggcagatggtgggcgggggccccaggcctctgcacctggcaccccctcttctctctcggcagcgcctgtctggcttccccagcagccactgccctttgccttccaggatagaaatcccattcaaattccacatgctgcattcagggctggtccacggcctggctttctggtttgacgttgctttcatcgg

SEQ ID NO: 273346 - DNA, 196 bp, Homo sapiens
  chr19:11031991-11032187
  hypo
gggtggctgggggcggtgacgccgtctcccttccttctttcctccctctcgctgcgcagccaacacggggattgtcaatcacacccactcccggatgggctccataatgagcacggggattgtccaaggtaacgagggtggcgggggcagggcccgtgggggccgagctagcgtgtgagtcgccatcctctgtccg

SEQ ID NO: 273347 - DNA, 180 bp, Homo sapiens
  chr19:11068308-11068488
  hypo
cgcgcctggcccggcctgtttttctttacactattgcatattagtgtgattagcataaaagacaattagagaacagtcataccatccactccatgggcagcaaccctgcctcctccatgcattgctgcagggtattcctagctcaatgcttagcatttggagagagcataagaaatacta

SEQ ID NO: 273348 - DNA, 39 bp, Homo sapiens
  chr19:11077567-11077606
  hypo
aaagaaaaaaaaaaagccgggggttgggaaggataacag

SEQ ID NO: 273349 - DNA, 101 bp, Homo sapiens
  chr19:11084520-11084621
  hypo
caggcgtgagccaccgcgcccggcctggaggttttcttatagaccaccgaggggaacattttgttttgtagttcacgcatagtaaacggggctggctctgc

SEQ ID NO: 273350 - DNA, 36 bp, Homo sapiens; identical to SEQ ID NO: 219146
  chr19:11117137-11117173
  hypo

SEQ ID NO: 273351 - DNA, 593 bp, Homo sapiens
  chr19:11128616-11129209
  hypo
agggcaaaaggcagcagaagcgcaaggctgctgagcctctgctccccacgcttcttcaggaactctccccagccttcaccacagccatgcgtccttctgtctattggctgtgccgcctggttggctgtggcttccagcggggctggagatgggttcatggtggacacagcacctccctcgtggagctgcttgggggcaaaccacgagtagtccctgggactccagcttcgagccctgtctttacggaccaccccgtctagactttctgagtggcttccctcccccactgaaaactccctgccccagagttcctcccagagcccgtcccctttgggactcagctttattaccgcctccaccctctcctcagtctctaggctgtcggtctcaggtgactcacccctccccactgcattctgcctgcccccatgtcctccctcattccagccctggtcatcccacaggggaacagccacgagttgccgctccctcccatccctgtcctcccgcctgccacctgagccaggccccgcctcgcccctcactgtcctcgttctctctcacagtcaggaaccttccgtggctggagggtg

SEQ ID NO: 273352 - DNA, 426 bp, Homo sapiens
  chr19:11129445-11129871
  hypo
gcccttcacgtcctcgccagtctctcttcctccctccctccctcagctgccctaaacacagtttctctgcccactcggagggctgtggccatgttggcctcgcccctgacagccagtggctatgggtttgcacagtgagccattgatgagagaccggcacttgactctcatttccttgttccatcagaacgctgtccaactgggcgtacgagtttgacaagtgggccccctccgtggtgaaggtgtcttacaaggtaggtcacagccactgaggtttcctctcttgctacggaggtgcaggcggtggtgggcaggacgtccacacatacctctggacagtgaacctgagaatgctgggtctccagtcgcatggagtctccaggacagcctggaactccagtcacatggatccgggagtttggactg

SEQ ID NO: 273353 - DNA, 92 bp, Homo sapiens
  chr19:11144003-11144095
  hypo
gcagaacgaggtgcgtgtgctccgcctctgcaccgtcaacagcgtggaggagaagatcctagctgcagccaagtacaagctcaacgtggacc

SEQ ID NO: 273354 - DNA, 183 bp, Homo sapiens; identical to SEQ ID NO: 219148
  chr19:11145621-11145804
  hypo

SEQ ID NO: 273355 - DNA, 248 bp, Homo sapiens
  chr19:11151830-11152078
  hypo
gtgtgtgttatgccccgagccagtcaagctgaagggagagcgggtgcgggggccctcctccgtgtcccagcccggcccctgggattgcgtcgcggcctctgcttgtcgacctgggtgctggctgtcctattttactactattgaccctgaaggccatcgaggagggcacgctggaggagatcgaagaggaggtccggcagaagaaatcatcacggaagcgcaagcgagacagcgacgccggctcctcc

SEQ ID NO: 273356 - DNA, 184 bp, Homo sapiens; identical to SEQ ID NO: 219150
  chr19:11152797-11152981
  hypo

SEQ ID NO: 273357 - DNA, 330 bp, Homo sapiens
  chr19:11154843-11155173
  hypo
gagaggatgagcctcgaccacccccacacacgcacacaccatgcacttggatccacgtgacatggactgtggatgtaagaacgtgaaaggtaaaacaaaattctagaagaaagcacgggagaaaatcttcatgagtaggcatcgatttcttccacgggagccaaaagccactaatcacaaacaattgagaaattagacctcactgaaattaataacatctgtttattaatggacacgctgatggagacagtgaaaactcctcatagatgaggaaaagacaacacaatttaaagctggacaagagccgggaacagacgcctccttacacag

SEQ ID NO: 273358 - DNA, 164 bp, Homo sapiens
  chr19:11172377-11172541
  hypo
tatttaaagtttggcaggtccctggcaaggtgccctggcaggggtggccaacgcacactctctcctcctgtcccctctccaggaccgctcaggaagtggcagcgaagaagactgagccccgacattccagtctcgaccccgagcccctcgttccagagctgaga

SEQ ID NO: 273359 - DNA, 150 bp, Homo sapiens
  chr19:11172753-11172903
  hypo
ctgtttttcttttccgttgctggcagtactgttgcgccgcagtttggagtcactgtagttaagtgtggatgcatgtgcgtcaccgtccactcctcctactgtattttattggacaggtcagactcgccgggggcccggcgagggtatgtc

SEQ ID NO: 273360 - DNA, 52 bp, Homo sapiens
  chr19:11200059-11200111
  hypo
tttgaaaatcaccccactgcaaactcctccccctgctagaaacctcacattg

SEQ ID NO: 273361 - DNA, 270 bp, Homo sapiens
  chr19:11213902-11214172
  hypo
aaatggactttgaagctgggcgtcttcttggctgtcttaatacaagtggcacatccaaatccaaaaccccgaaattcaaagtcttgagcacccgaaattctgaaacgtcttgagcactgacctttagaaggaaatgcttattggagcattttggatttcggatttttaccactgagtgtggagtcctaattaggaaaaaaaccaggctgaccgaaccaaaggaaagcaataaaagaaggcagatagggtcaggcacggtggctcacccct

SEQ ID NO: 273362 - DNA, 233 bp, Homo sapiens; identical to SEQ ID NO: 219153
  chr19:11215985-11216218
  hypo

SEQ ID NO: 273363 - DNA, 127 bp, Homo sapiens
  chr19:11252647-11252774
  hypo
gtctagtcctcaggagaagccgcccagggagcactagggcccgaggaagggttcaacctcgagactccatagcccctgggctcccgtccccagaaacaccagttacgagcagggggctggccatggt

SEQ ID NO: 273364 - DNA, 102 bp, Homo sapiens
  chr19:11285244-11285346
  hypo
agtccagcagccgcgcagacatggcccggaacgtgaccaggtgccgccgcaccagctcggggtgtgcgtcgctgcggcaggccaggcgcagccactcctgca

SEQ ID NO: 273365 - DNA, 153 bp, Homo sapiens; identical to SEQ ID NO: 219154
  chr19:11289073-11289226
  hypo

SEQ ID NO: 273366 - DNA, 1146 bp, Homo sapiens
  chr19:11303546-11304692
  hypo
cttcaccatatggacgttgctggtagctgcagcgggcactgggcacattgtctccaccacctcctggctgcggaacacaggtgggctctcaggcctaccaggcattgccagggccctcagccctgtgccgtaaggctccaggctctgggcccgctgtgcgggggcgccagcggctgtgctggccaccacctccacctcccgtggcccttctaccacccggactgtatccacgcggaccgggctgtccggcggtggccaggcctggggctgggggtcagcctgccgggcctgagctgcctgcagctcctgcagcgccttcttgagctgggtctccagcacagcgaccttggcggcgagggcagcctccccatcaggcatgcccaagtcccgttctcgaacccaggtgcccacactccgggtctccagtgccactgggtcctctgggggatcggggaggtccaggcagagctcgctgcgaccccggcccgctgtggggtggcccaggaacttctggctcttaagttgtactgtgagctgccgcttttcctcctggagcaccgagagcttcacctggagcacagggatcagcttcacctgctcctccagctgccgcagcttccgcagggcacccgccatctgctcccgcacgtgggccaggtgcccggcactgggaggcaccggtgtggacagtcctgaactccgtggtgtcgggggtggcaaccccacgcccaccagggaggctgtcgagccggccgcactgggggtcagggagcccaggccggtgggtgtggccgcctggtcctcgagacggcgacgggcatccagcagcgtgcgctccacccgcggattgaagccaccgcgggtctccagagcaccatactgagggtagaagccacggccgcagtaggaataggctgagtggcggctgtccccactggcattggagcacagcgactcagtggacgtccaccaggagccagggccacggggcagcgagctcaggcgggggcggcgctgcactgccacgcgtcgcagcgtgtggcccttctcgatgtcatccacgtacttgaggaagtccaggtccaggcggtagccatagggggtctccacggagtagggtggatcggggtccttggcagggaaggc

SEQ ID NO: 273367 - DNA, 59 bp, Homo sapiens
  chr19:11319674-11319733
  hypo
cactgggcggcctcggcgtggttgcccagctccgcgtgcttcccggccatgttctgcaa

SEQ ID NO: 273368 - DNA, 176 bp, Homo sapiens
  chr19:11327510-11327686
  hypo
actcagcccgcagcacgctgggtccctgggtacatccttagcctgcctcctccatcatctcctgcccacgccctcaaaccttgtactcaaaggcagctaggcaaaggtacagcaaatccaacagacgtcccagctgggggagtgtcaggtcagtggcccagcgctgcaggagcgcc

SEQ ID NO: 273369 - DNA, 63 bp, Homo sapiens
  chr19:11333607-11333670
  hypo
atgtcaacattgctccgccttccatccatgccatgcccaccctgcccacgcccactcctacct

SEQ ID NO: 273370 - DNA, 150 bp, Homo sapiens; identical to SEQ ID NO: 219157
  chr19:11339623-11339773
  hypo

SEQ ID NO: 273371 - DNA, 300 bp, Homo sapiens; identical to SEQ ID NO: 219159
  chr19:11473074-11473374
  hypo

SEQ ID NO: 273372 - DNA, 134 bp, Homo sapiens
  chr19:11510383-11510517
  hypo
atggataccccgggcgctcagtgtgcctcctgtatacactcctggccccacaatcctgtgtgtacacatgtgcatgcacacacacgtgcacacacacagagcctgggtgcccgcaggcccgcatgcacacacaa

SEQ ID NO: 273373 - DNA, 40 bp, Homo sapiens; identical to SEQ ID NO: 219160
  chr19:11549272-11549312
  hypo

SEQ ID NO: 273374 - DNA, 184 bp, Homo sapiens; identical to SEQ ID NO: 219161
  chr19:11559278-11559462
  hypo

SEQ ID NO: 273375 - DNA, 401 bp, Homo sapiens
  chr19:11559905-11560306
  hypo
gattggccccgaccacgacaagttcagtgccatgaagtatgagcaaggcacgggctgctggcagggccccaaccgctccaccaccgtgagtgcctgcaaggcaggggagctggggcggggagacccaggcctggcccagccgaaccctctcgagcacccgtctgcccatccccaggtgcgcctcctgtgcgggaaagagaccatggtgaccagcaccacagagcccagtcgctgcgagtacctcatggagctgatgacgccagccgcctgcccggagccaccgcctgaagcacccaccgaagacgaccatgacgagctctagctggatgggcgcagaggtgggcggggaggtggagtctcgtcggcctgccccagcaaggggaggcggcgggccctgagga

SEQ ID NO: 273376 - DNA, 155 bp, Homo sapiens; identical to SEQ ID NO: 219163
  chr19:11565669-11565824
  hypo

SEQ ID NO: 273377 - DNA, 213 bp, Homo sapiens
  chr19:11594589-11594802
  hypo
gttgtactgcacctccgcagtgtgcttcttcatgtgccagttgagcgacgcgcgctgccggcactggtagccacagatctcgcacctgccgggagcccgtggcgggacggggcggggtcagagtgggcggggcggggcggggccctacaaggccgagcgcaggtggaaccgggcccagacactgcgttggggcgaagccgcccctgggacctg

SEQ ID NO: 273378 - DNA, 528 bp, Homo sapiens
  chr19:11598119-11598647
  hypo
gatgcctgctactgcggtggcgtccatggtgctaggctggctaccctcgggctctgtctgggtgtaggctgccacaccctccatcatggcacagggcacctcctcgcccagtccactgccggggacaccgctgcctgctgccatgttgaggtgaatgccctcggccgtgagagcgtcgtaaccagggcccgcaatgatgatcacctgtgagccgggcaccatgcctggcatggggcagctggccaccacctcacccagggcctcctggggcacgttctcaaagagggcgctggggcccgcacccacttgcacaggcaccggcacgcacaccactgtctccagggcttcaggcccattgcctgctgggttggagcacagcggggtaccctgctcggccaggctttccacgtggtggacgtcaaagggaatgtgcacgccctcctgagtgatgagcccgctgctgcccaccgggctggtgggcgtcgctgccgctgccgctgccgcagccttgaccggctggccctcagg

SEQ ID NO: 273379 - DNA, 370 bp, Homo sapiens; identical to SEQ ID NO: 219165
  chr19:11605729-11606099
  hypo

SEQ ID NO: 273380 - DNA, 118 bp, Homo sapiens
  chr19:11658623-11658741
  hypo
ggaaacaaggtgaacgtgggagtgaagtacgcagagaagcaggagcggaaattcgagccggggaagctaagagaagggcggaacatcattgggctgcaggtaccgccctgtcctcact

SEQ ID NO: 273381 - DNA, 446 bp, Homo sapiens; identical to SEQ ID NO: 219166
  chr19:11662234-11662680
  hypo

SEQ ID NO: 273382 - DNA, 96 bp, Homo sapiens
  chr19:11699967-11700063
  hypo
aactcccacctctttcctcaatgatttgaacgtttgatcatttgaatgtttgaatgtttgatcctcgtgatcaaacattcccgttactctctagac

SEQ ID NO: 273383 - DNA, 76 bp, Homo sapiens
  chr19:11788684-11788760
  hypo
gtgggagacgagggagaggctcagcatcagagggagaccgtggaaagtgggagacgagggagagcagcttcagttt

SEQ ID NO: 273384 - DNA, 156 bp, Homo sapiens
  chr19:11794320-11794476
  hypo
caagagagagagactccgtctcaaaaaaaaaaaaagtgcgtatgtgtatatatgtttaagacagggtcccttgctaggtctagaggcgagtgccaccatccccagctaatttttgtataatttttttgtaaggtggagggtcgtgaactcctggcc

SEQ ID NO: 273385 - DNA, 148 bp, Homo sapiens
  chr19:11820662-11820810
  hypo
agaccatgcggccacggccgagcctgcctttccagcactgccatggcatgtcccactgctcctgaagtacaggaatggccactcatgggaactgaccgggagtgactgtgtgcgcagtcagcaacacactgaggctggagtgcttgta

SEQ ID NO: 273386 - DNA, 100 bp, Homo sapiens
  chr19:11926329-11926429
  hypo
catctctgacaggttcgtgtgggaggagtagcggtctttggggtccccagtgcccacttttttctgttaaaaattaaactgaggtacgttaacaattaaa

SEQ ID NO: 273387 - DNA, 100 bp, Homo sapiens
  chr19:11926729-11926829
  hypo
cacgaatgagaaacacccagtcctggcttgtggtttgtcaacggaaaaagccaagctatgtaaaataaagaagtttattaggagccgaataggagagccg

SEQ ID NO: 273388 - DNA, 89 bp, Homo sapiens
  chr19:11961501-11961590
  hypo
ggaaggaattcaagacgagtcacaaagtgcagtgcgaagagagtttattgaaagctactctgggccagcatgatggcttaggcctgtaa

SEQ ID NO: 273389 - DNA, 42 bp, Homo sapiens
  chr19:12177042-12177084
  hypo
gggtttttcaaaggcagaatcggggaagaggtggtgggaaat

SEQ ID NO: 273390 - DNA, 37 bp, Homo sapiens
  chr19:12177363-12177400
  hypo
ttttttgttgttgttgttgacggaggctccctctgtc

SEQ ID NO: 273391 - DNA, 360 bp, Homo sapiens
  chr19:12205465-12205825
  hypo
gcccagtctatacctgccagtcttacacagaagagtttcactgccctaaaaatcctttgtgctttgtgtagccatcacactcccctccctctcttccactaaccccttaatccctggcacaaccgatgattttattgcctttagagttttgccttgtccagaatgtcatgtacttggaatcatgttgtaagtagccatttcggcctgtttgtttcacgtaaaaatacgcatttaaagtatctttgtgtctatgtggcttgataacagatttattatttctttattttacaaaattttaaagagatggggtctcactatgttgcccaatgtggttggcggatcacgaagtcagaagttcga

SEQ ID NO: 273392 - DNA, 89 bp, Homo sapiens
  chr19:12260460-12260549
  hypo
tgggcaaagtatttcagtgacgtttctcaaagatacatacaagtgacaagtaagcacgtgaaaaagggttcaacatcaggaatcattcg

SEQ ID NO: 273393 - DNA, 43 bp, Homo sapiens
  chr19:12416132-12416175
  hypo
gaggcagagttccggcagtaacgtgagtggcccagttcctaac

SEQ ID NO: 273394 - DNA, 111 bp, Homo sapiens; identical to SEQ ID NO: 219170
  chr19:12418638-12418749
  hypo

SEQ ID NO: 273395 - DNA, 145 bp, Homo sapiens
  chr19:12461696-12461841
  hypo
ctctccagtgtgagttctttcatgcatacgaaataaactaggccaaaaaaaggctttcccacacaacttacatatataaggtccacctccacgttgtactattatgtgtcttcgaaggtttcccgaagaactgaaggttttccca

SEQ ID NO: 273396 - DNA, 251 bp, Homo sapiens
  chr19:12691091-12691342
  hypo
catatctgcaatcccgcaggagagtgcaagttcctcccccatttgttaaatatttcattgccgcatgagtcacgtcttcaaagggaattaggacaactgaaggcttaatcacaccgtttacattccttgaatttctctccagcgtaagtactctcatacatccaaaaggaactaatacaactgacagcattaccacactttactttcttagggcttctgtctactatgagtcctttcgtgcacgtgcaaag

SEQ ID NO: 273397 - DNA, 40 bp, Homo sapiens
  chr19:12701915-12701955
  hypo
tctggggccgggcacggtggctcatgcctgtaatcccaac

SEQ ID NO: 273398 - DNA, 120 bp, Homo sapiens; identical to SEQ ID NO: 219173
  chr19:12710770-12710890
  hypo

SEQ ID NO: 273399 - DNA, 95 bp, Homo sapiens; identical to SEQ ID NO: 219174
  chr19:12729967-12730062
  hypo

SEQ ID NO: 273400 - DNA, 120 bp, Homo sapiens; identical to SEQ ID NO: 219175
  chr19:12746886-12747006
  hypo

SEQ ID NO: 273401 - DNA, 50 bp, Homo sapiens
  chr19:12747555-12747605
  hypo
cctcttgcccctgtgcggccccgccgaactggaaacgtttccagcaggtg

SEQ ID NO: 273402 - DNA, 70 bp, Homo sapiens
  chr19:12748932-12749002
  hypo
accccagtcacgtgcgaccgctcaaggcggtcctcagaagcggaggggacctccgcgggccagtaggcct

SEQ ID NO: 273403 - DNA, 99 bp, Homo sapiens
  chr19:12749482-12749581
  hypo
aaaaaaaaaaaaaagaaaagaaaatataaacgccaacaaacaggtaattcccaatcaccggcaagaccccgccggattggaccccgaccctcagcagag

SEQ ID NO: 273404 - DNA, 78 bp, Homo sapiens
  chr19:12755553-12755631
  hypo
cacaagctggcccagccctccgtcaagaaggaaacttgaaaaagaacacatctgggctgggcgcggtggctcacgcct

SEQ ID NO: 273405 - DNA, 186 bp, Homo sapiens
  chr19:12757981-12758167
  hypo
attgcccccacctgccggccccaggtaagactccaccccttccctacccctgaccagggccccacctgtgtttgttgtccacttgagcctggaggctgcctcgcggagctggttggccaccagcgtggtctcctgcaggcgggtgatggtgaaggtggagaacaggtcctgcggggaaggggatgg

SEQ ID NO: 273406 - DNA, 197 bp, Homo sapiens; identical to SEQ ID NO: 219176
  chr19:12794668-12794865
  hypo

SEQ ID NO: 273407 - DNA, 33 bp, Homo sapiens
  chr19:12795863-12795896
  hypo
aaatagggattggggctgggcgcggtggctcac

SEQ ID NO: 273408 - DNA, 51 bp, Homo sapiens; identical to SEQ ID NO: 219178
  chr19:12811290-12811341
  hypo

SEQ ID NO: 273409 - DNA, 204 bp, Homo sapiens; identical to SEQ ID NO: 219179
  chr19:12817328-12817532
  hypo

SEQ ID NO: 273410 - DNA, 190 bp, Homo sapiens
  chr19:12885520-12885710
  hypo
cctggagccatgcctcgttgaaccaggaggggtctctgggggcgagaaggtgggatgagcagactgggggacacttttgggatcctccccttcagctccactcacatctggttcagcacataggctacggcaaggccgctgctcaggtcctgagggctggcacagggagacggaacgtggaacgtctgta

SEQ ID NO: 273411 - DNA, 34 bp, Homo sapiens
  chr19:12906630-12906664
  hypo
agccactgcgcccggccttgggagcagctcttaa

SEQ ID NO: 273412 - DNA, 101 bp, Homo sapiens
  chr19:12928674-12928775
  hypo
agaggtctgcggggtgaatgcggtggaataagtgactggaggatggagggggttccaggcattgggcacgtgttgaggcctagaaatgggagacctggctt

SEQ ID NO: 273413 - DNA, 149 bp, Homo sapiens
  chr19:12953398-12953547
  hypo
gcccgtccagtttactgtctcacagccacacgcttacacatgcacatgctaatgtgtgttgtgcactcacatgagcacgcgccgatgtgtgtccctgtgtgtgtgcatctgcgtgcgagtgtgaatgagtgtgtcgctgtgtgcaagtt

SEQ ID NO: 273414 - DNA, 436 bp, Homo sapiens
  chr19:12969190-12969626
  hypo
gccaagaaaccgccgggggagaatgacttcgataccatcaagctcataagcaacggtgcctacgggtgagccacccggggctctggcggggggagggtggcggaggccgggtgtctcggaggtgacggccggtcctcgctctctccccctgcagcgctgtctacctggtgcggcaccgcgacacgcggcagcgctttgccatgaaaaagatcaacaagcagaacttgatcctccgcaaccagatccagcaggcctttgtggagcgcgatatcctcaccttcgccgagaacccgtttgtggtcggcatgttctgctcctttgagactcggcgccacctctgcatggtcatggaatatgtggaaggtgtggctgcctgcggggctgcagggaagatggggccgtgctcactggtcagggctgcggggtggcctgcctg

SEQ ID NO: 273415 - DNA, 316 bp, Homo sapiens
  chr19:12977263-12977579
  hypo
gaggcggggctagacggtgccactgagaatggggcaaggaccttgcctgggagcggagcctaaattaaatacactaatgaggcaggggcgtggcctgacctgaagacttgtaaacccgtcttgaaccaggactgggctcctgtggggatgtgatatgaggaggaaccccgtaccctcagtcacagcccatacccgctccccagcccgctcagacaggtatcaccacgtgaactcctatgacgaggatgacacgacggaggaggagcccgtggaaatccgccagttctcttcctgctctccgcgcttcagcaaggtg

SEQ ID NO: 273416 - DNA, 130 bp, Homo sapiens
  chr19:12985184-12985314
  hypo
gggctgtggccaaggcggcgctgagcccggtgcaggaacacgagacaggccggcgcagcagctctggcgaggcgggcacacccctggtacccattgtcgtagagcctgcgcggcccggggctaaggctgt

SEQ ID NO: 273417 - DNA, 295 bp, Homo sapiens
  chr19:12985537-12985832
  hypo
gcagtgaccccagtcccacccgcatccctcttgggctcaggcaccaagcctcaagtggggctgacctcccggtgccctgctgaagctgtgcccccagcaggcctgaccaaaaaaggagtgtccagtcccgcacccccgggaccatagccaagggggtcatcggccccgcgctgtacagcctccgtatacatatgtacacatataaataaagtgcgtccgtgctgcgtgagttttctggggctcactcctctccaggcaaggcgagacatcacacgaccccacccccatgcccagg

SEQ ID NO: 273418 - DNA, 73 bp, Homo sapiens
  chr19:12986930-12987003
  hypo
tcctctccctggttccgattcatgtcacccacgcaggtccagggcccttttggggacacgcaccatttggagt

SEQ ID NO: 273419 - DNA, 45 bp, Homo sapiens
  chr19:13007716-13007761
  hypo
cctacagggtcccttcggctgcctgaacaacgcccggtacggcat

SEQ ID NO: 273420 - DNA, 89 bp, Homo sapiens; identical to SEQ ID NO: 219181
  chr19:13010440-13010529
  hypo

SEQ ID NO: 273421 - DNA, 75 bp, Homo sapiens
  chr19:13017983-13018058
  hypo
cttgtcttggtgcatcctcacgaccacactcgggtcatctgctgttctctttacgacatgggcttagagtggtta

SEQ ID NO: 273422 - DNA, 146 bp, Homo sapiens
  chr19:13023066-13023212
  hypo
acagcccctccatctgcagcaattggggacctaccacaatttccccaaacatgtcagcctttgcctggaatgactttcccttcctgcctccttcataatggaacatttggaacttttgcttctctaccccccgctatacctaggcc

SEQ ID NO: 273423 - DNA, 36 bp, Homo sapiens; identical to SEQ ID NO: 226559
  chr19:13029431-13029467
  hypo

SEQ ID NO: 273424 - DNA, 85 bp, Homo sapiens
  chr19:13071906-13071991
  hypo
ccccagtttccctttcgcccagtccctggcagtcactattccttttttttttttttttttgagacggatggagtctcgctccgtt

SEQ ID NO: 273425 - DNA, 672 bp, Homo sapiens; identical to SEQ ID NO: 219191
  chr19:13108002-13108674
  hypo

SEQ ID NO: 273426 - DNA, 750 bp, Homo sapiens; identical to SEQ ID NO: 219192
  chr19:13109259-13110009
  hypo

SEQ ID NO: 273427 - DNA, 210 bp, Homo sapiens; identical to SEQ ID NO: 219193
  chr19:13110309-13110519
  hypo

SEQ ID NO: 273428 - DNA, 199 bp, Homo sapiens; identical to SEQ ID NO: 219194
  chr19:13110780-13110979
  hypo

SEQ ID NO: 273429 - DNA, 147 bp, Homo sapiens
  chr19:13111557-13111704
  hypo
tgtctgcacctgggcgttgtcacctggacccgccatggagacaggacatatgtgcaggaccctatggtgggcacttggctggatcagggcacattgcgggtgggagcaatgctgggtgtttggccgtggcgccgtggctgtgggcaa

SEQ ID NO: 273430 - DNA, 374 bp, Homo sapiens
  chr19:13112075-13112449
  hypo
tgtctgtgtggcagcgtgtgtctgcccgggtccctctccatgcctctccatgtctcccagcgtccatcactgggtgctacctgcatgtgactccacggatcatcgcacgccctgtctcttgtgtatttggtagtgggggtcggggagcgtgccaccatgcgtgtcagtgtgccggatgtagtctctgtgtcacggtggcgctgcgcacgtcaacgggtattggtgtaccggtcaccatctttgtatctgcgctttgtatctggggtgacagtgtcccagcgacatgcgtcacatctacagcagtgtttttctgggtgtctgtgcgtcacggcaaagagtgtatccgtgtgtctcacacacgtgttggcctgtcc

SEQ ID NO: 273431 - DNA, 210 bp, Homo sapiens
  chr19:13114026-13114236
  hypo
caaacagacacaggcgtccccatacaaagaatcttgccctcactcacagacaccttgaggcacccggccacacccgaacacatcgatgcggcattacacactcagggacgtgcatgtgggtgcagacacacgggacacgcgcagtcacacgatcacatgccatgaagcacacagcacagacacaggctctgccaccgtcaaatgcagccc

SEQ ID NO: 273432 - DNA, 93 bp, Homo sapiens; identical to SEQ ID NO: 219197
  chr19:13115952-13116045
  hypo

SEQ ID NO: 273433 - DNA, 337 bp, Homo sapiens
  chr19:13117705-13118042
  hypo
cgggcagagccgagcggctgctgctgccagtctccatttcgaagcttgaggtgggggtggggaagtgctgggcgcctccaggcccctgcttgtcccgtgccacctggggatcatcccccatgcctgttccctggaagggccgggctgcctcttccgctgcccctttgcagcctggagctcagcaaggatgcccgcctggcttccatcttcccggttcgctccctcccttcctccccctctcgcctgcttgcctgtaatggctcaccatttttggcatctcttccccctccccccccataggcgccaacctcacttccaaacccgccgccatcgttgg

SEQ ID NO: 273434 - DNA, 36 bp, Homo sapiens
  chr19:13119308-13119344
  hypo
ggagcccatgctgacgttactcgcttgctccaatct

SEQ ID NO: 273435 - DNA, 281 bp, Homo sapiens
  chr19:13119763-13120044
  hypo
agcctccccatcctcgctgtagccaggtcctcaccgaggtagatttgcgggggtctcccagtcccagtcccacacactgcctcatccccactcacagtcaacgcccgcaacaccccgccacccgcagtctgtcgcgcagtgacagcctgtcacaagcaccgccgcacaccggcacaatctgtcgtccacgcacagtctcacacacaacctgtcacacacgcacacacacacacagcggcacagtcgcacacacagccagcctcacgcgatcacaccaagcg

SEQ ID NO: 273436 - DNA, 173 bp, Homo sapiens
  chr19:13150456-13150629
  hypo
gctgggcgaggccccgtttctatgcaagttggccctgggctcagctgggggccagtttattttgctccgttgtgatacttagcatgcagtttttagtttctcttaggctggaatcttggagctgggactgtgttttatccgcctttgcatctgtctctcgcgcagcttatagt

SEQ ID NO: 273437 - DNA, 228 bp, Homo sapiens
  chr19:13151483-13151711
  hypo
ggtacatgtgcttgcggctctggtagctgggtttggttattaacaatgaattattaaaggaatgtgaatagggagggaggtttgtctttcacacactcgcgcacacacacagccacttctcgaagcagatcttaaagttgattctgctgccgctgctgtacctttgcttgcctcggatcttagaactgtttccagtagtttttgagtgaattccgagcactccacttt

SEQ ID NO: 273438 - DNA, 37 bp, Homo sapiens
  chr19:13154726-13154763
  hypo
ccaggagttcgagcctgggccacgtagcaagaccccc

SEQ ID NO: 273439 - DNA, 258 bp, Homo sapiens; identical to SEQ ID NO: 219198
  chr19:13156412-13156670
  hypo

SEQ ID NO: 273440 - DNA, 98 bp, Homo sapiens; identical to SEQ ID NO: 219199
  chr19:13160324-13160422
  hypo

SEQ ID NO: 273441 - DNA, 178 bp, Homo sapiens
  chr19:13177633-13177811
  hypo
agatcctagaagccccgtgggcccagaccctggccaagcctcatcccccggccctctggctgccctgcattctcaaggacttccttggtcccctgagtctcctgtctgctgagacggggagaacccctctgtgacccgtccccttagccccccatctatccaccgttcccctcctcag

SEQ ID NO: 273442 - DNA, 39 bp, Homo sapiens; identical to SEQ ID NO: 219200
  chr19:13179793-13179832
  hypo

SEQ ID NO: 273443 - DNA, 75 bp, Homo sapiens
  chr19:13181440-13181515
  hypo
cctccggctgaggccgccagccgtaagatggctgccaaggtctaaaatggctgccagcagcgcccggagcagcgc

SEQ ID NO: 273444 - DNA, 449 bp, Homo sapiens
  chr19:13186060-13186509
  hypo
agctgagggttttgccgacttctctgatgtgggcagcttggaggaccgtggcatcacagattgggaaggggcttgaggaagaggagcaggttgaagctgatggcttgaggggccctagggctgatcttggggttgggcacgcagtgagtgcccagaaatgctgctgtcggccggcaccactccccacccagagggccatctatgcacagttctttagcctggactcttggtcactccctggagcctcagcccatccttggcccatgtgaccctttctttcttccccagcaccaccaagcgccccaagtccatcgatgacagtgagatggagagccctgttgatgacgtgttctatcccgggacaggccgttccccagcagctggcagcagccagtccagcgggtggcccaacgatgtggatgcaggtatgggtgcgggggatcctgacc

SEQ ID NO: 273445 - DNA, 143 bp, Homo sapiens
  chr19:13194583-13194726
  hypo
atggagcccacgcccggcttctgggaggaggctagagacagcactgtgctacacaagaggctgatgcatagctgcagagagccagagggcccggctccgccactgatccagtgggtagggagtggcagcgcccagctgtgctt

SEQ ID NO: 273446 - DNA, 80 bp, Homo sapiens; identical to SEQ ID NO: 219201
  chr19:13196307-13196387
  hypo

SEQ ID NO: 273447 - DNA, 211 bp, Homo sapiens
  chr19:13197662-13197873
  hypo
tctgtgaggacagaacgaggcactggctggagacatcaaggggatgggctcctcagggcttgctcaccgataggaggaggagcacacagcatcctctctgggtctcgcatccgggtgcccggaagggcggaactctatcccacaggagaggtgctggtttaggatgaagagcgcaggccaggccttcctgagcccacgctgcagtggtcat

SEQ ID NO: 273448 - DNA, 53 bp, Homo sapiens; identical to SEQ ID NO: 219202
  chr19:13199713-13199766
  hypo

SEQ ID NO: 273449 - DNA, 73 bp, Homo sapiens
  chr19:13201107-13201180
  hypo
cacagcattcgcaacgacaggcgcctcctctgccaaccggtttgtcagcatcggaccccgggacggcaacttt

SEQ ID NO: 273450 - DNA, 89 bp, Homo sapiens; identical to SEQ ID NO: 219205
  chr19:13218631-13218720
  hypo

SEQ ID NO: 273451 - DNA, 107 bp, Homo sapiens
  chr19:13249109-13249216
  hypo
ttcatcagtgaaacgggcaagatcgagccggacatgatgggtgtggagcatggcttcgagaccgccagccacgagggcgaggcgggtccctcggctgaagccctgca

SEQ ID NO: 273452 - DNA, 112 bp, Homo sapiens
  chr19:13252910-13253022
  hypo
tacagcaacactggctcactcggtgcccgcctgtgccgtggctgatatgccaagccccagaaacacatcccatacacacacactccacgccgcattcagaagagcattcatg

SEQ ID NO: 273453 - DNA, 42 bp, Homo sapiens
  chr19:13287254-13287296
  hypo
gaatcaaaagggaaatttcacgacatggggaaaagtatatgc

SEQ ID NO: 273454 - DNA, 131 bp, Homo sapiens
  chr19:13309845-13309976
  hypo
gtcatcacagtaaccgtgtacttcaggtaaacgctcagaaggaagccagttcccacaggactcacagtgggagacagagcggagcgtccagtgcttcctcggctagctgtatcccacgatgccgggtcatt

SEQ ID NO: 273455 - DNA, 55 bp, Homo sapiens; identical to SEQ ID NO: 219208
  chr19:13332535-13332590
  hypo

SEQ ID NO: 273456 - DNA, 205 bp, Homo sapiens
  chr19:13346307-13346512
  hypo
aacagattctctgcacgactacatcacagaggcacttccaatctgacttctacattcagccagagcatgagggtcacctgtcttctcagccctgggccagcagcagggacgaggactcaccttgaaggactgcacaaaggtccagagaagaatgcggatggtgtaaccctgacggagaagtttgatgagccgggcagctcggaag

SEQ ID NO: 273457 - DNA, 69 bp, Homo sapiens
  chr19:13347071-13347140
  hypo
catgtgcgggttccgagggcatgttacgctccgggccagaaatgcatctgtcacgggactcaccgggca

SEQ ID NO: 273458 - DNA, 158 bp, Homo sapiens
  chr19:13397501-13397659
  hypo
cggcggctggcggcgttctgggggttggtggccatggcagggatggccagcatggggccggggtcggtgctgtttcccatcttggctgggctctggggcaggccggcgtggccaaggctgccgtggggagcggccgactccgcggtggccagcttgtt

SEQ ID NO: 273459 - DNA, 139 bp, Homo sapiens
  chr19:13458299-13458438
  hypo
caaactacagcccgcgggccagccacctgtttttataggttaacgtttaattggcccacagccatgctcattcacttacgcgctttatctgtcgttactttcacgctacaggagcagattgagtcgttgcgatggagac

SEQ ID NO: 273460 - DNA, 105 bp, Homo sapiens
  chr19:13490331-13490436
  hypo
aaggggaaaggacgcgtcagtgacatggggctggcgggatgaagggagtggtgacatttctatcagtaaaggcacctgctctttaccacctggaaggcaaacagt

SEQ ID NO: 273461 - DNA, 38 bp, Homo sapiens
  chr19:13580551-13580589
  hypo
tgtgggccaccgcgcccggctgaaccacctcctcttta

SEQ ID NO: 273462 - DNA, 159 bp, Homo sapiens; identical to SEQ ID NO: 219210
  chr19:13873457-13873616
  hypo

SEQ ID NO: 273463 - DNA, 231 bp, Homo sapiens
  chr19:13879630-13879861
  hypo
tccccagctgtggtcgtgggagctgaccgcgtggttgccaacggcgacacagccaacaaggtgggcacctaccagctggccattgtcgccaagcaccatggcattcccttctacgtggctgcccccagctcttcatgtgacctccgtctggagaccggcaaggagatcattattgaagagcgaccgggccaggagctgaccgatgttaatggggtccggattgcagcacct

SEQ ID NO: 273464 - DNA, 199 bp, Homo sapiens
  chr19:13919891-13920090
  hypo
gatgctgcgaatgcgggactccaacggggcgcgcatgctgattctcatgaccgagcagttcctgcaggacacgcgcctggccctgtggcggcagcagggcgcgggcatgacggacaagtgccggcagctctgggatgagctgggtgaggcccaaaccccggtgcgtggtggacaccgggacttcggctcccatgggggc

SEQ ID NO: 273465 - DNA, 255 bp, Homo sapiens
  chr19:13936528-13936783
  hypo
tgagggctgccaggtggatgcgggagggcgatggtggctcggggccaggactgactgtgagctgcgcctcccggggcatgggctgagtgtgagccacttcgctgggggcccggcatttgcgtgagctattcctctgtggctggggactgagcgagaaccactcttggggcggggactgtgagtgagacacacctctgggggcgtggcctgagtgtgggccacttccttgggggcgtggcatgagtgagccactcc

SEQ ID NO: 273466 - DNA, 136 bp, Homo sapiens
  chr19:13941061-13941197
  hypo
aggcggctaccatcgtggcagtgacgggcaccacacacgccactctgctgcgactgcagctggacacatcgcggagggaggagctctgggcctgcgcccgcaccctggccttgcagtgcgcgatgaaggaccctca

SEQ ID NO: 273467 - DNA, 162 bp, Homo sapiens
  chr19:13943491-13943653
  hypo
agggaacacagggctgaatgcgttaccgctgtcatttaatcgtcaccacagccctatgagttggtaggattatcttttccattttacagatgagaaaactgaggttgcaaagtggaaagaaagggcacccagcggccgggcgcggtggctcacgtctgtaat

SEQ ID NO: 273468 - DNA, 82 bp, Homo sapiens
  chr19:13965916-13965998
  hypo
ttccaaagtgctgggattacagcatgagtgaccacgccctgcccaactttagaacatttccatcacccgcaaaagaaatctc

SEQ ID NO: 273469 - DNA, 38 bp, Homo sapiens
  chr19:13969423-13969461
  hypo
actgcacccggctgccattacttcgaagaatagctgta

SEQ ID NO: 273470 - DNA, 97 bp, Homo sapiens
  chr19:13987350-13987447
  hypo
ccactaagacaaccgatgtgaaaactcttggagggagaccagagctgggggccggggggcatgatccttcccccctacccccgcaaccagcccatga

SEQ ID NO: 273471 - DNA, 292 bp, Homo sapiens
  chr19:14000115-14000407
  hypo
tgaggcaggtggtctcgctgccctgccagctctgaggtggtgtctggaatgccctgctgagccccgggctcctggagagggtcgtctgctatttctctgtgttccagcacaacagaggcttgcggggacacacggaacccctcgaggtctcgttcgaggttctggccacctaactcggcttcctcttgagcaggacctggctcctgcttctgattgacacatggacctgtgtccggggatgcatgaccggaatctccagcacccatcatggactctccgctcccaggtgcca

SEQ ID NO: 273472 - DNA, 209 bp, Homo sapiens; identical to SEQ ID NO: 219213
  chr19:14000962-14001171
  hypo

SEQ ID NO: 273473 - DNA, 131 bp, Homo sapiens
  chr19:14029922-14030053
  hypo
aacacctgtggccctcgcagcaataccaagatgccatccgagcccacaaggctggccgagccgtggatgtcgctgaattgcccgtgcccccaggtaggccttgcccctgtaggcctcgccccagtaggccc

SEQ ID NO: 273474 - DNA, 592 bp, Homo sapiens
  chr19:14043632-14044224
  hypo
caggtgcctggcccgatgtcgccgacccggagccggttgtgcgccaggctgagctcccgcagttggtccaggccggccagaggctcgggctcgagcatccgcagctggttgcgttgcagctgcagggtgcgcaggccagtgggcaggcccatgggcagccgggttagctgattccctgccaggtcgaggctgcgcagggcacgcaaccggcggaaggcccggtggtgcacacgggcgctggccaggcggttataggccaggttaagctccgtcaggcccggtgtggcgaccaggtcacgggcacccagcgcggccacgtggttgtggggcagcaccagggcacgcaggcggcggggcagggctggaggcacgcggtccagcccattgccatagaggtgcagcgtgtgcaggccccgcagcggccgcagagccccggcgggcagccctgagctccccagctggttgtgctgcagcaacaaatagcgcagaccacgcgccccgtgcagccgagccgcctccacctgccggatgcggttgcggcccaggtgcaggatagccagggtccggggcaggccggcgggcactgtggtca

SEQ ID NO: 273475 - DNA, 88 bp, Homo sapiens
  chr19:14066988-14067076
  hypo
ccaccgtgacatctacgtcagcaccgtggccgtgccaccgccaggccgctgtgctgcttgccaggatgccagccgagcccacccaggt

SEQ ID NO: 273476 - DNA, 273 bp, Homo sapiens
  chr19:14072645-14072918
  hypo
acccaacaagttaccaactccgctcgggcggcgctcacgaatcgcacaatagtcatggggtgggggtcgcacggcacggaggagaagcgtggtctccgggaagataggggcacagaaaaggttccattacaaaccagcggcggagggcgggggcgcgggggctggggtctgtgggcactccccggctccgcggctcgctgctctttggaagctggaggccgtgccccctgccgccctcctcacagccgggccgggcagtgcccccttcttgag

SEQ ID NO: 273477 - DNA, 162 bp, Homo sapiens
  chr19:14073132-14073294
  hypo
taagttaacagtttcgcacgggagggggcctgcctgcctgccccctggggtggtgggaggacggggctggggagaagacgctggggcctgggaggggggcggccaaggggccgagctggatgccccgcggggcacctgggcacgcggcgggttccttaaggc

SEQ ID NO: 273478 - DNA, 312 bp, Homo sapiens
  chr19:14073501-14073813
  hypo
agggcttagctggagggcagcgcctgcacgaagaggccgcgcgcgtcagtccgcgccagcttggccggcggctccagggtctccgggcccagcgcgggtgactcgccgccagccgccagtgagatgtcctgcggcagctcgtcctcgctctcctcctcctcttcttcctcctcgtctggaacacagggaccaagtccggctcggggcggggtggcaacgcccccgggctcctcctcctcccgagcccctccgttgtccgccacccccgggacccgcgccctgggtgggaacacgcctcgcctacctttgtcg

SEQ ID NO: 273479 - DNA, 431 bp, Homo sapiens
  chr19:14074413-14074844
  hypo
agggcttgagcacctggctcaccacgccgtccagccaggccgcccactgctccagcgagttctgctgctgcagcgtcaccttgaagtcctgctccagccgctgcaccacgcggtcctcgcagcggcacacccacgaggcctgctcctggggcacagagggtgggcgggcgcccggggctcagccgccgtcacccccgcctggcccgccccgttaggctgcccctcattcgcccgccccgccccgccccgcgctcacctgcacgttggcgaagtccacgcggttgaggtcgctcagcatctggttgatctgtgcggtgttctgcagcacagcgcgcgccgcctgcgccaggtggttgagcgacgtgtagcgccgcagtgtctgcgcgaaggcgccagccgcggccacctgcgtgcagggattgaggggcttg

SEQ ID NO: 273480 - DNA, 35 bp, Homo sapiens
  chr19:14084906-14084941
  hypo
aaagccccggcccccggaaccgtctagttggggag

SEQ ID NO: 273481 - DNA, 50 bp, Homo sapiens
  chr19:14084971-14085021
  hypo
gagagatcataacagaaggtgatcaggcagtgagtgaagcaggaaggggg

SEQ ID NO: 273482 - DNA, 131 bp, Homo sapiens
  chr19:14085051-14085182
  hypo
aagggactagagaaggcgacgctgtgattggagaagaccatcaggaatgcagatatgtttcccctgagccaagctacctatcccaggctggggaagcctctctccttcagatatcgcgtgacgggatgggc

SEQ ID NO: 273483 - DNA, 884 bp, Homo sapiens
  chr19:14181143-14182027
  hypo
atcaatcttcccgcgtccgccgattcctcctccttggtcgccgcgtccttggctggcgtcagaaaaatggctacaaacttcctagcacatgagaagatctggtttgacaagttcaaatatgacgacgcagaaaggagattctatcagcagatgaacaggcctgtggcaggtgcctcccgccaggagaacggcgccagcgtgatcctccatgacattgtgagagccagagagaacatccagaaatccctggctggaagctcaggccccggggcctccagtggccccagcggagaccacagcgagctcgttgtccggatcgccagtctggaagtggagaaccagagcctgcgtggcgtggtacaggagctgcagcaggccatctccaagctggaggcccagctgaacgtgctggagaagagctcgcctggccaccgggccacggccccgcagacccagcacgtgtctcctatgcgccaagtggagtccccggccaagaagccagcctcaccagcagaggatgacgaggatgatgacatcgacctgtttggcagcgacaatgaggaggaggacaaggaggcggcacagctgcgggaggagcggctacggcagtacgcggagaaggccaagaagcctgcattagtggccaagtcctccatcctgctggatgtcaagccttgggacgatgagacggacatggcccagctggaggcctgtgtgcgctctatcgagctggacgggctggtctgggggacctccaagctgatgcccgtgggctacggtatccggaagctacagattcagtgtgtggtggaggacgacaaggtggggacttacttgctggaggaggagatcactaaatttgaggagcacgtgcagagtgtcga

SEQ ID NO: 273484 - DNA, 104 bp, Homo sapiens
  chr19:14209031-14209135
  hypo
ttccatttatatcatgtccacgcccagacaaaacaaaggcacggtgtttgaagtcagaaaggacaactgcctttggtggggaggtgacgtgtcaagagagggat

SEQ ID NO: 273485 - DNA, 40 bp, Homo sapiens; identical to SEQ ID NO: 219217
  chr19:14225013-14225053
  hypo

SEQ ID NO: 273486 - DNA, 469 bp, Homo sapiens
  chr19:14263406-14263875
  hypo
acatcctccgaattcggctctgggaacacaacccaaatgtgaggggatccttgggccacccaccctctggcgtctttctgagactgctcacctgatcatcacgatcagaaacctaggccaagccactccccacctctcaggctccaggttccaacactcagccccagggagtcctgtctggcccgatacctgggtccctgtgtagtagcgggtgttgcttcgcatggctgaggtcttgagggatccgtgagtgcccccgggtggggagcggatgcagcagtaggagtgacgcaggcacttgctgtactccttgtgcacctgggaggtggaggacagtcagctggctgggacactggcctcctctgtgatccagtctcccacagggctggtcacaagacaggcagccttgggaggccggagaccgagcttccaatgactgtgttcccctgttcagcgacttgcaggccac

SEQ ID NO: 273487 - DNA, 33 bp, Homo sapiens
  chr19:14352486-14352519
  hypo
gaccccaagtgacttgcccgcttcagtctccta

SEQ ID NO: 273488 - DNA, 43 bp, Homo sapiens
  chr19:14447097-14447140
  hypo
gggattacaggcgtgagccaccgtgcccagcctattctttata

SEQ ID NO: 273489 - DNA, 142 bp, Homo sapiens; identical to SEQ ID NO: 219218
  chr19:14509047-14509189
  hypo

SEQ ID NO: 273490 - DNA, 179 bp, Homo sapiens
  chr19:14522734-14522913
  hypo
tctcggcactcgggcggccccggtcttcccacccgtgccatcagacactggaccacaccacagccctccacagcaccttcatccttcaggatgtgctctgagataacgagggcacgggcgccaatatgaagcccaaagatgtgcacctggcctgactcgggagcaagacaccagaattc

SEQ ID NO: 273491 - DNA, 101 bp, Homo sapiens; identical to SEQ ID NO: 219219
  chr19:14532585-14532686
  hypo

SEQ ID NO: 273492 - DNA, 373 bp, Homo sapiens; identical to SEQ ID NO: 219220
  chr19:14551929-14552302
  hypo

SEQ ID NO: 273493 - DNA, 245 bp, Homo sapiens
  chr19:14591231-14591476
  hypo
ggcctcgatcatgtcgcccacgctgatgaggtggatgtggtcgatcacgctgccctccttgatgcgctgcgggggcggggagtcatcagcccttggggctctgccctggtttccggggtcccatggcccaccctcactcccaggcctccggggtgccccgtctccccaggcaccttgatgaaggcgtagccagccccgttgtccgtgatggtgagcccgagtgcatcctccgacttgaacacctc

SEQ ID NO: 273494 - DNA, 290 bp, Homo sapiens
  chr19:14616946-14617236
  hypo
gcgggctatgggaagtggctcggtcagtttaatgagttgaatgatgccccaccctaaaatatatgtccacattccagaactgtgaatgtgacttgacttggagtaagtgtcttcaaagatgtaattcagtggaggatctcgagatgagatcatcctggattagggtggctggccccgaaatccaatgatgggtgtccttataagagatggaaaaggagaagacacaaagacacacagaggggagggccacgggacggcagcggcagagattggagcgatgcagctacaag

SEQ ID NO: 273495 - DNA, 81 bp, Homo sapiens
  chr19:14630485-14630566
  hypo
tgggtccccagtgcctggaacgcagtgagaacctcataaatattccccgttcttacacacgtgcttctttttcttccccaa

SEQ ID NO: 273496 - DNA, 107 bp, Homo sapiens
  chr19:14636954-14637061
  hypo
tccttggaagctgccgcagcttaggccgtctcttgcagtttctcccttggaaattactttaataaaggagctagttaccatcagctcaacaacgacccaacagatct

SEQ ID NO: 273497 - DNA, 34 bp, Homo sapiens
  chr19:14648832-14648866
  hypo
caggcgtgagccactgcgccggcagtgtgagtgc

SEQ ID NO: 273498 - DNA, 152 bp, Homo sapiens
  chr19:14660736-14660888
  hypo
acagtgagactctgtctcaaaaaaaaaaataaaaaaaataaactatacacctgcccccttcaactgccactccctgtcccctttcctttctttcttctttccatgtcgcacgtcacctttgaacatattacatatagcgatttatttcattg

SEQ ID NO: 273499 - DNA, 444 bp, Homo sapiens
  chr19:14663746-14664190
  hypo
acgggcgagatcagcgtcgctctgggtgggccagtgctcctcggaggccctgagggcacaaccgcagggatgggtgtaggctgtgggtaccactgagaatggggggcaggcccagggctgagacccaggttctccaacttcccactgtgtttgtcttgtgccatattcatcctctatgaatggctgtggctgctcgcccaagccaggagctcgtgcgtccgatgaccatcttccaaggctggattgctacctgctcgctcggggctctgctggatgggaacagcagctccagcttctccgggtcccgggctaccgctgcctctgcacctggccctggcctcggatccgagagcccagagacattggcattgagaccctggcacctctcgtcttgccagcacaggtagaagacaggagcagagcggtccagggacctgggagtgg

SEQ ID NO: 273500 - DNA, 410 bp, Homo sapiens
  chr19:14664432-14664842
  hypo
aagtgggaaggaaagggagccgagagggctgagccgctgagccggagtccagatgaatgtgccggagtctctgcatttgtgatgggggcgaggtgatgggggcgaggtggccggcgtggctctgggcatgatcgggccaggcctccgacctctatgctgggcattggctggacagggagctcaggcgatgagtgcagcagcgcttgtgcccggcgcggggatggtgagtgcctggctggccagctgcaggacctgtcaggccctttgtgtctttacctggggccctggttgcactgaccagggctcgcacccccagccaggcctcttgtgccccagactcgggagatgcttcctaccaggaagtgcagtcccctgcggggtccgagagagcctgccggagctttgagctc

SEQ ID NO: 273501 - DNA, 143 bp, Homo sapiens
  chr19:14676333-14676476
  hypo
aaagcaggggcggcgggaggtggctggctgagtccaggacagccacatacacgggttgcgaggctgcccacgctcactctccgcccctgcccacaggtggggtcctggatcggtttcgccatcatgacgcagtgtctcccagg

SEQ ID NO: 273502 - DNA, 141 bp, Homo sapiens
  chr19:14815854-14815995
  hypo
tcttttgccaggggccggggctgttcctgaggatgcagctggtgccctccatagaagagagggagacaccattgactcgagaggaccggccagctctccaggagccgccttggtctctgggatgcacggtaagcctgggag

SEQ ID NO: 273503 - DNA, 211 bp, Homo sapiens
  chr19:14863011-14863222
  hypo
tgggattacaggcatgagccaccacgcccagccgggctattatattaaggaatcaaatgccgcatcattccatgagccagcgtgtcctgcgtcaaggaagggagccctctggaacaccgctgtcaataccttgtgtccggtttgatcaattgccacgaggaagaggaggtgggccaggaagaggcagagcgagagctgcagatgcagtgag

SEQ ID NO: 273504 - DNA, 96 bp, Homo sapiens; identical to SEQ ID NO: 219228
  chr19:14912989-14913085
  hypo

SEQ ID NO: 273505 - DNA, 85 bp, Homo sapiens
  chr19:15033674-15033759
  hypo
gaccagaaccagaactagagcgtgcccgtgggattgtaaataaagagatcaaaatccaaaacccccaaaaaaatagcaaagaata

SEQ ID NO: 273506 - DNA, 43 bp, Homo sapiens
  chr19:15044831-15044874
  hypo
tgaggattaaattggctgggcgcggtggctcacgcctgtaatc

SEQ ID NO: 273507 - DNA, 386 bp, Homo sapiens
  chr19:15073003-15073389
  hypo
cctgcagggtacccaaggcccgagtgacattttccaggaagctggttccgttctccactgagaatggaggaggcatggaggcacccggctcagacccgttctctgtcctcaccatggtcctggttaccaccctcgtgctgtactgcgtcttgaactgaaatagagagagattgcgcccagattcaattcagcggatgcattagaatcgcctggagaaattccttgagaccactgattcccagttcccacaccctggaagatcgataagatcttcattatcgattatcactcattatcgactatcactcattcagcagatctgaatgagtgaatgaatgacttgaatagtgcatggaagaatgagcgaatgaatcagtaaacccatt

SEQ ID NO: 273508 - DNA, 133 bp, Homo sapiens
  chr19:15209505-15209638
  hypo
ccggggtatttctccgccaactcaccatgactgccacagaagtgctgagctctgcccaaacctgaccggtccctccacctgcattttgtctttcaacgaatgggtctgtatgtgcctgcgggtggttaaccca

SEQ ID NO: 273509 - DNA, 159 bp, Homo sapiens; identical to SEQ ID NO: 219229
  chr19:15224770-15224929
  hypo

SEQ ID NO: 273510 - DNA, 417 bp, Homo sapiens; identical to SEQ ID NO: 219230
  chr19:15252000-15252417
  hypo

SEQ ID NO: 273511 - DNA, 41 bp, Homo sapiens; identical to SEQ ID NO: 219231
  chr19:15252900-15252941
  hypo

SEQ ID NO: 273512 - DNA, 484 bp, Homo sapiens
  chr19:15271804-15272288
  hypo
ggtaaggcgggggccgctcctgcggggagacgggggtccctgggttgagcagctggggtcccggcgccagtggcagcaggaacgaggggcctggaggggcaggtgggggcagccgggcccaatcgaggggcacagccacagggttcagcaggcccaggctgagtacacatcctccagggggctggcgccctagacccgcccggcctgggccaccaagctgtgccagagacactgcagtggcagtggcagctgcatagggcccctcaagggggaagccaccaggggaagcagggggcccaccgaaaggccgcggggagtccagcgagtccacgggcgacagcgtgaccgagctgtcagccagggggcccgggcaggccagcgtcagcttcttgccccgcccccggggcccctgcggccccagccccgccttcccggggggcctcctgctcttcttggaccccgactgtgccgctttgaggccagg

SEQ ID NO: 273513 - DNA, 71 bp, Homo sapiens
  chr19:15276698-15276769
  hypo
tggctgcatcagcacgggcataacgggcagccaggtgcaaagcagtctcgccagtacggtcagtccgtgcc

SEQ ID NO: 273514 - DNA, 77 bp, Homo sapiens; identical to SEQ ID NO: 219232
  chr19:15281186-15281263
  hypo

SEQ ID NO: 273515 - DNA, 232 bp, Homo sapiens
  chr19:15281503-15281735
  hypo
cgggaagtccaggcgctccaccgctgacaacgctcccaggtagtcagcggcgctctgggcatcggggaagcagtgatcattctcaggcgactgcaggcagagccggttgtcaatctccagcattactaccgagctgcagggacagcagggagggaccagagggctcaaaaattgcccgatgcaccccctggtaccaagccccactttccctccccagcgcctggctctgaag

SEQ ID NO: 273516 - DNA, 167 bp, Homo sapiens
  chr19:15284956-15285123
  hypo
gcctggccgtgcgcgtccaggcggaagcgcagcgaggtgcgcaggatggcgctgagccgctgcagaaagtcggcgctggaacgcagtagctcctctggcggcagcagcactgtgagcaccagcacgccgcgggccagcagggccggcacctcgctggcacaatccag

SEQ ID NO: 273517 - DNA, 293 bp, Homo sapiens
  chr19:15292359-15292652
  hypo
tgctctccaagcagaggccccgcccacctggggctgcagtcgggcaggtcctgttcgcagtggaagcctccgtagcctggcgggcaggtgcaggtgaaggaggccacgtggtcggtacaggtgcccgggccgcaggggttgctcaggcactcatccacatcgcgggcgcatcgtgggccggcgaaaccagggaggcaggagcaggaaaaggagcccacgccgtcttggcacgagccaccgttcaggcatgggtctgcggacaggaggaaggcggtctggtcacctaccttgcc

SEQ ID NO: 273518 - DNA, 391 bp, Homo sapiens
  chr19:15302331-15302722
  hypo
ctgactgcagctctcgcctgtccagccattgacacacacgcagctgtggccacccagcgtgttgaagcaggtacccccattgtggcaggcgttgggctgcagctgacactcatccacgtcctccgtgcagaactggcctgtggcacacagatgcagcagtccagccacctggcgcatgtccacccgaggcctgcctccccgctccctctggccgcagtgcccacctgtccactcaggagggcactggcagttataggtgttgacgccatccacgcatgtccccccattgagacatcggtgtcctggacagtcgtccacgttcacttcacaattctgaccctcaaaccctagcagggaagggggcaaggatggtcaccgccgggctggcctg

SEQ ID NO: 273519 - DNA, 81 bp, Homo sapiens
  chr19:15346126-15346207
  hypo
tttacaccttccattaaatcaattatctcacaatttgatgttcccaggatctctcccaaccgactccgctaatctggacgc

SEQ ID NO: 273520 - DNA, 188 bp, Homo sapiens; identical to SEQ ID NO: 219234
  chr19:15352349-15352537
  hypo

SEQ ID NO: 273521 - DNA, 214 bp, Homo sapiens
  chr19:15360213-15360427
  hypo
gatgggcacaagaacggcactggagactggagccctgccccgtgcctggctaaccctgggtagggacagacccaccgcccgcttagaaaggtcacagaggcagaatgcatggatgccttggaaaccgcccccagcctgctcagcttctagagagtggccctggttcccactagcaagctccacgtgtgccctgcctgagcgcacgccggcattt

SEQ ID NO: 273522 - DNA, 142 bp, Homo sapiens
  chr19:15364850-15364992
  hypo
aagttctgggagtgccgtctctgggctctagcatcctggacacaggaccgagctagtgccaggcacaggtgggaagagtttggtaagacacgtagaacacaagtcacctaacctgtttcggagtcttcgctgtcagaggagc

SEQ ID NO: 273523 - DNA, 396 bp, Homo sapiens; identical to SEQ ID NO: 219235
  chr19:15375241-15375637
  hypo

SEQ ID NO: 273524 - DNA, 112 bp, Homo sapiens
  chr19:15382514-15382626
  hypo
tggtcaatggagagcgtggcgcctcttctgcctccatacctttcctgagccatttcaagacccagacacgtactgccctgttctgattatcttcccccgagtgcttgacacg

SEQ ID NO: 273525 - DNA, 128 bp, Homo sapiens
  chr19:15401109-15401237
  hypo
catttcaattctcttcaagacgcagcactgacttagaatggaatttttgatgcgcctccactaatcctgttacgttagaaaacagaaatagaatttgttcccttggcgttcactggttgccatagaaa

SEQ ID NO: 273526 - DNA, 141 bp, Homo sapiens; identical to SEQ ID NO: 219236
  chr19:15421598-15421739
  hypo

SEQ ID NO: 273527 - DNA, 105 bp, Homo sapiens; identical to SEQ ID NO: 219237
  chr19:15422154-15422259
  hypo

SEQ ID NO: 273528 - DNA, 240 bp, Homo sapiens
  chr19:15426970-15427210
  hypo
aaaaaaaaaaaaaaaaaaaaagactgagaagctcaccataatcctgaaagagtatccagttcacaccataattttaacaagcctggggcacctggactaaagacacactccagtttacttacttccccccaaccatcccgcttctatattcccagacttgctctgagtagcaaaaggataaatggaagtgaaggcccggagcggtggatcacctgagatcaggagttcgagaccagcctg

SEQ ID NO: 273529 - DNA, 206 bp, Homo sapiens
  chr19:15487800-15488006
  hypo
ggtccagcactccacgccccgtagcctgcaagaagaccccgtgagttaaaattctatttgtcacaccagagaacgggtccttttgggggtactcctaaagggatctccttacagttcagtgccagccttagaagaaggaagactcccccccaccccaccaaaaaaaagccatcacacaactggctaatggcgtcatcgcattccac

SEQ ID NO: 273530 - DNA, 120 bp, Homo sapiens; identical to SEQ ID NO: 219238
  chr19:15506075-15506195
  hypo

SEQ ID NO: 273531 - DNA, 250 bp, Homo sapiens
  chr19:15512030-15512280
  hypo
ccaaagcgggagccgcccgggaaggcgcccccacctcgcatgccctggaacatgccgtactcggggatgatgttctgggagaagagggagggcagccgagaggcaccagacatgcactggccccgggcccccatggggtcttcccacatgcgcccatagcctgaggccattggccggccgctccgggcatcccgggcccagccctgtgccctgggaccgaaggtgtcgttgccacgcatgcggaactggt

SEQ ID NO: 273532 - DNA, 140 bp, Homo sapiens
  chr19:15531276-15531416
  hypo
caaggcagggccccaggacacgtcttctgcgccctgcaggttcgttccttcatcgcacttgccacagtcatcattgtaccgatttgatttcgttcacatccaacaccctcagagaccacggctcaaaagctgagactttg

SEQ ID NO: 273533 - DNA, 340 bp, Homo sapiens; identical to SEQ ID NO: 219239
  chr19:15538869-15539209
  hypo

SEQ ID NO: 273534 - DNA, 121 bp, Homo sapiens
  chr19:15551195-15551316
  hypo
caagtgcagccctgcgtcctggggggatccctgctcgtcctcatcttggagccagtcgaacctggggcggccctgggcatgtttctccaaaagccttggttccccccggtggtgtaagaac

SEQ ID NO: 273535 - DNA, 35 bp, Homo sapiens
  chr19:15630866-15630901
  hypo
aagtctcagcccggcgtggtggctcaagcctgtaa

SEQ ID NO: 273536 - DNA, 36 bp, Homo sapiens; identical to SEQ ID NO: 226560
  chr19:15694860-15694896
  hypo

SEQ ID NO: 273537 - DNA, 77 bp, Homo sapiens
  chr19:15937637-15937714
  hypo
atgctttttcaagagtcgccttaacatgaagtcactgtgtgagggtttcggctctcgagtcaagataattcacttac

SEQ ID NO: 273538 - DNA, 187 bp, Homo sapiens; identical to SEQ ID NO: 219241
  chr19:16025606-16025793
  hypo

SEQ ID NO: 273539 - DNA, 53 bp, Homo sapiens
  chr19:16147950-16148003
  hypo
gtcttgagctagggacggcctggccacaccctgagccccggaggttcccagag

SEQ ID NO: 273540 - DNA, 153 bp, Homo sapiens
  chr19:16198711-16198864
  hypo
agaaaaacccatgttgcagctggtctaggggtctgggtggggcatcattgggggctgtctgcagtggatgggagaggacacggctggtggggatcgggctcagctgggcctttctgtctctgcaggtagctcgtaagctggtcatcctggagg

SEQ ID NO: 273541 - DNA, 43 bp, Homo sapiens
  chr19:16218036-16218079
  hypo
acaggcatgagccaccgcgcccggccctcaagagctatttaga

SEQ ID NO: 273542 - DNA, 38 bp, Homo sapiens
  chr19:16221419-16221457
  hypo
tgcagtggggcgatcacggcttactgcaccctcaacct

SEQ ID NO: 273543 - DNA, 231 bp, Homo sapiens
  chr19:16226302-16226533
  hypo
ccagcctggctcggcgccactgcctcctcaggggcccattgattcctccagtgaaagggttggcatttgagaaagtgctttgtgaaccgctcaacaccgcgtagaccctgttgcgctttaatactttgatccagccatattttgccagtgtcttctgtgggccaggcagccattttggcaagagggctgcagaaaggacacaggtgagtcaaggtgcgtgcaggactgggg

SEQ ID NO: 273544 - DNA, 916 bp, Homo sapiens
  chr19:16232439-16233355
  hypo
aaggtatcacagtggctgaacggtgagaaagccaggcatcccgggtagatgctccttgtctcctactgaggacagttattttcctttaatgttgctaatatcccttctcttcatgtttagggacacagccggtcaggaacggtttcggacgatcacaacggcctactacaggggtgcaatggtagggactttttgtttggttgtttttatctgctttttaagtcaacatgggagcgtcactgtgcattggttaccgaagcctagatgtttctgtggagcccgtgccccaactcctcagggctccttggtcccaagttagtcttaggaacaggctttgtgccccggcctacccccatgtacatacctccccttctggctgcagagacaatgcaaggtttaaataaagtggaaacataattctttgggaatgaagaaagacacaggaagccggttcttccaggtgagctcagtgcagttaaagccggcatgccccgacttttaggagctgtcacatgacctgcatctgtctctgaaatttgctaccaaaagcttgaagatcttccaggagctgacctgccctgggctgtcggccgttatatccgtcacccaggcctgaggcgggatgacgtgatgggaagactcagtcatcatccctcaaaacatttctcaagcaccttctctgggccaggccttaactagatgcagaaggcggccagggatgggacgaggtcctgtgtcaggggccctgtgtgtacatggcagggcattcaggggtagagggagcaggaggtggagcccctggacctgacctgagaccctggcttgcccactgagctccatctcctgacttggaaaagggaacggagcacagcactgtgtctcgggctgtgctgaggataaacggctgcctctcccc

SEQ ID NO: 273545 - DNA, 94 bp, Homo sapiens; identical to SEQ ID NO: 219247
  chr19:16235972-16236066
  hypo

SEQ ID NO: 273546 - DNA, 618 bp, Homo sapiens
  chr19:16238412-16239030
  hypo
tctgccccaggggcctgagacgagttggtcaccccagtggggcacgtgccatgggatgacagaagcacacacccagccggggcttcttgggtgcactctgcgggcatctcatcaaaacctaccatggccccgctccagactttcaagaccacaggagcggggaacagagccatagtttgatcccagcaggtccccgccaccctcccatctcagctgccatccccagcaactccatgccctgtgaggccctgtggaggggcattcactatagaattgagggagtgatccaggaagtcacgcccacagccccagccctgttgctgctccctcttggcgccggccctgccttcagctcctgttttaggcaagctcagatgcgcccggcggctggtgtgctcatgcgtgtgcctccctctctcacagctggccctcgactatggaatcaagttcatggagaccagcgcgaaggccaacatcaatgtggaaaatgtgagtcccgggccctgctgggagacatggggcctgcaggatcggccccttcaggctaaagggggagctggcgtcctccgaggaggtcctgccagacggaccagcctcgggctcagggctgccagtcag

SEQ ID NO: 273547 - DNA, 295 bp, Homo sapiens
  chr19:16240097-16240392
  hypo
catgcgtaaagtcccgtcaatgctaaggtgctctgcggaagtgagagttgatgtcagagagtaagggtgggtgggaggcagagggagccggggaaggatgagctggggccggacaggccagatgaacccactgccagaggcgggcatcaaagggccaaatgggaggcccacgcctgggaagctgtctcaccacacccgctgtacacgggcggctgaggactcagggtcctgccatcccaaggactcacaatgtgcttattccacaggcatttttcactctcgccagagatatcaa

SEQ ID NO: 273548 - DNA, 239 bp, Homo sapiens; identical to SEQ ID NO: 219248
  chr19:16243047-16243286
  hypo

SEQ ID NO: 273549 - DNA, 270 bp, Homo sapiens
  chr19:16318743-16319013
  hypo
tgaatgtgtgcaagcgttcattcattcctcatccgtccgctcaatgatctgcctcccattcctccctccctccccaaccgccacaggtgttttccgagtacttcaaggagctggaggaggagagcatccgggacaactttgttatcatctacgagctgctggacgagctcatggacttcggctacccccagaccaccgacagcaagatcctgcaggagtgagtgggcaggggtggggcctggggccaggcctgggcggtgtcatgacatc

SEQ ID NO: 273550 - DNA, 170 bp, Homo sapiens; identical to SEQ ID NO: 219249
  chr19:16320831-16321001
  hypo

SEQ ID NO: 273551 - DNA, 162 bp, Homo sapiens; identical to SEQ ID NO: 219250
  chr19:16328981-16329143
  hypo

SEQ ID NO: 273552 - DNA, 128 bp, Homo sapiens
  chr19:16337602-16337730
  hypo
ggtcctgcaccctgccctgctctgcctggggcactggggcctaggctaaggccttgctctctccctcccaggccaggtttctcccctcaccttgggccctaggtgtgggccgtgtgaaggccacgcat

SEQ ID NO: 273553 - DNA, 291 bp, Homo sapiens
  chr19:16337760-16338051
  hypo
aacacttcccacagcagggcgggggcagaggggcccagggcctggttttgtgaactgtgcctcccactcagctgtcacaggccactggaagagggtgcagtggctgggcatgcccccgttcctagcccggtgagggcttctcgggcatcagtctatcagggcagctccccgcctggggctgggcagggccccacccacatagccctcagtgaggtggcaaaccaaggtaggacccaggaccccgtggatgccagggcctgagcccttggggagccccgagccatcccccag

SEQ ID NO: 273554 - DNA, 52 bp, Homo sapiens; identical to SEQ ID NO: 219252
  chr19:16343122-16343174
  hypo

SEQ ID NO: 273555 - DNA, 42 bp, Homo sapiens
  chr19:16469773-16469815
  hypo
cagagagggaagaggtttcccgggaacagccacacacgcaaa

SEQ ID NO: 273556 - DNA, 377 bp, Homo sapiens
  chr19:16472526-16472903
  hypo
aatcccagggaagctgcaagcggaagggagtggggtggcccggaggcggaggactcaacttacagaggtgaagtctgcaaagcccgaggcagaggccttagaaggtttagctgcagaggaggggacaaatgggtcttttccactaaacgggtccccaaacccctttttactttggaacgggtcgccgctgtcagccccgagtggctggaatggatcgggggcctcgggaaagtctgcggaaccaagctggcttacaggtgtacttttacctggaaagtttaggagaaaaaaaaaaggagaaagaaagaaatatgagttactcacccggacagagcagaatgctggtgggcacaagcccggggcgcttctctgagaaa

SEQ ID NO: 273557 - DNA, 284 bp, Homo sapiens; identical to SEQ ID NO: 219253
  chr19:16485430-16485714
  hypo

SEQ ID NO: 273558 - DNA, 263 bp, Homo sapiens
  chr19:16495386-16495649
  hypo
cgtgtggtgagggccggacaccaacgggtccagtctggtaaccagcctcgctgctgtcctccttcaacagttcactcctcacctgtggatctgtctgcatttattcaaggaggccggccctcacttttcaacaccccttgagagttctgtcacatgggcgactctgaacactcgctggcccactttccctggacgcctcgcacctgcaggcctgctgcccatggccctctcgagacgcctgtgcccaacgccttctcaagttt

SEQ ID NO: 273559 - DNA, 139 bp, Homo sapiens
  chr19:16511197-16511336
  hypo
ataaagtcacactgcgtgagcttcacatggaatttagtaacctgagtagaactgtccaaacataggaagttccagatgtaccactgtggatacactattctcagggacctaaaacccccaacttcgacccacaagggag

SEQ ID NO: 273560 - DNA, 626 bp, Homo sapiens
  chr19:16511801-16512427
  hypo
gccgggttgtgagacggaaacacacacgccaagaacagccagggagcaaagcgaggagttctggcttctcgtaactcatgaaggatgaatgctcatcgtttaaatttagacgataaagctgatgatgacgggcccgggggcggctatggaaaccacctcattacgagtccacgagaaaagagagtatgggaggaaagagggaggcggtgcacccagcgggggccagacacaagagacagatgagctcgccagcagtgccttcccagcagcccaggggacgcgtgtgcttccccataaatccttgggactgaggacttggctgctgagaaaagaaacacatcaagcattgaacataaagaggcaagtgtggtgtttagagagcacgagcgctcactcttattccagggaggaagaggaatccatgacgtacagaggcccaggagcagaagggctccagggaggagccctgggagagagggtggcagcacggagagagctgctggaggcagcagagcaccaaggaaacatccagacatgcgcggcccggcccatccgctcccggaacagcaccaagacgaaatgggaaactacatgtccccaggttcgaggctgcaggggcagactct

SEQ ID NO: 273561 - DNA, 54 bp, Homo sapiens; identical to SEQ ID NO: 219255
  chr19:16513151-16513205
  hypo

SEQ ID NO: 273562 - DNA, 155 bp, Homo sapiens
  chr19:16528334-16528489
  hypo
gtggagggaagggccgtttccaacatacctttgtaactgggcaatctcttgactgatgtcatcaagctccttcacgccagtaaactccccggagccgagagagcctgaactgtcctagaattgaattcagaggcgagatctctaattagcaacct

SEQ ID NO: 273563 - DNA, 35 bp, Homo sapiens; identical to SEQ ID NO: 219256
  chr19:16550467-16550502
  hypo

SEQ ID NO: 273564 - DNA, 132 bp, Homo sapiens
  chr19:16552745-16552877
  hypo
agcgcagcttcactcgcccccaccctccctgtgtatgccggatcgacctgaaatgggagaccaagaggcaaaataacttttcagcaaatgcagcagcaggtgaagtggcacccgccacgctaactatccgct

SEQ ID NO: 273565 - DNA, 85 bp, Homo sapiens
  chr19:16620061-16620146
  hypo
ttaaatgccatccacgtgccacctaagcatgcgtcacaccatcaggattcctgcagccccgtggacatgccgtactgaagacgcc

SEQ ID NO: 273566 - DNA, 530 bp, Homo sapiens
  chr19:16620368-16620898
  hypo
tgggcaggatgccccgaggcaggcccaggcgaggagctgggcatcacagggaaaggccgcctctgcagagggggatgagagcgaggtctcggagcatctcagtgccagctcggcttctgccatccagcaggacagcacttccagcatgcagccaccatctgaagcccccatggtgaacacagtcagctcagcttattcggaggattttgaaaactctccaagtctgacagcatctgagccaaccgcccattccaaggagtctcttgacagaacactggacgctttgtctgaatcctcttcaagtgtgaagacagaccttccacaaacagccgagtctaggaaaaagtcgggcaggcacgtgacaagagtgcttgtgaaggacacagctgtgcagacgccagatcctgccttcacctacgagtggaccaagggtaagccttggggcccgtgggggccggggcagccgggacaggagctcagcgtgtggtttacagcatcctgggagacacgtgggagagctcaggttcctg

SEQ ID NO: 273567 - DNA, 43 bp, Homo sapiens; identical to SEQ ID NO: 219258
  chr19:16631183-16631226
  hypo

SEQ ID NO: 273568 - DNA, 38 bp, Homo sapiens
  chr19:16638296-16638334
  hypo
cccacgggcaagggggaaagtcacgccctggaagaccc

SEQ ID NO: 273569 - DNA, 149 bp, Homo sapiens
  chr19:16638587-16638736
  hypo
aacagaacaccctgccgtgccttgcagcgttaaactcccctgcactcgcaggacaatggtgatctatactacagagaagcccaaaccatcaaagctcggggaagggacgtgaagacctgtcacttgacctgtcccggagccacaggaag

SEQ ID NO: 273570 - DNA, 187 bp, Homo sapiens
  chr19:16643385-16643572
  hypo
gggcacggggtggcggcgctcaccagtggtgcagcacgtcattgatcaggtagatgaggtgcagccgcagctcgaagtgtgccccatcagccgtgatgcggttccggaggtggccggccatcagctcacagtgcggcggggacttggcattgctgaacatccagttcttcccggcctgcaacaaccg

SEQ ID NO: 273571 - DNA, 172 bp, Homo sapiens
  chr19:16661966-16662138
  hypo
tcggtgaaggcacacggcaagttcttctgacaaataacaccctttgggattgactcttcacgttttacacagcaattgtctcagcttgggaccaaagtatttacaaagcaagcgaacaagagacgaagcaagagggacacttctgaggccggtggtgcggaaactcaccgcc

SEQ ID NO: 273572 - DNA, 83 bp, Homo sapiens; identical to SEQ ID NO: 219260
  chr19:16680107-16680190
  hypo

SEQ ID NO: 273573 - DNA, 390 bp, Homo sapiens
  chr19:16680657-16681047
  hypo
aaaacaaacactcttaaggagagataggagaggtggagattttaggagggagtggtcatgccacaaggagggcagaccgagggctgtggacctgaattccagcttcccgaatatcaggctgtggccctcaggcacatgattctcccctctcagtccatctcaggaaaacctgagatcaggaatgatgactactggccttatctgccttgcagggcaggttcctagaagttatgatgtcattataattagtctggctgcctaaccgggccaattcccagtctttcctcactgtgtgaagttccggctccttgcccaagctgggtacaatgtcccgtacaacggggaaacctgatacacacgatgatatccggtgatgcagctacacacctc

SEQ ID NO: 273574 - DNA, 317 bp, Homo sapiens
  chr19:16681299-16681616
  hypo
gctgagacaacaagcgcccaacttccacttaagaatacgggataaagctgtctccggctaaagccatggctattcttgccccaagccaggaaataccctggcttggcatcttgaacagaatttggactgtgcccaaagcatcctccttatgcagccctgagtcctgtgtgccactttcgcttccgttcccagaccatcacaacttctggctgttttaatttctaagactttgctggattttgccaagatcgaactccttggatcgcgtctggcttctgatcccagaggtcccctgacagaaatctcttgtcaagaag

SEQ ID NO: 273575 - DNA, 117 bp, Homo sapiens
  chr19:16735189-16735306
  hypo
aagaaagcagctcccaaggacgtttcccgctcagagcctggcagctggaggcactgacacacgcggccagggctagttcaagtccctctttgctgcgggaccttctcaggcctctcc

SEQ ID NO: 273576 - DNA, 190 bp, Homo sapiens
  chr19:16735778-16735968
  hypo
gatgggaaccgaatcacctgctgaggagactgctcactatgactgctgtgcgagagtaagacacagtccttcactttacccacaatgcagtgagagtaagctggaacaatcatgcacacactgcgcttcggagagattttcaacaccctgggctgaaagggtgcacgacgaaaagaaaagctccaactgc

SEQ ID NO: 273577 - DNA, 129 bp, Homo sapiens; identical to SEQ ID NO: 219263
  chr19:16756122-16756251
  hypo

SEQ ID NO: 273578 - DNA, 165 bp, Homo sapiens
  chr19:16757897-16758062
  hypo
catgcacacctcggcgaacacttttccacccaccacgagcttggactttctgggaaggttgtcggttttctggtcaaaaacattcttgaagtcatcaggaatggaggaatggagactcggcatcccgggaaagtgagttcctggtttcatcgctgggattcaaga

SEQ ID NO: 273579 - DNA, 200 bp, Homo sapiens
  chr19:16763517-16763717
  hypo
ccactggggtggcacgcagactggacagcaaccccacattcggagtctcaatcactcaggacagacaactttttgtcctctctctttctgggggaagcatacagggatggacccacagaggccaagaacaccagattctcccgtcgtgtcttttcctaaatccatttacagcaaatctcacaattcgttaacagtagtat

SEQ ID NO: 273580 - DNA, 111 bp, Homo sapiens
  chr19:16763932-16764043
  hypo
catgggctcagggacggcatctcctggcagcccctgcagaggtgccgggcatagccgggggctggagaactccatgttccaataaaagttccagcccggtttggtggggac

SEQ ID NO: 273581 - DNA, 209 bp, Homo sapiens
  chr19:16766708-16766917
  hypo
tagtattatctagccgacaggattagtcacgtgcagcacaacctgtatacagggctgatccagcacagactagaaacattaaatgcttggtctgtttccaggaagttttgagaggcgctgctcagcaagacccttcccctagcgaaggatcgtgaaaacaggacctcccaccatcaacagatgccaatcaaacgttactcattccaggc

SEQ ID NO: 273582 - DNA, 140 bp, Homo sapiens
  chr19:16781235-16781375
  hypo
ctaccgtgcccagccgaggcagagctgatttttaaaaaatccatctactgaaatttccacccacaggtactttccatttccgcactgttccagaaatacctcttgcgtcgttgctaggcgctaagcaatctctttttcac

SEQ ID NO: 273583 - DNA, 97 bp, Homo sapiens
  chr19:16835422-16835519
  hypo
ctcaggtgggaggatcgtttgttggcaggagcctgccaagttccagccttgaactcaacccagtgagaccccatttctacaaaaaaaatattttttt

SEQ ID NO: 273584 - DNA, 551 bp, Homo sapiens
  chr19:17000717-17001268
  hypo
ctgccgcctggccacggccgcactctatggtcacatgtatggctcagtgctgctgctggccgccgtcagcctggatcgctacctggccctggtgcacccgctgcgggcccgcgccctgcgtggccggcgcctggcccttggactctgcatggctgcttggctcatggcggccgccctggcactgcccctgacactgcagcggcagaccttccggctggcgcgctccgatcgcgtgctctgccatgacgcgctgcccctggacgcacaggcctcccactggcaaccggccttcacctgcctggcgctgttgggctgtttcctgcccctgctggccatgctgctgtgctacggggccaccctgcacacgctggcggccagcggccggcgctacggccacgcgctgaggctgaccgcagtggtgctggcctccgccgtggccttcttcgtgcccagcaacctgctgctgctgctgcattactcggacccgagccccagcgcctggggcaacctctatggtgcctacgtgcccagcctggcgctgagcaccctca

SEQ ID NO: 273585 - DNA, 36 bp, Homo sapiens
  chr19:17009182-17009218
  hypo
ctgccctcaagtgatccgcctcggtcccatttttta

SEQ ID NO: 273586 - DNA, 169 bp, Homo sapiens
  chr19:17091354-17091523
  hypo
ccgcccgcttgcttcgctgctgggtggtgtgggcaggctgctggcccgatagcacaatattgccccgtgcagccacctcgtagtacagggtaaagttgcagggacatgtggacttcacagaaaaataggcttcttccccaacctatggaagacacgcagcatggggggc

SEQ ID NO: 273587 - DNA, 36 bp, Homo sapiens; identical to SEQ ID NO: 219266
  chr19:17160653-17160689
  hypo

SEQ ID NO: 273588 - DNA, 371 bp, Homo sapiens
  chr19:17160719-17161090
  hypo
gggacttctgcctggctgcttgaagaaaaatcttcgcttgggctgatgaacgtggcctgagcgggggctgacgaggcacccgggttgtcgtcctcagacaggggcgtgttcttgggtgctcccccagattctctgcaggcactgtcttgattgaaataccaccggctggggggcgccatgccctgggtctcttcccagacttcctggtttgccaaggctgcctctttgcttgcctctgcggagagttccagcacctgggcaaagctcctgttgaggatgggagaaagaataacggctttcaccctctgaggtgaagcgcatgtgtgtggtgaacggagggctgccacacggggaggcggattttcacatgc

SEQ ID NO: 273589 - DNA, 392 bp, Homo sapiens; identical to SEQ ID NO: 219268
  chr19:17172563-17172955
  hypo

SEQ ID NO: 273590 - DNA, 137 bp, Homo sapiens; identical to SEQ ID NO: 219269
  chr19:17220150-17220287
  hypo

SEQ ID NO: 273591 - DNA, 342 bp, Homo sapiens; identical to SEQ ID NO: 219270
  chr19:17240193-17240535
  hypo

SEQ ID NO: 273592 - DNA, 120 bp, Homo sapiens; identical to SEQ ID NO: 219271
  chr19:17255382-17255502
  hypo

SEQ ID NO: 273593 - DNA, 303 bp, Homo sapiens
  chr19:17264700-17265003
  hypo
tgttagtagtggttcgcagagtagctattacttggcctccaaaaacaactattttcctcccaattttgacctgtaggaactaccatgtgttttattatttgttacttggggtcagcgaggaagagcgccaagaatttcagctcaagcagcctgaagattatttctacctcaaccaggtaaacagcctcaagcccgagccacaaacgccacctctgttcccggcctcaagctgtttatgtatagccgggaagtcagaggcagcctgccctggcccccgaacccgctcccagaaggcagcattaa

SEQ ID NO: 273594 - DNA, 160 bp, Homo sapiens
  chr19:17283464-17283624
  hypo
ggccccaccccaccgtcagcccttcctgcgccagcccggggtctttggtaggcgccggtgagtgactatccccgagtgaccgcccacatccatcccccaccaggacttccgggagaagaacatggactacatgcggccagacatcgtggccctgctgcgg

SEQ ID NO: 273595 - DNA, 147 bp, Homo sapiens
  chr19:17303675-17303822
  hypo
agatgaagcgggccgccgtcaccatccaggcctgctggcggtcctaccgggtccggagggcgctggagaggacgcaggctgccgtgtacctccaggcctcatggaggggctactggcagcggaagctctaccggcaccagaaacaga

SEQ ID NO: 273596 - DNA, 138 bp, Homo sapiens
  chr19:17311458-17311596
  hypo
cagcagcatcgccacgctgcaggtgagaagcgcaccaaggaaccaggaggcaaagggaagaagaaccgaaatgtcaagattgggaagatcacagtgtcagagaagtggcgggaatcggtgttccgccagatcaccaac

SEQ ID NO: 273597 - DNA, 222 bp, Homo sapiens
  chr19:17312745-17312967
  hypo
ccgttcccagaagacgcccattgagagcttgtttatcgaagccaccgagaagttcaggagcaacatcaaaacgatgtactctgtcccggtatgtggcggcccggccttcagcctttcccataccctgctcagacccgtcattcccatccgccccttgcccaggcctgcagggtgacgcctagcattcctacagaacgggaagatccacgtgggctacaagga

SEQ ID NO: 273598 - DNA, 173 bp, Homo sapiens
  chr19:17362463-17362636
  hypo
gttccagctccctgcgcagagactgcagctgctcctgcaggtccagtgtcctgttgcgaaggagaagagagggggctcacagccccagccgatcctgtttcccaggtctcctcctacccacctgcccacagtattgtcatgtaaacacacctgtacaccggggtacaccttag

SEQ ID NO: 273599 - DNA, 56 bp, Homo sapiens
  chr19:17369111-17369167
  hypo
cactcatgggggcttcgtctcctgctcctgagtcggcctcccgcagagcaagcaga

SEQ ID NO: 273600 - DNA, 120 bp, Homo sapiens
  chr19:17376563-17376683
  hypo
tgttgggattacaggcatgagccaccgaccccaccagccccagaaacatttaagagccacttgaagcctcagtttatttatttattttattttattagatggaatcttgttctgccacgc

SEQ ID NO: 273601 - DNA, 54 bp, Homo sapiens
  chr19:17376962-17377016
  hypo
agggtcaaagaagccggccacattggccaggctctaattcgagaatagccggag

SEQ ID NO: 273602 - DNA, 92 bp, Homo sapiens
  chr19:17397245-17397337
  hypo
ggccacctgctcgtcgccggcgcttgggggtgcacctgctgcaccgtgccctccttgtcttcctggctgaaggcgagcgacagcttcatccc

SEQ ID NO: 273603 - DNA, 44 bp, Homo sapiens
  chr19:17397664-17397708
  hypo
gcttctgtaagaggcgtttgaacctgggcaactccacctggaat

SEQ ID NO: 273604 - DNA, 95 bp, Homo sapiens
  chr19:17404192-17404287
  hypo
accgcgcccggcctggaggaggattttgtcaacttcaactctaccaacattaggagctggatcattctttgctgggggggcgggggtgggcgggg

SEQ ID NO: 273605 - DNA, 189 bp, Homo sapiens
  chr19:17404632-17404821
  hypo
gcagcgattattggcgtgaaccacctcgccgggctagtatccagggctattctaagtgctaaggatccccagaccctttctaatctgaactcgctaattagagtttctaatctaaagatcccctggtgccggtcttctagaattatataggtcaccggtctcatacaaatcctccgctgtgaggagagc

SEQ ID NO: 273606 - DNA, 650 bp, Homo sapiens
  chr19:17405067-17405717
  hypo
gctgtggcgccccaggtgcccgcctctacctcggccatgcgctggtcttcctccaccggcacaaacttatcgtgcatgccgtggacaagcaggacgggcacggtgagctcggcgtggtagacctcgtcgccctcgggccagtactggccgctcatcatggcccggagtacgaaggatgacacgttgaaagcgttgccctcctttaacagctgcttctccttggctccttggcgggcgaagccggccctggtggtggtggaggcaccgctagagccccttatgccagcccgactgccgtggggtgcccccgatgccagccctagtcccagcggtacagtcccccctcccatccaactcgagcagatgcctgggttcgccagggccaggatcacggtctttggggtggggacactcacttgaggaagctccaggccaggcagggcgacaagcagtgcaggacgcaggtgggcatgttgaagattgagcagaagctgggctccagcgccgtagggcccccgccattgatcatgatcaccttgtgcactaggtctgggtactcatgtgccaggaatgtgcagaaagagacactgcccggaacgggtggggtgataggaggattgaagggaggcggtcagcaggatacaagcagt

SEQ ID NO: 273607 - DNA, 507 bp, Homo sapiens
  chr19:17411813-17412320
  hypo
ctcatagcctaggcgcacaaagaagtccagctgctccttccagatggccagggaaccgccgacaccatggatgaaaaagagcaccacgtcggcctgggcgcctttgcagctagtgatgcgcttctcacagtcaatatggatggtcctcttggggcgcctggctcgccgccgccgcccaccactgccactgccgctgccgctgcctgcgctgccgggggccaagcggccatcgctgcccgccggatctgccagctccacctccagggcggccggcggctccccagagccattctgcccgtgtaggaggtcggctcgaggggctcggcccaggttttccaccagcaaccgcccattgcggtacacggtgatccggcgctgacagcggaccaagccggagaggtccccctgggctgcatccgaggatgcggatgatggtggaggtggggcagcggctggggcgggtcctgcatgcttcacccgcagcacgcggccgggcttgacctctac

SEQ ID NO: 273608 - DNA, 140 bp, Homo sapiens; identical to SEQ ID NO: 219276
  chr19:17415104-17415244
  hypo

SEQ ID NO: 273609 - DNA, 797 bp, Homo sapiens
  chr19:17422760-17423557
  hypo
acaggaaggctgcacgtaccctgccttcattcatttgtccaacgcagacatgttgatcctaaaggctgcccctgagggagctctgtgcaaagcattccccttgttgtcttatgactcagagtaaccctgggaggtggccctgttggaatgcgtctcttcacagggaggcccagaggctgggaagtccctcgtcccaggtcacacaaccagggacgggctaagccaggattgagagcagaatgcccggagtacctgcacctctcgccactcagccaccgggccctgtgtgagcccggccagggttcagtcagccctgtcctgtcctcttcccttggggaggtaccagtccagccagggaggtggacatgtaagcagatgacctcgccggggtgtgagggaggctctgggagaggctcccgaagtgtcgggggaacaaaggggccagggagggtgttggagctggtggggaggttagcaggtatttgccacatggaggcatgaggggcattcctagagggtgtgtgtggcagagggtgtgtatgatgggagtccagcaggggcaagctgggccagggctgcgaagggggacagggacccctcctcacccttcaggtctcagtgcctgcatccctgcgtctgggcagccctcctttatcccctaaatgggccagagctctgccttgcacctcacactgcgccctcgaggcaccctgtcctgcagccgcttcctgtgcactgtgcagctctttgccccacaccatctcaaggccaggcgcgtggccatggtggctcagtcc

SEQ ID NO: 273610 - DNA, 323 bp, Homo sapiens
  chr19:17435942-17436265
  hypo
gtgccagcagggaccctgggcgcttgggccgttcaggcccgtggccacccgcagtgctgcccttggccttggcagaggccttctcggaggaggtggcagggtccagcccagagccctcggccctcgcctcctctcggccaccagaatcatgctcccgccgggcatggtgctctgcatggcgctgtcgctcctcctcctcccgccgcctgcgctgctgctgctggtagcgatgctgggcctggcgctcgtgtctctgcaggtagagccaagccgttacaggactaagaagaaagggtgttagcgggtgccagctgaggctggtg

SEQ ID NO: 273611 - DNA, 265 bp, Homo sapiens
  chr19:17438171-17438436
  hypo
aggaggctgcaggctgcagacgctggggccgccctctcgcctcccagctgcccccgcccctgtcgccggccccacctcgagcactaccaccgacacgatggctgcctccgggctcagccaggggaagaggcgctgcagctgcccgcactggccgattaagtagcagttgaccacaatcgctaggacacccatggcctccatcaccttctgcagggcggcaggagggctcaggcggggtccagccggcctccccagaccccaggct

SEQ ID NO: 273612 - DNA, 866 bp, Homo sapiens
  chr19:17443706-17444572
  hypo
cctgtgattggtgttgaccccgccctgctcactgattggctggtcctccaggaagcgcacgttgtggagtgcttctccctgcttggcacgcaaattctgcagccagaagcggatgatgctctggcgttcctgcgaggaagagggcgtgagctcagggaactcataggcacaggatgcatgcgggggcccagagccggcctcacctgggaggtgaagaagcgtagctcgctctccacattctcatagataaagtcctcctcgcaggagaagccgcgggtgcccccgccaaactcggccttcactgctttgcgcagacccagctcgtcggcccctcggagtaggctgtgaagaaggcggaggaggtgggctcacagggaggccccggcccaccatcctggagctgaggatggtgcacctggcagcctttgggacaaacgcagggcggctggatagcatggttggcacttggtagagcggggagtcgggtggcaggctcagcgagaggccagggacaggggactcgcctctcatacgtggcggtgacaaagaaggcgtaggcacgcgtgtggcggtggtggcggacttgcacgatgagctcgggaatgcccacgcggatgtggttcagcagccatagcagcgtgtggtcatcggtcgtgtctgccaaggggcacagggaccgatggctcctgccacgagggggcccaaggcctcctacgtattcccgttctgggaagccgagctcaggagagccgcatctgggcactgggcgggcgggcgggcgggcttgggtacctgggaaggtcatcagcacgtcgcagttctctgtaggcaccgtcttcatccacgccttgtgggacaccaggtag

SEQ ID NO: 273613 - DNA, 225 bp, Homo sapiens
  chr19:17449331-17449556
  hypo
tgggaccttcctgcaggcagcgtgccagggcttcgaccggcggaggcaggcgagttcaccagacgggcgttcgccaatgggaagctgaacctgaccgaagtggaggggctggcggaccttatccacgcggaaacagaggcgcagcggcggcaggccctcaggcagctggacggagagctgggccacctctgccgtggctgggccgagaccctcaccaaagcaagt

SEQ ID NO: 273614 - DNA, 42 bp, Homo sapiens
  chr19:17536626-17536668
  hypo
tcatagagaagaccttgtcccggcccttcatcattgggcata

SEQ ID NO: 273615 - DNA, 372 bp, Homo sapiens
  chr19:17597312-17597684
  hypo
cccagaggccaggcggggcagggcaccagtgacgctgtcccctccgtcctccctcccagcggtctctctgtgctgatccgcgtgcgcctggagctgcggcggcaccagcgtgccggccacaccatcccgcgcatctttcaggcggtagtgcagcgacagcccgagcgcctggcgctggtggatgccgggaccggcgagtgctggacctttgcgcagctggacgcctactccaatgcggtagccaacctcttccgccagctgggcttcgcgccgggcgacgtggtggccatcttcctggagggccggccggagttcgtggggctgtggctgggcctggccaaggcgggcatggaggccgcgctgctcaacgtg

SEQ ID NO: 273616 - DNA, 62 bp, Homo sapiens
  chr19:17631822-17631884
  hypo
gctggttcttggacgaggcggccgcccgcctcctgaccgtgcccttcgagaagcattccact

SEQ ID NO: 273617 - DNA, 258 bp, Homo sapiens
  chr19:17657447-17657705
  hypo
gaggggccctcctctccatccgagcccctaacccgccatggttccaggagctgcctgagttcgagggggatgtccttgccgtgggcagccaggctctgaccactgagggcatctatgaggacgtcatccgggggtgcttgctgcagaggattgaccaaggtgagtcccgccctgccatggctcagaggagcctggcgtcccttggctgtatgtaccgagccccaccagggccacatcgactctcacttcctgtgaata

SEQ ID NO: 273618 - DNA, 527 bp, Homo sapiens
  chr19:17687902-17688429
  hypo
agccagtctgactgggagccatggagtgggtggggaaagcgtgttggagagaggctggaggctccttaccccagcgactcctcaacgtctgtgccccacagtgaagcacccgcccgcagagccctcccgcttcatctcggctcccaccaagacaccggacaagatgggcttcgacgaggtgagctgggccttccctggaggcggggcgggggctggagggcccttgtttgcaggggctgatctggctggggactctccgggctgcaggtcttcatgatcaacctgaggcggcggcaggaccggcgggagcgcatgctgcgggcgctgcaggcacaggagatcgagtgccggctggtggaggccgtggacggcaagtgagtccgaggcctgggggtgggggggcgggtccgcacgtggatgtgggtgtagacctcgctggtagacggcaagtgattcagatgggggcgggcgtggtgtccaaacagatgtagacctcgtcagtgggcgtcctgaaggggaagtgaatg

SEQ ID NO: 273619 - DNA, 432 bp, Homo sapiens; identical to SEQ ID NO: 96847
  chr19:17691243-17691675
  hypo

SEQ ID NO: 273620 - DNA, 320 bp, Homo sapiens
  chr19:17757924-17758244
  hypo
tatgcgtgcacacacggagatgagatggaatgcacccgaccgagtgagtgcgcgctgcaaaggagagggaccaggccatgggacagggcatgagacaggtctcagagggtggagaaggaggggccctatggcggcccacgccccctcaccggtgatgctgatcttggcggaccacttggacgtgccgtccagcacgctctgcttgaccgccttcatctgctgcgtgtgcgccgtcttggtcaccgcgaagatctcctggatgagctcgaagatctcgggcttgttgcgctcccggatcttcatgcggtccttgagcacca

SEQ ID NO: 273621 - DNA, 474 bp, Homo sapiens
  chr19:17759137-17759611
  hypo
tggtgccccacccatcgccttgcccttcagcctttccccgccatgcaagccccggggctccccacgccaacccgtggccctgcgctcaggccctgcgctcacgctgcaggcagtcggcgttgagcaggtcctggcacttctcgtggcacttgacaccgcactcggtgcagcgcatgccctgcctcgcgatgccccacagcagcccctcgcactcgtagcagtaggtgggcgtggtggccgtccacacttcgaagttgtgtggcgtcgtgcacgagatggggtagattaaggcttgcagggtcttcttgtaaacgtggtttttctgcagggagggatggggtgcggtttgggggcgcctaacctggcgctgtccctgtcctgccccattccgccccatcactgagcgcggtaaagtcccaggccctcccctgcctccacgctgtcggaatccacgctgccttctgccagtctgtg

SEQ ID NO: 273622 - DNA, 1218 bp, Homo sapiens
  chr19:17837840-17839058
  hypo
aacctcaagaagacgaatgcccaggcggcacccaagccccgcaaagcgcccagcacgtcccactctggcttcccgccggtggcaaatggaccccgcagcccgcccagcctccgatgtggagaagccagcccccccagtgcagcctgcggctctccggcctcccagctggtggccacgcccagcctggagctggggccgatcccagccggggaggagaaggcactggagctgcctttggccgccagctcaatcccaaggccacgcacaccctcccctgagtcccaccggagccccgcagagggcagcgagcggctgtcgctgagcccactgcggggcggggaggccgggccagacgcctcacccacagtgaccacacccacggtgaccacgccctcactacccgcagaggtgggctccccgcactcgaccgaggtggacgagtccctgtcggtgtcctttgagcaggtgctgccgccatccgcccccaccagtgaggctgggctgagcctcccgctgcgtggcccccgggcgcggcgctcggcttccccacacgatgtggacctgtgcctggtgtcaccctgtgaatttgagcatcgcaaggcggtgccaatggcaccggcacctgcgtcccccggcagctcgaatgacagcagtgcccggtcacaggaacgggcaggtgggctgggggccgaggagacgccacccacatcggtcagcgagtccctgcccaccctgtctgactcggatcccgtgcccctggcccccggtgcggcagactcagacgaagacacagagggctttggagtccctcgccacgaccctttgcctgaccccctcaaggtccccccaccactgcctgacccatccagcatctgcatggtggaccccgagatgctgccccccaagacagcacggcaaacggagaacgtcagccgcacccggaagcccctggcccgccccaactcacgcgctgccgcccccaaagccactccagtggctgctgccaaaaccaaggggcttgctggtggggaccgtgccagccgaccactcagtgcccggagtgagcccagtgagaagggaggccgggcacccctgtccagaaagtcctcaacccccaagactgccactcgaggcccgtcgggtgagtactggagctggggccctgggctgggttagcagctgcttaggctggagagcatagctcgtccccctgttttt

SEQ ID NO: 273623 - DNA, 38 bp, Homo sapiens
  chr19:17848807-17848845
  hypo
acaggtagaacccaagtactcggatcaaggaatgggga

SEQ ID NO: 273624 - DNA, 392 bp, Homo sapiens
  chr19:17881296-17881688
  hypo
ctgcccaagtcccgcgagaactacctgaaccgttgcatggaccaggagcggctgcggagggagagtaccagccagaaggagatggacaaggtgggctcacagtgggggggttctgaggaatttgccgcggggcggaggggctgcctgatcagagagtggaaacacatcccagagcgacggtcctggaacctgtgggtgatcacaccctgggtaccccgaggagttcacctgccaggtgatggggcctgggggaggccccctgagtatcgccctcccatccccgtttcctccctgtgctttgtaggcggagactaaaaccaagaaggcggcagagagcctgcggcgctcagtggaaaaatacaactcagcccgagctgactttgagcagaaga

SEQ ID NO: 273625 - DNA, 120 bp, Homo sapiens
  chr19:17882045-17882165
  hypo
gtggaaccctgtctcgaaaaaataaaataaattcaagcagattggaatctgaggattaggaatcagaacttttttcaagttacaagtgatagaagccttcattcaaaccgacaggtgtat

SEQ ID NO: 273626 - DNA, 111 bp, Homo sapiens
  chr19:17994699-17994810
  hypo
gtgggtggccttgggcgccacgctgtacccacccagcgagcagaccatgagggtcctgccatcgtcggctgcccgctgcgtggctctctcagtcaacgcctctggcctcct

SEQ ID NO: 273627 - DNA, 78 bp, Homo sapiens
  chr19:18041148-18041226
  hypo
ccaccgcgcccggcctttaataatctttttacctagaaggcgggggaacctgctgggaattggcgaaaactagcagtc

SEQ ID NO: 273628 - DNA, 779 bp, Homo sapiens
  chr19:18052911-18053690
  hypo
gcctcagtgacccacggcagggaaacgtggacagtgctgcccgactcataagggcagagcccctgccctagcctgaaacgggtccaggcctcccacggctcttagaatccaacatgaacccctccctggcccccagaggctccgcatggcccagccgtctccctcccggcctcttccccctcccgcttcactcccactccagcctccaagctgttcctgttacaacaaatggctcctgcctcggcgcctttgcactggtagccctgctgctaaggacgctcctgttccccagctctcccccttggccggcgctcttcgcacctaggagcgtcacttcttcaagagccacccacccgccctgtccaaggttcccctgttggcctcacatcccccgcccagggcagcaccgggacctatcttgttcctggtatgtcccctgcacccagcacagagcctaaatcctcgttggctgagatgaaaactcgaaccccaggctagtgggtggcgcgggggtgtggggtcttctgcctgaccatgcacgccgcccccgcaggaggagaaggagaagcggcgcctcgaccagctggaacgtaagaaggagacgcagcgcctactggaggaggaggactccaagctcaagggcggcaaggcgccgcgggtggccacgtccagcaaggtcacccgggcccagatcgaggacacgctgcgccgagaccatcagctcagggaggccccggacacaggtcgggcggcatcccgctctggagctgcacttttgc

SEQ ID NO: 273629 - DNA, 41 bp, Homo sapiens; identical to SEQ ID NO: 219290
  chr19:18054174-18054215
  hypo

SEQ ID NO: 273630 - DNA, 797 bp, Homo sapiens
  chr19:18054245-18055042
  hypo
ctgggggcggggccgggcttttcggggcaaggctgcgcccaaggccccctgacgctcatgtccacccccagcgtggcggaggaggcggccgaccggcacccagaaagacgcatgcgggcagccttcacagcctttgaggaagcccagctgccgcggctcaaacaagagaaccccaacatgcggctgtcgcagctgaaacagctgctcaagaaggagtggctccgctctcctgacaaccccatgaaccagcgggccgtgcccttcaatgcccccaagtgagcccagaacttggggagccagttcacccacgggtggtccaggtcacgactctgcacgcccttaggccaggtcagctgcgagggtcacagagcgttccgggggccaaggcgccgggccccggggccatgctcttatcaccagccacccgtcctcccgccagagggtccctgccccgagtgacaccccatcccctcccatcccccggcgcgtgtgtgtagagcctcagggctgagtgcccaataaaggtggcggcaaggctgcggtgaggcacttgaagcctaagtgagtgggtggggagaggcgggcgaagaatggggagaaggaacagctttggggacctgctgtgaaccgcactgggatcatagctagaaaagacaagagcccccaacagcgcgctccttcctgctgccagctgtgcttcatcggctcctgccagcacccctccttggctgtgccacttgtccagtgaggcacctgctccactgtctcctgcacacgcttagagaggtggaggtgga

SEQ ID NO: 273631 - DNA, 84 bp, Homo sapiens
  chr19:18080377-18080461
  hypo
agggcaccttaggacgcggctgccaggcgaggaggaacatggcagacacacggctgaatttggcccatgcgtcgggtggctgag

SEQ ID NO: 273632 - DNA, 643 bp, Homo sapiens
  chr19:18084483-18085126
  hypo
gatggtaaacccacgtgtcagcactctgggccactcccaaacttagaacgttctgggttggccgggatggtccttgcctttctggtcagtaagctggaccctgctgtgaccatgtccctctgtgcccttgcaggtcagtgcaggagcccagccgctgagccatgccgggccccgggcggcctgcagcgagcccaacccctgcacccaggtagtcatgaacagccacagctacaatggcagcgtggggcggccgctgggcagcgggccgggcgccctgggacgagaccctccggaccctgaggccggccaccccccacaacccccgcacagcccgggcctccaggtggtagtggccaagagtgagccagcccggccctcacccggcagcccccgggggcagccccaggaccaggacgatgacgaggatgatgaggaagatgaggccggcaggcagagagcctcggggaaaccctcaaatgtgggccaccgcctgggccaccggcgggcgctcttcgagaagcggaagcgcctcagcgactatgccctcattttcggcatgtttggcatcgtcgtcatggtgacggagaccgagctgtcctggggggtgtacaccaaggtaggcgtggtcctcccccaggcactc

SEQ ID NO: 273633 - DNA, 563 bp, Homo sapiens
  chr19:18092405-18092968
  hypo
cctgtggggtttcaggccaggctgacgtcactctctgggggcgcggtggggctgggcagggagcgcggcgcgtgtctgacacccatggctggttccctcccgccctccacagctgttcatggtggacaacggggctgatgactggcgcatcgccatgacctgcgagcgcgtgttcctcatctcgctagagctggcagtgtgcgccattcacccggtgcccggccactaccgcttcacgtggacggcgcggctggccttcacgtacgcgccctcggtggccgaggccgacgtggacgtgctgctgtccatccccatgttcctgcgcctctacctgctgggccgggtgatgctactgcacagcaaaatcttcacggacgcctcgagccgcagcatcggggccctcaacaagatcaccttcaacacgcgcttcgtcatgaagacactcatgaccatctgccccggcaccgtgctgctggtcttcagcatctcctcctggatcatcgcagcctggaccgtgcgcgtctgcgagaggtgcgaccgccgcccctggagcccccccagcc

SEQ ID NO: 273634 - DNA, 396 bp, Homo sapiens
  chr19:18103592-18103988
  hypo
tcaggagatggtgtcggcatagttttctgaatgaaacaccgcctccggtggtggtgagaggacaggtgtgcccctgaggggctggcacagaaccctcagaggctgggcacctccccagagcaacggcagcccctcggccatctgggaaccccgcgcggggccctagggtggcatccccgggaggtgggcagggttgggtacatgccgaacaactgtgctgaggttaaaattgccttgtgatttttctcctgctctgcccggtcctgccagggctcagaagtaagtgttctcccaggggcttggtggggctgggaaatcgggggtgcatggtggtcacagacagggggtacacccggggcatgccaaccccagcctcagaggcgggcagggttcaca

SEQ ID NO: 273635 - DNA, 47 bp, Homo sapiens
  chr19:18120713-18120760
  hypo
gtggtggccagcctcgcgggcgagccggtgggccccgggcagcgggc

SEQ ID NO: 273636 - DNA, 189 bp, Homo sapiens
  chr19:18121351-18121540
  hypo
acctcacccaccctgtctctcgcttccagctcctcctgagtactcggaggtggtagccgacactgaggaggcagccttggggcagagccccttcccgcttccgcaggaccccgacatgagccttgaaggcccgttcttcgcctacatccaagagttccgctaccgcccgccacccctgtactctgaggt

SEQ ID NO: 273637 - DNA, 316 bp, Homo sapiens; identical to SEQ ID NO: 219297
  chr19:18123645-18123961
  hypo

SEQ ID NO: 273638 - DNA, 144 bp, Homo sapiens
  chr19:18126517-18126661
  hypo
tagccattcatccgcggatggacatctgggttgtttccacggcttggctatagtgaatcttgctgctaagaacacgtgtgttcaaggattactttgaaaacccacggagctgttaggtggccctagtggcgtggggctgttatt

SEQ ID NO: 273639 - DNA, 83 bp, Homo sapiens
  chr19:18159860-18159943
  hypo
ttggccgccatggccgtacctgtaccgtgggtgtatccaagaagaaataagtctgtaggccttatctgttaataaatagttta

SEQ ID NO: 273640 - DNA, 85 bp, Homo sapiens
  chr19:18207919-18208004
  hypo
ggtgagatcctcactcgcctcaccctagaacccgttctgctgtgtgtactgggcacattttttgttgttgttttgtttttgtttt

SEQ ID NO: 273641 - DNA, 249 bp, Homo sapiens
  chr19:18241244-18241493
  hypo
tgtagtgcctgctggggcctcgatctccggtcccagcaagcctggccctctgtccccagggccgtctacctggtgcggcaccgtgacacacggcagcgctttgccatcaagaagatcaacaaacagaacttgatcctgcgtaaccagatccagcaggtctttgtggagcgtgacattctcacctttgccgagaacccctttgtggtcagcatgttctgctcctttgagacccggcgccacctatgtatg

SEQ ID NO: 273642 - DNA, 54 bp, Homo sapiens
  chr19:18242605-18242659
  hypo
accttttgcaggaggtaaagcgaggaggatgcataggcattgggcataacctaa

SEQ ID NO: 273643 - DNA, 135 bp, Homo sapiens
  chr19:18242689-18242824
  hypo
cctcatgactacatccgcccttctcccaggcggcgactgcgccacgctcctgaagaacatgggcccgctgcccgtggacatggcccgcctgtacttcgccgagacggtgttggcgctggagtacctgcataacta

SEQ ID NO: 273644 - DNA, 110 bp, Homo sapiens
  chr19:18255885-18255995
  hypo
ctcttcgccgagccgagacccgtcccccgtgtgtggcagcctgcggccccccatcgttatccacagctctggcaagaagtacggcttcagcctgcgggcgatccgcgtct

SEQ ID NO: 273645 - DNA, 407 bp, Homo sapiens
  chr19:18272536-18272943
  hypo
gctcgtcgcagctccggtactggtctctcgctcgcctttgtgtgagaatctatggagcacttactgcatacagctatgagggagctggcctcgcacatgtgcctgtatcatctcctcctccgccctgcacatactgtctcgtatatacccccaggcgtgcaagcgcacgcacaatcctgtgcacatgcgtgggcggacaggccctacccagccctcaccacactccccttccccctaaggagtgagcccagccctgacttcccggcgctgctggtggagaagctgcttcaggaacacttggaagagcaggaggttgcgcccccaggtgagtcccctgtattgctgtcatttcttcccgttgggggccgtaaatactgatccctgagtgctgccggcatcagcaggct

SEQ ID NO: 273646 - DNA, 64 bp, Homo sapiens; identical to SEQ ID NO: 219300
  chr19:18273254-18273318
  hypo

SEQ ID NO: 273647 - DNA, 145 bp, Homo sapiens
  chr19:18277902-18278047
  hypo
accctgaggtctctgcgccaccccacccctcccacaggatcctgctgaactccgagcggctcaagtcccgcattgccgagatccatgagagccgcacgaagctggagcagcagctgcgggcccaggcctcggacaacagagagat

SEQ ID NO: 273648 - DNA, 134 bp, Homo sapiens
  chr19:18331075-18331209
  hypo
ggagcggctggtttcggacaggtgggtcaactcccggttcaggatccgcttgaactggggcggagagaaggtgaagaccgtgatgatggggcaccgtgggccgaggcaggtgagctcagcgatctgccccacct

SEQ ID NO: 273649 - DNA, 627 bp, Homo sapiens; identical to SEQ ID NO: 219302
  chr19:18368469-18369096
  hypo

SEQ ID NO: 273650 - DNA, 157 bp, Homo sapiens
  chr19:18416995-18417152
  hypo
atgcaaaatctatacgatggcaagtaactctgaagactcaagaaaaagagttcctcacggacgggaccttttattccaatcacctctcaaaataggtctccgaacgaggaccctgaagagaaggctatgcagggggacgggccgctgcctggctcag

SEQ ID NO: 273651 - DNA, 101 bp, Homo sapiens
  chr19:18435014-18435115
  hypo
ttttcttgtaaaggacactcctttctcttattaagtccaccataaatttcaggataatgtcatctcaagatccttaattacatctgcgaagaccctgttct

SEQ ID NO: 273652 - DNA, 76 bp, Homo sapiens
  chr19:18441765-18441841
  hypo
ggaaacgcagacaccctcctgggttgcgcttcgctggtcaaggcagtgaccctctcccatccggggaaccaggagc

SEQ ID NO: 273653 - DNA, 219 bp, Homo sapiens
  chr19:18459066-18459285
  hypo
gggtgaggaggacccgggtcacagaacttggtaacatcacgggacaattgctgccacagtgagtctagacagacctgctaaggatattaccagggaacaaagagggtctttgtcgtggggtcaggggaatcggtcagacgaggctgcgcggcggggtcctgtcaggtagatggggtgtagacaatggggcgtctgcccgagccccgtcctttcacggtg

SEQ ID NO: 273654 - DNA, 79 bp, Homo sapiens; identical to SEQ ID NO: 219304
  chr19:18496195-18496274
  hypo

SEQ ID NO: 273655 - DNA, 251 bp, Homo sapiens
  chr19:18546489-18546740
  hypo
gagtgcagcaggagtttgcccgggtccctgccacccctcgccgggcaaccccgcgcccgcgcccgcgccccacgcacgcagtggtcaggctcttcgccgggcgtatagagcactgggttgctctgcaccatgtcgtccaccacgttgctcttggacacctccttagagcggaactgcaatggcgccgataggttctccccatcgttgttgcccaggtggttgtaactcacgatggacatggtctgtgggta

SEQ ID NO: 273656 - DNA, 91 bp, Homo sapiens
  chr19:18547000-18547091
  hypo
gccctccaggatgctggccacggcgaagagcgtggagggcgacacctccagaccgagctgtgggcaaggcgggcagtcagcacagagctgt

SEQ ID NO: 273657 - DNA, 49 bp, Homo sapiens
  chr19:18556529-18556578
  hypo
tcaggtcaccagttccgaaaggtggcaggtggggcggctacgtccaagg

SEQ ID NO: 273658 - DNA, 67 bp, Homo sapiens; identical to SEQ ID NO: 219306
  chr19:18557168-18557235
  hypo

SEQ ID NO: 273659 - DNA, 142 bp, Homo sapiens
  chr19:18591739-18591881
  hypo
agcccgcagcagatatttctatctgcattcacgaaggtgcatagaaagcttatggaaaagggtttttcagaaatcttgtagacaaaaatatgcagattgcccaaaactgtggcctctacacgctccacgcaccttgcttgct

SEQ ID NO: 273660 - DNA, 113 bp, Homo sapiens
  chr19:18600784-18600897
  hypo
cacgctgtggagcccgtgctggtccctcaagcctccagccacctgcacgcggggccagccaggccaggtgagacacagccttgcttacacgccagctgcgtctgagagcagag

SEQ ID NO: 273661 - DNA, 407 bp, Homo sapiens
  chr19:18637199-18637606
  hypo
gaattgtgagctcgcgtacacatacaaaattccttccgcagtgctcacttccaattcacagcccatggcaagtcgggtaaggccctcctgagtcactgctcaaggccaggtatatgggaggtgttagtaaatgctttggtatgaaagacaaagccatccccgtcgttctccaaaggtaccacacatggtccagctggcataccttgcacagctatgccatccacaagggatacccttcaccacccattaaaggcatcccatgccttcaacacaactgcagcgtcacacgtgctggatgctccagctcaccacccacaaccagctcagacctttgaggatgaagtggccgagtgaataaccacattcaatttcacactcctagtctggccattcggggcctctctcct

SEQ ID NO: 273662 - DNA, 81 bp, Homo sapiens; identical to SEQ ID NO: 219308
  chr19:18675984-18676065
  hypo

SEQ ID NO: 273663 - DNA, 87 bp, Homo sapiens
  chr19:18688221-18688308
  hypo
gcatgtggaagctttcctttcgcttcattcaataaacagctgctgctcactctcctggtccgtggactctttttgaactgttaacac

SEQ ID NO: 273664 - DNA, 446 bp, Homo sapiens
  chr19:18688368-18688814
  hypo
ggagaaactgactcatcgtgggggctcacccaggatttccaaagcggtaacatcggacctctttcgcttgctactctgctctacttttctttagaattgagggcaaacaccgggcacctgtcggccatttaaaagcgacaagtgccgccgcctgactaaagacacagatgtaagggtatctgagaaagggctctctaacaacccccagcccttctgaatcgagagtgttgttttgcctagaaaccagttcccactttctctgcattttctgggttgaaccgagggctggccaagggtggaaaacagtggccccaagctcctggtaacgcccagtcgagatgacagcgctttgtgaaacctttgttaaacagccacccaaacgcacttcacccacccttcgagaggcatgcctcctaggtccaaacgtctataaggaagactttctt

SEQ ID NO: 273665 - DNA, 56 bp, Homo sapiens
  chr19:18707295-18707351
  hypo
gtgcagatcacaccactatgcgacagaatgaggccgtgtctcaaaagaaaaaaaaa

SEQ ID NO: 273666 - DNA, 36 bp, Homo sapiens; identical to SEQ ID NO: 219310
  chr19:18757684-18757720
  hypo

SEQ ID NO: 273667 - DNA, 235 bp, Homo sapiens; identical to SEQ ID NO: 219311
  chr19:18757927-18758162
  hypo

SEQ ID NO: 273668 - DNA, 327 bp, Homo sapiens
  chr19:18771033-18771360
  hypo
ctgggcctggctagggtgcccgatgacattgctggggggatacagcggcaagcgggtgtcagaatggcccctagcccgggccaggcctgtagcgggggcgtgtggccactcagaggccagattcgggcagagggtgcagccagggcgggcagcaatggcctcttgagacggccctggccggggctgctgacgcattggctccgatgactcacgtgcgggtgaccgtcactcgagtggccgtctggagactcggaccggctcagggccaccgccttcctgggggcctgtggccccgccgtgccggccgccccctgtctggaccagcct

SEQ ID NO: 273669 - DNA, 386 bp, Homo sapiens
  chr19:18782970-18783356
  hypo
gtcagatgcaggcccgcaagagggaggccaagtgcgacttctggggcctctcagcaagtgagggccaagggggcctctggggagccgtgtgaggtgggaatccgccccggacctggccagcttggaaacctgcccctggctctgtctccgaggaagcagctccagctcgtccgttctcacgggccctggagattcactttgcacggtgcagcctcggaccctgctcttcctcggggcgcctgaccgtggatctcagcggcctggcgcctaacacagagcctggcaccgacggagcatagctcgaatgtttgctgcacaaaggagaggtgctggggcgggaaggtgagggcagccttcttcacactagtggccgtgggcaccttctg

SEQ ID NO: 273670 - DNA, 148 bp, Homo sapiens; identical to SEQ ID NO: 219313
  chr19:18798371-18798519
  hypo

SEQ ID NO: 273671 - DNA, 211 bp, Homo sapiens
  chr19:18807984-18808195
  hypo
ttgccaactggaaacgaagcatggccggggcctcctccttggggttcttgcacggagggattcagaagcacttggcaccggggggagcagcctcatcggtgtccagccagggccacacagtcagcctcagcccccacctcgcttccttctgggcgagcttagacctgggaggcctctttttttttggagtgccgtggtgcgatctcagctc

SEQ ID NO: 273672 - DNA, 196 bp, Homo sapiens
  chr19:18809609-18809805
  hypo
gttcagcaggcacacggtgtgtattcagcaggtgcacagtgtgtatttggttgctgagcaagtgcacactgtgtactcagtaggcgcagtgtgtgctctgcgggcactcagcaggtgcacagtgtgtatttagcaggcgctcagcaggtgcataatgtgtatttagcaggtactcagcaggcgtaccgtgtgtgct

SEQ ID NO: 273673 - DNA, 226 bp, Homo sapiens
  chr19:18830681-18830907
  hypo
atgggcacaggcccgctccgggaaggccccaggcccgtccatgtgggcagcgtcggcgtcgggcttcttgcctgggacccaggggccgctcttggggagggagaccctgtttcaagtggccagcatccccgccagtggtttgcattattcaattggtgataagatttaaaattaaactgcaaaggatctgttcccccagctacaaatagacgtgtgcttgcacatt

SEQ ID NO: 273674 - DNA, 305 bp, Homo sapiens
  chr19:18836821-18837126
  hypo
cccgactcatgtaccgcgccctcgatcttctctggagttgaggccgggccctggaacaggctccagctccttgttctcccagctggtgatgcaggaacatctttgcgcataaatctgcgttctggatgatttccctcaggagagcttcccagaagtgggattaccaggttagagggcaggaacgttgctcaggcactcggcggacgctgccaaatggctcagccggcgctcccagccacctgcctctcagagccccatgcatttccagcaccgctgacgtgtgccggcctcgcttcacccctcgg

SEQ ID NO: 273675 - DNA, 732 bp, Homo sapiens
  chr19:18856004-18856736
  hypo
atggctccggaaggcgcctgtacttggctctggtggtgcctggagtgcctggaggaggctgcgggggagggtgtgtgggggccgcgtctcaatcaagagcagccctgggctccacaaggaagcctcccaggaactcgcgcttggccaggtgggccccgaaacagtcctgggctggaagcccctgggctgtctcttggcaggcccctccagggatgacgtaggtgggggtaggaggccgtccaggcccggagagagagggcggaggcctgtctgcacctggtgagactggggaggagggctgcctaggccggctacatccctggcacccggcgggcgctggccccgagcttgtgccgctctgcctggcctgtgcatgccagctgcactgcacgcccctgccaccctggctcccgggaccccagctcacaccccctccctaccccccagtgcttggagagccagggagctggggctgaaggaagaagcccatcccaggctgtggagcgatggccgagggtgctccagagtggggggccctgcgatcagactctggggccagcgctggggccacagctggtaaccattgtttggatttctctctctctgtttccatctcctcctcccccagacccccttccaatcctcgggcctggacaccagccggaccacccggcaccatgggctggtggacagggtgtaccgggagcgtggccggctcggctccccacaccg

SEQ ID NO: 273676 - DNA, 294 bp, Homo sapiens
  chr19:18867539-18867833
  hypo
gaaaaggaagatggcgacagtcaccttgcagagggagacacaccccgatagtggagtggggtggtgggtgaatttttaatactgctcagaaatccattaatgtctccataatgttggtggaatgcttttcaaagtattcttgagaacgtgatcgccggtgtgctttgcagaaatccggtaatgaagcgaatgtttactctcagaatgaaggaggctctggccaagcagaaacccattcagccggcgttctccacagaggcttaacacccgccggtcgcacgccacccctcgggc

SEQ ID NO: 273677 - DNA, 163 bp, Homo sapiens
  chr19:18870913-18871076
  hypo
cccctccccgctcccgaccccgctggaccccgaggagcccaccttccctgcactgagcagctccagcagcaccggcaacctcgcggccaacctgacgcacctgggcatcggtggcgccggccagggtaaggcagggacactccgccctcggacagagcactgg

SEQ ID NO: 273678 - DNA, 374 bp, Homo sapiens
  chr19:18872660-18873034
  hypo
gagggaacagggccccagcccgagcgcattgaggctgcattctgactcccacacctgggccctgggccctgggcccgcggggctctgccactggacagagggcaccagagaaggcccagaaaacacagccgattcggaggagccctcttcattgtctccagatagacagggccaggcaggcggcatccacacgcacctgcgcagaaccagaaagctgaaggtcagcgctggggctgcaggtacccctgccccgcatagaagccaccatctcccagcccctgcttttcccctcacatctcttcacggccaccagagcacatggcccccttcccgctggagggtccttggcaggtccccagcgcccgcccgggagc

SEQ ID NO: 273679 - DNA, 457 bp, Homo sapiens
  chr19:18874215-18874672
  hypo
tattcaggacggtcaccctgtacaggtttgtagcctgggaacaagggccctaccgtctggccgaggtgtgcagaggctctgccatccaggtttgtgtaagttgccctgtgatcctcatgcacagccatgaaatcgccggacaacgcgttttttcagaagtcacccccattgttaagtgatgcttgactgtacttagaatcaacattgaaaaaccaggggaatgcccgtagaacaccagatttctggctgctcttgaagaatcagacagcccagtggccatggccgatgtcttgcacctcgagacgggccacagtgctctggtttgcctcaggccccacccgcccctgtcgtcccacatccataccctcacacgctcctgacgtttgcccctactttgtaccgagcccgacctctgcttctgacctgggcactgagcatctctcggcctgctggacgc

SEQ ID NO: 273680 - DNA, 351 bp, Homo sapiens
  chr19:18879380-18879731
  hypo
gccccagcccccgccgcctcctccacccgcgtcccagcagccaccacccccgccacccccacaggcgcccgtccgcctgccccctggtggccccctgttgcccagcgccagcctgactcgtgggccacagccgcccccgcttgcagtcacggtaccgtcctctctcccccagtcccccccagagaaccctggccagccatcgatggggatcgacatcgcctcggtaagcccagggtggggtccctcggggcctgactgggggtcttgtagaggacagcccgggggctgcagaacagtcgggttacctgctgcatgggccaggggtcagaaccccagcgaacgctgcctggg

SEQ ID NO: 273681 - DNA, 68 bp, Homo sapiens
  chr19:18880025-18880093
  hypo
gcccgttgggcacagcgcctggggcccagggctgggggctgcagctcagaccattggacttttctgcc

SEQ ID NO: 273682 - DNA, 518 bp, Homo sapiens
  chr19:18883485-18884003
  hypo
catcagccaagggccgtctgggaccactgcctgtagccccgtgttctggaggcaagttggtgggcagcagtggtctcggggaggcatgggggtcagcctggtgtctgcgcatgcttggtctgcccgcactggctctctgagctctcgggctctggcagcgtgtctggtctcgtcgtgtggtactgttggggatggggctggaggggctggagaagcggcaggtgaggcctgtcccaggtgggcagcccaggtggggctggttcctgagtgaggtccctcttgcatgtgagacaggacgggacaggaattaggagtcgagccagtttctctcaggagagagtcactggaatggttggtgaatttttgggccccaagccaaagcgggttagtctgctgggcagcgagcaggtggcggtgttgtcaagcccatgtctgtgtgtctggtgtccgtcgtgcgctgatgcaggaggcaggcggctcatggaggtatagggacatcagtacggggctctcagggg

SEQ ID NO: 273683 - DNA, 42 bp, Homo sapiens
  chr19:18957753-18957795
  hypo
gatcgcaccactgcactccagcctgagcgacagtcacggcag

SEQ ID NO: 273684 - DNA, 193 bp, Homo sapiens
  chr19:18963590-18963783
  hypo
gcctgtgtgtgttccggggactcctaatggcttctctttcagatgtgcccttggtggcatttggggctgcaggtgccactcacggcgcctgctctcacggcagaggcttgctgtagggcccgcctcatggggcctcgggcatgtggaggccaggcccgggcctgtgctggaggctaaccggggctcttgtttt

SEQ ID NO: 273685 - DNA, 151 bp, Homo sapiens; identical to SEQ ID NO: 219321
  chr19:18963997-18964148
  hypo

SEQ ID NO: 273686 - DNA, 328 bp, Homo sapiens
  chr19:18988692-18989020
  hypo
agtcaataccagctcgagccaaaagtcttgagtcgtctttgattcttttatttctgtttcatctacacccaaggcgaatctgatgggttctcccttccaaacagggtggggggtctgacgctcctctgcctggctacagccccggatgtgttaaatgtctgcatctcgcacctcccgttccaaaaaacgtcacggagctctgagccactgcttccctgaaaccatcgttcccacgtcaccgatggcccccaccggccaaatcagagggcctggctggtcggcaccttccagggccttccacaacctcctgccccggctcctgctcaaa

SEQ ID NO: 273687 - DNA, 549 bp, Homo sapiens
  chr19:18989666-18990215
  hypo
cctgcccacgaacacgcttggacgggtgacactaaaggagggaacgcggggtgcgggcccctccacactcactcggctttgctgggcttcaggctctgggcctcggctgtgtcatactcccgcaggtccttcagctcgtgcacctggcctgtcaacaccttggctgcaaacgccacgatgtactgcgagaggggaggggaggtgccagtgagaagaaagcccccacgccactgccctgctgacagccatgtgctcctgtcccgggccctccacacgggctgtctgccacctaacgtgcccctccccgggactgcctgaggaggggacagggattgggacgaggacgggaccgccactgtggaggagagccggggccgactcaccaggaaccagtagaggttcataagggtgagcagcagcaggagcgcattgaagaagaagtagaaggggatgtcaggcaccgtgcgcagactgcagtgactggtggcatacaggaccttgagcgggaaccagtagaggcggaaccagaacctgcggtgggaggagtca

SEQ ID NO: 273688 - DNA, 433 bp, Homo sapiens
  chr19:18994722-18995155
  hypo
ctgcctctggtctgtcccctcgtcggacccctgagcactctgaccttggaaccctgagcactccgacctgatgtgatcccctccacggcctcctctgtgccccgccgcaacatcagcctccgcactctgtgtgggctgtgcctcggccccctgccacccgatcctgtccttaccggaaggcgtaggaggagacgatgaggatgagagtgaccacgtggtggagcagcatgaccaccgagtccttgcgccaggtgtccatgtatagcgtagcgtagatggagtggccatagaagcttccctggagcaggtaggcggctgcaatgtcccgtggcactgccatgcccggcgtccagtctggggagagccaaatctcacagtcagggccctgcgaagcctctagacgatcgcctccatgacccggtgacaccctcca

SEQ ID NO: 273689 - DNA, 153 bp, Homo sapiens
  chr19:18996626-18996779
  hypo
ctcttcctgtctttaacagagccctgccttgcgggtgtcctgggcccactccctgcaaatccctggccctgacagatgcggctgcccacggagtcttgccatgcccgggcacaccatgccaccaagcgcagggtctcccgccaagcgggtcct

SEQ ID NO: 273690 - DNA, 220 bp, Homo sapiens
  chr19:19040159-19040379
  hypo
agtccctttccaggacgaatgggcccaactatgccgcctgcagcctggcccgcatcccaggccggaatcgttcatagaaaaccagccccggctcagggcgcagcctcagccaggcgggccaggccctcacgcagctcactcagctcaaacaggctgacgtccagcagctgcgctgcccggcccacctcagcccgcgcccgctcccgctctgcccgtgcct

SEQ ID NO: 273691 - DNA, 186 bp, Homo sapiens
  chr19:19042699-19042885
  hypo
ccagggcagatgggaactgccgaggcgcggtctccacagttgcccgggccaggtgggggtctctcggagggaggggtgccctcacccgctgccgcagccgctcggcctctgcacgctgagcctccagctgctgcctccactgggctgcggcggcgttggcctctcgcagggcgcctgccagcttgt

SEQ ID NO: 273692 - DNA, 34 bp, Homo sapiens
  chr19:19087049-19087083
  hypo
agcatggtggctcacgcatgtaatcccagcactt

SEQ ID NO: 273693 - DNA, 64 bp, Homo sapiens
  chr19:19100287-19100351
  hypo
ggaaaacgtcctcgcgtgctgcttgaacatgcatgcgcgcacatctgtacgtgggcatgcatgc

SEQ ID NO: 273694 - DNA, 136 bp, Homo sapiens
  chr19:19104043-19104179
  hypo
agcttcagagctttggtacccgagtgcagacttggtaattaccgggaatttgtctcccccgtataaattctggcgaacaacgagaaaacaccatctgtgatcgtttccacatcacgtttgctaacagagcacttct

SEQ ID NO: 273695 - DNA, 266 bp, Homo sapiens; identical to SEQ ID NO: 219323
  chr19:19109239-19109505
  hypo

SEQ ID NO: 273696 - DNA, 281 bp, Homo sapiens; identical to SEQ ID NO: 219324
  chr19:19114950-19115231
  hypo

SEQ ID NO: 273697 - DNA, 272 bp, Homo sapiens
  chr19:19135284-19135556
  hypo
tattggccaatgtgcgttttctactaaaatcctgatatgtttccaattggctaaagaacttctgtgtaaaaaaatctcgaataaaagacattaccaaagaaacacgaaaaacaacaaatagaaactttggctgatttccttaccatcactcagactacttggagccttggcctgaatttcaggtttcgtaggaggaatcattttctcctcctctcgcatcggctctggttcggctttcttaacctggaggggacatccgctgctgactagcc

SEQ ID NO: 273698 - DNA, 198 bp, Homo sapiens
  chr19:19136747-19136945
  hypo
tccagtcctgagaacggaaatgccccaatttccggtggccaatgacctggtcccgagaatcagagtgagaaaattccagatcccggccacattctttgcgaaagtagctgtcatcactgatggaagggttgcttgatctgaaggaaggccctggaaatacgtcacttctcaggccttctcttccggcatctctagagt

SEQ ID NO: 273699 - DNA, 98 bp, Homo sapiens
  chr19:19147972-19148070
  hypo
gacagagcgagactctgtctcaaaaaaaaaagaaaagggcattgaagtggagggcatgggaactgggttctgcaggctggctgcgagccagtccttct

SEQ ID NO: 273700 - DNA, 240 bp, Homo sapiens; identical to SEQ ID NO: 219325
  chr19:19156742-19156982
  hypo

SEQ ID NO: 273701 - DNA, 135 bp, Homo sapiens
  chr19:19165034-19165169
  hypo
tgccaggaggtcgtcgacctcgggggcctgagcattctggtgtccctgctagccgactgcaatgaccaccagatgagggaccagagcggcgttcaggtatgaagtccccctggcccattgcgtgctgtccttctg

SEQ ID NO: 273702 - DNA, 139 bp, Homo sapiens
  chr19:19218716-19218855
  hypo
ttcatgtcttcatccgcatctcgagagaagaggggctgaagactctctaccatggatttatgcccaccgtgctgggggtcattccctacgctggcctgagcttcttcacctatgagacgctcaagagcttgcacagagg

SEQ ID NO: 273703 - DNA, 44 bp, Homo sapiens
  chr19:19226768-19226812
  hypo
ctttttgctataaacaattccgcgcagcctaggagtgtcctgaa

SEQ ID NO: 273704 - DNA, 216 bp, Homo sapiens
  chr19:19230753-19230969
  hypo
gtgctggtggaagtagaggccgaaaaggctggcgagcagctggcaggcagccgtccaccagatgaggtaggccaggacgccacggaggaagaggggagtaagcaggccacccagagccccggcaatccgcgctgcagtctgctggacttcgtcctccccagagccgatgggggcagcgctggctgaggatgggtcgggggatagtagaggagctgg

SEQ ID NO: 273705 - DNA, 275 bp, Homo sapiens
  chr19:19231766-19232041
  hypo
ttccctctggcctaggtcatcggggcgtccataccctctgctggatttcacgggcttcgatgcggccagcctcccttcgcagctgctccacccgggccttggccaggcacaggtaggcctgcaggtggggccgggtcaccgccagccgcagcaggcacagcaccaccagcaaccagaggcgcccagagtcgaaggcagaatcggacagcctgtgcggagagggccgggggcaagggactaagaaggtcgcccccgaccccccaggatcttcccca

SEQ ID NO: 273706 - DNA, 94 bp, Homo sapiens
  chr19:19335196-19335290
  hypo
ccacaggaactctacgatgtgtattgctttgcccgggagctggggggtaagtctgggactggcaggacccggcccctccgcctctctttgagta

SEQ ID NO: 273707 - DNA, 328 bp, Homo sapiens
  chr19:19389261-19389589
  hypo
agcaaaatttcccccgcagccccaggaaatgtttctgaggcagcagctgagctgctgtttgctaattccctacacagacggcgcctgtcattaacagatgcctcctgcagcgaaaaggcctggctcctgctgtgatcgagagggtagccaggctactttgggcacctgcagggtgaggcagctacaggaggggctggcatgtggcagaggctggagctagggcccctcctggctcaccttcagggccttgaaggtctccataaacttttccagctcgtctggaggcaggaagtctccgatgaagtgcttgccccggcccatctttgtc

SEQ ID NO: 273708 - DNA, 466 bp, Homo sapiens
  chr19:19391471-19391937
  hypo
ggcgcacgcacaaacgggctctcagaaggcagctccgttgctaacagacaccaggtgtaagcgcgcacagattcagagtctggcgtaagactcagctgtgcgactcccttagctccttcaggggaggcagccaaccatcctcagagcagctgacatttaatttggcatcagctgtggaacttggcaggctccagtaacactgacacatagaaagatgctgcaacagccccatccgggtggcagaaaccaccacccctcgggcggtgcggtgcttcccgggggagaaggtgagcaaaggggtgcagcgggccctctgggaagggaaaagatttgggtccttccagctcatcaacactcgggctttgccgctaagaatggcccacatttgcactcttagtccttccttggtttacagggcactgagggatgtgggggagccctgttggggagacgcaggagccgaagt

SEQ ID NO: 273709 - DNA, 194 bp, Homo sapiens; identical to SEQ ID NO: 219326
  chr19:19416790-19416984
  hypo

SEQ ID NO: 273710 - DNA, 690 bp, Homo sapiens; identical to SEQ ID NO: 219327
  chr19:19446448-19447138
  hypo

SEQ ID NO: 273711 - DNA, 90 bp, Homo sapiens
  chr19:19447258-19447348
  hypo
ccaccatgcctggctaattttttttatttgttctagagatgatctcgcccaggctggcctcaagcaatcctgcctcgacttcccaaagtg

SEQ ID NO: 273712 - DNA, 221 bp, Homo sapiens
  chr19:19447906-19448127
  hypo
aaggaatccagcttgattgccgccttgttttttttttttcttacattcccaaacgtgactatttcctttcagaattccgttgatgcagcaaagccgctgctgcggaaggcgatccagatctcacagcagaccccatattggcactgccgcctgctcttccagctcgctgtgagtaccgcggcccgggaacgagggtgcccggcagggaccatgaccctggg

SEQ ID NO: 273713 - DNA, 180 bp, Homo sapiens; identical to SEQ ID NO: 219328
  chr19:19494668-19494848
  hypo

SEQ ID NO: 273714 - DNA, 167 bp, Homo sapiens
  chr19:19540205-19540372
  hypo
aggaggccaggtggttggagcgggagcatggaacgtgtatgctccttcacatgcacgtagcgcacttgcggctgaagtgggccgggccttgaaggccgtggtgaggtgctctgacgctgggtggacctgggaaattaaggagggccgtctggtttattatggggagt

SEQ ID NO: 273715 - DNA, 292 bp, Homo sapiens; identical to SEQ ID NO: 219329
  chr19:19576164-19576456
  hypo

SEQ ID NO: 273716 - DNA, 513 bp, Homo sapiens
  chr19:19604056-19604569
  hypo
cttagacaacaggtgtcaaggaagtggagcacagatgtctggtgccgctggaagcatgtttctgggtgaagcactctgtgcagaaaggccgcctgcactgtgggcgcaggggatgccccagtctctaccatcatccctcctgctgtgtgcgtctcagtcccctcccagctgcaagtgtgctgagctcccgtggatctcagccccaactgtcgggagggtcctgcttctgtttcttcttccctggagcccgaagctcgctgttgcgctgcttctagatgcagcttaatgggcagcgaggttaagtttattttgttaggctttttgagtgctctgttctgggaaactccgaccttccaagtactttagtcattgcctcagtgacccagaaagtaagtgtgttctgggcagcaggagctgaaggaaggacaggactctctctgctctggcttggggtttgttttttgaaaccctgcccccactgcccccgcgccccctccccgccccccaccttac

SEQ ID NO: 273717 - DNA, 194 bp, Homo sapiens
  chr19:19611820-19612014
  hypo
ggacagactgtggcgactgagactccagcatcctgggctgggggcggccagggccctgactgtcgtcctggccctctgacgtgagccatgtgctgtctgcttgcagcaggcaggatgtcggccgccactgtgctgtcccgggagccctacatgtgtgcacagtgcaagacggacttcacgtgccgctggcggga

SEQ ID NO: 273718 - DNA, 132 bp, Homo sapiens
  chr19:19612753-19612885
  hypo
tgctttcaacccccgtttgtgtaggtcataaaaccccggcgtaagttggcgttccgctcaggagaggcccgcgactggagtaacggggctgtgctacaggtcagaaccgcactgggcgccgggagcctcgcg

SEQ ID NO: 273719 - DNA, 731 bp, Homo sapiens
  chr19:19616882-19617613
  hypo
ccctggagggtgggcggctcatggtgccacagcccctggcagggacggccggcccgcccccgtgactgactgacagatgcagggatggccgaggcagccctcgctccagctgaacgcctccattgctgcttgttctggagacccccgcccccgcaccttccagacttagcagaagaacaaactgaagaacagacccagccagagaagcagggattccagaagctgcccattaagggagaaggagaggatccggtcggcagcagccctgagcagaaagctggaggggggactgtcgcggggtttttctgttgtggtttattttattaaattttttccttttttctattcatttcgatggacgcaatcttaagccaccctggccttgctcctgggaggtgagcgtgcacaggtgtgtgcaggtcaggaggtgccgtccaggtgtgcggcgagccgctgcgcacagatgtcaggatttccgtttgggtctagtttagaacctgtccttaaacctaggggttgctgtcaggatttgctttcagactttttttttttttgtaattccctttagagtctacaaaaatgtttttaaaaggatcaggtctgcttttagtttcatttttgtttctttcccgtcccactctttaaaaactggttccgtgaggaaaggcagaagccgttccgtgtctcttgcaggctgggccggcttcatgccagtgcgagggcgtcccgtg

SEQ ID NO: 273720 - DNA, 150 bp, Homo sapiens
  chr19:19623134-19623284
  hypo
ttataggcgtgagctgccacgccctgcccagagtccctccttgaacacctcccaactctacctggcatttagcacaacttacaattattttatttccatgtcattcttttattttacttgacttttcaattgtctcgttttcggcaggga

SEQ ID NO: 273721 - DNA, 98 bp, Homo sapiens
  chr19:19624553-19624651
  hypo
tgttttcgaactcctgacctcaagatatctgcccgcttcggactcgcagtgttggggttacaggcgtgagccaccgcgcctggcccttggctctgcct

SEQ ID NO: 273722 - DNA, 595 bp, Homo sapiens
  chr19:19625551-19626146
  hypo
gcacgccgcgtttctggcgccggggcaggccggcgatgtccgagtcgtcgaagggcatgcacccggtgaccatgacgtagagcacgacgcccatgctccacacatcgtacttcttggggtcgtaggggatgcccaggagcacctcgggtgacgcgtaggcggctgagccgcagtaggtggtgctcaggtctgggtagccatgggcctggcggccgaagccgaagtcggtgagcttgacgcggcgctcgtccgggctcagcagcacgttttcgcacttgaggtcgcggtgcaccaggtgatgatcgtgcaggtagcgcacggcgccggcgatctgcgcaaagaggtcgcgcgcctgaactccggggatgcgcccgttgcgctgcacggcttgcagcaggtcggtggcggccgcttccatcacgatgtacagtttcccgttgcacacctcgatgaactcgaagacgtgcacgatgtgcgggtgtcgcacgccccgcaggatggacagctctcgcggcaggaacttgttgacgaagtccgggggcgctcgccgccggtccaccaccttgatggccacggtacccttgtacttcttgga

SEQ ID NO: 273723 - DNA, 315 bp, Homo sapiens
  chr19:19636872-19637187
  hypo
cagcctcactcctgagaagccgccagtgtcccctgattgcagagtgggcagcgcctggagctgtggaggagggtgtctgggggcgggctggcccgctgagcagcgcctctcttcacaggctacagcatgctggccatagggattggaaccctgatctacgggcactggagcataatgaagtggaaccgtgagcgcaggtagggcccctggtgggcgttgtctgaaagtgcccccccggcgagttgtcggggtcctgtagcattccgctgttgtctgtgctggcgaggggtgaacgggccccttggacttggctgt

SEQ ID NO: 273724 - DNA, 65 bp, Homo sapiens
  chr19:19674354-19674419
  hypo
agagaggccagagtccgcagggtgaggaaggcgtccccagcgctgggcagcgggaagggtccaga

SEQ ID NO: 273725 - DNA, 128 bp, Homo sapiens
  chr19:19680293-19680421
  hypo
ttctttggcttcttcgctggggtaagggttgttcagatgggagtaaaaatactcattcagcacttccgtcgcctgcttgctgaaattccgccgcttgcgcctgcaaaaacagccgccttcgtaggcat

SEQ ID NO: 273726 - DNA, 38 bp, Homo sapiens
  chr19:19710043-19710081
  hypo
gggattacaggcatgagccaccacgctcggccagaaag

SEQ ID NO: 273727 - DNA, 177 bp, Homo sapiens
  chr19:19719311-19719488
  hypo
agtctggaacaaaccgcgtgctcactccttacctggcaaggagttcaaggccatgcttggtcggacagcagctgaggcaggcagtcacccccgagtctcccttccaaggtcacgcccaccactcatgcccgatgggaccacaatgcatgccttcatgctccacgcctgccttgcatg

SEQ ID NO: 273728 - DNA, 50 bp, Homo sapiens
  chr19:19735078-19735128
  hypo
ccatcagtgggtggccgttctcgggaagcatgatgcgagtgctggcacct

SEQ ID NO: 273729 - DNA, 430 bp, Homo sapiens
  chr19:19737450-19737880
  hypo
cgtagaagaaaatgcgggtgtacacagccaccatgagcaggaagacaagcaggctcgacagagcccagacggccaaataggagcggctgagcaggggtgccatgcgtgagcagcggtccagggcacagaggcagtgccaggagtgggcaggcagcagccccaggcccagggcagccacccacacgcccacaatgagcatgaccacgcggccacggggcaggcggctgtgcagctgcacggccatcacactgcggtgccgctccacggcgatggccagcagtgtggccaccgacgcagtgaggcttgtgtccagcaagccctgccgcaggaaccagccctcaagtgaaagtcgggctgtgcggggaccagtgtggaacatgaggaagaggtaggccacgcccgcgaagaggtcagccgcggccagattgcc

SEQ ID NO: 273730 - DNA, 54 bp, Homo sapiens
  chr19:19766967-19767021
  hypo
ctgggctgaggtcttcgatgggctcctggggaggaagatcgtgaatctggatgg

SEQ ID NO: 273731 - DNA, 173 bp, Homo sapiens
  chr19:19769452-19769625
  hypo
tccggctcccagccacgtgtcagcatttgcagttttggtgaagatgaagggagagggtgtgcaccgcacattggccattgtactcagtacaaaagggcagacatggtcacggtcttccatcaccattctgaagcgctgagatgcgtagactcgaaacagtgaggactgaaatg

SEQ ID NO: 273732 - DNA, 120 bp, Homo sapiens
  chr19:19775583-19775703
  hypo
ctccaaaaaaaaaaaaaaaaaaaaaaagaaattaccactttaacataaaaaatgaaaaactggtgtttacttgaaattatatacttctaggccgggcgcggtggctcacccctgtaattc

SEQ ID NO: 273733 - DNA, 84 bp, Homo sapiens
  chr19:19819260-19819344
  hypo
cccggccttagtgtgaacttttaaatgcatttaccaacaagaatccacagtgtgggtttggatgggaaacggagctggacatga

SEQ ID NO: 273734 - DNA, 225 bp, Homo sapiens
  chr19:19822261-19822486
  hypo
tgtgagacctttcatgaattcgaacagaacttgaaaatctgaaggctttcccacattgtttacatcgatagggtttctctcccgtgtgagttctctcatgcattcgaaatttactggaagaaatgaaggcttttccacattgtttacattgatacggtttctctccagtgtgagtcctttcatgcaatcgaatttgactggaacgaaggaaggccttaccacatt

SEQ ID NO: 273735 - DNA, 783 bp, Homo sapiens
  chr19:19861401-19862184
  hypo
agcaccgatggccacgcaggggacatggcacacctcacccggttgttgtaccatttcaggtcagagaaccccggcaagaacttgctgcaggaacacgaggtgctgagcctgtgcgggagcaggacatcaagggctgctcaagagcgtccatggctacagtgactgtggcctcttcccagcctcatctgtgccgtgcaggtgatctatgactccaagctgggactggcaggtgatggtggccccagcatctcagccacgctgccaacatgctgtcaggaggcttcgaggccatgcccggtatgctgcccacctccttgagaccccttcctgacactttccagccggtgctacagccgcagcacgtgccaccactgaatacctttcagcagccggtgcaggcttcagacggcaggcgtgcccgacagccgtggcctcagcagctctttcgtggcaaccaggacagtcagggcagtgatgaagtgatgatgcctaggacgacaagtgggatggcagctccgtgatggtggatgagcctagtggcggttcacacctggtcctcagtggctccctgagcccccgtggtggcaacagcttggccaccatgaggcgcagtctcaaccgcttccccacctgtcaagtcaggcagggaggccttgtgcttggcgaggcgttgggctctgtgaaggacggggacaagctgtgcgtggctctgtggctctatggcctcaagtggcaggagaacccctactccttccagtgcactaccagcgacaccgctcagta

SEQ ID NO: 273736 - DNA, 139 bp, Homo sapiens
  chr19:19974478-19974617
  hypo
aacagcctgggttccagagtcggccactcatttctgcacagatgaggacaggtctcatgaagctttggcgcagtctggtaccctcagttttttgtaacgagttgtttggcaggaggtccagtcacgagggccttccgca

SEQ ID NO: 273737 - DNA, 76 bp, Homo sapiens
  chr19:20013812-20013888
  hypo
gctgggattacaggcgtgagccaccgcgcccggcctttgggaggatcttactgacgatgaagttgttattgttttg

SEQ ID NO: 273738 - DNA, 37 bp, Homo sapiens
  chr19:20095094-20095131
  hypo
gtgctgggcatagtggctcacgcctgtaatcccagca

SEQ ID NO: 273739 - DNA, 86 bp, Homo sapiens
  chr19:20103785-20103871
  hypo
gcattcatgtttaccgttatggtggaaattttggcctgctgttcttcctgctgattaagtagtctgtcaagagaaagcagagactc

SEQ ID NO: 273740 - DNA, 41 bp, Homo sapiens
  chr19:20115867-20115908
  hypo
aatgctttcatataaactagcgttctttctttttttttgag

SEQ ID NO: 273741 - DNA, 120 bp, Homo sapiens
  chr19:20187137-20187257
  hypo
ttggtgaccattgtttgtgtccacgttcaattagcacaaatttattatttaactttgactccacaccagactatggaggattcaccaccagaccggaaagcaacaggatgggctccagag

SEQ ID NO: 273742 - DNA, 90 bp, Homo sapiens
  chr19:21235804-21235894
  hypo
tcacctattggcaagggctttaggtgtttcttttacgagttgtcttgttgcattttgttgcagcccaaaatgcatcgcgactgttcagga

SEQ ID NO: 273743 - DNA, 32 bp, Homo sapiens
  chr19:21254339-21254371
  hypo
caaaattagccgggcgtggtggcacatgcctg

SEQ ID NO: 273744 - DNA, 120 bp, Homo sapiens; identical to SEQ ID NO: 219343
  chr19:21261376-21261496
  hypo

SEQ ID NO: 273745 - DNA, 89 bp, Homo sapiens; identical to SEQ ID NO: 219344
  chr19:21305621-21305710
  hypo

SEQ ID NO: 273746 - DNA, 257 bp, Homo sapiens
  chr19:21513407-21513664
  hypo
gctggccaccatgcccggctaatttgtagccaaactttaaaaagagtttagctctatttttaaaaagaaacaaagaacaggtgaaattgattgtaacaatttaacccaatatatcgaaaatattgtcattttaatatgtgagaaatatgtaattattaatgaagtgtgtctatatatatggaactaaacctttgaaactaactcgtattttacctttctagcacatcgcagttcagaccaggcgcattccaggcagc

SEQ ID NO: 273747 - DNA, 349 bp, Homo sapiens; identical to SEQ ID NO: 219346
  chr19:21623090-21623439
  hypo

SEQ ID NO: 273748 - DNA, 92 bp, Homo sapiens; identical to SEQ ID NO: 219347
  chr19:21627223-21627315
  hypo

SEQ ID NO: 273749 - DNA, 35 bp, Homo sapiens
  chr19:21642233-21642268
  hypo
ataaagtttaaggctaggagcggtggctcatgcct

SEQ ID NO: 273750 - DNA, 105 bp, Homo sapiens; identical to SEQ ID NO: 219348
  chr19:21645410-21645515
  hypo

SEQ ID NO: 273751 - DNA, 180 bp, Homo sapiens
  chr19:21648186-21648366
  hypo
acagagcgagacttccatctcaaaataaataaataaataataatcatcatcatcttagaatgctcaatgaacaaaaataaaacacaaatagacaactaaatgagatttagaaataatgagcgaaatatcaaagatataaaaacttttttaaatttttaattaatttattttttttagatg

SEQ ID NO: 273752 - DNA, 96 bp, Homo sapiens; identical to SEQ ID NO: 219349
  chr19:21654951-21655047
  hypo

SEQ ID NO: 273753 - DNA, 40 bp, Homo sapiens
  chr19:21717590-21717630
  hypo
tgtgtttttttttttttgttcgtttgtttgtttttttttg

SEQ ID NO: 273754 - DNA, 139 bp, Homo sapiens; identical to SEQ ID NO: 219350
  chr19:21760988-21761127
  hypo

SEQ ID NO: 273755 - DNA, 90 bp, Homo sapiens
  chr19:21767646-21767736
  hypo
cttaggaactgggattattccgagggcaatgaggagccactgaaaggcacagccagggctgggcgcggtggctcatgcctgtaatcccag

SEQ ID NO: 273756 - DNA, 33 bp, Homo sapiens; identical to SEQ ID NO: 219351
  chr19:21792703-21792736
  hypo

SEQ ID NO: 273757 - DNA, 180 bp, Homo sapiens
  chr19:21798902-21799082
  hypo
gattacaggcgtgagccaccgcgcccggcctaaaacccttttctttatgcccctcaggtggacctcaaatcatggctgggtgctttccatttcaccaatcactgtttgctcaaataaacttgttaacgttttaacattgactccctttaatttttaacaggagagactgagcatggtggc

SEQ ID NO: 273758 - DNA, 42 bp, Homo sapiens
  chr19:21799322-21799364
  hypo
gggcaataagagtgaaactccgtctcaaaaaaaaaaaaagtt

SEQ ID NO: 273759 - DNA, 43 bp, Homo sapiens
  chr19:22239550-22239593
  hypo
attacaggtgtaagccaccgcgcccggccgaatttagaaattt

SEQ ID NO: 273760 - DNA, 31 bp, Homo sapiens
  chr19:22606209-22606240
  hypo
ctttaaaaacaaggaacacacggggcacggt

SEQ ID NO: 273761 - DNA, 42 bp, Homo sapiens
  chr19:22768073-22768115
  hypo
gtgtggtggctttagtcaagcgttgttcattgttgttttata

SEQ ID NO: 273762 - DNA, 237 bp, Homo sapiens
  chr19:22799548-22799785
  hypo
cctagggcacctgagctgagcgtttgaccgtgtcctgggagttcataggtaaaataactgccgcgacctgcactgacccggaccggagtgcctgaaaggggccagctgcctattccgccagtccgcctggagggctgggacaggcttggtcctgtggacgaggttccatctcccctgcctgcggaaggaagaacgtgaagcacagagaaaggaagcgggatgatgactgcccctgtg

SEQ ID NO: 273763 - DNA, 180 bp, Homo sapiens; identical to SEQ ID NO: 219352
  chr19:22815034-22815214
  hypo

SEQ ID NO: 273764 - DNA, 100 bp, Homo sapiens
  chr19:22815454-22815554
  hypo
tacaggcgttaggcaccgtgcccagccaagccttaactcctgaatgagaccatacgtctttttattttagccccaattcggtacatggcatgtttttaat

SEQ ID NO: 273765 - DNA, 36 bp, Homo sapiens; identical to SEQ ID NO: 219355
  chr19:22824862-22824898
  hypo

SEQ ID NO: 273766 - DNA, 32 bp, Homo sapiens; identical to SEQ ID NO: 219356
  chr19:22825458-22825490
  hypo

SEQ ID NO: 273767 - DNA, 89 bp, Homo sapiens
  chr19:23083835-23083924
  hypo
aagcacagaacactcggtcgccattcacctcactgctttcaggagagaatgctcaaggtctcttgctgactttttttttttaacggagt

SEQ ID NO: 273768 - DNA, 688 bp, Homo sapiens
  chr19:23084164-23084852
  hypo
aggattacaggcgtgagccactgctcccagtctctttctgaatcttgactctgtgggcaccgcccgttagggaggctcgcgtccctgcccaggggccttcattaaccgaaggggacgtgccacgctgggggtgttcgaggtgtgggaggcctcctctgctggcgtcccacctctccgtttaccgccttctcccatcactccgctgggggctcatcccctgagacggggtccgggagcgtggtggaaatgatcgaggtgtagaggttggagggtcgtggcccagcggcttctgtcccagggggtggcggcgcgggcccgggggtggccatctgggtcccagcccttccttccctgtagcaggggcggacgaggtgcatcctgttccacccctgcacccttctcctccccgcccccctccgggtggaccagcagaccgcgggctgtggtgggaaggtgggcgggcttatgccaccagccgcccccactgcgccgcccacgtctaaggctccagctgggcggaacagtctcaggtctggagcgccacacttggctgtagggtggacccggtgcgccactgcccacggccaccggctggcttctcagtcgggccactgggtcgaccagatgtgggctgcgagccgcgaacattgctcttggccactagctcgaaatactaaaggtcaaccta

SEQ ID NO: 273769 - DNA, 120 bp, Homo sapiens
  chr19:23271955-23272075
  hypo
agccaccgcgcctggctgattatgtggtttttgtctttagttctgttatatgatgcatcgtatttcttttttcctatttatttttttctgtctcccaggctggagtgtagtggtgtgatc

SEQ ID NO: 273770 - DNA, 39 bp, Homo sapiens
  chr19:23297430-23297469
  hypo
gcgtgagccaccatgcccggccctaaagttgtttttctt

SEQ ID NO: 273771 - DNA, 42 bp, Homo sapiens
  chr19:23378285-23378327
  hypo
tgggatcacatgtgagccaccgtgcctagcccaacagcatca

SEQ ID NO: 273772 - DNA, 180 bp, Homo sapiens
  chr19:23435643-23435823
  hypo
gagactgtgagactccatctcaaaaaaaaaaaaaaaaaaaaagtttgtgacttatgtataatctttaataaggcgactttaaaattattggtaaagtagtatcagcaatgtcttaaatattgttagcattttgttaacttttttgagatgtagtctcactctgccgctcaggctggagtg

SEQ ID NO: 273773 - DNA, 37 bp, Homo sapiens
  chr19:23453188-23453225
  hypo
atatttcagagtcaacgggtaacattttatttttaat

SEQ ID NO: 273774 - DNA, 39 bp, Homo sapiens
  chr19:23917853-23917892
  hypo
agtgctggaattacaagcgggccaccaggcctggctgac

SEQ ID NO: 273775 - DNA, 296 bp, Homo sapiens
  chr19:24140474-24140770
  hypo
cctggtattatagacgtcggtgctgtcctcctgaaaatgggtagggactgtcccttaccggtattccccgaagattggtgagtcatcctactccatgcataacttcaaggcaatcacgtcggagtcaccacttgatcatgtccgagtcaccacttgatcacgtccgagtcaccacttgcagcttgttctgcagtgaatgccgagaaataaatattcagacaattacagctgaacggggaagggagcagctcctccaatggagtgttgctttaagattcatccgccaagtatttatt

SEQ ID NO: 273776 - DNA, 46 bp, Homo sapiens
  chr19:24178252-24178298
  hypo
attgatgccacaatgaatcacgatcgcatttctcttctgagcctga

SEQ ID NO: 273777 - DNA, 120 bp, Homo sapiens
  chr19:24269010-24269130
  hypo
caaaaaataaaaaataaaaaaaagtataagagatcataaaatatgtataaaaatctagaatggtcaaaaagacaaatttgatggactttatttttgttattttattttattttttgagac

SEQ ID NO: 273778 - DNA, 119 bp, Homo sapiens; identical to SEQ ID NO: 219358
  chr19:28296830-28296949
  hypo

SEQ ID NO: 273779 - DNA, 493 bp, Homo sapiens
  chr19:28341878-28342371
  hypo
taccctccaccctcagcatccggcctgctggccgctcctctgtcaggtctccgggtcaactagatgtcggccacgaacgccagacttagcctccggctcgccatgtttgaggtcgaccagcaggccctctcaccggagtgagctgtaaggagggatgctcagtgaaccaatcaagacgtgggccacggaggtcagcagggctctgggcaattcatggtcctgacctggcaagcaccactctgggacctgagcgttgcaaacccatctacacccgtccaacctgtgttggccggcgctcctcgctcgctcaggcctccgggttgacaagagttcagccgtgagcgcctggtttagccgccagcttacagtgtcggaggtcaaacagcaagccctcccccggagtaagcagtgagaagggaagcccggcggaccgagtgcaacacgggctgcagcggggagctgggttcgggacgggtcagagtcctgaccatgc

SEQ ID NO: 273780 - DNA, 42 bp, Homo sapiens
  chr19:28663020-28663062
  hypo
ttcatccattcaactgcagacgtgctccacttgctctgagtc

SEQ ID NO: 273781 - DNA, 37 bp, Homo sapiens
  chr19:29208561-29208598
  hypo
tcgatctcctgacctcgtgattatattacagagctat

SEQ ID NO: 273782 - DNA, 35 bp, Homo sapiens; identical to SEQ ID NO: 219359
  chr19:29930745-29930780
  hypo

SEQ ID NO: 273783 - DNA, 120 bp, Homo sapiens
  chr19:29930900-29931020
  hypo
ctttccgggaggtgaggagggagaggcgcaggtgggaagtgcgggaactggggctgcgcggctctcgggggccagcgtgagttccaggtgggcttgggcctggtgggcccgcactctgag

SEQ ID NO: 273784 - DNA, 237 bp, Homo sapiens
  chr19:29993079-29993316
  hypo
caagacacccctggcaactgcgcaggacacatctcagagctgggccacataagacgggaggaagctgcggcatttatccatccactccattcatccgtcactggctggagccactcctgggatgccgatgcccacacgcctccgtggctatagggagcccacaggctgagtcacaggaaccgagggtaaggtggctggtgtgcagggtggccgtgcgtgtccaggaggtacaggggg

SEQ ID NO: 273785 - DNA, 79 bp, Homo sapiens; identical to SEQ ID NO: 219360
  chr19:30102075-30102154
  hypo

SEQ ID NO: 273786 - DNA, 305 bp, Homo sapiens
  chr19:30129854-30130159
  hypo
agacagcccagatgcgagtgtcagctctgccacttgggaaagtccttaaaactcttctcatctgcgaagagatcaaccatgagattggtcatagaactaacttcaccgggatgttgtaaggcttgagtgcactgtctatggaagcacttagcacactgcctagcacatcgcaaatgcccggtaagtgactggtattgctacttgagtggaaaaaacacaaactatttttcctctgctctcccccacgataatcaacacagaagactgaccaaatatgagggggttttccccgcacacccagaaag

SEQ ID NO: 273787 - DNA, 204 bp, Homo sapiens
  chr19:30155053-30155257
  hypo
tcctatgcgctgcccgttctcagcactcggtatgcaggggtgaaccagaagaaagtcctgtctgaacacgagaagaaattactgtctagcccgtggggctcacagcctgggtgggaggcaagccaccagcatgacttgtttatgagcattccacagaagccacagcctggtaggcagccctgaatcccacgagcggcctcagga

SEQ ID NO: 273788 - DNA, 340 bp, Homo sapiens
  chr19:30185996-30186336
  hypo
aaatcctgccactccgccacccagacaccgaacacccagacacctaacacacagacacctgacacccagacacctggacacctgacacccggacacccagactacctgacacccggacacctggacacccgatcacccagacacctgatacccagatacccggacacccagacacctgacacccagatactgagacacctgacacccagacacctgacacccagacatccagacacccggacacctgacacccagacacctgacacccggacacctggacacccggacaccgagacacctgacacccagacactgagacgcctgacacccagacacctag

SEQ ID NO: 273789 - DNA, 40 bp, Homo sapiens
  chr19:30252252-30252292
  hypo
cggcacctgctcaccgtcatcacacggggacttagtctta

SEQ ID NO: 273790 - DNA, 37 bp, Homo sapiens
  chr19:30298274-30298311
  hypo
ctcacgttccctggcgctgggccgcagacactctgtg

SEQ ID NO: 273791 - DNA, 196 bp, Homo sapiens; identical to SEQ ID NO: 219363
  chr19:30314899-30315095
  hypo

SEQ ID NO: 273792 - DNA, 89 bp, Homo sapiens
  chr19:30324369-30324458
  hypo
tcttttcctgggcagcccctttgaaagtgtcatctacactcactgtcactccctcttggaccctctccagttggcgtcgccacaccaca

SEQ ID NO: 273793 - DNA, 240 bp, Homo sapiens
  chr19:30495018-30495258
  hypo
gtccaatttgctgccgtgagaaaaggtctaattgttgcagaaatttaatgatctagagcgacatcagggctgtgagattttatgaactgtttacaccgtaattttcattttgttaatgcagtcttttttttgtaacccattcatggctagagcataagtgattgtgttttatttaaaatagcattgcatagcatgagagccgtatcggagaacatgtgccactctcgagaagcccttcat

SEQ ID NO: 273794 - DNA, 90 bp, Homo sapiens
  chr19:30502049-30502139
  hypo
aagaagaagccaaacgtaaacgaaagaacagcactggcagtggccactctgcccaggagctgccgaccatcaggacgcctgcagacattt

SEQ ID NO: 273795 - DNA, 162 bp, Homo sapiens; identical to SEQ ID NO: 219364
  chr19:30535945-30536107
  hypo

SEQ ID NO: 273796 - DNA, 129 bp, Homo sapiens
  chr19:30561933-30562062
  hypo
cctggcctagcagagcgttttattattatgggaaacagcagaagtgggttggaggggggtccatcatctcctgcaaccagataaaatagaaacaactaaataaagcacccttgccgctcaagggaaaaa

SEQ ID NO: 273797 - DNA, 545 bp, Homo sapiens
  chr19:30562447-30562992
  hypo
gcccgcaccgcctccgcgtcctcccgggctccccgtggaggggcaccaatttgtcctcgcctgcgcctgctcgggccagatggtgggtatttccaggccacaaagtcctctgacctttgaacagttgccgccgaatttcaataatgaaagggccttttttgaatatgtacaaatgagacgttatatttccatacattttatttccagcctcatctgcgaatctaatattgacccggagttatctgtgatggggaagttattaattctgacagatataagggagaagctaatattcgccttttacaaacacctaatattaatctcaggcgctgtaaacgagtcccgcacgccggcatgggggagatgacaccagctcggaatttgataatgaaaaacggggaagtttaatttcagggaatggataaaaatgtttgcccgctgagaggtgagcagcgccaaaagctctgggagggcgggattcccggaggacagggtggaggtctgggaggtgacctccatccgaaggtctgcgatttggggcatgg

SEQ ID NO: 273798 - DNA, 42 bp, Homo sapiens
  chr19:30583764-30583806
  hypo
gctgctcctccctgggccaccgagggacaggagacccatgga

SEQ ID NO: 273799 - DNA, 292 bp, Homo sapiens
  chr19:30602305-30602597
  hypo
gggcattttaaagccggtttcatcatcagaaaatgtaaataaaagccaaggtaatatttccggtttgaacagaggcacacaaaacacagaaacttcatgggttaggcggctggctcgggggagggagagctcttgttcagcggggtctacccagaaccacgccgaaatgaggtggagtggagcttccctttatcaccgcgcatctgaccctgagcgtgagagtcctcatgcccaggacggtcccctgctgctcaccgtccccgcgggtgcacagtgtcgaggccagcctggc

SEQ ID NO: 273800 - DNA, 132 bp, Homo sapiens
  chr19:30635829-30635961
  hypo
cccttcctccatcccggcctgtttatggattcctgactgagtccgccaggcggcttgaagcggttgtggacagctgggccgcttggcattttatggtgagtggcggcttcccaaggccgtaactgtgtatgc

SEQ ID NO: 273801 - DNA, 114 bp, Homo sapiens
  chr19:30637463-30637577
  hypo
ccatgagcaccacattctggcggactcaccgtgcacgggcattcagcgagactcgatgcgaaggcaaggcaagcacgtgacatccagtactacgtgaggtgctgacagccccca

SEQ ID NO: 273802 - DNA, 913 bp, Homo sapiens
  chr19:30935128-30936041
  hypo
ccggccggacctgaagcccccgccgcacgcccagcaggccccgctggccgcctgcaccctggccctgcaggctaaccacagcgttcccgacgtggcccacccggtgccctcgcccaagcctgccagcgtgcaggaggacgcggtggccccggcggcgggcttccgctgtaccttctgcaagggcaagttcaagaagcgcgaggagctggaccgccacatccgcatcttgcacaagccctacaagtgcacgttgtgcgacttcgcggcttcgcaggaggaggagctcatcagccacgtggagaaggcacacatcacggccgagtcggcccagggccagggccccaacggcggtggcgagcagtcggccaacgagttccgctgcgaggtgtgcggtcaggtgttcagccaggcgtggttcctcaagggtcacatgcgcaagcacaaagactcctttgagcactgctgccagatctgcggccggcgcttcaaggagccctggttcctcaagaaccacatgaaggtccacctcaacaagctgtcggtgaagaacaagtcccccagcgaccccgaggtgcctgtgcccatgggcggcatgtcccaggaggcccacgccaacctgtactccaggtacctctcctgcctgcagagtggcttcatgaccccggacaaagccggcctgagcgagcccagccagctctatggcaagggcgagctgcccatgaaggagaaggaagcgctggggaagctgctgtctcccatctccagcatggcccacggcgtcccggagggggacaagcactccctcctgggatgcctcaatctcgtgccgccgctgaaatccagctgcatcgagcggctgcaggcggctgccaaggctgcggagatggaccccgtgaacagctaccaggcttgg

SEQ ID NO: 273803 - DNA, 337 bp, Homo sapiens; identical to SEQ ID NO: 219369
  chr19:30936341-30936678
  hypo

SEQ ID NO: 273804 - DNA, 42 bp, Homo sapiens
  chr19:31126107-31126149
  hypo
aggattcccatcccaaacaacgctaagtaaagaaacaggcat

SEQ ID NO: 273805 - DNA, 95 bp, Homo sapiens
  chr19:31197039-31197134
  hypo
catgtagcataggattcatacgtgaaattattactcagtaatgtgacaatcgaaagtacaatagacagttggctgggcgcggtggctcacgcctg

SEQ ID NO: 273806 - DNA, 260 bp, Homo sapiens
  chr19:31217750-31218010
  hypo
attggatggagaaagccaggcgctgctgagcgcttaacgacaaccagccttctccccagaaccggctgtgagcacagctaagaatagacctgggccaggacggtggagtctctctgtgcgagagttctctgcgggaatattctaaactccgcagtggagccggctctgcctcagccttgccgagcagggggccaagcgtgtctgagtcagttcagctgctgtaacaaagcaccgtgatcggggtagcttataaacaacag

SEQ ID NO: 273807 - DNA, 51 bp, Homo sapiens
  chr19:31275152-31275203
  hypo
cactgacttggagagacagccggttggtgcggggtttgtgtgggtttattt

SEQ ID NO: 273808 - DNA, 42 bp, Homo sapiens
  chr19:31388754-31388796
  hypo
tccccagacttgagtcaaatcgctcttttgtgaattttgtgg

SEQ ID NO: 273809 - DNA, 56 bp, Homo sapiens
  chr19:31493091-31493147
  hypo
gagctgcccatatggggaggcggtctttcaccgacgattctgcagacagaaattgc

SEQ ID NO: 273810 - DNA, 199 bp, Homo sapiens
  chr19:31640396-31640595
  hypo
tcggcgtgtggaggcgggaggggcacagccaggtgcgagggaaggctggcatctggcgcccactgcctgcccacccgcccgcccgcccgcccaagtaggtctgggcttccctgcctttaataaccatccccaccgcagaggaacggaagctagaaacacaccggctttggcatttcaggcgagtcgagggtggattatc

SEQ ID NO: 273811 - DNA, 1183 bp, Homo sapiens
  chr19:31767644-31768827
  hypo
tatctgactgttaatctgttcggtggacagtttggataagtcccgtagccggaagcctaagtgtgactctaggtgactgatgtacgtggaaggagtcctgatttgggacgcacaatcgttacaaaagaagacggggtggccagtgtccaagtttttgaggaactttgttccacctgtccttcgaagctggtatttcacgttggccagccagtggctgatggtggtcatggacagcccggtgaacctggagatatgcatccgctcctgggggctcaggtctgacatgatgtacttcccttctgaggtctgccggaggctggcggcaaactgggcctggaggatcaggaggtgctgggggttccagtttgactggcggcccttcctcttctgggcgggcgtcgactcctcagcctcctccagagtggccccgtcaatgtcagacttctcggagatgctggaaggagtggaggattttgacgtgtggctctctgtcaagttcttcagcatatcggatatatctgacaaggcattctcgcgtagcggcgagtttgacatgaatgatacgacggcagatgtctttgccgttgtcaccgtggatgaggaggttgccggggctgtggacgtgggtgacagaagcactgaacccaaggagcagcctttgtcactcttcccttttgtcaagtctatgggctggtcgttgttgacgtggtagaaatagcggtcgaggtggtctgccttcttggactgcaggggcggcggggtggccacagcagccttctccgccaggctgttgctcatcttgaaaagcatgctcatggggtccagggcaggcagggagggcttggcggccttgcccaggtgaatgttcatgactgactgcagggcgctcaaagggttaacaaaaggctgttcaggcgggtggtcggtgatgatggccgtgctgccactcaaactgctggctaggggcttcaccagctccttgccattctccaccggctcagcgagggggctcccatccttgcacccatcccgcggggggctggggctgttctcctggctgcggaagcccccatcgctggatgcctccatcttgatgggttccccgacttcgctgctacatggggagggagtggcccgcttgggcggggaaagcttcccatccggctccttcatcttctcctcc

SEQ ID NO: 273812 - DNA, 801 bp, Homo sapiens
  chr19:31769867-31770668
  hypo
gcacttcagcaccttctgggcgtcttccttcccttccatttccagcaaggagcgtttgcgaggcttggaccagcgcttggggttgttgttatcggtctcatggttgtcgtcgcggtaatgccccgtctcgttcatgtgcaccgtcaactccaccagggtgtcgtaggcagcgctgcagtccttacagcggaacttgctggcccccgtgaagatggagccatagagcttgctgctctgccggtacagctgcacggtgctgaagaggctgggctccgggagcatgcggctctgtgacacctgctgcagcgtcttagccatggcgctctggtgccagtcgaagctcccgctgccacagctgctgctgctgctactgctgctgctgctgctgccgttgttcttctccgaggagggctggtgcaggttgaggttgaggttggaccagtaggagttggagaggaagttgttgtacacggccttcatctgctccaggctatccgacacagtcgtgtcttccagtgggaccgtgacctccttggtctcctcttcgttcttgatggagccgctttcaaagtcagccattcggtcactggtctcactgatgtgtgactcgctgtccatttcatggcaggaaaactcggcggccggggagttctggtagctggggcaggccctggcgagctccttctccgggcacatgtacttggccgagggctctccatctgccgtatgctcctctgggtctaaaccttcgtccaccagggcagcagcctttaactcttcggaaacataggctgccatgat

SEQ ID NO: 273813 - DNA, 98 bp, Homo sapiens
  chr19:31790090-31790188
  hypo
actccatctcaaaaaaaagtgtgacacacaaccgcatggcgactctctctgaccggaaaggacagtaggctggagtccggccacgccaccttggcaag

SEQ ID NO: 273814 - DNA, 107 bp, Homo sapiens
  chr19:31792447-31792554
  hypo
ggctgcctgagacatgcctgcgggaaggcactggccctgtgctgggcatcgtcatagagcaggagacaccccggcaaagggattccgcaaggtccaccctcaggcct

SEQ ID NO: 273815 - DNA, 239 bp, Homo sapiens; identical to SEQ ID NO: 219376
  chr19:31794098-31794337
  hypo

SEQ ID NO: 273816 - DNA, 128 bp, Homo sapiens
  chr19:31827455-31827583
  hypo
tcttcatgttttaaaaaatccggttatctaaggaacgaagtttcagacccaccagaactgtagaagggcatcggatcctggtcagcagggtctcactccagttcttcggggtctgagactctctggaa

SEQ ID NO: 273817 - DNA, 42 bp, Homo sapiens
  chr19:32063825-32063867
  hypo
aggttttgtcatcccacccacgacaacctctgttagtcaata

SEQ ID NO: 273818 - DNA, 42 bp, Homo sapiens
  chr19:32064208-32064250
  hypo
attcatttagcattcaaagtcgagtaaaaggaggatttggtc

SEQ ID NO: 273819 - DNA, 42 bp, Homo sapiens
  chr19:32078978-32079020
  hypo
ctcccctgattcttcccttgcggtgggctgtgcccatgtaca

SEQ ID NO: 273820 - DNA, 369 bp, Homo sapiens
  chr19:32083443-32083812
  hypo
aagggaatggtgacagcttgcgcttgccggggagtcctgctgccttccgaggtgtgaagggaaggcatgcactgtgcatatgctgtaccatacagttttgcctacaactgcttgtagcttcattgtagctgtgaatgctccgttcctctccttttcacccctgaagattcgcgaacatgcaggattgagctgtgcgaggcatagcattccccacatggtagacgaaggcggatgtgggtctgatggctctactgccgtccacccgggaggatggacgtgtgttccgggatatcagagcttgcggctgaccagcccacatgtccatgcagccctcccgctggctgtgtcgacattttgggtgtcactgaa

SEQ ID NO: 273821 - DNA, 42 bp, Homo sapiens
  chr19:32087789-32087831
  hypo
acattcccatgctggcttcacgtgtgttgccatttcatgtcc

SEQ ID NO: 273822 - DNA, 189 bp, Homo sapiens
  chr19:32088784-32088973
  hypo
cactcccatgtcaccaggggcgaggctggccttctggagtctgcagctctgtgagtccccaacagggtggggcttatttagcgatggcatcaggctgcaatgtaggctgaaacacacctaccacacactgcgtgtgcagaatgctttcacacgcattaattagtatgcgagctctcctctgccctggag

SEQ ID NO: 273823 - DNA, 121 bp, Homo sapiens
  chr19:32198252-32198373
  hypo
gcttctctgcccatcgagctggctggcacttcgaattaccctcaagagtccatgggcatcacgtcacatttgcgtgcccaatatcatacgtgacgagtcgtgccaccgccagggcctttaa

SEQ ID NO: 273824 - DNA, 148 bp, Homo sapiens
  chr19:32366589-32366737
  hypo
gcttcctgctcacagagaggcgaggctggctcaggccccgacggtgacgctgacgacggcgacagggaggtgtgcgaagccgggcgcgagctgtgccagctctcgctaatcctctgcagtatggttcgctgctaatttgtcatggcac

SEQ ID NO: 273825 - DNA, 205 bp, Homo sapiens
  chr19:32374296-32374501
  hypo
cccttacctatgaccagcagcgatgttttttcagtgattccgcaagagtcaaaaacccaacaaagcgcatcgccggcgctgtaaagggagcatgctgccggtgtctgtgaccactgtatgcaaagcttggcattagtcacagccgggccggctgtgacaggcctgaagtgagggagattaatgcgaggctgggacactttattat

SEQ ID NO: 273826 - DNA, 81 bp, Homo sapiens
  chr19:32380867-32380948
  hypo
caggtcctcaatgagtgttgcgggtggaagcgtcgcaggccagctgagcccaaaaatggggcttagcccacagggttctcg

SEQ ID NO: 273827 - DNA, 137 bp, Homo sapiens
  chr19:32438836-32438973
  hypo
tggtgtgccagccgcgctgcacattgacccaaggcagagctcgtggagaaatgatgtcctcttaagcagactcctggagagatggtccgcatttctcctgacaaattagaagcgccgtgaatgcaaccattcctcag

SEQ ID NO: 273828 - DNA, 249 bp, Homo sapiens
  chr19:32521093-32521342
  hypo
tccagtgcagtccccgacccagacccaggcctcccgagaagccggtgaggtgaagtcattggagggagcctcatccctgatgggtgggcacagggcctgtctgacttgcccactcatatcactcagaaatctgaggaggtggtgcttgaggggcagtagaatgaggctccaagaagtcactctcatctctgtgggccacgccagagttcaagactggatcttcgctccaatggccgagggatctctgga

SEQ ID NO: 273829 - DNA, 118 bp, Homo sapiens
  chr19:32537990-32538108
  hypo
aaaaataaatcactgggaaccgcagcagggtgagaacccagacctcagcaagtcccaatttcagaggtgacagcatctttaaatgccgcaggagtgcgctcctagctgaggcaggtgt

SEQ ID NO: 273830 - DNA, 74 bp, Homo sapiens; identical to SEQ ID NO: 219380
  chr19:32672523-32672597
  hypo

SEQ ID NO: 273831 - DNA, 345 bp, Homo sapiens
  chr19:32718520-32718865
  hypo
gctatgctagggaggggttccgggagggccactcagaggaggtgacggtgaggagacctgagtgtggtgagcagcgagtcacctgtgaatctgggacaagcatttccccgcagagggaacagccgaggcgaaggcccgaggaggggaggggcttggtgtgcctgcggaacagttgcgcggagccccgtgtggctgaaaaggagaaggcgaaggagaggcgtaggggaggggacaggtggcaagagcccagagaaccttctggggcacaggagggagtgtggattttcttttgtgtatgatgggagccgttggagactttgtgcgtgagagcgacgagacctgatt

SEQ ID NO: 273832 - DNA, 137 bp, Homo sapiens
  chr19:32835111-32835248
  hypo
tctcttaccttttatcgaaaaaaaaattactcaacattttattttttcacagctatttggtctaattggcaaaggattctgtggaatagcagaattctaactttgcagccgggcgcggtggctcacgccggtaaccc

SEQ ID NO: 273833 - DNA, 290 bp, Homo sapiens; identical to SEQ ID NO: 219381
  chr19:32845482-32845772
  hypo

SEQ ID NO: 273834 - DNA, 66 bp, Homo sapiens
  chr19:32849470-32849536
  hypo
atgtcagcagataccgcaggagctcaaatagagccgcaagcaaagccctttcgtatggtgttactc

SEQ ID NO: 273835 - DNA, 192 bp, Homo sapiens; identical to SEQ ID NO: 219382
  chr19:32850567-32850759
  hypo

SEQ ID NO: 273836 - DNA, 576 bp, Homo sapiens
  chr19:32898172-32898748
  hypo
cccccacccattactcccaccgacgctccctgggatagcagctgccctgattggcacacccccgcagtcatcaccactgaggcgtattcctgaagctgccagtgtgaattgttttatagaacactggtgttaaaattcaggtacctgagacaaaacaatattttaattcttcaaaatccggttgtcaacacatttactatggagtatctcccacgtggccacttctgtgggaggtactgaagacctactaccgcctatggaagtagaaaataatatacaactgtgtagttacgtgacgcattgcgtggtaactgctatggctcagggagggagaagatcagccggaactggaatgtcccaagatgttctggaagaaaagcagtggctcgtttgtgttgcttacctgtattcctgactcctggcagggcctgctgtagagcacatgcttcatgaataaatatgattgagttgaataaatatttgaattgtgttttgagtgtagctttgaaggccagcaacgatttagatggcaagatcgagggcaggctgggcacaatggctcattcatgtaatcct

SEQ ID NO: 273837 - DNA, 45 bp, Homo sapiens
  chr19:33143457-33143502
  hypo
gctacaagagcgaaactccatcccgggggtagggtgtggggttgg

SEQ ID NO: 273838 - DNA, 96 bp, Homo sapiens
  chr19:33209600-33209696
  hypo
aactttacttcaccgtcttcatttacatcgggcgtaccccaagcagaaggtatttaaattcacagaaattctgccgggcctttgagtccctgtgtt

SEQ ID NO: 273839 - DNA, 213 bp, Homo sapiens
  chr19:33211877-33212090
  hypo
caagcgacactggcgtccccagggccccgctctccgtactccacggggcccttaggctcggcgcctggacagggtcgggtggcccgggcagccccagcccatgggtccgggcttccctcatgcccccagtctctgttgccctatccgctcaccgcgtgggctctgcgtgggcgttgttctagtcctcggggaagggacgcccgcctggaccct

SEQ ID NO: 273840 - DNA, 189 bp, Homo sapiens
  chr19:33304762-33304951
  hypo
gaataactgctgcatagaaacggtgacttatttggggatttgttagggagaggtgtttttcatgttattgggtcatgaattgggttgtgggtttagtttttgttcaggggaatattttacattgtaaccccagcgcacacgtgcattgtgtatgcgaggcacacgcacgcacacacatgcagccgaaca

SEQ ID NO: 273841 - DNA, 507 bp, Homo sapiens
  chr19:33355051-33355558
  hypo
cccacatagaagggcgcacacacatactcggagaagctgaggcagatgatggcgaaggacgtgggcttaatgacgatcaggctggcccaggagaagaggtaggcggggatgggcccgtaggcctccatcaggtagggatactctccccctgacttggtgatcattgtgccaagctccgcaaagcacagggcacctggaacacagagaggaagggcccacaggccccttgtgaggcactgccccggccccagggagccttcctcccaccggaggctgcgctcgtatggaggggcccaccgtggtccgccctcgctggacggccctgagctccagcgttggacattcagtccagcctgatttacacctgtttgccatacatgtgccaagagggatactggcagggtgagggctggcacaggtagcagctgcctggcgtgcccctgcatgcttccggggctgcaacaggctcccaagtctctttacccagcgtcgcgaggaccccgcaag

SEQ ID NO: 273842 - DNA, 150 bp, Homo sapiens
  chr19:33365575-33365725
  hypo
tagagtgctgacacacgggtggactgtggaacaaggggatggcggcccagagcacccagcacagacgcggggagccagcctgggtcctcagtagcaggtggcatgcccagttccaggaagcagcctcatgcgctccgtaggtttgaagtc

SEQ ID NO: 273843 - DNA, 145 bp, Homo sapiens
  chr19:33367850-33367995
  hypo
aacagtggttctctaggtcacgatggcgggagcagcattcctgctgacaagcactcctgccccgcgcagccacgctgggctgccgccgcctgtcagcctgtctacaggaggctgcagagcggccgtaaatgcctttgaaatagca

SEQ ID NO: 273844 - DNA, 210 bp, Homo sapiens
  chr19:33415226-33415436
  hypo
atgagaaagtgtcttactagcgtcatcagtctgcagagcttcactggccattagccacaacacgaggtctgtcgctgggccggttttgatgcctaacagtctatgtctgtttcagctcccaacagtctgtgtgtgtgacacttcagctgagcctcctccatcagggcttttccagcttccgtgtcctgcgctgtcctttggtgagaatct

SEQ ID NO: 273845 - DNA, 96 bp, Homo sapiens
  chr19:33467959-33468055
  hypo
aaaaaaaaaaaaaaagaaaaaggattttctccagcagcaaccagtgaaagatgaggcgaggcttgaatggagcccgtgggtcgtcctgccttagcg

SEQ ID NO: 273846 - DNA, 120 bp, Homo sapiens
  chr19:33539243-33539363
  hypo
gagccatggcatccagccctggaatggattttaaaattaatatcgtttaaagcattaaacggtttccaattttgtctttcttcagatttaagattaaaatatctttggccgggcatagta

SEQ ID NO: 273847 - DNA, 111 bp, Homo sapiens
  chr19:33540577-33540688
  hypo
gcaagtactgagtgaacccccgtgtcatcaccagctttacaggcaactcctggggtcggcccgcttatgtggaccctggtacagcatctcggatcccatggttctgcagca

SEQ ID NO: 273848 - DNA, 138 bp, Homo sapiens
  chr19:33549077-33549215
  hypo
agccaagaggctgattccttttcaagcatggccggagccatcccaacaaagcaccaattcccagcactgctcagcactccaggaaacgagacctgctgggaactgctgccaaagaaactgtatcgagtcagggtctgg

SEQ ID NO: 273849 - DNA, 180 bp, Homo sapiens
  chr19:33556899-33557079
  hypo
tctgcccacctcggcctgcctcccaaagtgctgggattacagcttttgttttgttttgttttgttttgtttttaaatagatgcggggtctcaccatgatatcaaggctggcctcgaactcccgaccttaagtgatcctcactcgtctcgctctgtcgcccaggctgaagtgcaatggcgc

SEQ ID NO: 273850 - DNA, 37 bp, Homo sapiens
  chr19:33557319-33557356
  hypo
gagcacggttcttaaccacctccgttttctaggctgc

SEQ ID NO: 273851 - DNA, 98 bp, Homo sapiens
  chr19:33557645-33557743
  hypo
cccagcaaagggaccgccctcagcggtcgcgatagatgccacaggtggaacagaatgcaatgtgctgcaaaaccagcccagcgttaacatatctttaa

SEQ ID NO: 273852 - DNA, 94 bp, Homo sapiens; identical to SEQ ID NO: 219390
  chr19:33585139-33585233
  hypo

SEQ ID NO: 273853 - DNA, 119 bp, Homo sapiens; identical to SEQ ID NO: 219391
  chr19:33693687-33693806
  hypo

SEQ ID NO: 273854 - DNA, 94 bp, Homo sapiens
  chr19:33696620-33696714
  hypo
cgagcgcggggaccgcctgctgcagacgctgtcctaccgcagcaaccaccggcccgtgagcctggaggccgcccagggccgcctcactgtggcc

SEQ ID NO: 273855 - DNA, 37 bp, Homo sapiens
  chr19:33697260-33697297
  hypo
gaatacaggtgggcgctgtgcccgcagccaggggacc

SEQ ID NO: 273856 - DNA, 217 bp, Homo sapiens
  chr19:33697590-33697807
  hypo
gggcctcattccacccgtggaggactttcctgtctacagtgcgtcccaggtgagcccccggagggcgtgaggcccctccggggccacttgggacagtgtgcggaggaggctggtccaggggtcacaggagcaggaggcaaggcctgcgcagggtgacctgagggcccatggccaggtggggggggtggacaaggtggtctctcgggtctcaggtccc

SEQ ID NO: 273857 - DNA, 94 bp, Homo sapiens; identical to SEQ ID NO: 219392
  chr19:33698374-33698468
  hypo

SEQ ID NO: 273858 - DNA, 383 bp, Homo sapiens; identical to SEQ ID NO: 219393
  chr19:33701377-33701760
  hypo

SEQ ID NO: 273859 - DNA, 165 bp, Homo sapiens
  chr19:33702314-33702479
  hypo
ctcaccacagccaccgcattggaggagagcagctcctggggggacatggccgtgaagtaggcaatgttggtgaacgtgtacacgaaggtcaccagtgggatggagatgaagatggcgcgaggtaggttcctggtgacaggcagtggagtgcgtcagcgtcagctc

SEQ ID NO: 273860 - DNA, 130 bp, Homo sapiens
  chr19:33703396-33703526
  hypo
cccttaccccgactcggccctaccttggaagatctggagaaggcccacgccgatgatgagggacaaggccagcagcttcccgcctgtgaacatgtcctggatgcgcgtggcccagcgcacactggagctg

SEQ ID NO: 273861 - DNA, 152 bp, Homo sapiens
  chr19:33710896-33711048
  hypo
cctctgagacctgagccacccgggaccccaacaccccggggtgatcggctgcggcctgggtgaagcctactcgcctcaagcgcacgggtgtcctcacatcctcacggtaagcctgtgtcaggtacctctccgggatgctgactgtgactact

SEQ ID NO: 273862 - DNA, 339 bp, Homo sapiens
  chr19:33726762-33727101
  hypo
cctttctcacagctcggtggagccgccctgccaggcccatcttggccggtgggtcggggctccgcaggccccgtgggctcagcctccccacctgcctggtgggcagggaggccttgagcctgggaaaggcgcgggcggccactgctggaggggagcgggcaccgtggggctgcgcgctgcggcgggctccccccacaggctccaagacacgtcaaaaccgggtacaaaaaattggggcaatctacgtgtttacttctaacaaatgaatgcttgtaacgtaaaaacaagactttgcacaccaccggggctgttcggatccgagaacgcatgggttcacgg

SEQ ID NO: 273863 - DNA, 656 bp, Homo sapiens
  chr19:33772442-33773098
  hypo
agttgcaggtggggcgtggaggccagctctgtgggcgctgggtccttcccctgcggccacaccgtgtgccaggaacgagagaccccctggctgtgcgttccaccctggccctccatctgagccctgggctactggggaggcagcaggagcccgggcagacggctcatctgagctcggccttctgtcagctgacaggggtcacgtgctgtctgggcttgcctggggcctgagaaatggggatgcggacagccattgtcagggctgttggggaaattcaaggaatggaagagtcagagggagttgggaggccatgtctcggtgtgtgcgggggcatcgaaagccctgctggatttgggggatcaaaggaccgccacgcatcacttgtggggtctcgggatgatgggggtcaggcctgctctttgctggggaggccagtggctagcaaggtctggggctcagtgaataaggccacgcttgcagccgcccttgtcccagtgcttggagagccaccaggcagactttatctgcatccctggaagtgacctgaagagactgccgggcactagaggggtccatgtgggacccggaacccaaaggatcaggttcaccaaagcctggacttccctggagggcccctgacccgtctcagcggccgt

SEQ ID NO: 273864 - DNA, 51 bp, Homo sapiens
  chr19:33869570-33869621
  hypo
tagaacatggaacccgcaggggtgatagcatgagagcgctggagacagggt

SEQ ID NO: 273865 - DNA, 81 bp, Homo sapiens; identical to SEQ ID NO: 219396
  chr19:33882202-33882283
  hypo

SEQ ID NO: 273866 - DNA, 169 bp, Homo sapiens
  chr19:33907910-33908079
  hypo
ccgtggagcgctcccgggcacacggcccagctcctgccctcagaagtttatcacctaacatgaagacgagtcacagtcctataaaaatgctgcagctgcccagacagcggtagaagggctgcctggcagcaagtgtcggccaagctatgtgcctcgagcatgggtgggg

SEQ ID NO: 273867 - DNA, 52 bp, Homo sapiens
  chr19:33917859-33917911
  hypo
gggcccctccaccgcgtgcggctgtgttttatggcagcgaaccggctgttag

SEQ ID NO: 273868 - DNA, 178 bp, Homo sapiens; identical to SEQ ID NO: 219397
  chr19:33926621-33926799
  hypo

SEQ ID NO: 273869 - DNA, 183 bp, Homo sapiens; identical to SEQ ID NO: 219398
  chr19:33939089-33939272
  hypo

SEQ ID NO: 273870 - DNA, 32 bp, Homo sapiens
  chr19:33953394-33953426
  hypo
cacggctgggcagccgccggaagctccccggg

SEQ ID NO: 273871 - DNA, 118 bp, Homo sapiens
  chr19:33953632-33953750
  hypo
gcagaaacaaagtccgagagtagaatggtggggcactaaaccaccctgaaaagtcatcgaaaaccattacatcaaacactctgccaagagccagggaggcgggcgcagtcagaagaaa

SEQ ID NO: 273872 - DNA, 319 bp, Homo sapiens
  chr19:33996089-33996408
  hypo
caccatccatttcccgcggcccggcctgccttcagctacaaacaatgctgcctcgccgactctcactctgctctccacagaaggcagcggcatttgctctgcggtggaagccggcagccatctgaggatgttagctggtcagagacaaaagcagacctcgccacagtgacgcaggtgcctatgcccaaagaccactcccggagcaagcttcctcacaggggccacagagggaacagcgctgcccgggaggctggagaccaggtccagtgaccaggcctgcccagggtcagtgcctcaaaccacccgggcagcagccgaa

SEQ ID NO: 273873 - DNA, 116 bp, Homo sapiens
  chr19:33997989-33998105
  hypo
ccctcccaccatacccgcatccatctctcacacaagatgtgggtatggccctgggaaggctgagcgcccctccctgcatacccagagccggggacggaatgcgttacaaaggttcc

SEQ ID NO: 273874 - DNA, 450 bp, Homo sapiens
  chr19:34000696-34001146
  hypo
ttaagtacagtgtccgccctggcaccactgagcaggcagaacagctcctcggcggtggggagtacctggaacagcaggcaccatggagggtggaggagggtgcccagcagcccgagcctctgctctatctcacaggtgagccgggagggcaggacctgcgctgcgtccagaggaaggcagcaaataacacacccagcatatcagcgatgggcctcagagaggcggttccccgatccaaacccaacccaccaccctcaggcacgcacagggccatgccacacctgtcgatgccatgcaggagtgacggcctcgcagggccaaaccctcaggcattttcacagacggagaagctagaatttcaggattaacaaactgcacttctaaacaaacaaggcccccagttgacagggctctgatgagtggaggaacaccagggttcttggtctcgag

SEQ ID NO: 273875 - DNA, 63 bp, Homo sapiens
  chr19:34158695-34158758
  hypo
ttaccttaatttgacaagtacgcaagaaataatgcaagactcgtttatgttcaggtaatgcac

SEQ ID NO: 273876 - DNA, 288 bp, Homo sapiens; identical to SEQ ID NO: 219400
  chr19:34177591-34177879
  hypo

SEQ ID NO: 273877 - DNA, 361 bp, Homo sapiens
  chr19:34263490-34263851
  hypo
cgccttccgcgacaagtttgagcaccccaacagctactatcacccggtcttcggcaaggccatcctggcccggtaccgcgccaatgcctctcgggaggccctgcggaccggctctggggtgcgttttcccgagttcgtccagtacctgctggacgtgcaccggcccgtggggatggacattcactgggaccatgtcagccggctctgcagcccctgcctcatcgactacgatttcgtaggcaagttcgagagcatggaggacgatgccaacttcttcctgagcctcatccgcgcgccgcggaacctgaccttcccccggttcaaggaccggcactcgcaggaggcgcggaccacagcgagg

SEQ ID NO: 273878 - DNA, 138 bp, Homo sapiens
  chr19:34272610-34272748
  hypo
tggagagtgaccaaggaacacggctgagggtggggggccctggcctggacccccgctgagtgcccgaagactgatggagcatgcgacctcctagcgctggctctcaggacatgaatcgggaccagaaggaggagtggg

SEQ ID NO: 273879 - DNA, 169 bp, Homo sapiens
  chr19:34302228-34302397
  hypo
ggagcaggagcagcggcgccgcagccgggcctgtgactgcctggtggtgcgcgtcacgcccgacttgggcgagcggatcgcactcagcggcgagaaggccctcatcgaggaggtcttccccgagaccggagacgtcatgtgcaactccgtcaacgccggctggaaccag

SEQ ID NO: 273880 - DNA, 511 bp, Homo sapiens
  chr19:34303757-34304268
  hypo
tcctcccagttcagcgagtatgtgctttgccgggaggagcggcggccgcagcccacccccactgctgttcgaatcaagcaggaacccctggactaggccctgcttcagtgcccacctgggcccccccagggacctggaaacagtgctggggagttctgcctgtgtatacttggccgtgggcatgagaccgagggtgaggctggagggtccaaagctggcccagcgagcaccagggtcccaggtgtcatggcaacagaacgtgggatgctggaggcatgcctgcagaaggactgttgatgcgacccaaagatacagcggtgggatctctgctgccagctctcccagcccctcagcttcgcagcctggcgcagcatcctctgaggccccggggcctgttggggcggggttggaagagccgtctgcagctacttcagaggagctgtttatccctctccacgcggggcagactctggcgggtctcctagcgtccgagagatggcttattttctac

SEQ ID NO: 273881 - DNA, 88 bp, Homo sapiens; identical to SEQ ID NO: 219403
  chr19:34421531-34421619
  hypo

SEQ ID NO: 273882 - DNA, 32 bp, Homo sapiens
  chr19:34537937-34537969
  hypo
ttctcggccgggcgcggtgactcaaagcctgt

SEQ ID NO: 273883 - DNA, 31 bp, Homo sapiens; identical to SEQ ID NO: 67308
  chr19:34538209-34538240
  hypo

SEQ ID NO: 273884 - DNA, 34 bp, Homo sapiens
  chr19:34538665-34538699
  hypo
ggtgaaattttttttttagacggagtctcggtct

SEQ ID NO: 273885 - DNA, 34 bp, Homo sapiens
  chr19:34538939-34538973
  hypo
agccaccgcgcccggcccatgggtgaaatttttt

SEQ ID NO: 273886 - DNA, 34 bp, Homo sapiens
  chr19:34603234-34603268
  hypo
accgcacccggccgctagggaacagattctaaga

SEQ ID NO: 273887 - DNA, 37 bp, Homo sapiens
  chr19:34630392-34630429
  hypo
gtgagccaccgctcccggccttctcttgaacttttct

SEQ ID NO: 273888 - DNA, 190 bp, Homo sapiens
  chr19:34846160-34846350
  hypo
gctgtgagactgtgtgaagccgtttgtgtggtctccatgtaggtgctgtgttcccggcaccgccttgctctgaacactggtaattccaggtgctgcgcttggcagaggggtctcgccaaagcgcatgtgtgtgcatgtgtgaacgtgtgtgtcctttgcatggttgggcgtgggtgccttgctagggcat

SEQ ID NO: 273889 - DNA, 89 bp, Homo sapiens; identical to SEQ ID NO: 219404
  chr19:34949546-34949635
  hypo

SEQ ID NO: 273890 - DNA, 93 bp, Homo sapiens; identical to SEQ ID NO: 219405
  chr19:34963041-34963134
  hypo

SEQ ID NO: 273891 - DNA, 49 bp, Homo sapiens
  chr19:34988798-34988847
  hypo
gattgtccagtaccgagggcagcaaaaggttgacgctgagagtgagagc

SEQ ID NO: 273892 - DNA, 42 bp, Homo sapiens
  chr19:34989429-34989471
  hypo
tggaaggttctgctgtttgccgtcttctcttttctagtgatc

SEQ ID NO: 273893 - DNA, 309 bp, Homo sapiens
  chr19:35050089-35050398
  hypo
caggccctgtcagacgctgcaagcccagctcagaagcctggcctgggaccaagttcactgcagcaggctgggcccttgcattctgagctgggtgcggatgcgctggtgctctgggaagtcaggggctttgacaactgaaggcaaaggagccgggcacctgagggggtcccgggggagggggtgccgggggaggggatccggcgtcgtcaccctccagtccttgcccacaggtcagggagcccctgccatgggggaaggaggctgtttcttttgtaaactggtggaggcgtgcctcgcccctgggcctga

SEQ ID NO: 273894 - DNA, 61 bp, Homo sapiens
  chr19:35082486-35082547
  hypo
cacctttctgcaaggtcctgcgtgacctggcacttgcctcgttttctgacgtgacctcctt

SEQ ID NO: 273895 - DNA, 38 bp, Homo sapiens
  chr19:35178755-35178793
  hypo
aaggccgtgtggcccgtatggcccgagaggtgctgagg

SEQ ID NO: 273896 - DNA, 207 bp, Homo sapiens
  chr19:35298169-35298376
  hypo
aagatttgaaagtaggagtccggcgggtgagggcccaagggacgcaccaccaacttgaagccaccgtgatgcgagcctgtgggtgaatggctccagaaactgcggtgactaggatggggacagccacatggcagcctccagcccagcactgacacgagatcacaatgggtggcaccctagcctagcgtcagagcctcagtcttacct

SEQ ID NO: 273897 - DNA, 90 bp, Homo sapiens
  chr19:35323413-35323503
  hypo
tgatctggtgtcctctgtggcggctgcctgaaaagaagaggccgagggttctttgtcctatgtctctccgaatcttaatacctgccctgc

SEQ ID NO: 273898 - DNA, 45 bp, Homo sapiens
  chr19:35324046-35324091
  hypo
tctcctctactccaaggattcgccggctcacaattgctcttcata

SEQ ID NO: 273899 - DNA, 80 bp, Homo sapiens
  chr19:35367988-35368068
  hypo
gtccttgggtttggtgcacacgaacaaatgacagttaacaatttaaaccaaataggccgggcgcggcgactcacgcctgt

SEQ ID NO: 273900 - DNA, 120 bp, Homo sapiens
  chr19:35416319-35416439
  hypo
ctccgcagcaccggctctccttggactgccccagccaaactccgcgtccttctggtgggtggcctgcccgcgtgccagcgtctgtcatgtcttcttccgccaacatgttcctctggatgt

SEQ ID NO: 273901 - DNA, 34 bp, Homo sapiens
  chr19:35497192-35497226
  hypo
tccagcctgggtgacagcgcgactctttgtctcc

SEQ ID NO: 273902 - DNA, 139 bp, Homo sapiens; identical to SEQ ID NO: 219409
  chr19:35497760-35497899
  hypo

SEQ ID NO: 273903 - DNA, 35 bp, Homo sapiens
  chr19:35512756-35512791
  hypo
ttcacacctcgggtacgttccgttggggccgggtt

SEQ ID NO: 273904 - DNA, 88 bp, Homo sapiens
  chr19:35523454-35523542
  hypo
gtggaggtggactcggagaccgaggccgtgtatgggatgaccttcaaaattctttgcatctcctgcaagcgccgcagcgagaccaacg

SEQ ID NO: 273905 - DNA, 462 bp, Homo sapiens
  chr19:35551108-35551570
  hypo
cccttggggaggccacgtcccctcaagctccccaggatggggccatgtactttcagaccccctagggcagggccaagcctgggctctggggacctgggctccagtcccctgtcgccgccccctgctgacccttgtcccacagactgtggccgcaggaagctgcccgtggaccgcatcgtgggaggccgggacaccagcttgggccggtggccgtggcaagtcagccttcgctatgatggagcacacctctgtgggggatccctgctctccggggactgggtgctgacagccgcccactgcttcccggagtgagtgccccccaatggcgctgatgatggggaggcagaggagcggagagacagtggggaggagggcggattgtgcccaggcaggtggccaccctccacccctttccctggtaggcggaaccgggtcctgtcccgatggcgagtgtttgccggt

SEQ ID NO: 273906 - DNA, 111 bp, Homo sapiens
  chr19:35589857-35589968
  hypo
aactctgcgccctgcgctgcgcgttgcctgcccgcgtggcgagccagcctgggatgcagttacgtgctccttccctttcaccgcccccagctccaacgatggcctccccac

SEQ ID NO: 273907 - DNA, 32 bp, Homo sapiens; identical to SEQ ID NO: 219412
  chr19:35591100-35591132
  hypo

SEQ ID NO: 273908 - DNA, 250 bp, Homo sapiens
  chr19:35597196-35597446
  hypo
cctagctcttgtgccgagcctgccctgcccgacagctgcctgacaccatgccaggatggctgccagtgtgacccaggctttgtgctcagtggcatggactgcgtgcccccaatccagtgcagctgctccatggggggcaggtaccaccacccggctggggaggccttctggactggggagcgctgtgagcaattctgccactgccaggcctccacccacgccgtgtgctgctccccgtcctcctgtgggc

SEQ ID NO: 273909 - DNA, 35 bp, Homo sapiens
  chr19:35599309-35599344
  hypo
aaaaaaaaaaaaaagaatggcgttcattcatccac

SEQ ID NO: 273910 - DNA, 97 bp, Homo sapiens
  chr19:35599789-35599886
  hypo
ggtcagagaggtgacggggaccagatggtgggggacttatggggctagtgaggacttcgcttttgcctggagcgaggtgcgccgaggacagggctct

SEQ ID NO: 273911 - DNA, 93 bp, Homo sapiens
  chr19:35608882-35608975
  hypo
ctggggggttaagtgagtgagaacacggcaaggtcagtgtgcactccagggcaaggtggaggaagtgccagctctcgctatcaaaattataac

SEQ ID NO: 273912 - DNA, 87 bp, Homo sapiens
  chr19:35613703-35613790
  hypo
gctggggttctgtgcgccatgggcatcatcatcgtcatgagtgagtggaggagctcgggggagcaggcgggccggggctggggctcc

SEQ ID NO: 273913 - DNA, 115 bp, Homo sapiens
  chr19:35615955-35616070
  hypo
ggcttaaggcctagacgtgtggctgatgaacgtggcccacggtcagcagctcacaggcgggccatcaccccaagtagggccaggagccagccaaggggccgtccaggggccccag

SEQ ID NO: 273914 - DNA, 406 bp, Homo sapiens
  chr19:35616100-35616506
  hypo
gcactgaggtcgatctcgtgatgctggtagatctgtgtggggcccttaaagcaagcagcaaagaggaagcgtctgccggccatagtgatgtgggcaaaggcacggggggccaccagggccggaggccccagctcctgcagtggctccaggagccccttgtcaggctcaaggcggaggacctggctgaaggcgaagtcgctgcctaggatggccagctggtccctggcgatgagcagtggctggaagacgtgggcaccgcgcgagggaagttgctgcagcagacgaaacatggagccgtcccagcgcatgacctgtgggggtgtggccagtgagggcctggggtcccgggggtctctgggggccgtggaacagcttggaagcagaagcctgtcggtcccaaaactcc

SEQ ID NO: 273915 - DNA, 422 bp, Homo sapiens; identical to SEQ ID NO: 219413
  chr19:35617132-35617554
  hypo

SEQ ID NO: 273916 - DNA, 115 bp, Homo sapiens
  chr19:35619189-35619304
  hypo
ggctgtaatatttcactctgcgtgccaggccctgtttccaggtgccagcgttgaagcaatgagccaaactacatataatgcccacctaaagggcgaatcttttttaaatggctat

SEQ ID NO: 273917 - DNA, 61 bp, Homo sapiens
  chr19:35621941-35622002
  hypo
attgcacctgcagttcttagcgcaatacttggcacttaacgaagaatttttaaattggttg

SEQ ID NO: 273918 - DNA, 41 bp, Homo sapiens
  chr19:35677474-35677515
  hypo
gattacaggtgtgagccaccgtgcccagaccaattttaaaa

SEQ ID NO: 273919 - DNA, 137 bp, Homo sapiens
  chr19:35793376-35793513
  hypo
gggacaatggtggccgtagagggggagacggtctctatcttgtgctccacacagagcaacccggaccctattctcaccatcttcaaggagaagcagatcctgtccacggtcatctacgagagcgagctgcagctgga

SEQ ID NO: 273920 - DNA, 201 bp, Homo sapiens
  chr19:35797931-35798132
  hypo
cggcagggtgtcggcgttccgccgacatccaggtcgaacactttgtcaccagagcaccagtggggctgtcttgagtggaagtgctttgaaaaagttttatgtctgtcggttcaggttcgctgttattaatgtactccgtggcgtgttagctggttaacgctatagcaagcatattgcagctctgcccgaacaggacttttt

SEQ ID NO: 273921 - DNA, 36 bp, Homo sapiens
  chr19:35835485-35835521
  hypo
tcacaggctctgggcgtgccacgtctgtgggaaaag

SEQ ID NO: 273922 - DNA, 58 bp, Homo sapiens
  chr19:35835740-35835798
  hypo
agaccatcggcaggcgagtggctgtgggactcgggtcctgcctcgccatcctcatcct

SEQ ID NO: 273923 - DNA, 184 bp, Homo sapiens; identical to SEQ ID NO: 219415
  chr19:35842417-35842601
  hypo

SEQ ID NO: 273924 - DNA, 71 bp, Homo sapiens
  chr19:35843099-35843170
  hypo
cacaggcggaagctgcgggccgcctgggtggccggcggggccctcctcacgctgctgctctgcgtaggacc

SEQ ID NO: 273925 - DNA, 253 bp, Homo sapiens
  chr19:35843200-35843453
  hypo
gtaccccaatctaggaggctcctggcggaagctggggctcatcacgggtgcctggagtgtggtgcttaatccgctggtgaccggttacttgggaaggggtcctggcctgaagacagtgtgtgcggcaagaacgcaagggggcaagtcccagaagtaacgccactgctcgggggaaggagcatggggcaggagggcccggctgcttctccaggcccctgcggggggctgcttcggaggaactgcagggcagcct

SEQ ID NO: 273926 - DNA, 438 bp, Homo sapiens
  chr19:35940916-35941354
  hypo
gcgggcatcagcatcgagcgctacctgggagtggctttccccgtgcagtacaagctctcccgccggcctctgtatggagtgattgcagctctggtggcctgggttatgtcctttggtcactgcaccatcgtgatcatcgttcaatacttgaacacgactgagcaggtcagaagtggcaatgaaattacctgctacgagaacttcaccgataaccagttggacgtggtgctgcccgtgcggctggagctgtgcctggtgctcttcttcatccccatggcagtcaccatcttctgctactggcgttttgtgtggatcatgctctcccagccccttgtgggggcccagaggcggcgccgagccgtggggctggctgtggtgacgctgctcaatttcctggtgtgcttcggaccttacaacgtgtcccacctggtggggtat

SEQ ID NO: 273927 - DNA, 96 bp, Homo sapiens; identical to SEQ ID NO: 219416
  chr19:35983448-35983544
  hypo

SEQ ID NO: 273928 - DNA, 80 bp, Homo sapiens
  chr19:35991456-35991536
  hypo
ttctgcagtgatgacgcgtccgcaccctgaaaggaagaaggggccacagttcgtgcctccgcagtcgtgcgggcattgcc

SEQ ID NO: 273929 - DNA, 185 bp, Homo sapiens; identical to SEQ ID NO: 219417
  chr19:36041161-36041346
  hypo

SEQ ID NO: 273930 - DNA, 512 bp, Homo sapiens
  chr19:36042035-36042547
  hypo
aggccattaggaattggggacgtgatggaaatcaggatactgtgggtcaaagtaggtcagatgtcagcagcagcagggaggtgttctacacactgaacactggagtggcccgggcctctcagcaccacccctttagtgaaatgtggagggggccgtggggggagttattggccagttagaaaggtttttttggcatgtcaccatctggcactggcacccgctggcatttgccggctgttctaaaccacagtcaggatctgatgggagttgggaccaggggttggagggcaggaagagggccagccagggacacctgaagaagccttgctggaaggcagagagacggcgcgtcttgcggatgaggacatcggcgatctggcacacctcaatgctgatgaagaacacggtgtagcaggtgtactgctggtacaggcgctgcccgaatgtctgcaggccaggggcaaacggaaacagcctgagtccagcctgagtcccggcggagagcctctgca

SEQ ID NO: 273931 - DNA, 34 bp, Homo sapiens
  chr19:36115285-36115319
  hypo
catgagccaccgcgcctgaccacattgccatatc

SEQ ID NO: 273932 - DNA, 193 bp, Homo sapiens
  chr19:36156235-36156428
  hypo
ggcccctggggacacgcgctggctcagtccccacctccgccagggaagcggtctgatgatacccatttcgcagatgggcaaatccacaagccaagtcgtgccgcccagaagaggcagaaccgggatttgaacctaggtttctcattctgcacctgaagaaataaatgtctggtccatgcgtgtgttggggggc

SEQ ID NO: 273933 - DNA, 76 bp, Homo sapiens
  chr19:36157074-36157150
  hypo
ttggatcttgctcctattcccaggaaggcccatgtcctagcaagagagacaccaggtggtgcgcacgcccctccac

SEQ ID NO: 273934 - DNA, 229 bp, Homo sapiens
  chr19:36157519-36157748
  hypo
gtgactgccccaccggagcccgggtgtcctcttgtgcaaaatgcctccccaccagggctgtgggtacatcagtaccagcctgggccccgcagagagctggagcaacccctcgaagccagggtgtggctcagagatggggggtccggctggccctttacgctcctggcctcatccctgctcatgtgtcccaggatgatggcgtctgcggcagcagcggaggccgagaagg

SEQ ID NO: 273935 - DNA, 120 bp, Homo sapiens; identical to SEQ ID NO: 219420
  chr19:36167374-36167494
  hypo

SEQ ID NO: 273936 - DNA, 78 bp, Homo sapiens
  chr19:36172746-36172824
  hypo
ggcgtgagccaccgcgcccggcctgtattttttataaaaatacaaaaaccgttctgcgcctggtagaacacttcttta

SEQ ID NO: 273937 - DNA, 88 bp, Homo sapiens
  chr19:36199997-36200085
  hypo
aggtgtgagccactgcgcctggcgaaagagtaaacatacttaaagttcatgtaagatttggataatcgctcttaatctatataaaatg

SEQ ID NO: 273938 - DNA, 131 bp, Homo sapiens
  chr19:36210797-36210928
  hypo
ggaaggcacagaacggatggtgcaggcactgactgaacttctccggcgggcccaggcaccccaagcaccccggagccgggcatgtgagccctccaccccccggcggtctcggggacggcccccaggacggc

SEQ ID NO: 273939 - DNA, 109 bp, Homo sapiens
  chr19:36220088-36220197
  hypo
gaacgagtggacacacgtcaactgtgccatctggtcggcggaagtcttcgaggagaacgacggctccctcaagaatgtgcatgctgctgtggcccgagggaggcagatg

SEQ ID NO: 273940 - DNA, 551 bp, Homo sapiens
  chr19:36221473-36222024
  hypo
gatctctcggactgcgagggacggctcttccccattggctaccagtgagcggtcggggtgatccatggggccaggggactccatagctggatcccatttcccaagcatcctaaccgtcttatcccacatgccaggtgctcccgtctgtactggagcacagtggatgctcggaggcgctgctggtatcggtgccgaattctggagtatcggccatgggggccgagggaagagccagctcacctggaggctgcagaggagaaccagaccattgtgcacagccccgccccttcctcaggtgtggctttggctctgtcttcttcctgaataccgctctccctaaacaaacctacagatctctgttccccgctcccttttggaaagtccaggaggcttgcttttgcttcagttgctgtaatgtaacggcagctcgcttactgccatgccttgtgtgccaggggctgtgcccggcttttcatgggaagtgaggtggggagagcggcacgctgcctacttgaggtggggtactggcttttggacgactgcagggagta

SEQ ID NO: 273941 - DNA, 255 bp, Homo sapiens
  chr19:36222351-36222606
  hypo
agggtacacccatcccgtctggaaaccagggagttttgggtggaggagggagatcagtttgcagaggttgggtggagccaggtaatggagagcctccgggccggggcgggcgggagcgtctgatgtggcttggatgcaccaggcaagtaagaaagtggtaggactggccgtgctggagggagggcagttccccatggcgtgcaaagcctgcagcagaggcagagaggagatggcaaggagcgagtggggagaggc

SEQ ID NO: 273942 - DNA, 139 bp, Homo sapiens
  chr19:36229127-36229266
  hypo
aagcgagcctgtccgcggggacagagcacctgatctccccacctcatccctgcagggcatcgggtgctatatgttccgcatggatgactttgatgtagtggacgccacgatgcatggcaatgccgcccgcttcatcaac

SEQ ID NO: 273943 - DNA, 33 bp, Homo sapiens
  chr19:36260605-36260638
  hypo
ccaggaaatcctgccatctccgcctttatttta

SEQ ID NO: 273944 - DNA, 77 bp, Homo sapiens
  chr19:36262374-36262451
  hypo
tcatggtaggatctaagtggcggatatgcgggtgtccactgtaaaatttttcaactttgctgtaatttagaaacttt

SEQ ID NO: 273945 - DNA, 40 bp, Homo sapiens
  chr19:36275619-36275659
  hypo
cagagccgctgccctcgctggctgccgggagctgcctcct

SEQ ID NO: 273946 - DNA, 79 bp, Homo sapiens; identical to SEQ ID NO: 219423
  chr19:36388611-36388690
  hypo

SEQ ID NO: 273947 - DNA, 215 bp, Homo sapiens; identical to SEQ ID NO: 219424
  chr19:36435529-36435744
  hypo

SEQ ID NO: 273948 - DNA, 82 bp, Homo sapiens
  chr19:36500940-36501022
  hypo
atccaggagcatgcagggctcgagggcaagcctcaaggagtgggtcggcgtgttcaggggcgtttctgtgaacactggggtg

SEQ ID NO: 273949 - DNA, 320 bp, Homo sapiens
  chr19:36510004-36510324
  hypo
gtcagcagcatcagaactgccgagtggacacccagccacacccctcttgggcccgaggtcggactaaccctgcttgggagggcagatgaagtaccgaacgcccccaacgctgccatcgttcttgccctcaggttcgtccagctccacgcccacccactggccgctggcaaactccgtggtcccacagaaccgcagtgtgcccgtctggggagagaagggaggcgatggctaaggaaggaatgctgggaggccaacgtggagtgcccacacacgggcagcaaggtgggttgcatgaggccgccctgggcccaaaccccagg

SEQ ID NO: 273950 - DNA, 36 bp, Homo sapiens
  chr19:36562069-36562105
  hypo
cactccagcctgggcgcaacaaaaaactctatctca

SEQ ID NO: 273951 - DNA, 636 bp, Homo sapiens
  chr19:36592529-36593165
  hypo
aggctgtgggctcctgaccccgactctgtccttcagactcgggggagtcagaggccgacctggagtgcagcttcgcagccatccactccccagctccgcctcctgaccctgcccctcggtttgccacgtcgctgccccatttcccaggtaagcaggggccagacacgcaggggactcgctgctcgggcctggcttagggccagtcacaatgtctaagcacaggccctgcacttggagcccactgagcctggaagacggggatccctgcttctcagcctgcgggcaacagggcagggatgggtggggcccgctttctccatttcaggtggcgtctgctgtgactcatggtgttggctcctcttgtccctcccctccttccctgtcaggatgcgcaggtcccacagaagatgagctgtccctgcccgagggacccagcgtccccagcagctccctaccccagactccggagcaggagaagttcctccgccaccactttgagacactgactgagtccccctgcagaggtagggccctgcctcacccacacctgccgaggccgtctgtgcagcctgggcacagcattggcgtccctggagttggctccccagcagggccaggagggtgagtggagagcaa

SEQ ID NO: 273952 - DNA, 349 bp, Homo sapiens
  chr19:36604429-36604778
  hypo
aggtgcatggacagccggccagctacgcttaccgtgagcgccgcgagaagctgcacgtgtgcgaggactgcggcttcaccagctcccggcccgacacctacgcacagcaccgcgccctgcaccgcgcagcctgatacggtgtgccagcgtcctccccacgaggcaaataaacacagaaaactcacgcatggaatctggtgtttattacactcgggggagagaggaggtcactcggtccagcggtggccgcagtgtggggctgtgcacacgtagtaaaggcgcatggcgtcctggcagaaatgatgcatggttaggaaggatttggacccagcagcgccttaccccaaaa

SEQ ID NO: 273953 - DNA, 80 bp, Homo sapiens; identical to SEQ ID NO: 219425
  chr19:36632702-36632782
  hypo

SEQ ID NO: 273954 - DNA, 354 bp, Homo sapiens
  chr19:36641049-36641403
  hypo
atgcctccatgccccgagggccctctctcagttctgggaggatgactccagtccctgcacgccctggcacacccttcacggttgctacccaggcggccaagctccagaccgtgccagacccaggtgccccagtgcctttgtctatattctgctcccagcctgccaggcccaggaggaaataaacatgccccagttgctgatctctatgggatctgcctcctgatctgacccgagagaggaggggtggctcgggctctgggtcctggggagcaggggaggtagtagattcgtccccagggctggatccgtggatttcctcgtctttttctcgtcggcattttttgtctcatcctg

SEQ ID NO: 273955 - DNA, 35 bp, Homo sapiens
  chr19:36645415-36645450
  hypo
gggccaggcactgtggctcacgccagtaattccaa

SEQ ID NO: 273956 - DNA, 32 bp, Homo sapiens
  chr19:36707255-36707287
  hypo
atcttggtcgggtgcggtggctcatgcctgta

SEQ ID NO: 273957 - DNA, 31 bp, Homo sapiens
  chr19:36707527-36707558
  hypo
ccagcctggacaagagcgagattccgtctca

SEQ ID NO: 273958 - DNA, 175 bp, Homo sapiens
  chr19:36746788-36746963
  hypo
tcttctggtgagtctctcctcgcatctctgtctgggtcatgtggccgggtgtcattcgttttccaggcggttacagtttgggttcgtgaccggtgggcaacgtggggagctacatgagacacggcggggattaaatcagctcccaatcatgagcggcctcattgctagaatcaag

SEQ ID NO: 273959 - DNA, 44 bp, Homo sapiens
  chr19:36750231-36750275
  hypo
ttcctgcacaggccctgtctcgcaggttttcaggtgtgcttggc

SEQ ID NO: 273960 - DNA, 186 bp, Homo sapiens
  chr19:36853754-36853940
  hypo
aattcatcacaaactcgggttttattataaacactttctcttttataaccaattctttagtaaactttcaaaaattcgttcgatggcagtctacatttttaatatattagattcttttttctttagatattttaattcaataaaatctcgaaagtcttccccaattctcaacgtctacaatatcta

SEQ ID NO: 273961 - DNA, 32 bp, Homo sapiens; identical to SEQ ID NO: 219427
  chr19:36870583-36870615
  hypo

SEQ ID NO: 273962 - DNA, 93 bp, Homo sapiens
  chr19:36928986-36929079
  hypo
aaatatattagtaatcacatcgaataaaagtgaatataatactttacttaaaagacaaaggtggggccgggcgcggtggctcacgcctgtaat

SEQ ID NO: 273963 - DNA, 77 bp, Homo sapiens
  chr19:37103348-37103425
  hypo
ttatttttcttcagtaaacacgtagcagcgatatcgctgattcataaggcagatgcgtatttcatttctttagaaac

SEQ ID NO: 273964 - DNA, 146 bp, Homo sapiens
  chr19:37114162-37114308
  hypo
taacagtgtgtaaacgtatactgagaagattttagagaaaatcgtcaataaaatgttgacctccaaaaacatgagttttagttgggaaagcaatactgtattatcaaattgaggactttacatagaatgatcgtgttaaaatctta

SEQ ID NO: 273965 - DNA, 379 bp, Homo sapiens
  chr19:37159074-37159453
  hypo
cctgggctcaagcgatcctcccgtctcagtggccaaagtattggatgacaggtgtgagccaccgcgctgggtggtgaaacggttttgaggctttttgagaatggctgttctatatgcccgcgtggggctcatgcggcgagcgccgccactcccgcagtggcccctgtgggggtgatacgtgatgtggcttaaatgtgagaggccacctggacccgtgtgattgccacgtttgcaggagcgcagccacgtgcacagggatcttgtgacattctgtgtgaggctttttgcgctgggtccacccatgattagaggactagtgtgactgtggcggcccctgagaagggaagaagctggttgcgaccaggaaggtctgagatgg

SEQ ID NO: 273966 - DNA, 36 bp, Homo sapiens
  chr19:37179405-37179441
  hypo
agggtaagattgggcccatgcgggccgggcgcggtg

SEQ ID NO: 273967 - DNA, 38 bp, Homo sapiens
  chr19:37272529-37272567
  hypo
caaacaaaacaaaacccgtaagccagatattcattcat

SEQ ID NO: 273968 - DNA, 99 bp, Homo sapiens
  chr19:37293601-37293700
  hypo
gctgggattaaaggcgtaagccactgcgcctggctgttttttcatttctattatgatttgtcctgtggaatgtcagtgacttagcggtatttttatcac

SEQ ID NO: 273969 - DNA, 621 bp, Homo sapiens
  chr19:37501127-37501748
  hypo
aggacggtctctggatgccaggagtcgcggagggcggaccagcatgaggaaaccattggcggaaaatggcagaagcagtgcggcatcccagcctcaactgccgggacggtgttcaagtgagtctccccaaaagtcatgccccccgtgatctcgacgacatgtctgcttgtgtgcccgtgggctgctctctcacttgagaatcgttctcgcaaagagcagaaccccgcagcctcaggggttgcctggggctatgtgtttctgtgccactgctctatgtctgtgtgtgtgtgtctcccattctctcttctctctctgtcactctgtttctctctctctgtctgtgagtgtgtgtgccggtgtgcgtgtgtgtgttgaatgaatgtgccctgtgcatcaaaaagcgatttcttgcatatcggcctgtctttggtgcgcctcttgctgcgtctctgcctgggacatgttgccggttgtcaatcggtttcgcggcagttccactttgggtttctaaaggcctcgacgacgtgaggagaggcgtcggtcctggaggaactgaaatttcatctccatcctgagcggcctcttttctaggatcaagacgaccacactccagccaaggac

SEQ ID NO: 273970 - DNA, 120 bp, Homo sapiens
  chr19:37503359-37503479
  hypo
cggcctgacctctccagggtgtcaacaggatggtctgcggatgccaagagtggtggaggtccgaccaggatgatgaagccacaggcggagtctgggggaagcagctcggcatcccagctt

SEQ ID NO: 273971 - DNA, 504 bp, Homo sapiens
  chr19:37504006-37504510
  hypo
cctcttgtccaagatcaagacgaccaccccacacttaagcacattttttaaaggggtcgcagcctgatgtttaggagccgggcccatgtagacctggctaatgcaccttactcgcctctcactgcctgtcacttcgtccacagcagcccccgctcactattttttaaaggggccactgacgggattacaggagccaggcgcctgtcggccttgccaatgtgcatgctcgtggcgtgtgcaggttctcacgtcttaatgatcccctccatcgtctggggaatgggtccctgaggcttgccgatcacaatcactccgtggcagtgcatccgtgtcaaagcttttgcctgacctctcaacgtggttgacatgattgtctctggatgcccggatttgaggaggtcaccgaccaggatgaaaaaacctcatgcagagtcacggagaagcagcgcgggatcccagcttcaggggacagatggaatctccggactcccatttggatctgat

SEQ ID NO: 273972 - DNA, 327 bp, Homo sapiens; identical to SEQ ID NO: 219431
  chr19:37505284-37505611
  hypo

SEQ ID NO: 273973 - DNA, 682 bp, Homo sapiens
  chr19:37546262-37546944
  hypo
gagagtcctgaaaccccagccggcgacctgaagctcctcctccaccggtaaaagtcggctcaaaaaggccctgaggacaggggtcctgggggtccggccccgaagtcccctctccaacaacgcccgctactccatcaacactccagccaccacagcgactgccacaggagcccccgtccacgcagagccgaaaccgtttaaaggggctacagcctgacttccaagggcaaagcacgagtcggcttaggcaatgcggatgcatgaggcgacaccgctactcctgtcacagtgaccccaatggttgcctgaggacgactccatcaaccttgacaaagcaggagccgtccgtggcagtgcgtcagtgttgaggcgccaggctgacatctccagaaggtcaacaaaactgtttcaggattccaggagacacggaggggcaaacaggatgaagaaacagcaggcggagtctgggaaaagcagcgcggaattccagcccgaggcctgcccggatggtgtttgggtgagtctccccaaaagtcgtgccccacatcatctcgaggaagcgtctgcctgtgtgcccgtggactactctctaaaccgatggttgttcttttgaaaagcagaaccccgcagcctcaggggttgcctggggtggtgtgtttccgttccactgctgtgtatctgt

SEQ ID NO: 273974 - DNA, 340 bp, Homo sapiens
  chr19:37547634-37547974
  hypo
tgaggaggaatccaaagacccgagcaggcgccctgaagctcctcctccaccggtaggagttggctcaaggaggtcctgaggacaggactccgggagtgcggccctggggtgcctacagccctctctcccacgtcgccgcctaccggaccggggatccagccaccgccagggttgcagccaaaggcccctgcctctgcgctgccgccattgcttaaaggggcttcagcctgacttccagcagcggagcgcgagtcggcctagccaatgcgcatgcgcgaagcgccagccaattctcccatcacagtgagtcccacggttgcctgagtaaccactccctgag

SEQ ID NO: 273975 - DNA, 160 bp, Homo sapiens
  chr19:37548034-37548194
  hypo
cctgacctctccacgggggcgacaggaaggtctccggatgccaggagtctccaaggactgaccagggtgacaaaaccacaggcagagtccaggggaagcagtgcggcatccaagcctcaggcctgcccggacggggatcgggtgagcctccccaaaactt

SEQ ID NO: 273976 - DNA, 216 bp, Homo sapiens
  chr19:37550817-37551033
  hypo
tatgtgtgtgtgcccatgagcgtgtgtgtgttgggacgtatatgccccctgcgccaaaaagggatttcttgtatgtccgcctgtcgttggcgagcctttttctgcgtctgcctgggtcacgtggctggttgtctcgttttcgcggcggttgcacttcgggtttttgaaggcctccaccacctcaggagatgcgtcggtcccagagcaactgaagtc

SEQ ID NO: 273977 - DNA, 36 bp, Homo sapiens
  chr19:37551265-37551301
  hypo
gcctctttggacaagtcacccgtttggcactcctcc

SEQ ID NO: 273978 - DNA, 214 bp, Homo sapiens
  chr19:37551901-37552115
  hypo
caaattgtggcttggactcacgcacaggccccctcctggttcccaggtgttctatgattttcgttggcatcgatggaaaggtcacctgtgccccccttcctccggaacatgcctggacaccattgtttgtttcgccatcgccccgtatgccctctgtgacacacattcacagcatctgctcttgaatacaccagtgccacgtgtggtcacactg

SEQ ID NO: 273979 - DNA, 40 bp, Homo sapiens
  chr19:37633553-37633593
  hypo
attataggcatgagccaccgcacccagcccattttaattt

SEQ ID NO: 273980 - DNA, 97 bp, Homo sapiens
  chr19:37666951-37667048
  hypo
cacatagaacacaggctacccgagatagcaggaatatgctttttaaaaaaccctccaaatcggctgggcgcgatctcggctcactgcaacctccgcc

SEQ ID NO: 273981 - DNA, 36 bp, Homo sapiens
  chr19:37674960-37674996
  hypo
tacaaaacactgtgctgggccgggcgcagtggctca

SEQ ID NO: 273982 - DNA, 36 bp, Homo sapiens
  chr19:37682220-37682256
  hypo
gcaagaatgtcagagggggccggacacggtggctca

SEQ ID NO: 273983 - DNA, 85 bp, Homo sapiens
  chr19:37702065-37702150
  hypo
ctggggttataggcgtgagccaccgcctccggctgttatatttacaatacctaagttaccccttggttacggcacactgcagaaa

SEQ ID NO: 273984 - DNA, 43 bp, Homo sapiens; identical to SEQ ID NO: 219432
  chr19:37702591-37702634
  hypo

SEQ ID NO: 273985 - DNA, 42 bp, Homo sapiens
  chr19:37741708-37741750
  hypo
agcttatgaattgtttctttcgggaatcttgcatttaatatt

SEQ ID NO: 273986 - DNA, 37 bp, Homo sapiens
  chr19:37831817-37831854
  hypo
gggattacaggcgtgagccaccgcgtctggccttgtg

SEQ ID NO: 273987 - DNA, 241 bp, Homo sapiens
  chr19:37853603-37853844
  hypo
tgcagggaatgtgggcgaggctttacgtggaagtcaaacctgatcacacatcagaggacacactcaggggagaaaccttatgtgtgcaaggattgtggacgaggctttacttggaagtcgaacctctttacacatcagcggacacactcagggctcaagccttatgtgtgcaaggaatgtgggcagagctttagcctgaagtcaaacctcattacccaccagagggcgcacactggggaga

SEQ ID NO: 273988 - DNA, 43 bp, Homo sapiens
  chr19:37995767-37995810
  hypo
aattcagaaatggggttgggcgcggtggctcacacctgtagtc

SEQ ID NO: 273989 - DNA, 141 bp, Homo sapiens
  chr19:38069705-38069846
  hypo
cacctctgcagcaaccgcacctccgcctaaactctggtggcctgaggttctgtgttcctctggggcagaactcccagaggtaacagataacacttggcacctctgtatgccctaaacagtgaagttcggcattgtttggaa

SEQ ID NO: 273990 - DNA, 32 bp, Homo sapiens
  chr19:38172706-38172738
  hypo
actgatagctttgccaggcacggtggctcatg

SEQ ID NO: 273991 - DNA, 35 bp, Homo sapiens
  chr19:38185144-38185179
  hypo
cagagcgagactccgtctcaacaaacaaacaaaaa

SEQ ID NO: 273992 - DNA, 508 bp, Homo sapiens
  chr19:38187527-38188035
  hypo
cagctggaggagcacggactgccctgccggcaggcaggtgatgttccgagagcatgagagctggtatgcaatgtcttctgcagcttccagcttgcacagctcgctctggccgtcccctgcagtggccagtgagttggcgatcagctcagctgccttggagtcaccctcagcagagatgatggccgccttttccaccacaaatctggcgctctctgcttcctggggggccacctgtctgttaactccttcaagaaggtcagatgtgtcaaagacacgtcgtccagaatgagcccaaaggtggctgctcactccataaggttgttgctcacctggctggagaccagctccctctgggtgattagttctccagcatcaaagcgagccaccagtgacttgaggatctccgtggtaatgaacggcagcacacactcatcgtagtcctctccaatgctggtgaagatgcgaggaagctggctagtgatgggccggaagaggatgcacagtgtga

SEQ ID NO: 273993 - DNA, 382 bp, Homo sapiens
  chr19:38221768-38222150
  hypo
tatgagcatgtagatcacaacgaatgatcacactgacactacagacacaatgaatgatcacgctgacactaaagacacaacaaatgatcacgctgacactacagacacaatgatgacgctgacactacagacacaatgaatgatcacgctgacactacagacacaacgaatgatcacgctgacactacagacacaacgaatgatcacgctgacactaaagacacaacaaatgatcacgctgacactacagacacaatgttcacgctgacactacagacacaacgaatgatcacgctgacactacagacacaacgaatgatcacgctgacactacagaactttggctgacaatgcataatgcgtgatgctccttagtttggaa

SEQ ID NO: 273994 - DNA, 82 bp, Homo sapiens
  chr19:38273674-38273756
  hypo
caacaagagcgaaactctgtctcaaaaaaaaaaaaaaaatcactgccacaaactttttcacataggacgatgaaggattcca

SEQ ID NO: 273995 - DNA, 92 bp, Homo sapiens
  chr19:38287060-38287152
  hypo
ccacgctgctcctcccggattctgcctgtggtttcatcatcctggtcctaactccgccactcatggcatccggagaccatcccatcaacacc

SEQ ID NO: 273996 - DNA, 95 bp, Homo sapiens
  chr19:38299439-38299534
  hypo
ttttgtgtgtgtgttttaagcggaaacctacactctcaaaagcagaacgttcactttttaaaaccatctcggctgggcgcggtggctcacgcctg

SEQ ID NO: 273997 - DNA, 102 bp, Homo sapiens
  chr19:38309039-38309141
  hypo
agattttgtgctgtaactttcgtggctcacagtttccttctaattaggttagatgcaaaatgaaagtattataatagaataaagtaattcggccgggcgtgg

SEQ ID NO: 273998 - DNA, 276 bp, Homo sapiens
  chr19:38345148-38345424
  hypo
acagccagaatgtggcagggcgaagagtcagactccagacatgtgctgagccattatgccattgtcccgcctggccgtgctgggatgtgcatgggacgctctggcctttgtgacagaggccttgcatcagcggtttgcaagcatggccggctctttacggttctacggggtccccatgcagcccttcataaaggcaacgcttgagttccaccaggccggaagaagccatgaaacaaaagctatgagaaggccgggcgcggtggctcacgcctgtaa

SEQ ID NO: 273999 - DNA, 114 bp, Homo sapiens; identical to SEQ ID NO: 219435
  chr19:38347218-38347332
  hypo

SEQ ID NO: 274000 - DNA, 34 bp, Homo sapiens
  chr19:38348720-38348754
  hypo
tgttagccatcgcgcccagcctactttctgatct

SEQ ID NO: 274001 - DNA, 97 bp, Homo sapiens
  chr19:38383008-38383105
  hypo
gtaagaccctgtctcaaaaaaagaaggaagaggaggaggaagaggagtgaacagtcgggattgtcaaggatagtcatctaggcgtgagcaaaggcta

SEQ ID NO: 274002 - DNA, 194 bp, Homo sapiens; identical to SEQ ID NO: 219436
  chr19:38446271-38446465
  hypo

SEQ ID NO: 274003 - DNA, 79 bp, Homo sapiens
  chr19:38472268-38472347
  hypo
gtattgtcagatgacgcagtgccagtggtagcagcgtcgccatcatttcagcagcagtgcccttcgttagctgtaccac

SEQ ID NO: 274004 - DNA, 78 bp, Homo sapiens
  chr19:38480528-38480606
  hypo
cagaatgagccttggcttcccgtgcactcagtcggggtgctggggcctggctgagccgggccattggagagtagagga

SEQ ID NO: 274005 - DNA, 339 bp, Homo sapiens
  chr19:38481033-38481372
  hypo
aaagcagccagtgagacaggcggggtcgtggggtgaatacctgtggaactttggcggaagccaggtccgatgggatctggagtaccagctttgacttcagagcgctctcttctggctgggcatggagacaaggaatagatacagcaatagccacataactgcaggtggacgatgagtacagctcttgctcagctagtcagcccacagcgagaaccccgccccagtctgggctaacgtgtcctctgctgccagcagcccagtagggttctttgctggagtctggtttttccttgacttgtagctggcaagtgcttacacgctctcagaggcccagcagac

SEQ ID NO: 274006 - DNA, 196 bp, Homo sapiens; identical to SEQ ID NO: 219438
  chr19:38500327-38500523
  hypo

SEQ ID NO: 274007 - DNA, 431 bp, Homo sapiens; identical to SEQ ID NO: 219439
  chr19:38564442-38564873
  hypo

SEQ ID NO: 274008 - DNA, 42 bp, Homo sapiens
  chr19:38568581-38568623
  hypo
gttataggcatgagccactgcgcctggccaatatttttgctt

SEQ ID NO: 274009 - DNA, 42 bp, Homo sapiens; identical to SEQ ID NO: 219440
  chr19:38572016-38572058
  hypo

SEQ ID NO: 274010 - DNA, 142 bp, Homo sapiens; identical to SEQ ID NO: 219441
  chr19:38572720-38572862
  hypo

SEQ ID NO: 274011 - DNA, 140 bp, Homo sapiens
  chr19:38582275-38582415
  hypo
tgtgttctggccgccgcactcggctgcctctgggttttgactaagtcagcttagactgcacactggacccactcatgagttaggagctcaaccaactcagtgctagcgtttgtgtttttgttcgtaatgaaaatacaata

SEQ ID NO: 274012 - DNA, 51 bp, Homo sapiens; identical to SEQ ID NO: 219442
  chr19:38625643-38625694
  hypo

SEQ ID NO: 274013 - DNA, 221 bp, Homo sapiens
  chr19:38625953-38626174
  hypo
ctccagtcatgccccgggtgtctccggttcccagcccttttctcctgccaccttcctaccctgcccggagccacagcccagccacacctgcttagatctctgcaggggcaagtcaaggccagataaccccacaggcaagtgccctggtggctacgctcctcgaggaaggacatgcacccctctccacacactcccacgggtgcacacgataagccagcttg

SEQ ID NO: 274014 - DNA, 127 bp, Homo sapiens
  chr19:38626519-38626646
  hypo
tgttgtagtgagctctgaggcgagcagtgaggacgggatagaagtgccctcgctgccaccagccaggccgcatggcttgcacgctgaccccatgctctcagacaccgaggagaatgcatggggtctt

SEQ ID NO: 274015 - DNA, 198 bp, Homo sapiens
  chr19:38636781-38636979
  hypo
gcgtgagccaccacacccaacctgtcttttaattattgttatttcatgatgaatgttagataaaaagaatcagatgtacgtatgcttcagaggttgtctttttcactcagcagaatgtccttaaggttcatccacgttgtcgcgagtctctagttcactcattatgctgtttattccgtggtctagatataccacagt

SEQ ID NO: 274016 - DNA, 92 bp, Homo sapiens; identical to SEQ ID NO: 219444
  chr19:38639131-38639223
  hypo

SEQ ID NO: 274017 - DNA, 180 bp, Homo sapiens; identical to SEQ ID NO: 219445
  chr19:38679125-38679305
  hypo

SEQ ID NO: 274018 - DNA, 31 bp, Homo sapiens; identical to SEQ ID NO: 219446
  chr19:38679545-38679576
  hypo

SEQ ID NO: 274019 - DNA, 247 bp, Homo sapiens
  chr19:38684215-38684462
  hypo
gagagcctgtgcagcgggcgccgggagcccagcttcgccagccccgctggcctagagccagggctgcccagcgacgtgctcttcaccagcacctgcgccttcccgtccagcacgctgcctgcacgccgccagcaccagcacccccacccgcccgtcggccccggtgccacccctgccgccggcagcggctttcccgagaagaaatgtgagcctgggccccctgggactggcgcggtagttaccccaa

SEQ ID NO: 274020 - DNA, 48 bp, Homo sapiens; identical to SEQ ID NO: 219447
  chr19:38689956-38690004
  hypo

SEQ ID NO: 274021 - DNA, 91 bp, Homo sapiens; identical to SEQ ID NO: 219448
  chr19:38691720-38691811
  hypo

SEQ ID NO: 274022 - DNA, 275 bp, Homo sapiens
  chr19:38704117-38704392
  hypo
agaggaaaaagggccaggttcgatttatggacaccggcataatgataacacaggggactggtgttcaccagggaaggctcaggcacaggctttaggcttaaggggcagaggtggacgtgccaggcggggcgggcagcagggcacgcggggggcgggcggcactcacgtcgttctcggaggttccgcacaggctgcaggatttgcactcgatgcactgccagcggtaggtccgcacggctgccgtcatgttcaccgtgaattgtaaacacgagggg

SEQ ID NO: 274023 - DNA, 430 bp, Homo sapiens
  chr19:38706579-38707009
  hypo
tccctaaagcctcactgatccgacccaattcccacaatcctcagcagttgcatcagcctcgctagctctggttatccacagtatcccctacatgctccgggtcccctcggtcctcaccgccttgcctccctccctccaggtctgcactcctgaatgtcctctgcacccggcccccagaaacctcaggtggggagcatcacctgatcgcccacagtccgcacaggagatgaggtcctcgggacaccccgtcttcttggagccccccaggcagaagtcacagtagccgttggggatgacagtgccgtcgggcgccttcttggctgcaagacagcagacaggcattggcacggggcaggcaagggcaccccgcaaaggtggctgcagactttaggagcagaaggaggcatccgtacctgtgtgtttcctttgt

SEQ ID NO: 274024 - DNA, 440 bp, Homo sapiens
  chr19:38711296-38711736
  hypo
aagaaacaattagccctccagatacacctagaccctggggaagacacagccagatgagatgcttggacacatagcggggagataccgacatactcagggagaatcactcagctagatacacacaaacacacacaggagacagacaggaagagacacagccaggtgggcactgccacgctcctgggtacacacagaccctcggactcaggaagagaaactgaccccgaggatcccgatattcctaaacacattcaagggtaagtccagatcctctgatggactggcacacacgtgcagaaatacacctgatacgccagacaccatcaggaagattctcccagacactccgaggcacccacacacccacagaaagagacggccgcaccgcctaacacacccagacacactcgggaggagccggacaccctgacagaccagac

SEQ ID NO: 274025 - DNA, 42 bp, Homo sapiens
  chr19:38747775-38747817
  hypo
ctataccagacactgctttacgctccagggatagagcaggga

SEQ ID NO: 274026 - DNA, 36 bp, Homo sapiens
  chr19:38756647-38756683
  hypo
ttagctcaggtggtcgggggacgtctccgtgaggag

SEQ ID NO: 274027 - DNA, 87 bp, Homo sapiens
  chr19:38764530-38764617
  hypo
cataaaaaatacaatcgtaaagatacaatatctactatttgttaaaagttttgtgctaggccaggtgcggtggctcacgcctgtaat

SEQ ID NO: 274028 - DNA, 211 bp, Homo sapiens
  chr19:38774186-38774397
  hypo
gatccatgtacaggtctgtgcgtgtcctttgttgccaggattgccctgccaagctaaccgggttgtgcttcgcgtttcagacttctgcctggtgtcgaaggtggtgggcagatgccgggcctccatgcctaggtggtggtacaatgtcactgacggatcctgccagctgtttgtgtatgggggctgtgacggaaacagcaataattacctg

SEQ ID NO: 274029 - DNA, 183 bp, Homo sapiens
  chr19:38780287-38780470
  hypo
ggtcaaggtgacaggccccacgtggatgccgccagcagtgggaaggaggctgcgcctgtggagatgtgcgttagaggcgtagcctggcacgtggctctgcaatttacattgtccctgaacctctcgccagcggcttggctgtgggcaagtgactgttgccccgcctcagagttcccatgtata

SEQ ID NO: 274030 - DNA, 75 bp, Homo sapiens
  chr19:38781556-38781631
  hypo
cacgggtgacaggacggaggaccacgggccagggtgtttcccaacacagtctggtctgagcgggaggccaggcct

SEQ ID NO: 274031 - DNA, 341 bp, Homo sapiens; identical to SEQ ID NO: 219451
  chr19:38781916-38782257
  hypo

SEQ ID NO: 274032 - DNA, 266 bp, Homo sapiens
  chr19:38782477-38782743
  hypo
agtggtggttctggcggggctgttcgtgatggtgttgatcctcttcctgggagcctccatggtctacctgatccgggtggcacggaggaaccaggagcgtgccctgcgcaccgtctggagctccggagatgacaaggagcagctggtgaagaacacatatgtcctgtgaccgccctgtcgccaagaggactggggaagggaggggagactatgtgtgagctttttttaaatagagggattgactcggatttgagtgatcattaggg

SEQ ID NO: 274033 - DNA, 235 bp, Homo sapiens
  chr19:38784873-38785108
  hypo
ggcctcagcccctccgctcctggcagctcaactccatccgggcctctggactctttccagggcgactggtgggcctcaccacagcagacactcttcaggctgctgccgccgtggcccttgaagctcagctgtgtcatgtgttcaattcttggggcattttacggcctgacaaaggccctctttttgttggaaaggccacccaacagtgggtcagtggcctcggcattcagtggcc

SEQ ID NO: 274034 - DNA, 74 bp, Homo sapiens
  chr19:38786544-38786618
  hypo
agtggccacttggtcgagtgtcctttttgccaagtctccctacttggcacatcagacaacgtgagggaaatcat

SEQ ID NO: 274035 - DNA, 45 bp, Homo sapiens
  chr19:38817274-38817319
  hypo
tctccatcgcctttgcgctcctgggcgtgccgaccaccatgctgc

SEQ ID NO: 274036 - DNA, 147 bp, Homo sapiens
  chr19:38828045-38828192
  hypo
gagagtggtgtgagcgacagcttctttgagcaagagcccgtggacacagtgagcagcttgtttcacatgctggtggactcacccatcgacccgagcgaggtgaggggaccagggtcaagtgaaccagagggattttgaacccgcact

SEQ ID NO: 274037 - DNA, 155 bp, Homo sapiens
  chr19:38828222-38828377
  hypo
ctctttgcagaaatacctgggcttcccttactacctgaagatcaactactcctgcgaggaaaaggtgagtgggtgcagcacggataggctcattctatgagccttggttttcccacctctaacatttttatttatttatttattttatttttttg

SEQ ID NO: 274038 - DNA, 152 bp, Homo sapiens
  chr19:38838188-38838340
  hypo
taaggatcttttggcttcagcgacagaactatgttggaattagtgcagctacaggagaacgccaaggcaggttggtttacccagagaactggctttaagaagtgcacccacagccggtgcagtggctcacgcctataatcccagcactttgg

SEQ ID NO: 274039 - DNA, 79 bp, Homo sapiens
  chr19:38841908-38841987
  hypo
gggcaatgtagcaagactcccgtctacacagttatttatttattttaattagctgggaggccgggtgcggtggcttacg

SEQ ID NO: 274040 - DNA, 138 bp, Homo sapiens; identical to SEQ ID NO: 219454
  chr19:38851300-38851438
  hypo

SEQ ID NO: 274041 - DNA, 92 bp, Homo sapiens
  chr19:38855368-38855460
  hypo
ggccaacaccccgttagcctattcctgagtagaaaatggcagccttccgttttcctaccagccaccacctcgccccagctatgggttatttg

SEQ ID NO: 274042 - DNA, 120 bp, Homo sapiens
  chr19:38868585-38868705
  hypo
tcttaatatagttatagctaacactttgtgtttatttgggccaggtattgttctaatcaccttacctgggttgaatcatttaattcacttaacccttgttcattcaacccatctctacga

SEQ ID NO: 274043 - DNA, 425 bp, Homo sapiens
  chr19:38873747-38874172
  hypo
tgaagttacttgtcaagggtcgttgggcagagtacgattggtgagaaaagagagcataggacacgtgggcaagtgctggccccatagggtggggatggagcctttgtgatcactctactcgtctctaatccctcctttcctgcagcgagggtgggtcctgggccccaacaactactacagttttgccagccagcagcagaagccggaagacaccaccattccctccacagaactggccaaacaggtcatcgagtatgcccggcagctggagatgatcgtctgagccccccgggcactgggtggggcagggcacgagttatttaaaacagttacactgcagggtttcgcccaataaaggtggactgacattccctcttccaggcccttgtctccccagttgggacggcagagagacaagttcttat

SEQ ID NO: 274044 - DNA, 453 bp, Homo sapiens
  chr19:38875946-38876399
  hypo
tgtggcagagatgaaggccacgggtcattctagggtcaggaagccaaagggctgagtaggactctatccagcagtctggggttcggcaccctcctgtcccttctcccctctcaccaggcagagacgttgcgtggcaggcggcgatggcgtggctggtggtggcagtaacacttgcagggacaggagttaagcacctggaagggcagccagtggcgcgcagcgcgggtgttagctgccccagtctgagaggccccgctgccaccaccccctccaccactgctgtcaggcacggtagctgtagctcgttcgcgaggaccatctccatgcaagccatccttacgggtcgcgccccgggctgcacgggaacccttgttcctgcgcgtgcgggtcttgatgggcgcagccgcgggtgcgggcgcggacacaggcggcgagggctcagccacggtggga

SEQ ID NO: 274045 - DNA, 33 bp, Homo sapiens
  chr19:38900084-38900117
  hypo
gcagaaaaacaggagctgggcgtggtggctcac

SEQ ID NO: 274046 - DNA, 132 bp, Homo sapiens
  chr19:38901797-38901929
  hypo
ggggggtcctgcatcgcccttggcccctggcctcttcttacattctaccttcacctggtctctgcagtgtttgtggcaacacagcccgcactctgggggaaggcagcggcaggggtccgatctgtgtcatcc

SEQ ID NO: 274047 - DNA, 179 bp, Homo sapiens
  chr19:38905549-38905728
  hypo
ccagctcctgcagccgcaggtagaggttgttcagcttgggtaggtgcaggcggccgtcaggcaacctgtcgggctgtgcctcatgcagggacaccaggtccttgaggtgcacgcccagtacaggcagccggaaacccgcgcagccagcccaggtgcggcggtagcgggcgtagttgttg

SEQ ID NO: 274048 - DNA, 42 bp, Homo sapiens
  chr19:38921075-38921117
  hypo
aaccataatagaaaaatggccgggctcagtggctcctgcgcc

SEQ ID NO: 274049 - DNA, 170 bp, Homo sapiens
  chr19:38934252-38934422
  hypo
ggcatgcacacagccgcatggtgagtgcaacctcggtgggcgtgggcaggggccagggcatgtggggcctgctagaaggaggctgacctccctctacaaccctagtatctgagctgcctcaccacctcccgctccatgactgacaagctggccttcgatgtgggactgca

SEQ ID NO: 274050 - DNA, 38 bp, Homo sapiens
  chr19:38951826-38951864
  hypo
ttgggaagccgaagtgggggcctcgcgcttgagcccga

SEQ ID NO: 274051 - DNA, 424 bp, Homo sapiens
  chr19:38956607-38957031
  hypo
attatatcaaaggtcagaaacgccgaagctgggacaagggtcagcagtcagggatcccatatagtgcagagcccggaagtggaggtgagggccttgtcccatggagccctaccatgcccgcaggtatatgatgagcaatgggtacaagccggctccgctggacctgagccacgtgcggctgacgccggcgcagacgacactggtggaccgtctggcagaaaatgggcacaacgtgtgggcccgagaccgcgtgggccagggctggagctacagcgcagtgcaggacatcccagcgcgccgaaaccctcggctggtgccctaccgcctgctggatgaagccaccaagcgcagcaaccgggacagcctctgccaggccgtgcgcaccctcctgggctacggctacaacatcgagcctcctgaccag

SEQ ID NO: 274052 - DNA, 350 bp, Homo sapiens
  chr19:38964030-38964380
  hypo
cggcactgtggacacgcccccctgcctgcgcctgacccaccgcacctggggctcccagaacagcctggtggagatgcttttcctgcggctgagcctcccagtccagttccaccagcacttccgctgcactgcaggggccaccccgctggcacctcctggcctgcagccccccgccgaggacgaggcccgggcggcggaacccgaccctgactacgaaaacctgcgccgctcagctgggggctggagcgaggcagagaacggcaaagaagggactgcgaaggagggcgcccccgggggcaccccgcaggcggggggagaggcgcagcccgccagggcggagaatgagaagg

SEQ ID NO: 274053 - DNA, 305 bp, Homo sapiens
  chr19:38973964-38974269
  hypo
cgagcgcaagaacccggccccgcagtgcccaccgcggctggagatgcagatgctgatgccagtgtcctggagccgcatgcccaaccacttcctgcaggtggagacgaggcgtgccggcgagcggctgggctgggccgtgcagtgccaggagccgctgaccatgatggcgctgcacatccccgaggagaaccggtcagggccagcccagctatgcaggggtgggcaggtgttgcaagccctctggggtctgggtcccactcagtgcccctcctcaacacaaccccgggattccagactacacccca

SEQ ID NO: 274054 - DNA, 37 bp, Homo sapiens
  chr19:38976811-38976848
  hypo
gcctgtgctcaagctcgtgtccaccctgctggtaatg

SEQ ID NO: 274055 - DNA, 164 bp, Homo sapiens
  chr19:38985044-38985208
  hypo
ttcgtgcagagccccgagctggtgcgggccatgttcagcctcctgcaccggcagtacgacgggctgggtgagctgctgcgtgccctgccgcgggcgtacaccatctcaccgtcctccgtggaagacaccatgagcctgctcgagtgcctcggccagatccgctc

SEQ ID NO: 274056 - DNA, 42 bp, Homo sapiens
  chr19:38991673-38991715
  hypo
gagggacaggagatgggtcacggtagagcagcagcagctgct

SEQ ID NO: 274057 - DNA, 127 bp, Homo sapiens
  chr19:38993197-38993324
  hypo
ctggccgtgctgccgctcatcaccaagtgtgcgccgctctttgcgggcacagaacaccgcgccatcatggtggactctatgctgcataccgtgtaccgcctgtctcggggtcgttcgctcaccaagg

SEQ ID NO: 274058 - DNA, 36 bp, Homo sapiens
  chr19:38993721-38993757
  hypo
cactagttagggcagcgtccccgtagaaatctctta

SEQ ID NO: 274059 - DNA, 93 bp, Homo sapiens
  chr19:38998407-38998500
  hypo
gcttcctgcagcagctgctgcgctggatggacatttctcaggagttcattgcccacctgggtacggagaaataccccccgcttatgcccgccc

SEQ ID NO: 274060 - DNA, 283 bp, Homo sapiens
  chr19:39015895-39016178
  hypo
gtggatgatggccgcgggttggggctgaggcatgggattggggcttgggctggtgctgagccctgtgtccccacagtccggtggctcggaccaggaacgcaccaagaagaagcgccggggggaccggtactctgtgcagacgtcactgatcgtggccacactgaagaagatgctgcccatcggcctgaatatgtgtgcgcccaccgaccaagacctcatcacgctggccaagacccgttacgccctggtgcctgcccagccccgtcctcggaaccttccagga

SEQ ID NO: 274061 - DNA, 157 bp, Homo sapiens
  chr19:39026970-39027127
  hypo
tacatggaccccaccctccacgtgccccaaatgtcacgccctggttgctgttctcttattaatgtccctaatccgggttaatcgcgtctcctctttgccgtgttgtgacgtgtctaacctttctacccggatcctcgctcctgcctttctacctcta

SEQ ID NO: 274062 - DNA, 595 bp, Homo sapiens; identical to SEQ ID NO: 219462
  chr19:39051723-39052318
  hypo

SEQ ID NO: 274063 - DNA, 416 bp, Homo sapiens
  chr19:39087585-39088001
  hypo
ttcatggagctcttgatagaagcgcaaagggtgcaaggccttagccacccactcctcagagttcccagcaccctcccaagccccttacccggacaagcaggaatttgttcatgggctggtaccactgaagcaggacaacggacgtctccaatgcaccgcacaggaacgggcccccagagctcgcaccctccgctgtggcatgggcaaggatgagtcaagatcaatgccctctatcctcctcgccacccacactaccacccatcttctgggttctggacacattgccttaactctgtaaccttctcaggtggatgcagttcaagcccctcctctggcctggccccgcccactctctgcacacccgtgaagctctctctcacccacacagcacgcccggcagcctttggtgtcctgga

SEQ ID NO: 274064 - DNA, 125 bp, Homo sapiens
  chr19:39092089-39092214
  hypo
agggatgtgtccaggcggccgtgctgtggatccggagggggcagccattgaacaactttacgagaagggcacatccctgggcaggtcgccgcggggccaggcagcagatccggcaaagagagcag

SEQ ID NO: 274065 - DNA, 103 bp, Homo sapiens; identical to SEQ ID NO: 219464
  chr19:39094630-39094733
  hypo

SEQ ID NO: 274066 - DNA, 94 bp, Homo sapiens
  chr19:39097473-39097567
  hypo
tctccctgtgctggcgccacacacaggctgtcgcacgtgatgggtgaagtgagtgcgcgcacctggatggagcctgactcggcctgtgggctgg

SEQ ID NO: 274067 - DNA, 232 bp, Homo sapiens
  chr19:39125643-39125875
  hypo
aaggtgtggatgagcaaatacggctggagtgccgacgagtcggggcagatcttcatctgtagccaagaagagagcattaaacccaagaacattgtggagaagattgactttgacagtgagtggtgacccacggcctcgggctttggggctaagggggtgcccctcaagggaggccgaggcaggggcccagaggacctgggtagatctgctcgtgttctgggctgggaagtct

SEQ ID NO: 274068 - DNA, 31 bp, Homo sapiens
  chr19:39128243-39128274
  hypo
gcgcccagccgggattgtgcctctctaattc

SEQ ID NO: 274069 - DNA, 79 bp, Homo sapiens; identical to SEQ ID NO: 219465
  chr19:39144877-39144956
  hypo

SEQ ID NO: 274070 - DNA, 40 bp, Homo sapiens
  chr19:39149969-39150009
  hypo
tacaggtatgagccaccgcgcccagcccctttgtaacttt

SEQ ID NO: 274071 - DNA, 516 bp, Homo sapiens
  chr19:39151297-39151813
  hypo
agtgctgggattacaggcgcgagccaccatgcccgacccatggactcacttgtataatcttgtgaagcaggtgttgttacccttacatgcagaaatggatccatgggcctttaagccacttgcccctgtgacagtgccaggatttgaatgtagaagttgaggctttcaagtttatgctgttatttctacactacactgaagtctagtgattgggaatggctttgcgagcgggtggtgaggggaggagtgtgcagtgcaggtacttcagatggagaggaaggtctcaaagaggtggcatttcagctgttccttaacggatgagaaagagagaaccaagagagcaccagaggaacgcgcttccaacagagaaaaccaagcaagggggcccccgaggagcagaaaggcccgagtggtcagagcggagcccgtggaagagatgggcacagccagattgcttagagctgtgttgttagaagtgctgatgagtctacattcaacttgcgcctgcaaactcag

SEQ ID NO: 274072 - DNA, 34 bp, Homo sapiens; identical to SEQ ID NO: 219466
  chr19:39159904-39159938
  hypo

SEQ ID NO: 274073 - DNA, 88 bp, Homo sapiens
  chr19:39182576-39182664
  hypo
cagcaacacgcacgctttctggcacctcaaaggggattgtccaagactggaacactggctgcagggagggggccgggtgcaaagagct

SEQ ID NO: 274074 - DNA, 154 bp, Homo sapiens
  chr19:39189493-39189647
  hypo
tctgggagggggctttgtgtcgagtctccctgaatgagcagggctggcgacagttgtcaaaacacatggtgcttggtcagagcccccgtagaagccccttgtcctccgcatggcctccgcctgcacccggggcgtggaatgtgctcttgtgtgt

SEQ ID NO: 274075 - DNA, 196 bp, Homo sapiens
  chr19:39190982-39191178
  hypo
gctctgccacttaccgcctggatggtcttgtgatgggtcattaaccaccccgagcctcagtttcctcacatctgcctcccggggtcactgtaaggatcagaaacaatgtgtgtatcggccatgtacggtgtgtgtcggcgagtgctccgtggcagctgcggttctcctgaggtcagagctgcggccctgcaggtgt

SEQ ID NO: 274076 - DNA, 165 bp, Homo sapiens
  chr19:39201702-39201867
  hypo
agtctgtctccagcccaggccggttagaaaaggaatgcaccctattcggactccacaaaaccccgcaaggcatgtccacgcaggcctggggctggcttccagtccagagcaagtgctcttcctcctgcatgagcctcaggccggcccggccgccctccctgcgtc

SEQ ID NO: 274077 - DNA, 128 bp, Homo sapiens
  chr19:39210537-39210665
  hypo
ttagaagccagctcagtctccggccagggcccagctggttcagcggcctccacacgtccctgccccacccctacctgactgggcatccacgcgggtctgcccatggcgtctgccagagcccccaggca

SEQ ID NO: 274078 - DNA, 86 bp, Homo sapiens
  chr19:39211068-39211154
  hypo
ggagaagggaattgcaaggccgccttgtggctgagcctcctgccccagggctgcgcagcagggccggtggagccagagtctcccag

SEQ ID NO: 274079 - DNA, 299 bp, Homo sapiens
  chr19:39211597-39211896
  hypo
ggatcagggactaataacagcgttcctcctttcctttaaagggcctgatggtgggcccgccccaatgcacacaggacaccttaggacagcgtggggcacttagacgtggagaggaccaccacctgtgcgggtgcagggtcagggtcctagaagaagctggctctgatgcttccccttccccaagcctgctgggacatgggctttgaccccgggtgcttctccggatcaaagccctccagaaacaggtgctacctttctaagccgtgctaccacggcccgatttgtatggtttcctacta

SEQ ID NO: 274080 - DNA, 212 bp, Homo sapiens
  chr19:39212194-39212406
  hypo
aagcaccgggactacgagacggccacactatcggacatcaaagccctcattcgcaagcacgaggccttcgagagcgacctggctgcgcaccaggaccgcgtggagcagatcgccgccattgcccaggagctcaagtacgtgcgggctcaggacactatcatcacctggctctcaccacagcctgcccagactggtggcggcagcacgccgag

SEQ ID NO: 274081 - DNA, 305 bp, Homo sapiens
  chr19:39221969-39222274
  hypo
accccaactctgccccatcccggcagggtgagtacaggctgatcccttcaatcctctgggcctgtttcctcatccatcaaacggactaagacagccccgaccccatagggtgtgtgaagacagaacgctcaggacagcgtctgacacgtgactcgatgtgtgggtactgttactccttaaatcctgtggggctttctccttgccagtgggcactggaggatatttctgtgcagcaaaaaatatagtcaatcccatatggagtcagtttccttacagtctacctcagaggcgatttctaaagctga

SEQ ID NO: 274082 - DNA, 32 bp, Homo sapiens; identical to SEQ ID NO: 219469
  chr19:39238369-39238401
  hypo

SEQ ID NO: 274083 - DNA, 143 bp, Homo sapiens
  chr19:39259868-39260011
  hypo
ctcatacacctggcctcaagcgatgctccgacatcagccttccaaagtgctgggattacaggcctgaggcatcgcgcccagctccaaatctccattctcggtgaaccatttgagaaaaaatcgcaaacatgttgcatctccaa

SEQ ID NO: 274084 - DNA, 137 bp, Homo sapiens
  chr19:39270478-39270615
  hypo
cattcttatggtagttttatacccaagcccactgaagaccgtaggagggagaggtaaagttttctttcccctgcaaaggacattcgagttgtttccactgtttggctgttatgaataatgaacgcttctacgaacat

SEQ ID NO: 274085 - DNA, 287 bp, Homo sapiens; identical to SEQ ID NO: 219470
  chr19:39277439-39277726
  hypo

SEQ ID NO: 274086 - DNA, 178 bp, Homo sapiens; identical to SEQ ID NO: 219471
  chr19:39279303-39279481
  hypo

SEQ ID NO: 274087 - DNA, 104 bp, Homo sapiens; identical to SEQ ID NO: 219472
  chr19:39289871-39289975
  hypo

SEQ ID NO: 274088 - DNA, 77 bp, Homo sapiens
  chr19:39302318-39302395
  hypo
atgaggccaatcattatcaacgtgttaaggccctttttaaaaagctaagactgggccaggcgcagtggctcacgcct

SEQ ID NO: 274089 - DNA, 149 bp, Homo sapiens
  chr19:39305780-39305929
  hypo
tgccaggcagggcacgaacgccaccctcaaccccagggcaggcagggagaccaggaagccttgcaacccagagggaccccagcgacttttgctcactccctccgccccggaattccttgtgcccctcgcctgcccgctgccagtctgaa

SEQ ID NO: 274090 - DNA, 432 bp, Homo sapiens
  chr19:39306227-39306659
  hypo
gctggggcctgggacgcgagggctctcagagcttggagaaggtgacggttttcagttccttgttctcagtcgtggcctggaccgacttcacgaggtcttgggtctgcagcatgctcatgttccaggacgcctggtaccgagggtgttgagagagaacgaggagagagattagcaggggccaatcaggataaagcatgagagcaccctgcaccctggttggtcgcctggggttagaggagggctgtgattggtcggagcgtgcaccttaccacgtagttgaggctctcggccaccgaatggtcgcgggaatacagcaggttgaccttggtgctctgcaccgccacggggctcttgctggaaatctcggccgccagcgctaaggcagcatccagcatgacctctttgtctgggaacacccggctgcagtgaaag

SEQ ID NO: 274091 - DNA, 36 bp, Homo sapiens; identical to SEQ ID NO: 219476
  chr19:39310980-39311016
  hypo

SEQ ID NO: 274092 - DNA, 233 bp, Homo sapiens
  chr19:39327431-39327664
  hypo
agacaagtttggttggttcccgtctttggaggctccccaaacccaggtcccctcaagtttgtacccatctcccattttctgcaggtcaacggcaggggtctaaggagtgactgcccaacgtgaggcttcaagatgagccaattaccaattatgcacggcgtttctccttctcttccttcattcccatagagaatcccattcctatctccttcgccagcccaaggcaatgggcc

SEQ ID NO: 274093 - DNA, 145 bp, Homo sapiens
  chr19:39329501-39329646
  hypo
cctctgctgccctcccgagcctgagcacctaccagacattcagcttctgcccaaacatgaagttgttgttgaggtgggtaatggcccggtctacagcgtagccatcagccatctccaccatggcggcccccggcttgcttttcat

SEQ ID NO: 274094 - DNA, 31 bp, Homo sapiens
  chr19:39330090-39330121
  hypo
tatgtgaacctgggcgcgttatttaagcccc

SEQ ID NO: 274095 - DNA, 33 bp, Homo sapiens
  chr19:39330892-39330925
  hypo
tagcgacttgggccccgacggtgaccccccact

SEQ ID NO: 274096 - DNA, 433 bp, Homo sapiens
  chr19:39332929-39333362
  hypo
atggaatctacttccgtctatgaaacgttctccgaaaagagcatcgctcgctggctggctgggacagctctgttctctgtgtttcctacttctgtgtacattctcgggttcaagtttgcttggattttgaccttttttttaatgtttaataaaaaaagcagtgtctgctgccatgttgcgtctctttctctctttgtctctgtatgcctctgtctctgtgcttgtagctgttccttggagcgcggtgtggtgttcttgatgtagtgagctcaagtctgcggctgtttctggggacgtggtggaggctgcatgttctgttctctccaggaagagctagtggttttctaccctgtgtgttggtgagcaatgtgcagaggcagagccgctgaagtatggttcctgaggggtggcgaagcaccgccctcactccagg

SEQ ID NO: 274097 - DNA, 783 bp, Homo sapiens
  chr19:39406262-39407045
  hypo
ggccaggcagcccaggcttccggggctggttggggccgatgtactggagaggcacgtgggtaggggctgtgatccgatcagtgccgaggtaggactggagggcagggggcacgagcactgagccgtcctggggacagagcagacctcaggacactgcagatgccccagccctccccggcgctgagctgcctctctgggtgggcccctcagcccctcaccttctgctggttactctccaggagcgcgatgagaaggcgggggacagcacaggcggtggcgttcacctgtgagacagccatgctcggaactggcgcccaccccaagctgagcccggggaggagccaaggtgggtgggtctagggcggcagaggctgcgggcgagggcacgcgggcaggaggctgtgcgggcctcaccgtgtgggcaaactgcagctccccagcctcggtctggaacatgatgtggaggcggcggctctggaagtctgtgcagttggaagcactggtgacctggggtggaggagcggcaggctgagcggatcagggatggggggcaggcctgtcctcctgcccaccccgtccccagcggcacagggctcacctctccaaagcggcctcggcctggcatccaggcctcaatgtcaaacttgcggtaggcggggaggcccagttcttgggtgggcatatccaggaccctgcggtcaaggacgaaggtgtggggaaggtcagcgggtgagaggaggagcaagaggaacaaatggaaacgatggaagagaaggcagccaa

SEQ ID NO: 274098 - DNA, 90 bp, Homo sapiens
  chr19:39408601-39408691
  hypo
gtcccgtgtttgtctctgcccggtagcaggtgctggagcaaaccatcctggcagagagcagggaaagtcgggtcaaggagggaagactga

SEQ ID NO: 274099 - DNA, 176 bp, Homo sapiens
  chr19:39415993-39416169
  hypo
cccacagaactctgacgcagttcacccttccctggtagcctgtagttcaggggaagtgggcccaggtggaggatggcctctgatcagcctatgccggctgccggaactccattcctccggctgacaactggagtgtggtgggggtctgggcccaggggacacgaggggactttgct

SEQ ID NO: 274100 - DNA, 410 bp, Homo sapiens
  chr19:39435417-39435827
  hypo
gttttgctaatgaaatgaatcgatatgtaagcgtcttgacacagggcttgggatgtaagaagggctcgatacttcttagctgttatgattatagatatccaggagtgacagaagggaaaccgagcagacgagaggctgggcgtgtgtgcctttagcgggtcggggggagctggaagctagtctggacccacctgtcggcagcccctctcagtccactgaaggaccgggtcaggtgaggctgagaacttgaccacttccttttcatacacatccagaaggcggacccggagctggtagacgcagccgcagttctctcgagcgccccacctgccaggcagcagtcagcctctatgcccccgtcacccagccagctctctgggtttcggggcgggaggctgagggctggctcc

SEQ ID NO: 274101 - DNA, 147 bp, Homo sapiens
  chr19:39439160-39439307
  hypo
ggggcctttgccccagggatcggggcctctcacttgggccactcactcgaaagaggtcacgaagcaggtctgcgaaggagccccaggcaccggtgttaggttcttttctatggcccagccgttcccgccatgctccacctcccagcc

SEQ ID NO: 274102 - DNA, 62 bp, Homo sapiens
  chr19:39544160-39544222
  hypo
tcaggaaccagaaggcagcacggcccccacagggctggcacgggcagcctcactgtggcctg

SEQ ID NO: 274103 - DNA, 98 bp, Homo sapiens
  chr19:39553665-39553763
  hypo
cacagagcagggcactcagccgacaacatgagggctgacggttgtcaccaagcagcgatgtctctccactgggagcctttaaaaaggctacacttggc

SEQ ID NO: 274104 - DNA, 42 bp, Homo sapiens
  chr19:39568094-39568136
  hypo
tgtccccaggtgcatgctaccgttctttctggaagggagctg

SEQ ID NO: 274105 - DNA, 90 bp, Homo sapiens; identical to SEQ ID NO: 219479
  chr19:39595965-39596055
  hypo

SEQ ID NO: 274106 - DNA, 245 bp, Homo sapiens
  chr19:39597518-39597763
  hypo
gcaggtcatttctgcttccccgcgggtcctccacctgctctgggtctgatcagttctccccgccccagggctgtgaggagcggctgacgccctttgctgtcttcccgaggccctggagtgccgtgcgtgtgaaggagtacgggtatacgcggctgcacatcctcaacgggacccacatccacatccagcaggtgtcggacgaccaggtcagtgaggggcaggccgaagtcacctgactgtacagc

SEQ ID NO: 274107 - DNA, 157 bp, Homo sapiens
  chr19:39642874-39643031
  hypo
tgatgaaatcttgagccatcccactctgtcccgcccgggacgtgaatcacctttcttaccccacatatccatggtgtatgtgctacccatctgtggctactcagtagctttctcggttctcacatccactgttgccgtatcacagtgcttatgttca

SEQ ID NO: 274108 - DNA, 220 bp, Homo sapiens
  chr19:39644535-39644755
  hypo
ttttgaggccatcatatgcttgcttttctctctgtttgccacctctgtatgcagcctgaagcagtttccttttgcctggctttgaaccttaaagtccgaggatggagtattgttcgatgtttttgcctcttctgtgtggcgtcttctttgatgctcatccacatgtagctgtagtcattcattcattcattctccctatcatgtgcggtgccatggagcc

SEQ ID NO: 274109 - DNA, 185 bp, Homo sapiens
  chr19:39645707-39645892
  hypo
ggaaggacccaggtgcgtctgtctgctgtgtgccggggcgcttgctcactgttgtccctggattcaccatggcctgggtgcccatcctgggtccgggcacccagcagccttggtccctaccgcctaccagactggagtccctggtagagcccctctagggtgtcaactcccgtgggcaggaagtt

SEQ ID NO: 274110 - DNA, 583 bp, Homo sapiens
  chr19:39646159-39646742
  hypo
ccctccggaggcctcgaggggaacagacagtgttcacaggagaaacagttacacctgcgagctctgcctcgggccagcctttgcactggaggtgggatttgaaggggagggaggggtgctgtggagcatctttttcttctgttcctgaacgggggttctgatcacatcagcctcatgcttggagcagctggttaagggcacagacaccgggacagacatccagcctgggagtcccagcgcctgacctcccctcgggcatcaagtcactccgcctctccgcgcctcagtttcctccatgatgaaaggggcctgctgaaggacctgtctcatttagggcagcagtgaggcaaagccccggagcccatgcctgtgccaagagcagggcctggcccagaatatggccttgtcacgttgagctgccttttttcagcagggttagtttcatcctggtgaggcggcgccagcatggcgttccaccttcttggcctcctctccctcctccctttcctgccatccacacctcccggccctattctcacacctcaggatggcgatatgggggcttcaccgtggtctcccctga

SEQ ID NO: 274111 - DNA, 225 bp, Homo sapiens
  chr19:39650786-39651011
  hypo
agacccattttctccccaggcgtcaaggtcagacttccagggagtgagtgtacgaggcccagggacttgtgtctgtctcggccccatccccgtgccctgcgcctcctcagggaccaggctcattactttggtaatggcatcacccatttgttccacagatatgtctcgagcacctactgtgttccagccactgctctagatgccggcaagaaccagacagacaga

SEQ ID NO: 274112 - DNA, 59 bp, Homo sapiens; identical to SEQ ID NO: 219482
  chr19:39653250-39653309
  hypo

SEQ ID NO: 274113 - DNA, 274 bp, Homo sapiens
  chr19:39663617-39663891
  hypo
tttgagaacatgtcggtgacacgctccaactccctgcggagagacagcccgccgccgcccgcccgtgcccgccaggaaaatgggatgccagaggagccggccaccacggccagagggggcccagggaaggcaggcagccgaggccggttcgccggtcacagcgaggcgggtggcggcagtggtgacaggcgacgggcggggccagagaagaggcccaagtcttccagggagggctcagggggtccccaggagtcctcccgggacaaacgccccc

SEQ ID NO: 274114 - DNA, 270 bp, Homo sapiens; identical to SEQ ID NO: 219484
  chr19:39664416-39664686
  hypo

SEQ ID NO: 274115 - DNA, 85 bp, Homo sapiens; identical to SEQ ID NO: 219485
  chr19:39670670-39670755
  hypo

SEQ ID NO: 274116 - DNA, 196 bp, Homo sapiens; identical to SEQ ID NO: 219486
  chr19:39671859-39672055
  hypo

SEQ ID NO: 274117 - DNA, 637 bp, Homo sapiens
  chr19:39672255-39672892
  hypo
cagacccttcctgaccccaccggcccggggggtctacagatccatgtttcaggcgtccgcctggagcggaacaggggagtgcttaggacaagggtggtgccagaggatccactctgcccacatttagttgaccagctgaggcactccacgggaatgaatgactctcgacaggtgccggaggtgaggaggggcccggaggcccaggaggggcacagggatggattcgtccgcctgggggctggaggtgtgtttacagagccccaaaataaacaatgcaaccaggtcagaccagcggttctcacagtgtggttcccagaccagcagcatcactgggagcttactggacacgcaaataaatccctgtgtgccaccccagctgcatcagatgctggtggggcccagtgatctgtatttaacacaccctccgggggatgccggtgcccactcacgtttgagaacccctgcgatccacgactgccctcccgtgtaaaaggcccacctctgtgggactccaagtcatcagcaccctagggtccttccgtctttttccttcctcctgggacacctgcctctcccatgtcgtattagagaattccttatgctcccaagtgggcacggggagaggaaggcactcctc

SEQ ID NO: 274118 - DNA, 272 bp, Homo sapiens
  chr19:39690956-39691228
  hypo
acagctgaaggccttgactccgcctgcaggttcgaggacagccggctggatgcgtgcgtctatgagctgcatgtctggctgctggcggccgaccgccgcacggtcattgctcagcaccacgtggccccccgaacttctgggagaggaccccctggccgctgggtccaggtgagactctccgcgccggggccctcaaccccagacgtgtgttcttgtcccaagacctcacagagggaggagaacaggtccgcgggtcctcaaaaagggctcct

SEQ ID NO: 274119 - DNA, 923 bp, Homo sapiens
  chr19:39804541-39805464
  hypo
ggccctgggactgcagcacccgcacccacctgtagacgagggagtcatcaacggaactgttgtactgaacctggtacatgcgtattccgggcacaggcctctgggctggccagcggatgagcacggagttcgaggtgagctcggctgccacgagccgacgctcagccgcagaatcgttggcacctggtctgcccggcgtggcgatgtcagaggagccgggctcggtgagaggcggcggggcagccggcgggggtgccatcagaggcagaggtaccacgcacacctccacgggcgccgtcgcttccccagcagcattggaggcgatacaagtgaaggtgccactgtccctcaaggtggtgatggtcacatccagcgtcccgtccccccggacccgggtccggctggagttccccagcagccgcccatcaggtgccacccagtgcaccaccggctcggggtcacccaccgctcggcagcgcaggctcaccgcctggccttccaccaccagggcccggccccccgcctgccgtgtgatcagcgggggctcacacaggaactcctcctcggggatggaccagaagtagcggtcggtgaggtgttcgggcgtggcgcaggtctctaagtcgtcctcgcgggtcagccgccgcagccagagcagctcgcagttgcagtgcagggggttgccgccgaagctgacggtcagcggggtgggcggcttgggcccggtgccctgcgacctcaggaagagcccgtcgggcgggagtttatgcaggcggttggaggtcatgtccagacggaccagcttgtgaagctgcacgaaggtcccctccgcgatgtggtcgatgaggttgtggtccagcgtgagggtgtttaggttcaccatctggcccaccgcctcccacggcagggcctccaggttgttg

SEQ ID NO: 274120 - DNA, 90 bp, Homo sapiens
  chr19:39816484-39816574
  hypo
accttaggtgatcctctgggattacaggcgtgagccaccgtgcctggcccaacatgtgttctcaaatgcgtcttgggagaggactgggga

SEQ ID NO: 274121 - DNA, 161 bp, Homo sapiens
  chr19:39816931-39817092
  hypo
gtcccccaagtctagggcaccgactcaaaacttagggagcttggatctgtgggcgtttataggataggttggtggaactagaggaggcggtccccagtttgtactgcctctccagggaatctccccaaacccgaagacacgtcccattgtgctgactcctc

SEQ ID NO: 274122 - DNA, 247 bp, Homo sapiens
  chr19:39818151-39818398
  hypo
agccacctctctaccgggaacctgaaaaggggtggggggagggagttcccacgtccctgaaaccggggacagagaggggaacaattagaaacatggaagagaagcagagagacagaaagggtgtgattcatctctgtgaagacctgcccatctcggaattctcagagcccggtacattgtgggtacttaatcaatgtccctcagagacagacgcagaaagcctgagaaagttcgatgtcaagagatg

SEQ ID NO: 274123 - DNA, 300 bp, Homo sapiens
  chr19:39913957-39914257
  hypo
tcccagatgagctggcattccgctcttgctcagaaatccggagcgcctggcaggcattggaacagggacagctggcccggccaggcttcccagagccactgctgatcctggaggattcggatctgggtggagacagcgggagcgggaaggcaggagccccgagttcagaaaggacggcgtcccgagtgcgagagctggcccggctttacagcgagcggatccagcagatgcagcgggcggagactcgggcatcagccaatgccccgcgccgccggcctcgggttctggcccaaccccagc

SEQ ID NO: 274124 - DNA, 174 bp, Homo sapiens
  chr19:39924224-39924398
  hypo
acaattaaagggtacaggagcgctgtgaaggcctccctcccagagccacctcctccatgcgcccagttcctgggactcaccataaatctgggccacgtgaccaccaccctttacacggacacggatgtctacaccagcaaatcgctccttgccgagaagcagaactggctccag

SEQ ID NO: 274125 - DNA, 40 bp, Homo sapiens; identical to SEQ ID NO: 219488
  chr19:39934201-39934241
  hypo

SEQ ID NO: 274126 - DNA, 53 bp, Homo sapiens; identical to SEQ ID NO: 219489
  chr19:39964614-39964667
  hypo

SEQ ID NO: 274127 - DNA, 120 bp, Homo sapiens; identical to SEQ ID NO: 226561
  chr19:39992816-39992936
  hypo

SEQ ID NO: 274128 - DNA, 165 bp, Homo sapiens; identical to SEQ ID NO: 219490
  chr19:40015704-40015869
  hypo

SEQ ID NO: 274129 - DNA, 34 bp, Homo sapiens
  chr19:40016259-40016293
  hypo
agcagcagggcgggcgcggtggctcacgcctgta

SEQ ID NO: 274130 - DNA, 34 bp, Homo sapiens
  chr19:40016713-40016747
  hypo
agagtgagactccgtctcaaaaacaaaacaaaac

SEQ ID NO: 274131 - DNA, 120 bp, Homo sapiens; identical to SEQ ID NO: 219491
  chr19:40019820-40019940
  hypo

SEQ ID NO: 274132 - DNA, 420 bp, Homo sapiens; identical to SEQ ID NO: 219492
  chr19:40020180-40020600
  hypo

SEQ ID NO: 274133 - DNA, 31 bp, Homo sapiens
  chr19:40026202-40026233
  hypo
tcaaggcctcgtgtttattgatacatgtaat

SEQ ID NO: 274134 - DNA, 148 bp, Homo sapiens
  chr19:40038357-40038505
  hypo
taggattacaggcgtgaaccactgcgcctctctggaatttgaccgtttatgctaaggcatgttgaggcagattttagcctcaggtcttccaggccaatggacccctcgcttctaaaagagttccagcgttgggttctgatcatgtccc

SEQ ID NO: 274135 - DNA, 105 bp, Homo sapiens
  chr19:40269170-40269275
  hypo
ccaacttatttttctctcagcgccttgtttatttactcattgatcccaagtgacatttttgaacattttatccattttcagttcgctccactttcttttgttttc

SEQ ID NO: 274136 - DNA, 175 bp, Homo sapiens; identical to SEQ ID NO: 219493
  chr19:40316373-40316548
  hypo

SEQ ID NO: 274137 - DNA, 136 bp, Homo sapiens
  chr19:40318907-40319043
  hypo
cgtgctcccaggaccgggccgccccctaccctctggccaagctggcaggagctgccgaagtccacaatcttgatggcgctgcgcttggggttgcacagcaagatgttttcgggcttgaggtcgcagtgaatgatgc

SEQ ID NO: 274138 - DNA, 76 bp, Homo sapiens; identical to SEQ ID NO: 219494
  chr19:40322485-40322561
  hypo

SEQ ID NO: 274139 - DNA, 151 bp, Homo sapiens
  chr19:40329690-40329841
  hypo
gagacatgggagaccgtggtgcccgaggcagccccgaggtagagaaccttagcccccggtttgatgtggatctggtccacaccacccaggattgctgctgctagcttggagcggaaggggttccaggctcggtactcaattttgtcatctc

SEQ ID NO: 274140 - DNA, 95 bp, Homo sapiens
  chr19:40343350-40343445
  hypo
gtgagtcaccacacctggcctgaaaagtgtattttaaaagagggatcaaaggctgcatgaagggatggatcaacggatggatacataataaaacc

SEQ ID NO: 274141 - DNA, 483 bp, Homo sapiens
  chr19:40362759-40363242
  hypo
ctgcctgacaggccgccgtgtaggctgccaggctgcggcacaggaaggctttgtcacccttttgcgcgcacaggtcgtatacgcattggcggaagtactcagagggactcagcaccgcctggcaggtcgcgaaggggccctgggggttccggagctgcccgcaggcctcgttgctctcatagggtgcagtctcctctgccaagcacactgggcagccttggggcccgcagccctcgccacagcccttggaggagccgggcgcccgccatgcagccccgaaggtctccacactggacgctgctgagccattgggcaggacaaagtcgtcactccagttgccattgaagttcccacagaggccacagagccgtccacggaaggggctggggatggacatgaggaggtgggcatcgccatcaaagagaagccgcagccccttggtcgtctgcagaaccatgtttcggccctcggcggtcacccgca

SEQ ID NO: 274142 - DNA, 41 bp, Homo sapiens
  chr19:40386023-40386064
  hypo
tcacttttccctcaccgacactcaaacgactgttcacctgg

SEQ ID NO: 274143 - DNA, 103 bp, Homo sapiens
  chr19:40405622-40405725
  hypo
cattagagcaaaggcgcgcctgggcctgccttatactgagggcctctgacagccaccctgagaaacttacctctgagggtccgcacagcctagattcccctta

SEQ ID NO: 274144 - DNA, 119 bp, Homo sapiens
  chr19:40408775-40408894
  hypo
ctgaaccatgctgggaggcacggatctggccgttggccagcaccacgggcagcttcatgtccacaccgttcacctgggaggtgagagaggcaggccacgcttcagaaagtagactttga

SEQ ID NO: 274145 - DNA, 65 bp, Homo sapiens; identical to SEQ ID NO: 219496
  chr19:40441597-40441662
  hypo

SEQ ID NO: 274146 - DNA, 70 bp, Homo sapiens
  chr19:40449596-40449666
  hypo
gtgtcctccagcctttccaccgccgcctgggcttgctgcgttctccttcgcagtcctcattctccttatt

SEQ ID NO: 274147 - DNA, 120 bp, Homo sapiens; identical to SEQ ID NO: 219497
  chr19:40474758-40474878
  hypo

SEQ ID NO: 274148 - DNA, 86 bp, Homo sapiens
  chr19:40660160-40660246
  hypo
caatagcttctcataaggagcgagcaacctaggtcccttgcctgcaccgttcacagtacggttcacgctcctatgagaatctaatg

SEQ ID NO: 274149 - DNA, 77 bp, Homo sapiens; identical to SEQ ID NO: 219498
  chr19:40660698-40660775
  hypo

SEQ ID NO: 274150 - DNA, 42 bp, Homo sapiens
  chr19:40706865-40706907
  hypo
gcaggatatccacacctccccgccataaacttcagtaacatt

SEQ ID NO: 274151 - DNA, 175 bp, Homo sapiens; identical to SEQ ID NO: 219499
  chr19:40711781-40711956
  hypo

SEQ ID NO: 274152 - DNA, 42 bp, Homo sapiens
  chr19:40720419-40720461
  hypo
tgttaactgggtgggagatgcggccatagcagtgttattaag

SEQ ID NO: 274153 - DNA, 34 bp, Homo sapiens
  chr19:40727176-40727210
  hypo
ctggctgctttacgtatattttaactcacatcct

SEQ ID NO: 274154 - DNA, 135 bp, Homo sapiens
  chr19:40738249-40738384
  hypo
agtgtctttattgcttgtaccgtacaaatatgaagacgaggagaaaggccagtagggacggagaactgtcagataacaacatcgcacacagaggaaaaagaccctcacccacccgaaccaaccccacccctcccc

SEQ ID NO: 274155 - DNA, 150 bp, Homo sapiens
  chr19:40739501-40739651
  hypo
ttaaaacctgaatctccaaccgcccaacagcccaggcctgggcgggaggtggagtcttccaaatgcgagtctgggcacaaaggtgaggctggaggctggaggcaggggctgcaggggccgctggggtgcgtctgggaggggcctgaagaa

SEQ ID NO: 274156 - DNA, 125 bp, Homo sapiens
  chr19:40741217-40741342
  hypo
ctccatgacctccttggcatcgctgggccccccaccaagcctgtgcagagacggccgtcagcacctgcctcccggagcagctgggttcgggcagacgggctttcggagcaggcaggccctgtatg

SEQ ID NO: 274157 - DNA, 367 bp, Homo sapiens
  chr19:40741640-40742007
  hypo
tccctaagtgccactgtggacgttttcaggggctgtgtggggacgacacactgcgaccctacaagcgagcacccttgtggacgctgccccctccaggccgcagggacagtggcagcagctggcgctgggctgggtggggccgacgccagccctcacctctgcttggggtccttcttaagcagcccagcaagcagggacttggcctcggggctgagcgtgcgcgggaagcggatctcttccatgaggatgagctcgaagaggcgctcgtggtcctggttgtagaagggcaggcggccgcacatcatctcgtacatgaccacacccagcccccaccagtccacggcccggccatagtcattgtcctcca

SEQ ID NO: 274158 - DNA, 137 bp, Homo sapiens
  chr19:40743496-40743633
  hypo
agccgagatcacaccactgcactcaacagagtaagactcctcaaaaataaataaataaataaatacaaataaagtaggtattgtggcagttgacactccgctagtggcctaggagcgctcatgggaggcttgggaag

SEQ ID NO: 274159 - DNA, 233 bp, Homo sapiens
  chr19:40744255-40744488
  hypo
tggaggcaaaaagaagcacacgtcatgaccaagtaacaataggccatgggcaagcccagatcagacagatgagcaaaccacgcatcccaaagcaggtgtgccaaccactgcacagagaaggcgcgaggcaaggagtgggtgacaaaagtgaggcgactctgtaaggggaagctgagcggctgcgggaattcacttcgagaggacacgggaacggagggctgctaggttttaac

SEQ ID NO: 274160 - DNA, 165 bp, Homo sapiens
  chr19:40744734-40744899
  hypo
cccacagctcctctccatcccgccccaccctaaagaaggaggccccagagggcaaagtcaaggcagccgcggctcacctcacccccgttggcatactccatcacaaagcacaggcggtcgtgggtctggaaggcatacttcagcgcctgggggatgaaggcagca

SEQ ID NO: 274161 - DNA, 161 bp, Homo sapiens; identical to SEQ ID NO: 219502
  chr19:40745940-40746101
  hypo

SEQ ID NO: 274162 - DNA, 260 bp, Homo sapiens
  chr19:40748512-40748772
  hypo
cttgtagtccatggggtcctcgcctggggcccgctgcttgaggctgttggcgaccatctggatggcccgcatccactcctccctgtgcagggacacacgtgagtcccagcagccaggagtcctgggcctcagagtcgaacagctgagtgccacctcccagccacccccagcaacaggcaagcaaatgaccacataaccatgggaatttgggcaagatctgtcagaaccagagagagctgaagggacctgagtgaaattcc

SEQ ID NO: 274163 - DNA, 105 bp, Homo sapiens
  chr19:40752791-40752896
  hypo
gcctggggctaagaggttggcgggctgtcggcgcagagcaccgcgcgcagggcggggtggaagggagggtgccgaagacactcgcaggggcgggcctaccccacc

SEQ ID NO: 274164 - DNA, 335 bp, Homo sapiens
  chr19:40753397-40753732
  hypo
gtccctgagcctcagtgaagcgctgaaagctacacgagactcaggagggtaaagcagggaccctctctagggaaggctcatgggacacccagccagggagcccacgggaaaagcaaaggaagaactctcctcgtaagccatgatctgcacccgcttttcagagaggggcccccacccctgccactcaacagcagtcccaagaacaccttccacttgcagaggctggtaccactgtgcgttatggtggaggactcctgtcgccctcccagcaaccctgtgtagtaggtactgccattcacttcatgctaaaatgacaagaccgaagcacagagagg

SEQ ID NO: 274165 - DNA, 72 bp, Homo sapiens
  chr19:40757959-40758031
  hypo
ccaggagcccagtgaggaggcgctgcagcacctagccaacaagcagtcaccgactggcacccacctgccctg

SEQ ID NO: 274166 - DNA, 196 bp, Homo sapiens
  chr19:40771905-40772101
  hypo
aaagcaacctactgcgtatgcacggtctggggcctagaagccagtcctgggggcttgaccgaggccctgatccctaccccaagaccttcacttctgtcctcagggaccagcaaccaacagactgagggacgccgaggccactgcttcgtctcaggttcccagaacggaggggaggagggcgcgaggcagcgccagc

SEQ ID NO: 274167 - DNA, 229 bp, Homo sapiens
  chr19:40773001-40773230
  hypo
tccccgagttcctacgctccactcttgctccctcccactcaccccacattcagcagctagagggatccccaacgctgaacctgtctttctcctgctcagaacctttgtggctccctggtgttcccagcaaaaaagccaaactcctcagctgaggatccaaggcccttcaggacctcgcctctgctgccctgcgttccaggtgcatgagctgagacgtgcacctagaaag

SEQ ID NO: 274168 - DNA, 207 bp, Homo sapiens
  chr19:40778365-40778572
  hypo
acactgggaccatcagcattcgctaacgaaggctcgcggcacgacagaatgcaggcgggatgccttttctgaaacgcacacacacacgccctgtcacctcaattctacaatatgcgtattgtttcacatgctgatgtcattgagattggcatgtaccttgcaatccatggacaaaactcacctatcgcattcttttcagaaaagcag

SEQ ID NO: 274169 - DNA, 169 bp, Homo sapiens; identical to SEQ ID NO: 219504
  chr19:40828672-40828841
  hypo

SEQ ID NO: 274170 - DNA, 445 bp, Homo sapiens
  chr19:40829074-40829519
  hypo
ttcttggaagtgagcaagcccgagttgctgcaccctgcagagcaggacactggcaggcaggaaacgcagctgggaggctctgcaatagttcaccaacaggcgccgcacaccccagcaccatgcggggatgatcttaactctacagccatccttggaggtgggtctatacagatgaggaggctgaagtacaaaggacttaagtgacatggccaaagccacgcagtcaggcccctgtgggcttcagggtgtactctgagctacacaccaggcctggggcctgtgggactgcgggccgcggcaggaagtacaggctgcatcatgggcacagtgaagagcctctgcagggcttccagtgaggggacgggccctgtcctgtgggccgcacacactgctgctgtggggataggggctggggtccatggtaactgtgcgagaccattcagga

SEQ ID NO: 274171 - DNA, 242 bp, Homo sapiens
  chr19:40829749-40829991
  hypo
gacagatgggaaagccgccagtgcaaagccaggaactgaggctggaaaggcaggttagacggccctgggccgagtgaggttgagatgtgttaaagagtcaggagcaccgctcagggaagacaacagctcgcacgcccagaatcgctcccccatccccactcactttactccctgtcgtggtgtctgccttggtctcggcgccgaggcggtcaaacacagacgtcctatggagacctgggagg

SEQ ID NO: 274172 - DNA, 109 bp, Homo sapiens; identical to SEQ ID NO: 219507
  chr19:40873917-40874026
  hypo

SEQ ID NO: 274173 - DNA, 83 bp, Homo sapiens
  chr19:40889834-40889917
  hypo
tagcgcacctggtcgtactcgttgttgccggggtagagaggccagcccaggtgcagctcagccatgacgcagcccagggacca

SEQ ID NO: 274174 - DNA, 207 bp, Homo sapiens
  chr19:40895455-40895662
  hypo
cagggtgactgtacggatgtggcgggcggggaggggcgcgaagttgttctccttctggaactcgaaaaggttttgctccagcagctcaaagaccaggtagaacttgagggcgtcatggaagaactcaaggaagcggatgacgtgggcctcttcagggtctaggcctcgcatgcagtgcagcagcttcagctcgttcttgatgatgcg

SEQ ID NO: 274175 - DNA, 43 bp, Homo sapiens
  chr19:40900557-40900600
  hypo
cccgcctgtgcctctcggcttagccccacgtccagctcaagct

SEQ ID NO: 274176 - DNA, 51 bp, Homo sapiens; identical to SEQ ID NO: 219508
  chr19:40900951-40901002
  hypo

SEQ ID NO: 274177 - DNA, 785 bp, Homo sapiens
  chr19:40901949-40902734
  hypo
ttcggaagatgcacgtcgggaaccttcggcacttgcatttccggcagccgaatctctgacactttcggcagctgcacctcggggaggtgcacatcgggcacagccatctcaggcaccttggggagttttatctctgggagcttcatgtcagggactttcatttcacagactttgggcagctgcacctctgggaggtgcacatcgggcacggccatttcaggcaccttggggagtttcatctctgagacttttggcagctgcacctcggggagtcgaacctctggcacagccatctcaggcattttagggagtttcatctctgggactttcgggagctgcacttccgggaggtgcacatcgggcacagccatctcgggcaccttcgggagtttcacctcagggagtttcatctcagggagcttcatctctgggacttttggaagctgcacttctgggaggtgcacatcgggcacggccatctcgggcaccttcgggagttgcacttcagggagtttcatctcaggaagtttcatctcaggcacctttggaagcttcatctcagggactttcatctctggcactttcggcagctgcacctctggaagccgcacctctggcacagccacctctgacacctctgggagtttcatctctgacactttcggcagctgtacctctggaagccgcacctccggcacagccatctctggcacctttgggagtttcatctccgacactttcagcagctgtacctctggaagccgcacctccggcacagccatctc

SEQ ID NO: 274178 - DNA, 113 bp, Homo sapiens; identical to SEQ ID NO: 219509
  chr19:40928722-40928835
  hypo

SEQ ID NO: 274179 - DNA, 263 bp, Homo sapiens
  chr19:40951499-40951762
  hypo
ttggttttgaactcctggcctcaagcaatcttctcgcctctggatatttaaacttgtttcctcatcctcaaaatataccctcaattcccaggctgcttctcagaacacatttcaaaggtttcctcctctccgaagccctccctggcagtccaggttgggttaggatccattctaggattccatggcctcctgtgccgccatcccagtcctggactgtcagttactatatggactgaggaacgccccgccgagggcaggtacca

SEQ ID NO: 274180 - DNA, 170 bp, Homo sapiens
  chr19:40952304-40952474
  hypo
gggtcccactccgtcgtggatgctggagtgcagtggcgcaccttggctcactgcagcctcagcctccctcctgaagcactagtgtaactctgtccccgggttacagccgtatgcttctttctgatgcctcccctccacccctcaccaactgtccacgcaggctcccaggc

SEQ ID NO: 274181 - DNA, 31 bp, Homo sapiens
  chr19:40955776-40955807
  hypo
aacctttaatgctttcaaatcgggaggtgtg

SEQ ID NO: 274182 - DNA, 66 bp, Homo sapiens
  chr19:41008064-41008130
  hypo
atcatagaacgctacgaggagctggcggctgagctgctggcctggatccaccgcaccgtgggcctc

SEQ ID NO: 274183 - DNA, 247 bp, Homo sapiens
  chr19:41133575-41133822
  hypo
acctcaagtcatagggtccccgcatttcccacaggttccctggctgagccctacgaggagctggaggcggaggagtgcgggatcctggacggctgcaccaacggccgctgcgtgcgcgtccccgaaggcttcacctgccgttgcttcgacggctaccgcctggacatgacccgcatggcctgcgttggtgagggcgggcccggggccagcatgcgcagggagaggcgaggcttgtccagggagggtg

SEQ ID NO: 274184 - DNA, 93 bp, Homo sapiens
  chr19:41168076-41168169
  hypo
cagggcggggacgccgacccattatagacagtgacagcctagagccatcacggcgggatggtggggaggggacaggcagaggggtgggaggcc

SEQ ID NO: 274185 - DNA, 266 bp, Homo sapiens
  chr19:41168199-41168465
  hypo
ggctggaatggggggcacaggcagaggggtcggggcggggactggtgaggtgcaggcagagggcaaaggggtcgaggtccagatgggagatgtacaggcagacggatccgggccagggcggggaggtacaggcccagttgaggagcataaggaaccataggagcccaaaggaggcgcccgaccagtcagggaggacttcccagaggggtgaatggctgagccagggcctgaagtataatgttcatgaatgcgacagcaattttttt

SEQ ID NO: 274186 - DNA, 566 bp, Homo sapiens
  chr19:41281362-41281928
  hypo
gtttccttgtactacgggagagagggaggggaggaaattggagaccccagcacccccttgctcactctcttgctcacagtccacgatggcccggtccctggtgtgccttggtgtcatcatcttgctgtctgccttctccggacctggtgtcaggggtggtcctatgcccaagctggctgaccggaagctgtgtgcggaccaggagtgcagccgtaagaatggggaggggagaattgggggcttgggcgttagcctgtgtggagggtgctgcattcccttctattccttccctagaccctatctccatggctgtggcccttcaggactacatggcccccgactgccgattcctgaccattcaccggggccaagtggtgtatgtcttctccaagctgaagggccgtgggcggctcttctggggaggcagcgtgagtcttgggagagtgaaagagggaagggtacagagctggggtagactcattatccccatgaagggaagatttgaggggggtgaactgaaatagacattgtggggggatattgttacttactttattttatttgct

SEQ ID NO: 274187 - DNA, 230 bp, Homo sapiens; identical to SEQ ID NO: 219514
  chr19:41292578-41292808
  hypo

SEQ ID NO: 274188 - DNA, 61 bp, Homo sapiens
  chr19:41602157-41602218
  hypo
gccacaaacctctacgaaggggaaaagcgttcatgcccattttacacgtgacaaagctgcg

SEQ ID NO: 274189 - DNA, 41 bp, Homo sapiens; identical to SEQ ID NO: 219515
  chr19:41616326-41616367
  hypo

SEQ ID NO: 274190 - DNA, 174 bp, Homo sapiens
  chr19:41643141-41643315
  hypo
tggccctacaccaacgcagtgctgctggagatccagcgcttcatcagcgtggtgccgcgcaccctcaccctcgacacccacctgcacagccactgtctggccaaaggtgcccactgagtctggagatcctgtgtggggccccgatgcatgagcgtattccgagatcagccagaa

SEQ ID NO: 274191 - DNA, 98 bp, Homo sapiens; identical to SEQ ID NO: 219516
  chr19:41665355-41665453
  hypo

SEQ ID NO: 274192 - DNA, 260 bp, Homo sapiens
  chr19:41673620-41673880
  hypo
ctgtgctgacaatacgtagctacgtaggaccaagcatccagcagaacgcacagtccgagacactctaggttgtggtagtaactgctgtaaaataactcctttattattgcacgtcagaataggcaagagagtgtaacacagaaaacatcagctactcttcagggtggtgactgctccttagtctaggtatgtacacctggaagggtccgtgaacattttccatgggagagatggatacagagataagttaaaggaaattg

SEQ ID NO: 274193 - DNA, 342 bp, Homo sapiens; identical to SEQ ID NO: 219517
  chr19:41675691-41676033
  hypo

SEQ ID NO: 274194 - DNA, 350 bp, Homo sapiens
  chr19:41680150-41680500
  hypo
tgagccaccgtacccggctgaaatttgtaatcaacccataatcatctattacttatgtaactgaattcctatgaaaagcataataaagtggagatcataaaggtgccgacttcgggctgttgtaagatttcggtgccacacctagcacagaaaaagcatggagagcagaagggcagtgaacgccagctggcacacgttggctacgtgcaagtattcgcctaaacgctgcgcaggtattcatcatatgatccccataaacctctgagggctgcactcacatgtcatccccgatctgctgatgagaagttcagttataggcccaaggtcacatatcccgagccagcgtaaaa

SEQ ID NO: 274195 - DNA, 446 bp, Homo sapiens
  chr19:41809773-41810219
  hypo
gcgcctggccatgccggctcacagtagtcaccaagacaacccagttccctggggttgccatttgggaatgatggcgcctttcatctggatttctccaacacaggtttcaaccgcagcggaggtggtggctatagccagaaccgctggggtaacaacaaccgggataacaacaactccaacaacagaggcagctacaaccgggctccccagcaacagccgccaccacagcagcctccgccaccacagccaccaccccagcagccaccgccaccacccagctacagccctgctcggaaccccccaggggccagcacctacaataagaacagcaacatccctggctcaagcgccaataccagcacccccaccgtcagcagctacagccctccacaggtgagagaatgagtgtgtgtttgtatgtagtgatcgcacgtgtgcttttgaac

SEQ ID NO: 274196 - DNA, 122 bp, Homo sapiens
  chr19:41854193-41854315
  hypo
cctcacctggtacagctccacgtgctgctccacttttaacttgagcctcagcagacgcagctctgcccgggagagcaacacgggttcaggtaccgcttctcggagctctgatgtgttgaaga

SEQ ID NO: 274197 - DNA, 120 bp, Homo sapiens
  chr19:41881465-41881585
  hypo
agccactgcgcccggcccgtgagcccgtttctttatctgcaaaacagggattaaaaacaagccaacaccccttcagcactcctccgcaaaaaaacaccccaaaacaaaataggccaggcg

SEQ ID NO: 274198 - DNA, 183 bp, Homo sapiens
  chr19:41919912-41920095
  hypo
cataaccaattgtgggaccccggtcccctctacacccccagggccggatctccttctacatgaccaactatggtgaggagggcacgcacgtggggagtgccgccgccctggacaacacggacctggtgtttggccagtaccgggaggcaggtacgtctgtccgtggtttggccctgtggtccc

SEQ ID NO: 274199 - DNA, 241 bp, Homo sapiens
  chr19:41921080-41921321
  hypo
acatgctctaggagggcaaacgccctgtggtgtttgtctaaggtctagtgtcatccgtgcggaaaaagatttccagacaccaggcagcaagctgggcccccgccagctgtgctgagcactgcacctgtttttgctgaagggttctcttgtgagggcaccaggcaggaccgagcaagcctcatgggaatcatgggagccgctgagctctccacatgggagagctggccgcctctgcaagaat

SEQ ID NO: 274200 - DNA, 234 bp, Homo sapiens
  chr19:41932289-41932523
  hypo
gcagccactgtgggaagctccggcaggctgctgacagcaagaagcggcggaggtccttggggtaggaggcgaagtcagggatctcggtggcggcggcggccccccaagcctggcagccccccgtttcagtgctgtccccactgggcagggaccccagccgccactgctgctggttccagtaagcaaagggcagcgggatagtctggcccaggcgggtggagaggttggcaggta

SEQ ID NO: 274201 - DNA, 468 bp, Homo sapiens
  chr19:42348888-42349356
  hypo
ggcagcggtggcgcgaggctcaactcgaagcgctattggtgggactgatagtcttgtgcgccaagaagctggcagaagggaaggggcgggacatcagttcaggatctcaaaccgcattggtcgtctgcctcggctgagagaggcgatgcttgaagttcattggtctttgtgagacagggtaagaaaagcagcgcgagcttggcggttcctctggccactttctcacagtgtctttgggcgtcttcttgactgaatctgactccattggaggctgtggtaaccgtgaactagctgcacgaacacggtccctcctgcctttccgtcctcctccctcttagccggactccctaacccaggcatcccctctcctccccctcgcgcccctcccgccctcgcgccccctctccccttccctgcctcgcgggccccttggcgcgttcccggttccccactcgctccctggggcac

SEQ ID NO: 274202 - DNA, 134 bp, Homo sapiens
  chr19:42373112-42373246
  hypo
ggcacctgtacctccggggtggcgctggggttggctccatgaccaagatctatgggggacgtcagagaaacggcgtcatgcccagccacttcagccgaggctccaagagtgtggcccgccgggtcctccaagcc

SEQ ID NO: 274203 - DNA, 161 bp, Homo sapiens
  chr19:42383169-42383330
  hypo
gtcacctggtggcgcgtcctccatggcaactacacgtggccccctgagttcttgggcccgggcgaggaccccaatggtacgctgatcatccagaatgtgaacaagagccatgggggcatatacgtgtgccgggtccaggagggcaacgagtcataccagca

SEQ ID NO: 274204 - DNA, 241 bp, Homo sapiens; identical to SEQ ID NO: 219519
  chr19:42398490-42398731
  hypo

SEQ ID NO: 274205 - DNA, 308 bp, Homo sapiens; identical to SEQ ID NO: 219520
  chr19:42400292-42400600
  hypo

SEQ ID NO: 274206 - DNA, 352 bp, Homo sapiens
  chr19:42408203-42408555
  hypo
gaagaaattggtccacgagggcccactgacgtggcgggtgactaaggacaaggcagtgggtgagtgccagagcagctgcctagtgcagggtgttggggcagtgagccaagggcggggagggggtcgcgcgggggcacgccgtgtgagcactgctcgccccgtagaggtgcatgtgctgctgctggacgacctgctgctgctgctccagcgccaggacgagcggctgctgctcaagtcccatagccggacactgacgcccacgcccgatggcaagaccatgctgcggcccgtgctgcggctcacctccgccatgacccgcgaggtggccaccggtgagtgcagccactgcatg

SEQ ID NO: 274207 - DNA, 304 bp, Homo sapiens
  chr19:42408828-42409132
  hypo
cacaaacactggaagcggctggagggtgggagtggctggaggggtttcgttaggtaagccagggtacatgcccgattccataaggaggtgtgagaggtggggctcaggaggacacatcgggccctggatattagcagacagtgagtggtgagttgagccatgggagccctgagagcgccaccactgtgggtgacttctccagcttgtgcttagggaggggcaggcactggggggacctgggctctgagccccatctccccctctccctgcagatcacaaagccttctacgtcctttttacctgg

SEQ ID NO: 274208 - DNA, 95 bp, Homo sapiens
  chr19:42409333-42409428
  hypo
gctctcatcactgagactgccggatccctgaaagtccctgcccctgcctctcgccctaagccccggcccagcccgagcaggtgaggggggccatg

SEQ ID NO: 274209 - DNA, 595 bp, Homo sapiens
  chr19:42424087-42424682
  hypo
atgatacgcccagacgtgacgaactcacagacatgacacgcccacagacgtgacacacccagacatgacgaactcacagacatgacgcgctcacagacatgatacgctcacagacatgacacacccagatgtgacacactcacagacatgacacgctcacagacatacactcacagacatgacacgctcacacatgcgctcacagacatgacacgcccagacatgatgcactcagacatgacacgctcacagacatgcgctcacagacatgacatgcccagacgtgacactcagacgtgacgtgctcagacgtgaggcacagacatgacatgctcacagacatgataacgctcacagacatgcgctcacagacatgacatgcccagacgtgacacactcagacgtgatgcactcagacgtgacgcacagacatgacatgttcacagacatgacatgcccagatgtgacacactcacagacatgacacactcacagacatgacacgctcacagacatgacacgcccagacatgatgaactcacagacgtgacacacagacatgacgcactcagacatgacacgctcacagacatga

SEQ ID NO: 274210 - DNA, 545 bp, Homo sapiens
  chr19:42460853-42461398
  hypo
aacagctttattttcaaaggcgggatccctccccgggcttgtgatgggacggcgctgtgggcccgagcagcagagccgtgcaggacaggcatgggcaggggtggggcagctggcccgggaggccggcaggtcccagaagacacctcacacgggttccatctgcagctcctccccgtccacagcctcaatctggtggaaggcagcgtgggagccgatgaccaccagggtggctcctgcaggaaagccggcagctcagggccacactcctgcacctggctcccaccatccaccccagctgctcagaccctgtactcacccagcacccagaagacggccgagcccgcaccagccagccagaagaaggggaaggagatgcctccagccagagcatactgatgcgctgggctcacctctcggcctgggggcagatggcattggggtgctgttccgactctccatgccctctcccagagtaacccctgctgccccccaacaatccgtacaagctccaggttctcgggatcgaatccaaactcctcatgcca

SEQ ID NO: 274211 - DNA, 55 bp, Homo sapiens
  chr19:42638977-42639032
  hypo
tcgccggatcgatacgtttgactcccgacaagacaataatcgcttgtacgcggcc

SEQ ID NO: 274212 - DNA, 56 bp, Homo sapiens
  chr19:42657375-42657431
  hypo
attctaggactgcacatacccgagcgtcttggcccgagtcatgtctgtgtgtgaac

SEQ ID NO: 274213 - DNA, 185 bp, Homo sapiens
  chr19:42700691-42700876
  hypo
ctccgtggggccacgccggcctcccacatctcccatgggctccgatctcctgtggccccacgccctgtccccacacgatcctgtttctctacccgatgctcccagggttgtcctccgggctcagatctgacccacctccgggccccgagggtcagtccctcaccccccgcgcctcgcccgcactc

SEQ ID NO: 274214 - DNA, 88 bp, Homo sapiens
  chr19:42712732-42712820
  hypo
actgccagtgcctggcgcatggaataaaatccaaactgtcatccctgccgtggcccgcgaggccaagctgctccggccccagcctggc

SEQ ID NO: 274215 - DNA, 432 bp, Homo sapiens
  chr19:42722466-42722898
  hypo
cctccttccaagcggcaacagaaccctccattccgactgtgtacatctcgatggcgtccatcacgacccccatcacagtcagatgtctccacccagagccaaaacggcccctccgtaaccccttccaatctctgccctccagggtcgcccagatacccgctccctaacttgcaacaactagagagggtctgtcagggagtctaggctgtggtgtatgcgtgtccccttaccgcggggccttgggtgtgacggtcgccacgccccccacttaggtgactcaaggtcaggacctgcatgtacttgagacaagtcccctccctggacctcttcccacccccgcaattaactcctcttgggagtcgggagatctgggtcctgcctagcactggcccagtactggctctgcctgagctgtagcagtgaattcaaaag

SEQ ID NO: 274216 - DNA, 31 bp, Homo sapiens; identical to SEQ ID NO: 219526
  chr19:42723738-42723769
  hypo

SEQ ID NO: 274217 - DNA, 46 bp, Homo sapiens
  chr19:42729404-42729450
  hypo
tcagcaggggctcgccggcaacaccggcggacggctcacagcccgg

SEQ ID NO: 274218 - DNA, 375 bp, Homo sapiens; identical to SEQ ID NO: 219527
  chr19:42791226-42791601
  hypo

SEQ ID NO: 274219 - DNA, 94 bp, Homo sapiens
  chr19:42796467-42796561
  hypo
tcagcgggcgggcacgcgctgcccctgggtaccagccctgcgtccagccaggctggaacagtcacctcgtacgggcccacgagctctgtagctc

SEQ ID NO: 274220 - DNA, 182 bp, Homo sapiens
  chr19:42813635-42813817
  hypo
caggcataagccaccgcgcccagccctccctattcactttgctactccccttgacttatctgcatgctgatggccaccctatctttatattccaggacaccatggatacccagggaccagtctcccagccttttcagcagcctgagaaacctggtcgtgtccgtcgtcggaagactaggcgg

SEQ ID NO: 274221 - DNA, 143 bp, Homo sapiens
  chr19:42856439-42856582
  hypo
tggccctccctgcccgctgggcatacgcccgctgtcctgacgtggatgagtgtcgcctgggcctggcccggtgccacccgcgggcgacctgcctgaacacgcccctcagctacgagtgtcactgccagcggggctaccagggt

SEQ ID NO: 274222 - DNA, 236 bp, Homo sapiens; identical to SEQ ID NO: 219528
  chr19:42873732-42873968
  hypo

SEQ ID NO: 274223 - DNA, 315 bp, Homo sapiens
  chr19:42906776-42907091
  hypo
caggctcttgagcatgctgtcgggtgccagcagcggcgacatgaaggggttcttgactatgggtgaggagtagaggggcatctgtgtggcaccctggctggagcgtcgggggtggaaaccctcggggaaggcggcacggacgcccaggcctctgtccatggggctcagctcatttttggcctcagcctcttcccctgcatcctcaggtggtaataagaagttgacatcggagggtgtggaggggctaagtgtctcagctgacagcgacatctcgggggtgtccgacgacgtctcggagtttcccctcaggctcaa

SEQ ID NO: 274224 - DNA, 70 bp, Homo sapiens
  chr19:42914487-42914557
  hypo
atcccttatgcagcgtgacatactcccggaggaagtcggcggtgagcccctcgtcgccctcaaagaagag

SEQ ID NO: 274225 - DNA, 84 bp, Homo sapiens
  chr19:43181320-43181404
  hypo
tctatagtaattttgtctttcgatgcacgttcacagccagcgatggccaatggtgtctctcacgctgcatcattctcaccctga

SEQ ID NO: 274226 - DNA, 150 bp, Homo sapiens
  chr19:43918868-43919018
  hypo
gccactcaccttccgagcatgcgcaccctccgagattgccaggaattgacttctctgtggccaatgaggtgccgcgttcctccaggctcatccaatgaacttatccgatgcttttgcatccaccaatggggtttcgagtgctgtgtggcc

SEQ ID NO: 274227 - DNA, 327 bp, Homo sapiens
  chr19:43919347-43919674
  hypo
ggctctcagaatcccgggttctgatgaggctggggctggggctgggggccgagattctgggtccctgagagaatgtaagggacccctgagactgagggagaagcggccttcagggccacactcctgatcctgaagttggagggcactgggtggccgggcctgagaattaaaaccatgaaaaactggggcgtgataaacctgtgaactcgctccagctcacaagccggttagggacagaacgactttagaagtcgtggtcatatacaccataaaccccactgtgaggccgggcatcagggctcactcctggaatcccagcactatggg

SEQ ID NO: 274228 - DNA, 36 bp, Homo sapiens
  chr19:43975086-43975122
  hypo
tacaggcgtgagccaccatgccgggcccaaagtgtc

SEQ ID NO: 274229 - DNA, 127 bp, Homo sapiens; identical to SEQ ID NO: 219531
  chr19:44005794-44005921
  hypo

SEQ ID NO: 274230 - DNA, 122 bp, Homo sapiens
  chr19:44096724-44096846
  hypo
agccctgggagtccgccaggccgtagggggaacactggcggcggcgcctcctccagcacctcccacgtctcgtcctccgggcttaacgcagcggcccgctctgagtcgccaccacctgattt

SEQ ID NO: 274231 - DNA, 93 bp, Homo sapiens
  chr19:44128766-44128859
  hypo
ttttgactcaagtttcttcctccactaagaaacagagtccaagaaacaggtccaagtcccttcccaccttgtctaaaacgctccaagtattta

SEQ ID NO: 274232 - DNA, 90 bp, Homo sapiens
  chr19:44207878-44207968
  hypo
gcgtacaagagacatagccacagagctcagcatagtggttcagaggatgtactcaggttccagtctgtctgggttcgaaagccaacactt

SEQ ID NO: 274233 - DNA, 763 bp, Homo sapiens
  chr19:44222771-44223534
  hypo
aggaaaggctggaggccctgcgcacagcctttgagtcgggtgacctcccccaggccgcctctcacctccaggagctgctggcctccacggaaagcatccgcctggaggtgggcgtcacgggcgagtcgggcgcgggcaagtcctccctcatcaatgccctgcgtggcctggaggccgaggaccctggcgcggctctcacgggcgtcatggagaccacgatgcaaccgtcgccctatccacacccacagttccctgacgtgaccctctgggacctgccaggagccggctctccaggctgcccggctgacaagtacctaaagcaggtagacttcagccgctatgacttcttcctgctggtctccccccgccgctgcggggccgtcgagacccgcctggccgctgagatcctgtgccagggcaagaagttctactttgtgcgcaccaaggtggacgaggacctggcggccacgcgcacccagcggccgtcgggcttcagagaggccgctgtcctgcaggagatccgagaccactgtgccgagcggctgcgggaggccggcgtggctgaccctcgcatcttcctggtgtccaacctctcgccggcccgctacgactttcccacgctggtgtccacctgggagcacgacctgccctcccaccggcgccacgctggcctgctgtcgctccccgacatctcgctggaggccttgcagaagaagaaggccatgcttcaagagcaagtcctcaagaccgccctggtgttggg

SEQ ID NO: 274234 - DNA, 167 bp, Homo sapiens
  chr19:44243554-44243721
  hypo
cttgacaaggtcacacaattcgttggtggtttcaggtaaaaacgggatatgcgaagtccagagaagagagagatcagtgtgtgtgtgctgggggtctggtggctcctccagaggcgaggataggcagtctgagggaggcaagccacaccctccgaatgccagcttaa

SEQ ID NO: 274235 - DNA, 266 bp, Homo sapiens
  chr19:44273509-44273775
  hypo
tggacatgcacacacacagccgtgcagagaggtgacttggacatgggtgcacatggacacgtgtgcatacaaagcggccctcacgcgttgatggcggccagcagcttgcgctgatgcctgcgggcagcatgagactccttcctgcgagtatgtttgtagaacatccaggcttcttgtagcactcgggcagcggactccttcatctgggggtgggtggcacagtgtccgtggagatagacccttacggttctgggaaggcagggcta

SEQ ID NO: 274236 - DNA, 39 bp, Homo sapiens
  chr19:44502274-44502313
  hypo
ttcctgattggtcccgggccaaggtcccagaccaagctg

SEQ ID NO: 274237 - DNA, 34 bp, Homo sapiens
  chr19:44530714-44530748
  hypo
tttttacagagtttcgctcttgttgcttaggctg

SEQ ID NO: 274238 - DNA, 34 bp, Homo sapiens
  chr19:44530808-44530842
  hypo
cctgcctcagtctcattttcgtcaaagggcccgc

SEQ ID NO: 274239 - DNA, 44 bp, Homo sapiens; identical to SEQ ID NO: 219535
  chr19:44564104-44564148
  hypo

SEQ ID NO: 274240 - DNA, 37 bp, Homo sapiens; identical to SEQ ID NO: 219536
  chr19:44575624-44575661
  hypo

SEQ ID NO: 274241 - DNA, 56 bp, Homo sapiens; identical to SEQ ID NO: 219537
  chr19:44578499-44578555
  hypo

SEQ ID NO: 274242 - DNA, 322 bp, Homo sapiens
  chr19:44932984-44933306
  hypo
tctgtaaggtttctcgcctgtgtggactctctggtgaatgagaagccctgagctgtaactgaagcctttgccacactcagcacatttatagggtttctctccagtgtggaccctctgatggataaggaggtcggagctgtagatgaaacccttcccacacacgtcacacacgtagggcctctctcccgtgtggaccctctggtggctgtgaaggtctgaattccgccggaagcccttcccacactcactgcatttatagggtttctctcctgtgtggaccctctgatggatgtggaggtcggagctccggccaaagctcttc

SEQ ID NO: 274243 - DNA, 31 bp, Homo sapiens; identical to SEQ ID NO: 219538
  chr19:44988475-44988506
  hypo

SEQ ID NO: 274244 - DNA, 93 bp, Homo sapiens; identical to SEQ ID NO: 219540
  chr19:45108543-45108636
  hypo

SEQ ID NO: 274245 - DNA, 150 bp, Homo sapiens; identical to SEQ ID NO: 219541
  chr19:45149597-45149747
  hypo

SEQ ID NO: 274246 - DNA, 41 bp, Homo sapiens; identical to SEQ ID NO: 219542
  chr19:45150351-45150392
  hypo

SEQ ID NO: 274247 - DNA, 432 bp, Homo sapiens; identical to SEQ ID NO: 219543
  chr19:45150422-45150854
  hypo

SEQ ID NO: 274248 - DNA, 35 bp, Homo sapiens
  chr19:45162026-45162061
  hypo
cactcaggcatatcccgtaacgccatcatcttcct

SEQ ID NO: 274249 - DNA, 206 bp, Homo sapiens; identical to SEQ ID NO: 219544
  chr19:45164648-45164854
  hypo

SEQ ID NO: 274250 - DNA, 147 bp, Homo sapiens; identical to SEQ ID NO: 219545
  chr19:45186851-45186998
  hypo

SEQ ID NO: 274251 - DNA, 104 bp, Homo sapiens
  chr19:45193693-45193797
  hypo
cgagcacttattatacgccatgcactatgctaagggctttacatttattcactgatatcctcacaacggttctgtgagtgaagttataccattgaaagtaatgg

SEQ ID NO: 274252 - DNA, 204 bp, Homo sapiens
  chr19:45206658-45206862
  hypo
ggagcctgcccagccgagcgaaggggacaacgtcacgctggtcgtccatgggctttcgggggaactgctcgcctacagctggtatgcggggcccacactcagcgtgtcatacctggtggccagctacatcgtgagcacaggcgatgagactcctggcccggcccacacggggcgggaggctgtgcgccccgatggcagcctgga

SEQ ID NO: 274253 - DNA, 92 bp, Homo sapiens
  chr19:45207482-45207574
  hypo
gggaggaggccggcgcctatcagtgtgaggtgtggaacccggtcagtgtcagccgcagcgagcccatcaacctgaccgtgtactgtgagtcc

SEQ ID NO: 274254 - DNA, 122 bp, Homo sapiens; identical to SEQ ID NO: 219547
  chr19:45211220-45211342
  hypo

SEQ ID NO: 274255 - DNA, 90 bp, Homo sapiens
  chr19:45268259-45268349
  hypo
cctctcctcctatgcagtggcggcaaacagcagtgccctcagtagtatacgcagcctgctgcgtgtagcggtggccttaagagaccttgg

SEQ ID NO: 274256 - DNA, 203 bp, Homo sapiens
  chr19:45279714-45279917
  hypo
cctaggatggggcgcggccagaatgccttgcttaggggcgaggcccacagcgccccgatggctgcccagcgagcaactgagcaaccaggctgatgttacaggttctacaggttgggtgaaagccacgcccggccacccctacacaaatgagttgctccccgcccccacagtcttgaacgccatcctcccgcctggcttcttcg

SEQ ID NO: 274257 - DNA, 81 bp, Homo sapiens
  chr19:45280161-45280242
  hypo
aagacccataccttcgacaaggcgctgtgtccaagtcccacctctcggtagctcccagcccttcccctcccctctccaaga

SEQ ID NO: 274258 - DNA, 377 bp, Homo sapiens; identical to SEQ ID NO: 219549
  chr19:45314500-45314877
  hypo

SEQ ID NO: 274259 - DNA, 321 bp, Homo sapiens; identical to SEQ ID NO: 219550
  chr19:45315415-45315736
  hypo

SEQ ID NO: 274260 - DNA, 304 bp, Homo sapiens
  chr19:45322433-45322737
  hypo
ccaattggggggcagcgtaagggaccttcctctccaccctgagccccctctcactcatccaagtatcacaccctcctttccacttcctgggagactggacgtcgttcacctctgcccttgaccccaccccttgaccccaccagccggggcctgatcggagcctccatagcccgcagagccaatccccggacggcagggttgggtgagcagctctctgaccctgaaagtgaccagcgccctgagccgcgatggcatctcctgtgaagcctccaacccccacgggaacaagcgccatgtcttccac

SEQ ID NO: 274261 - DNA, 38 bp, Homo sapiens
  chr19:45328104-45328142
  hypo
agacaccgtgcctggccgataatttggtcttgaggtcc

SEQ ID NO: 274262 - DNA, 295 bp, Homo sapiens
  chr19:45368653-45368948
  hypo
gcccagatgcacctgcgaaccaccagaatgtggccgccttccaccctaagatgggtcccagcttccccagcccgaagcctggcagcgagcggctgtccttcgtctctgccaagcagagcactgggcaagacacagaggcagagctccaggacgccacgctggccctccacgggctcacggtggaggacgagggcaactacacttgcgagtttgccaccttccccaaggggtccgtccgagggatgacctggctcagagtcataggtgagcagggtaagggcgggaggcaaggagg

SEQ ID NO: 274263 - DNA, 272 bp, Homo sapiens
  chr19:45377062-45377334
  hypo
tacctcctgccaacccgccccgtttctttagcattcctgtctatctgctaacttgtccacccgctctgggattctcctccttgctgatccagtccccccatttcccccagaccctcctgaagtgtccatctccggctatgatgacaactggtacctcggccgtactgatgccaccctgagctgtgacgtccgcagcaacccagagcccacgggctatgactggagcacgtgagtcacgtggtctcagaaccctgggtctgagggaggcgggg

SEQ ID NO: 274264 - DNA, 451 bp, Homo sapiens
  chr19:45377394-45377845
  hypo
tgagggaggaggggctgggcctaaattcctaagtcctccaggatgaagggagcttgcattttggcaatttggggtctccgggagtacttaggtccctggagcttggctcctggtgggtgtatctttagggatgaggcctgtgctcccctctcgaccttggtatccctctcacctgaccccacacccctccaggacctcaggcaccttcccgacctccgcagtggcccagggctcccagctggtcatccacgcagtggacagtctgttcaataccaccttcgtctgcacagtcaccaatgccgtgggcatgggccgcgctgagcaggtcatctttgtccgaggtgagtgggtcttgggggccgtgtgtggagacctgggtccgctcccctggagttctgcccttcaggacttggggctgcactgggggaggctgcgccgccgacctgggagg

SEQ ID NO: 274265 - DNA, 44 bp, Homo sapiens
  chr19:45382930-45382974
  hypo
gtaagggacaggtttttacccgcgtcacctctgctctcccaagc

SEQ ID NO: 274266 - DNA, 40 bp, Homo sapiens
  chr19:45385981-45386021
  hypo
agggtggctctgaccgctccgctctgcaaagactcctcgg

SEQ ID NO: 274267 - DNA, 72 bp, Homo sapiens; identical to SEQ ID NO: 219555
  chr19:45390079-45390151
  hypo

SEQ ID NO: 274268 - DNA, 353 bp, Homo sapiens
  chr19:45465023-45465376
  hypo
acagaggtgctctgcgagtgttttcctcctaaaagaagaggaccgcaccttcccaggtgttttcactgattcattctccagttattgataagcacccactctttgcccagcctgtgcctggccttcatgcatgatggtgtctaagacagcccccgtgtccattctccctccttaccctggcctctgtcccccacaggtgaccagcaatggcagcatcgggagggacccgccagcggagacccagcctcagaacccaccggcccagccggcacccaatgcctggcaggtcatcaaaggtgtgctgtttaggtgagcagacgggacttgggtttgttcaccgaaaacattcaaat

SEQ ID NO: 274269 - DNA, 65 bp, Homo sapiens
  chr19:45493681-45493746
  hypo
ctggagggcctgtccgtgcgctccgtcttcttcggcgttttccagtcattcgtggtcctcctcta

SEQ ID NO: 274270 - DNA, 261 bp, Homo sapiens
  chr19:45515279-45515540
  hypo
tctcgcggggctgcgtccctgagcacggtcaccctgggccctgtggcgcccccagccacgccgccgccttggggctgccccctgggccgactagtgtccccagcgccgggcccgggcccgcagccgcacctggtcatcacggagcagcccaagcagcgcggcatgcgcttccgctacgagtgcgagggccgctcggccggcagcatccttggggagagcagcaccgaggccagcaagacgctgcccgccatcgaggtgggc

SEQ ID NO: 274271 - DNA, 101 bp, Homo sapiens; identical to SEQ ID NO: 219557
  chr19:45546675-45546776
  hypo

SEQ ID NO: 274272 - DNA, 239 bp, Homo sapiens
  chr19:45567166-45567405
  hypo
tcgctgtggcccgcgctggcgctgctgttgatctgctgtgtgtgctgttcccgaagaggctccgggagcctgagctagtgagcctcctcctccctacccgcaggtcaccctcggagtccagctcagagtcccgctcccgctcccgctccccgaccccgggccgcgaggagaagatcacgttcatcaccagttttgggggcagcgatgaggaggcagccgcagccgctgctgccgcagca

SEQ ID NO: 274273 - DNA, 212 bp, Homo sapiens; identical to SEQ ID NO: 219558
  chr19:45567707-45567919
  hypo

SEQ ID NO: 274274 - DNA, 39 bp, Homo sapiens; identical to SEQ ID NO: 219559
  chr19:45569129-45569168
  hypo

SEQ ID NO: 274275 - DNA, 426 bp, Homo sapiens
  chr19:45570289-45570715
  hypo
cagagctcacctcccgggaagttagcaagcgggtgtctagtgagggagaggtgacgtgggccaggcagggctcatgatggcaggactgcccttaggctgagtgtatctagagcgccatctctgtagccggagggaggccggaatgccgctctgggacattttggagggagagtagcaggagaggagagtcgagcctgtcaccctgggccttgcaggaaggaggactgtggatccggacccagggtggggtgcggttggggtccctggagcctcacagtcctcctcccgccctgctgcatccccaggagccgctcccactcaggggaccgctacaggcggggcggccggggcctcaggcaccacagcagtagccgcagccgcagcagctggtccctcagcccgtcccgcagtcgcagcctgactcgc

SEQ ID NO: 274276 - DNA, 92 bp, Homo sapiens
  chr19:45572264-45572356
  hypo
aaaaagagagtggggctcttaagggaacccctcagccaccctgttctttctctctacagtcaaggcggataagaaggcggcacaagaaaaga

SEQ ID NO: 274277 - DNA, 1123 bp, Homo sapiens
  chr19:45574505-45575628
  hypo
cctttgcccagggcctctggcgacaggtccgggcctctccccgccctcgcctcagcccctgccctggcctcgcccgcactaggaactgggagcgcagctttctgtgccagtcctgctgcgccccaggcactgggggctggccgttccctcaccccctcactccaaaccggtctgtccagccgtccaccccacggaggggaagcctcctgccccacctcatgcaccccaagaaagccagagtccagacgggtgtaaataaaagggaaaatttacttggagaaggcgggcaaaaacgaggaggtcaatgggtgttggcagcggtaccagggacagtgaggggggctttcctgggctcaggcctcgccggccgcctcagggtgcttctgccgcaggtgtttgtccagggtggctcgcaggccgaagggcacatggcagtgggggcactcgaagcgggtgctgccaggcgtcatgccgtgcatgcggcggtggcggttgagcttactgctctgggcgcaggcgtagttgcagaactcacaggtgtaggggcgctccccggtgtgtgagcgccggtgcaccgtcaggttgctgctgttggtaaaatgcttcccgcagaactcacagctgcccccgggcccgcggctcttgccccctgacttgggcatctttttgggtgatgccttctggctgtttgcagggtcagttctttgttccgtggtgatggctccccaagtgtctccaccagggccggcttgagccccactgccaggagccccgggttcctggacacctgctgtggcggcggctccagccccctcaccaccgctgcatggaagggtgctggtgggggcagcagcatggacagccggctccggaggggctgcagaggcctgctcctggctggtgtcggccatgagggggctctggggcggcacctgccggtgggtcttcttgtggcggttgagcttgctgctctgggcgcaggcgtagggacactggtcgcaagcatagggccgctcgcctgtgtgtgagcgcatgtgcactttgaggttgctgaaggagctgagggtcttcttgcacacaggacaggtggggctccgccgggtgaggccgctgccacttgcac

SEQ ID NO: 274278 - DNA, 54 bp, Homo sapiens
  chr19:45601008-45601062
  hypo
ggtggtctctctcccgcgctggaatgggagagcagaggccgaagtccatcctct

SEQ ID NO: 274279 - DNA, 291 bp, Homo sapiens
  chr19:45603142-45603433
  hypo
ttagcacccattctgactcccggaagagcacgcgaagctggcccccagctggcactcggtaaccagccttcagtgcgtcagcgggagtgcgtgtgcacttgtttctgggagcgagtactggggctctgcgaaccttcacaggcatccgactccaagaggattaagaaccgtggggccaaatgccctgtgttggacggactgcagctggagcagtcactgagcacggaggccagaaacctgtttttacaaaagctccccaggtggttctgacaacctcgcttggctgtctgt

SEQ ID NO: 274280 - DNA, 528 bp, Homo sapiens
  chr19:45603730-45604258
  hypo
ccaggaggtaggtgccgtttgccccaatttgtagatgaggaaatggagcccatagaggtaaagtaattttcctgaggtcacacagtgggtaagtggtggagctgggattcaaatccaggcagccagcctggcgccgaagcctgcgcagtaataacccctgtgcggcggctgagtgcttggacgcattcggtgcaacgtgccatacggtctcttcatctataacccagaatcgtttataaaatagaggcaacagtgctggctttgcggtgttgtggcagggaggagaaacagaaacaggtggggtaagggcccagccttggtgggcacgcaggagggggtcactgtggttcgtggacagcttgagtccctggagatttgtgctgctcctctgtcctcagcattgcctgctgttctgacccttggcctctgggacgtgttcttcctgtgctactcagtgtctggtatgtgataggcgctcaatatattcttgctgcgtgagtgacttggtgaccccgtaaccagtcatgc

SEQ ID NO: 274281 - DNA, 539 bp, Homo sapiens
  chr19:45626602-45627141
  hypo
ccaggaagaaacctacgagcgcatccttgctgagggcaggacccgctctccacatcctggaaacccaacagagaaagacagtctctctggcagcctccctgtcttgaagttcgagaaggctgcatttctaggctcccacaacctgtctgtccggtttgaagccggggcctgagggcttcagggtactgatgcaggacagacagctctggttcaaacctccctctgtccgctcccacaggtgtggcctcagaagaccattccctctgtagcgtggtagaggctggaaattctactctgcaggattatgatgcggattaaatgcagtaatcgagtgtttggcagagtgcctggtagggaaggggttcagtaaagagctgctcgcaccattctgtgcagggaatgctttagggcatgttttagaattttagaacgtgtttcactacatgagtagcttcttgcagctttgaggccctggcatccctctcccctgcctgcaggcttccttgttcactgggccaagtccccgcagtaatcttcct

SEQ ID NO: 274282 - DNA, 259 bp, Homo sapiens
  chr19:45627566-45627825
  hypo
gtgctgggaagcaccgggcccttcgggggacgggaagaatttgggtgtggccagagcacagtgccccatgagtggagaggtccagattgtctatttttcttttcttttttttcccccaatgatcctagaaattctcccaagagaggtccagattttttgacaaggctgaagggcggcccctgagacctgactctacctgtctgcctggcctttcctcagtccagtgcgtgcacggccccctcctcgctctcacgcatca

SEQ ID NO: 274283 - DNA, 198 bp, Homo sapiens
  chr19:45629665-45629863
  hypo
tcactgctctgtgctgttggcgacggagcagggattggaacccaggcgcctggcttcgaggcccgcatgctgtggggaaatggggctctgccatgttggtggttatttattgtcgtgaacaagagctcaggcctggtttccaggtgtgactttattgcaccctcgccctacctccccggcttgagaattctggaaaat

SEQ ID NO: 274284 - DNA, 145 bp, Homo sapiens
  chr19:45631784-45631929
  hypo
agtcagtgtgtttgcgagagctggaatcgaagcctcttaaaatggcagatgatttggacttcgagacaagagatgcaggggcctcggcctccttcccaatgcagtgctcagcattatgtaacactggcttcgtggtgctcaaagg

SEQ ID NO: 274285 - DNA, 95 bp, Homo sapiens
  chr19:45647692-45647787
  hypo
accgtgcctggttttcagtttttatgtggtgcttaaagcaagccactcaggtacagagactctcagggcgagcactcgtgtgctcaaaccccggg

SEQ ID NO: 274286 - DNA, 157 bp, Homo sapiens
  chr19:45660340-45660497
  hypo
tccacctctgctgccgccaccccggcaaggctgccgcacctctcgcctggatttttgcaatctcctgctccctcggccacctgcttccgtcctcctcccatagcccattctcctggagatcctgtcagctcacatccatcctcggctcctgcctcct

SEQ ID NO: 274287 - DNA, 136 bp, Homo sapiens; identical to SEQ ID NO: 219567
  chr19:45678712-45678848
  hypo

SEQ ID NO: 274288 - DNA, 35 bp, Homo sapiens
  chr19:45694664-45694699
  hypo
cactgtgcccggccggctttatttagtttctgtgg

SEQ ID NO: 274289 - DNA, 119 bp, Homo sapiens
  chr19:45737164-45737283
  hypo
taagtgttgacagagcgctgaggtttttggaccacagtggtgccggagctcttattctaggactgcaagcgtccatggtactaaggtgctggaaccggaagcctcggtagcagtgagag

SEQ ID NO: 274290 - DNA, 93 bp, Homo sapiens
  chr19:45753567-45753660
  hypo
gcgctgtgtggcctccgagaggctcttgtcctctctggtctcagcctgcccgcatggggagtggctgtgccctgcaggcgaatacctgcacag

SEQ ID NO: 274291 - DNA, 166 bp, Homo sapiens
  chr19:45767999-45768165
  hypo
aagtgctggtgagccgcccaccctctccgccctgcccctgtgccacctccccctgccgctgcacctgaccctgaccccgctcggcctctgccctgcaggagaagtgtttgactacctcgtgtcgcatggccgcatgaaggagaaggaagctcgagccaagttccga

SEQ ID NO: 274292 - DNA, 100 bp, Homo sapiens
  chr19:45768393-45768493
  hypo
gcatgaaggcgccccggtgggcaggtgttgcatgtgtagggcatgtgggtgtgcccagcgcgtaggtgtgtgggtgatgggggcacgaaggtgccagggt

SEQ ID NO: 274293 - DNA, 134 bp, Homo sapiens
  chr19:45769021-45769155
  hypo
agatgcaggtgtgagggtgccggggcatgtggggtaagcagatgtgcaggtgtgagggtgccgggcatgtcggctaggaagatgtgcaggtgtgagggtgtttctgccttgacgctgctgtcctgaactcaagg

SEQ ID NO: 274294 - DNA, 109 bp, Homo sapiens
  chr19:45805727-45805836
  hypo
gatggcagctctgcgccaggccacagcagccgcccgctgccgctgccgccagccacagccgttcctgctggcctgcctgcacgggggtgcgggcgggcccgagcccctg

SEQ ID NO: 274295 - DNA, 244 bp, Homo sapiens
  chr19:45810102-45810346
  hypo
gcacctgttctacttcggacgagcccagccgatcagcgttggacacgtcaaatactgagcccacggcagctgtgtccacgccacctgtgggagcaagggacaggggcgtgaagaggcagcgaaggtgcagaggggctgggacgtggcccccgtgccaaatgcaacagccgcatgtagtgagtgcctactgtgtaacaggttacctgcacacaggtaatgcctgttcattcgtgagctcacgagt

SEQ ID NO: 274296 - DNA, 31 bp, Homo sapiens
  chr19:45813962-45813993
  hypo
tgatcctcagcctctcgagtagctgggacca

SEQ ID NO: 274297 - DNA, 224 bp, Homo sapiens
  chr19:45851245-45851469
  hypo
atccctgcccgccttcggaccctgcataacctcgtgatccagtacgcggggcagggccgctatgaggtggcggtgcctctgtgccgccaggccttggaggacctggagcgcagctcgggccactgccaccctgacgtggccaccatgctcaacatcctggcgctggtgtaccggtgagcactgcggccagccatggctgggggcaggaacggcagggacccatt

SEQ ID NO: 274298 - DNA, 118 bp, Homo sapiens
  chr19:45856038-45856156
  hypo
cgccaaacatgatgacggcccgcccgtagtggtgcactggtgggcagaggagagggggcgaggggggttacaagtgtggctggtgggacagggacagcctcacgcgacccaggatgct

SEQ ID NO: 274299 - DNA, 86 bp, Homo sapiens; identical to SEQ ID NO: 219569
  chr19:45866860-45866946
  hypo

SEQ ID NO: 274300 - DNA, 186 bp, Homo sapiens
  chr19:45867290-45867476
  hypo
gtctcccgggcggcgctggcctcccgcagcccctccaccagacgccggtactcgtcccgcaggcgctgctcgtctgtctctttgatcctgcggagagatgagctggggctgggagggggctggcaaccctggggacaagtcagacaggggccagggtcccaggggcagggcgggcaccaccgccag

SEQ ID NO: 274301 - DNA, 207 bp, Homo sapiens
  chr19:45895251-45895458
  hypo
ggacagctctggctccggccccccgggccctggccccccatgacgatggaagaggcggctgatgatctgctggtactgtttcttgtgggtagggggcagggccacagcaggggcctgctccatggagcccctgcgtttgaggggccggggaatttccgccaacacccgtgccacctcctccagctcgggcaccgactgtgcctccgg

SEQ ID NO: 274302 - DNA, 125 bp, Homo sapiens
  chr19:45903693-45903818
  hypo
ggctggggcatgctgatacccgcctctgtctgggaagtcgaaggaacagaacctgttcaggctggcggctcatttggatgaacagggagtgtgtgaccttgggcgttgagtcctctccactccct

SEQ ID NO: 274303 - DNA, 82 bp, Homo sapiens
  chr19:45949940-45950022
  hypo
cagtcacatggagccggtgtagaaagtaggagctgggccgggagaggtggctcacaactgtaatcccggaactttgggaggc

SEQ ID NO: 274304 - DNA, 802 bp, Homo sapiens
  chr19:45997474-45998276
  hypo
actgtccccttactggctctcgctccagtggcccccactgcttttcttcctcttccagcaatggctcttcgggcccagagttcgaatctcgcgatcgggatggggacggagtaccggcctggggtgtcccagagcccggactgagctggggagtcaagacctcgggcgatgagggctgagcaagtcggagtcgtaggtccagttctgatacggtagagagaggaggccgtgagctttcttcttggaggtgccccaaggagaaaccacccacccctcttggctttggtcccagcacctcggacatctcaccttccccagcttctcctgtctccaatctgttgggttcttggggttcttcgtcttccagcggggtggagctgctggtggaagagtcctccccggatcccgttccccgggccacccagcccagatggtccaaccgaagcctcaggtcttccagagggcgctcggatggaggcgcggtgtcaggatcaccccgtcgtccaggctccggggattggctcaggctggggatgctctccaagctgtcgcccaggctgggctgagggtgctggtctcgtggttccgagactgagcggccctgggggcgggggcggcgggcagttgaatccctgcggcccccggagcccactacaccatcaaaggcgatgtaggagaaggtcagctcccggggggtgccccagtcctgcgacgtggtctcctcctcgtcctcctctgagaattcccgggctgtgtgcagctctcgaaaatcagagtcgtcgttccctcctgcagtgggtga

SEQ ID NO: 274305 - DNA, 90 bp, Homo sapiens
  chr19:46021493-46021583
  hypo
tttgtgcattccagtgtgaccgtgtgcacctatgtgtaaaatgcaccattggcccggcgccgtggctcatgcctgtaatctcagcacttt

SEQ ID NO: 274306 - DNA, 307 bp, Homo sapiens
  chr19:46056763-46057070
  hypo
gcaagctcctatttcttggacgcaggcactgcgtgggaagcggaccggccgggattgcagagctgggcgcgcacctcttgcagctctgtgcgcagttcctccagggcgccctgtggcggcgccgcctgcacctgcgcctgcagcgcttccagcgccagcgccaggtggcccacctcgtcccgcagcgcgttccaggcagcacgctgctcctcctccttgtggcgctgctgcgcctggtggcgccagtactccagcactaggcagccgccgcccacgatgaagatggtggcttcgcccagcagctctg

SEQ ID NO: 274307 - DNA, 44 bp, Homo sapiens
  chr19:46136077-46136121
  hypo
tcggggcgaaggggcggggttagggtgggcgaaggacttacaga

SEQ ID NO: 274308 - DNA, 41 bp, Homo sapiens
  chr19:46208926-46208967
  hypo
agccaccgtgcctggcccacgctgtccttaaggagacactt

SEQ ID NO: 274309 - DNA, 161 bp, Homo sapiens
  chr19:46211661-46211822
  hypo
gagcgaaactgcatctcaaaacaaacaaacaaaaatatttgtggggcttctagatgacagttccttccacaggtggacttgtgtttgtttctgccagacatgtcagctagaagtaccctgtatcacacaggacgtgaacctggctgcgaacctgtgccgag

SEQ ID NO: 274310 - DNA, 154 bp, Homo sapiens
  chr19:46234863-46235017
  hypo
cgcccggcccgtcccctcctttcttacctcctgatttacaaatgagaaaattaagccttaggaggaaggaaagtcccatacattaggagttagtccacatcatagaatagcagctccacatcgctcgagcccaggagttcgaggcagtgagcta

SEQ ID NO: 274311 - DNA, 225 bp, Homo sapiens
  chr19:46236680-46236905
  hypo
ctggcctcaggaacgcactcttgctctgctcctcacgcctcgcgcaggatcctcgcgccgggaggattcgcacccaaccccaagcccggttgggaacgtggtgtccgagaccgtctgggatccccgcgcgcacggccggcttcccgggacccgcgcgagacgctgtctgatcgggctccctagagtggggcccggagaaaccagaacggcgggggcagcctcacg

SEQ ID NO: 274312 - DNA, 480 bp, Homo sapiens
  chr19:46286504-46286984
  hypo
actccctgcggctccgagagccaagaggaatctgagctcttctttccagggtggacggttctccagagtggaagtcggggcctccaaccggcctggggtgcctgggccttgagagggccaggcctgagaaactaggaggcaaggaccgaggagtcccagctgggcagggcctgggaaacgtggtcctgggcagttctgataatttaaaaaacaccgaggactttgatgaggggccctggctgcgggcaggatgctcttctccccaagagggtcctgctccagccgctggtgtgggtcaccagttgtgtgactcgcaggtccgttccctccctgggctccggcttttcctgctatgaaaaggggtgggaggcgctgggctgggagcaggcctgcactcctcctctggggaaagcggactgcctagaaccacagagtacacacacaggtcctctacatcatctcctccgaaggggacagacc

SEQ ID NO: 274313 - DNA, 620 bp, Homo sapiens
  chr19:46307536-46308156
  hypo
cacccagttggccatggagtcgaccagctccagcacggggatgccctcgaagtccgggttctcctcgtaggagtcgcgcccagcaccaccttcctcctcctcgtcgccctcctcctcactaaactggtagaagcccagcgggctgacctgcgtggcggccgagatgcgggctatctgggcccgcaggtagttggcctcgttgcccgggaagggtgggtagctgacgactggcgtgtccaggtagcctgtgaagaacttcttgatctttcgggcgttcacgatctgggctggagtgacgtggggcagccgcgtccatggcaggcccggctcgttgcacacaaagtacaggtacttgttggcgcctgagcggctctcctccttggggatcacgggcggcggcttccatacggacttagggacgatgtccacggccttctcctcgtcctcctcgccctcctcctcgccgtgcgcctccatgacctcgccaccttccgtcatctcctccacctcctcctcctctgcctcctcctcgccctcccggaattccacctcggccaccaggtagctgcgtttgattcccaggatcttgccccagaagcgacaggtgtggatgggctgct

SEQ ID NO: 274314 - DNA, 430 bp, Homo sapiens
  chr19:46321116-46321546
  hypo
ccaccgggctccctccggggtcagacgggggaaggggagggcaagcaggctagaagctgctgtctgcagcctggaggcggggtggccggggatgggttacctgcttcatgatgaggcgggacaggatgttcatgacgaagccccccaggcgggggtacatggtcagggactggatgacggtcctcatgagcagcatgggcagggggctctgctccatcagctgctgcatcaccacggccagcacctctgacgtgtacacgttccgctccgcaaagcacaggttggtggctgcgaggaggcggagagtgggcctgtcctctctgcccagctgccccctgggaggtgggagtcccggcctctgctgtctgcccatgtgaggggaagacttctaaagccctgacttctaaagcccctgcgggagagaggagac

SEQ ID NO: 274315 - DNA, 316 bp, Homo sapiens
  chr19:46326464-46326780
  hypo
tacccaggtgtcggcggcttccatgacttctgaccacaggcaaggtgccttctgccctctgctatgtgcctctggctcaactgctgctgaagcaacgtgctgccctgcccctcccagtcccacatgtcccaggtagcagggacaaacaggcctccagctccataccttctccagcccattgagcaccgggatgaggaagcggacgtctggcagtcgcttgtggtagagatcccggacccgcttcaccagctctggggagggtgggactgcatggaagcagcaggaggcaccaagttggaggcggaggggagcgtgg

SEQ ID NO: 274316 - DNA, 57 bp, Homo sapiens
  chr19:46327183-46327240
  hypo
ggtcaggtgttgcccggcagggtggcttgcggggcatgctggcgcccagggtgagac

SEQ ID NO: 274317 - DNA, 538 bp, Homo sapiens
  chr19:46330380-46330918
  hypo
ggctgaggccacaccggctcccctgctgggctgggcaatgccctcaggccccggcacaggactgggctgcacgaggagcctgtgctggccaccacgggtggactaagagcgagagtgggactgcccttcccaggagggcaagcgcacgtgtgtgtgtgtacacactacaggcagactcaggcacggtaaccctggtttctaggcagcttgatgccactgaaaatgaaaataaaacagacagaaatagccaaaaaaccactgaaagaagggaatgggcccagagaaacttgcaagggagtgtggaagacgtgggctggttactcaggatagaggcggcctctgcaagctgcaggctgagggcagccaggaagtggaggaggggatcaccttgtccttctcatgggagctgaggtcgaggaggacatgcaggtactggaactggcgggacgggcgcttgaagatcaggtctcgaagtgtggacatgcccagataggtgcgactctgcagcaaaaggaaagggacccgagctcagcccacc

SEQ ID NO: 274318 - DNA, 153 bp, Homo sapiens
  chr19:46338327-46338480
  hypo
acactcacctggtcccagtccggcagctgtcatctgtgtggccatgagccgagccaggtgcttgatctgggcttccgtgcctgctgactccacgggggtgtagatggcctggaaggaggctggcatggcctcgggtaggtacaccatgctgat

SEQ ID NO: 274319 - DNA, 105 bp, Homo sapiens
  chr19:46345643-46345748
  hypo
gaactccaaggaagccgggtgcttcagcacactcaacaggtgcagcttcagattcttacgcacactgctcacctgcgatttggccagcgtcgggggcaggttggc

SEQ ID NO: 274320 - DNA, 149 bp, Homo sapiens
  chr19:46356447-46356596
  hypo
gctgatgaaggagccgaacgggttctcacacaggaatgctaaccctgccagtctctgaactccaactgcctcctgctctgaaccatgcccagcccaagtgtcccatgtcgtcttctgcctttgcacacacttctgtgccctcagcttga

SEQ ID NO: 274321 - DNA, 181 bp, Homo sapiens
  chr19:46404484-46404665
  hypo
aaaggcttgcaacagcgcaggcacacagcctactctgaagacactcacctgcacgtcggtcctcccggcggtcttccgacaacacgtagcgctgagggcaggcgcttgggggcggcggctgtgaagagggggccgcagggggctcctccgccccagcacctgcccccggcgccgccacacc

SEQ ID NO: 274322 - DNA, 157 bp, Homo sapiens
  chr19:46811929-46812086
  hypo
gaggaaggtggaggcccccacggagcggtgcttctccttgcgcatgaagagtacactcaccagccgcgggcgcaccctcaacctcaaggcggccacctggaaggtgcgtggggccgggccagaggagggcggggacgctggggctgggtgtgagccc

SEQ ID NO: 274323 - DNA, 32 bp, Homo sapiens
  chr19:46835962-46835994
  hypo
agacataatgcctcacgcctgtaatcccagca

SEQ ID NO: 274324 - DNA, 38 bp, Homo sapiens
  chr19:46851845-46851883
  hypo
caggcatgagccaccacgcccagccctacaagaagaca

SEQ ID NO: 274325 - DNA, 147 bp, Homo sapiens
  chr19:46875776-46875923
  hypo
aaatcaccttactaaaatccaaaaaattcccaatccccaaatacacgcagcccccagggcttcttcggggattgtgaacctgtgttaccatttcaccagctccagacatcattacccatgagtactcgctgacgaagataatgcttt

SEQ ID NO: 274326 - DNA, 397 bp, Homo sapiens
  chr19:46885287-46885684
  hypo
actggggtgctctccgctctccagtctcgcccccacttctgtacctcaggaggtttctctgcacctcactccctcgcgcccaaccttccatgaagcccgtgtgagggagttggcagggggcagaggcgggctgtgctggggctccctggagtcctcatctgtcacgccagtccccacacggtcatgaacttccactcatttcccctcacgcagggcatcccgccctgctgcctcgcaccagggtgaaagctgtgggctccttccccaaggaagggctcgtcctgtctgcattttgattaatttaggtccctttgcattgccagctctcagatggctttacctttgattttgttgcttgtttggcttgttttcatctttagggcgagacagtcttttg

SEQ ID NO: 274327 - DNA, 475 bp, Homo sapiens
  chr19:47113154-47113629
  hypo
ttcctgaagcgctctcgagctgttctgtaaatacctggtgctaacatcccatgccgctccctcctcacgatgcacccaccgccctgagggcccgtcctaggaatggatgtggggatggtcgctttgtaatgtgctggttctctttttttttctttcccctctatggcccttaagactttcattttgttcagaaccatgctgggctagctaaagggtggggagagggaagatgggccccaccacgctctcaagagaacgcacctgcaataaaacagtcttgtcggccagctgcccaggggacggcagctacagcagcctctgcgtcctggtccgccagcacctcccgcttctccgtggtgacttggcgccgcttcctcacatctgtgctccgtgccctcttccctgcctcttccctcgcccacctgcctgcccccatactcccccagcggagagcatgatccgtgcccttgcttct

SEQ ID NO: 274328 - DNA, 284 bp, Homo sapiens
  chr19:47116867-47117151
  hypo
cgtgagccaccgcgcccggccgtgccaaactttatagacatcatttcacttagttcatacccaggctggatggactgattaaaacgcagcacccgctcaaggtgtgcggaccctgcccaggcttgccggcaggagtcactagagaaatctggcagtagaggagtggaggccgggcaggtgaagcctcttgcaccacacttactggaagcagctgagcggggtctcaaagcccagcgcactcggatcccaacgcccacgccttctcccaccgcatcccggtaccc

SEQ ID NO: 274329 - DNA, 241 bp, Homo sapiens
  chr19:47127006-47127247
  hypo
cccaggcccagcaggggcagcgcgcagaagaggacgcagaaggcgtagatggctggcagcgccaggcgggcgcagcggggcccgtccagctgcgcgtagaggtaggggtggctcagcgccaggcagcgctccacggccatggcaaagaggatgagcatggacgccaggccgaagaaggtcatggcgaaggcgaaggcatcgcacagggcggggccgcctcgggccaggcccagcagggagc

SEQ ID NO: 274330 - DNA, 254 bp, Homo sapiens
  chr19:47200356-47200610
  hypo
gggaaagtttgtgggcacagcgggaagtccgagggagctgaaagcccggaggcttaccttatagtatctgttggtcgtgttgttctggaagagcgtgatacacttgcagtccaggcgccaatagtgccgctttctctgcagagatgtttgaagagtcacgtgaaccgccagactttcctgcccagtccctatcccgtggagctgcttggggctccaggtgcctggagcaccacgtgcacgccgtaactctagca

SEQ ID NO: 274331 - DNA, 474 bp, Homo sapiens
  chr19:47223627-47224101
  hypo
cgccgcctctagggcgcctctaaggcctcaacccctcccctgcatgcccagggctcccccagtgattctcacaggacgcccctgactggactgcggggctcagcacacctggcagtactaggcatgggcgtgcagagactcagaatgcggggtttctgccctcacctcagccccacctgcccggccctacaccccagccagcgtggcggccagggcagggccaggtgggcatcatacgaagaccttggccagggcatcagcgccagcactggcaatgagggccttgctggggtggcaggcaacagcgtggatggcctcctcgtgcttcttgcggtgggccgtgatctcctgcacgcacgttttgttgtccaggctccagagacgcagggagcagtcatggcctgcacatgtgtcggggacagaaggggtggtcactgggctcctcgctcagacgcagccctggaacccctcacc

SEQ ID NO: 274332 - DNA, 66 bp, Homo sapiens
  chr19:47259537-47259603
  hypo
gagctgggaaggcgggcggctggagtggttcggctgcaacaaggagaccacgcgctgcttcggaac

SEQ ID NO: 274333 - DNA, 42 bp, Homo sapiens
  chr19:47261178-47261220
  hypo
aaaagaaccgacttctgaatcgcagctccactcatgactaat

SEQ ID NO: 274334 - DNA, 44 bp, Homo sapiens
  chr19:47273989-47274033
  hypo
ttacaggcatgagccactgcacccagccccggcttttattttaa

SEQ ID NO: 274335 - DNA, 42 bp, Homo sapiens
  chr19:47284561-47284603
  hypo
gaggactcccaagtccgggcgcggtggctcacgcctgtaatc

SEQ ID NO: 274336 - DNA, 50 bp, Homo sapiens
  chr19:47305320-47305370
  hypo
gatgatcttgggtaacggattccatctctgaacctcgggtcatctctgaa

SEQ ID NO: 274337 - DNA, 99 bp, Homo sapiens
  chr19:47334737-47334836
  hypo
tgcacccacataacgggattccacacagactatacacagaatcacctccaagatgcactgatagcaagctgcagaaccacatacggtgtgatcctaaga

SEQ ID NO: 274338 - DNA, 180 bp, Homo sapiens
  chr19:47335874-47336054
  hypo
gggagacagagcaagactctctctctcaaaaaaaaaaattcttgtgcattttcgttgtttttctgtttacaactacaaggtaaatgtcattcattcaggtgttttgtaacatctttgttgacatatatttacataccattcaattcacttatttaaaatgtatacttcggccaagcgcgg

SEQ ID NO: 274339 - DNA, 193 bp, Homo sapiens
  chr19:47368883-47369076
  hypo
ctgcatgtgaggaggtgaggcgtcaggtcaatatagttggagattgaaaaggtcggagtggttgttcgtctccatctagtctggtctgcttcccaactttggtccactgtggtctcctgagaggtgttaggccgcttgcagcgtcttcctgtgatctgctgtgacttttgtcggtcaccacctggcagtctaa

SEQ ID NO: 274340 - DNA, 49 bp, Homo sapiens
  chr19:47406253-47406302
  hypo
gtacccttgaggagcggtaatagccagaagggatcgtggtgttagagat

SEQ ID NO: 274341 - DNA, 169 bp, Homo sapiens
  chr19:47429562-47429731
  hypo
tagtgggagccttccgcactcagctgaatgaaattgaaaatctacgattgcacttcagtagggtccatgaatagtggctttgtctgtaaagagttgttgttgcacatggtctctgtctcccagtgccatgcgtttgcaaagacgagatcaggatcggcagggtcttatt

SEQ ID NO: 274342 - DNA, 186 bp, Homo sapiens
  chr19:47482458-47482644
  hypo
gcaccagctctcctcggagtcacactgccatcactccagtgccactgggcctgcgtgggcatgccagcaaagtcacacttcagagcatgaagacgtctcacgttcttggcaggacggctctcccagctgctcctggctttgaatgttcactcccgttttgcagagcgcagtcggctcacctcgatt

SEQ ID NO: 274343 - DNA, 38 bp, Homo sapiens
  chr19:47498024-47498062
  hypo
gtacccaggcaggagcgggtccccgtaaatatctgctc

SEQ ID NO: 274344 - DNA, 38 bp, Homo sapiens
  chr19:47500121-47500159
  hypo
agtgtgcccatggccgggtgcggtggctcacgcctgta

SEQ ID NO: 274345 - DNA, 105 bp, Homo sapiens
  chr19:47501403-47501508
  hypo
gtccgcacccctcccggattcatcagcagaatggcacacatatgtctccggccgagacggtctggcaccatcatctatcccaaaggagcccgagcccccgggccc

SEQ ID NO: 274346 - DNA, 391 bp, Homo sapiens
  chr19:47501971-47502362
  hypo
aggcaaagtgtgggcgttgggggaaaagggggtgcgtagttcctttggtgaagtgcataagaattcccccactgtttccatcagcccctccaacggggatgtgtggacggtccctgtgtctctaggaaaaggacagagccttggtctcatgaccgactgactccctccctcgaaggcctgttggcgtgggtgggtggcagcggccgcccgtctccatctggtcaggaagcaagcaggctttctgcgtagggatgcctgtctccaggggcaaccggatgagcaaagaatggtgttctttatggcggagtgtctccagattgttctgtcttgggtggtgggggccaggaagccccaggcacacagtgccgcccttcagcgggggcctgggaca

SEQ ID NO: 274347 - DNA, 170 bp, Homo sapiens
  chr19:47540628-47540798
  hypo
gcattagatcctaagcgcaggcccacaatgcaagaagtgttatctccattttacatcagaaaactgaggcacggcgcggagaggttaagttaattgcccccaggtcacacagctataagtgattgagttggattctagcccaggtctgtctgttccggggtcagcacgcc

SEQ ID NO: 274348 - DNA, 41 bp, Homo sapiens
  chr19:47579554-47579595
  hypo
tcaacacatgcacgcgtgcgcgcgcgcgcacacacacacac

SEQ ID NO: 274349 - DNA, 77 bp, Homo sapiens
  chr19:47592709-47592786
  hypo
aggcatgggccactgcgccggcagagatgtgttctaagaggccagtcagggctaccgtgtctctggtgctcaagcct

SEQ ID NO: 274350 - DNA, 347 bp, Homo sapiens
  chr19:47593033-47593380
  hypo
ccaccccaaccacagcccagcgggtgatctctccggtctcctgtgccatgcacatgcagagcctggcccttctttgtacacttatcccaaccctaagtgaccaaacttgaggttctgtgagaccaggccaccggggttggcccgggtggctccgatgccccagaggagaaactgtaagggcagggctcacctcggccgcggctgctgccctccttggcacgccggtactggttcagctctttggtgaagtcgtcatagtcctccttgcccatgtcctcctcctcgtcgccctcatattccccatactgctcattctcgtagtcctcgtacatgccataactcttgct

SEQ ID NO: 274351 - DNA, 84 bp, Homo sapiens
  chr19:47633342-47633426
  hypo
agattacaggtgcgagtcaccgtgcctggcctattcctgttttcttaacgctcctctctcccactgggccgtgactgcctctaa

SEQ ID NO: 274352 - DNA, 202 bp, Homo sapiens; identical to SEQ ID NO: 219590
  chr19:47646678-47646880
  hypo

SEQ ID NO: 274353 - DNA, 42 bp, Homo sapiens
  chr19:47779445-47779487
  hypo
ctcagagccaatgaccaaagcgctgtgctgccttggaagact

SEQ ID NO: 274354 - DNA, 52 bp, Homo sapiens
  chr19:47817584-47817636
  hypo
ccaatatgtgggccacgtgccacaatgcagctacctacgtttatttttcact

SEQ ID NO: 274355 - DNA, 137 bp, Homo sapiens; identical to SEQ ID NO: 219593
  chr19:47868801-47868938
  hypo

SEQ ID NO: 274356 - DNA, 225 bp, Homo sapiens
  chr19:47881070-47881295
  hypo
ggagggtgctgccccggtggaggctgaggccgaactcagatcatggatgcccttgcatgggcaccggcagcagagccatgggccccatggcagccactgccctgcccctagtgctcctcgagcgtctttgtgatcctaggcctggcctcggagtcctcacgcagccctgtgggtctccctttatagaggggactgaagctcaggcaggggcggggatacgtcacc

SEQ ID NO: 274357 - DNA, 74 bp, Homo sapiens
  chr19:47881715-47881789
  hypo
ggacagaggattggcgaccagccgggccgcaggaagcggaacagacctgctacctgaggcgctctctccctgca

SEQ ID NO: 274358 - DNA, 224 bp, Homo sapiens; identical to SEQ ID NO: 219595
  chr19:47976135-47976359
  hypo

SEQ ID NO: 274359 - DNA, 193 bp, Homo sapiens
  chr19:47989043-47989236
  hypo
ggagggcagtctgggaatgccgtcagtgctgctgtattcccagggcctggcatgcagcaggtgcttagtgaatattcgctgagggagtggcacgtgggtctagtgccacttcagcagtgcgtttccttcaggcgtcttcccgccctagtaacctataagccacatgttgagcggatgaatgaaaaaatgaagt

SEQ ID NO: 274360 - DNA, 102 bp, Homo sapiens; identical to SEQ ID NO: 219596
  chr19:47995719-47995821
  hypo

SEQ ID NO: 274361 - DNA, 731 bp, Homo sapiens
  chr19:48003383-48004114
  hypo
gttctctggcaactacatctcgggctctgttctctctaattcctccccaggatgtagggaagccaggttgggctaatttccgctcctttttcggcagcaactcctacctggctggtctcagaatcctccccgccccccacaccgctcccttctgcatgttaattctgacaacagaacagattttcctctctccccggcaggcggtgggtctgcaatggaactcccactcccaaatgctccgggattgggaaggggtgatcagctgcaccgacaccaccgacacggtagataggggggcggagacttgagcagggcgcgaatgccaactggaaggaagagagccagttctaaagtcaacgctcactctgcctcaggcacgcccctgccagcctatcacatgtcggccactggaaaaaccagagccgccaggaaacctgaggaatcaatgcagggtgctaggatggcgctccggacagccagcccgtgtggcccgcagaggccctcaccttgggggtcggctttcttgaatgcgttgccagcgtccacaaagcaggtggctgcgtcgtgcttgctctggagctgcaggtgcagctgtgcagcctggcagaacgcgtttccagcagctggaacagaagagaagggcagtcctggcctcagtggggctccacactttatgaagccacagagacactgccctgggaggtgggtcgggctctcgagaatgcggaaag

SEQ ID NO: 274362 - DNA, 238 bp, Homo sapiens; identical to SEQ ID NO: 219598
  chr19:48012650-48012888
  hypo

SEQ ID NO: 274363 - DNA, 44 bp, Homo sapiens
  chr19:48052287-48052331
  hypo
atcatgccactacactccagcccggatgacagacaaaaaaaaaa

SEQ ID NO: 274364 - DNA, 88 bp, Homo sapiens
  chr19:48077258-48077346
  hypo
gccatctggggcccctgctccgtgctgagctgtgttgggaagggcggtaggccctggtgccgactggccaaggaccatcttttttttc

SEQ ID NO: 274365 - DNA, 94 bp, Homo sapiens
  chr19:48082925-48083019
  hypo
gaggattttaggcatgagccaccgagcctggccaatgtttttgtagttttgacaaatgtatagttgtgtcacttaacaacggagatctgtctga

SEQ ID NO: 274366 - DNA, 338 bp, Homo sapiens
  chr19:48137147-48137485
  hypo
ttgctgggtgtctcagaacccgccgaggggcgttctgtgcgttcaccctgtccccctccaaagcctgaaaaacccctcatttcagaacacgtctcactccagaggtttccactaaaagatcgtggagccatgtgaatgtaaattccgtttccccctcttcatacatcccaggctgcatactgcacacaccgtttggcatctcccagccttgtgttttattgtatttaccactcagctctccagtccttgccagacgagtgagaatgagcagtggcgtcaggccttgacgggctctgcagggtgggcgggaggagtgggcagtgcggcttctggaaccc

SEQ ID NO: 274367 - DNA, 39 bp, Homo sapiens; identical to SEQ ID NO: 219600
  chr19:48145667-48145706
  hypo

SEQ ID NO: 274368 - DNA, 504 bp, Homo sapiens
  chr19:48150907-48151411
  hypo
agaatcctccttcccgggtgaggattggaagccatgatcgcctgcctctgttgctggttttagtctttaacccttgctctgtggacttgagaaatgtgcttttccatggtgcctgtgaccaagatgtccgcatcgttagtgaagaccctgctatgtccttgaccacactgcacggggatcctgtccacgatggggggtgtcctgttgggcttgagtgtctagatatggagaccgtagttcgcggggggagtggggggccgtttggcatatttgccctggcatttggggttgtttattgggggtgggagtgctcctggcatttcctgggcgggaactactggtgtagacctactggattaacttgctcctgggtcggtgtgcgggatagggggagggtgcatcagtctttgtggagcgtctgccttctctccgtctccctgttttcctgttaccgtctccccgtccctctctctgtctctctgaactgctcgttccctccttgcc

SEQ ID NO: 274369 - DNA, 210 bp, Homo sapiens
  chr19:48161876-48162086
  hypo
agacttcgtctcaaaaaaaaaaaaaaaaaaaaaagcagcagcagcttctagaacagtggttcgcagagtgtggtctgtgccagcagcatcagcatcacctgggaactcattagaaatgcagagtctcaggccgcaccgggacctgccgattcccagattctcaaatctgtattaggaaccagtggtctacaaacccgtgcgcacgtcttg

SEQ ID NO: 274370 - DNA, 43 bp, Homo sapiens
  chr19:48166308-48166351
  hypo
aggattaacaagtttggaggcgggcagcccatgaagagttatg

SEQ ID NO: 274371 - DNA, 399 bp, Homo sapiens
  chr19:48202212-48202611
  hypo
tcctcgcagtggacgaggagtttgagacggtctccacgcagctgctgaaacgcacccaggccatgctcaataaatatcggctcctgctcctggaggagtcccgggtagggtcagagtcgccttcctcgcctctgggctcctcctcgctgggacactgcccctttccctcacccgctctgggcaaggtggagcctcccgcccctcctagccccgggagggaggttgggagggaggcgggagctcccatcacaaggacagtttggaccttgcacgcatcgtccccgtcgctcgcgccccttcccccttcttgctggttcactcgcacgtcgtcttttcccccaccccagagggtgagcccctcagcggagatggtaatgatcgaccgaatgttcattcagg

SEQ ID NO: 274372 - DNA, 87 bp, Homo sapiens
  chr19:48244447-48244534
  hypo
acggcaagctgagcggctccaaggccaagacctggatggtggggaccaagctccccaactcagtgctggggcgcatctggaagctca

SEQ ID NO: 274373 - DNA, 45 bp, Homo sapiens
  chr19:48251493-48251538
  hypo
aataggaataagaggacttgctttagtgagcgggtaacacacgtc

SEQ ID NO: 274374 - DNA, 39 bp, Homo sapiens
  chr19:48259084-48259123
  hypo
cactgtgtcctgccgtggagccccgtgcccagtgatgac

SEQ ID NO: 274375 - DNA, 42 bp, Homo sapiens
  chr19:48305538-48305580
  hypo
gattgggcctgggatcgggcctgggttcgggcctgagattgg

SEQ ID NO: 274376 - DNA, 141 bp, Homo sapiens
  chr19:48375656-48375797
  hypo
tcccctaaaactaccctctccgtcactctactcacacggggacttctgattctgcctcaaacgtggcaggcatccccactcctcagactattggcgtcccacgctccttctccttggaacgctgctctctcagattggccc

SEQ ID NO: 274377 - DNA, 38 bp, Homo sapiens; identical to SEQ ID NO: 219603
  chr19:48393224-48393262
  hypo

SEQ ID NO: 274378 - DNA, 44 bp, Homo sapiens
  chr19:48479211-48479255
  hypo
aaggtaatgcatttttaatacacgttattttttagagcagtttt

SEQ ID NO: 274379 - DNA, 193 bp, Homo sapiens
  chr19:48640705-48640898
  hypo
ccttcctgacacacgcgtggcctcaggtccccaagatgtctggggtccgggatgagcggcccgccccactcacagcactgccagtgagcctggcgatgtcgcggaacttgctgaagaccccggaggcagtgagcggaggtggtggcagcatgagcctctgggtgctgcggctgttctcggccaccagccccac

SEQ ID NO: 274380 - DNA, 39 bp, Homo sapiens
  chr19:48668228-48668267
  hypo
agacactggccgggcgccgtggctcacgcctgaaatccc

SEQ ID NO: 274381 - DNA, 181 bp, Homo sapiens; identical to SEQ ID NO: 219604
  chr19:48675139-48675320
  hypo

SEQ ID NO: 274382 - DNA, 330 bp, Homo sapiens; identical to SEQ ID NO: 219605
  chr19:48685675-48686005
  hypo

SEQ ID NO: 274383 - DNA, 42 bp, Homo sapiens
  chr19:48704700-48704742
  hypo
tggccccagctagtcacacccgtgatgcccatctcttttttt

SEQ ID NO: 274384 - DNA, 228 bp, Homo sapiens
  chr19:48798924-48799152
  hypo
actgcgcttcccggcgaccctttgaagttcggcgtaacctgctgacccgctctggctgagtgtgagctaagaggacaggtgtcatatcaggtccaagcctcgagagtcactgcctgctgtgccatcctctcttcttcccgtgccaaaggactggcagcactccagtgatggctgtgccatgggcccggggtacacgagtgatatggagcggagcgctcagctggccca

SEQ ID NO: 274385 - DNA, 129 bp, Homo sapiens
  chr19:48800641-48800770
  hypo
gtgggcaccaggacggtactggagccggccctctgggtgctggccaggtccacgctcagggtgccgtccagcttcgcggcggcggcggccaggtccttctggcgctgcgcctccgcctgctcctggagc

SEQ ID NO: 274386 - DNA, 156 bp, Homo sapiens
  chr19:48844372-48844528
  hypo
agcaggtgaatgatcgcgtacgacagatgcttcacaccagtctacactcctggggccggtgccaaccctgggaagaatcagtaaaaggcagctcccctctgggctgactcagcctcgagacaggacacgcattttggcaagcggagcacaagttgg

SEQ ID NO: 274387 - DNA, 53 bp, Homo sapiens
  chr19:48846609-48846662
  hypo
acgcctggagcccacgctggacttcaggggcatctgcccgactcgctggccca

SEQ ID NO: 274388 - DNA, 375 bp, Homo sapiens
  chr19:48857796-48858171
  hypo
caagcgtgagtcactgtgcccggccaaatttcacttctgtaccttgttgctggtctcttcctcagtagaacagagcctgtgaggtacatctctcatgctgtccactgtctcccagagcctcaagccattccagagacacagtaggtgctcaataaatatttactgagcgaactcaatgaatgaatgaatcagcgaaaaaagatcagagagaggtcacccgccaaggtcacccgcaccactagtgaacaaccaagctattgtttgaaccgaggctatgctgcttctttccctgcccaggccacatcttcaaaggacttaagtcatcagcaaatggtcacccagcgggcctcacccgcctctgccacttctaccctg

SEQ ID NO: 274389 - DNA, 144 bp, Homo sapiens; identical to SEQ ID NO: 219609
  chr19:48889258-48889402
  hypo

SEQ ID NO: 274390 - DNA, 82 bp, Homo sapiens
  chr19:48902796-48902878
  hypo
cctgggcgacacagtgagactctgtccaaaagaaaaagaaaaggaatggagttcagaaagaaaggggcgaagtctagtggag

SEQ ID NO: 274391 - DNA, 287 bp, Homo sapiens; identical to SEQ ID NO: 219611
  chr19:48908063-48908350
  hypo

SEQ ID NO: 274392 - DNA, 180 bp, Homo sapiens
  chr19:48925877-48926057
  hypo
aaagaattaaactagttagtccactcagaacatttatttatttatttagaacagtgcccggtgcactataggtgtttgctgatattatcattatcattagacctgaactcactggaatcaatgcttagattgtgtttcttatctttttacatccctttcccaaatcatagggatgaagtt

SEQ ID NO: 274393 - DNA, 93 bp, Homo sapiens
  chr19:48926477-48926570
  hypo
caatacaaaaaaagttgagttcaggccccaaagtgcagcccacgaatacaacaaggctgagcacagtaactctctccccgtcctgcatttact

SEQ ID NO: 274394 - DNA, 34 bp, Homo sapiens; identical to SEQ ID NO: 219612
  chr19:48953831-48953865
  hypo

SEQ ID NO: 274395 - DNA, 124 bp, Homo sapiens
  chr19:48964897-48965021
  hypo
ctgacgtttctgccggtttcttgtcccagcaggttgggggcgcctgccccccactaggccaagtggagggggtccctccgtccaatgggcctggccagggccctacgccgcctcagcggcgccc

SEQ ID NO: 274396 - DNA, 153 bp, Homo sapiens
  chr19:48979074-48979227
  hypo
tactggcctggagccgtgcctggtaacagtaggtgccacctgcgtgttagatgtggtttataatggagacacggtgcacagctgctccagagagacacatctgggcagttacagtccagcacagcagtggaggcttcccgcggcagcaggaga

SEQ ID NO: 274397 - DNA, 44 bp, Homo sapiens
  chr19:48989605-48989649
  hypo
gcgcccggccttttggaacattcttcctacgtgactcaggcccc

SEQ ID NO: 274398 - DNA, 122 bp, Homo sapiens
  chr19:49012370-49012492
  hypo
gacatggggtgagacactcacgggcccagaatccgatggacgcagggacggatggaaggatggacagacggacggacgcgtggagagccgggtggcgcggcggagtggtcaatggagtgagg

SEQ ID NO: 274399 - DNA, 145 bp, Homo sapiens
  chr19:49043366-49043511
  hypo
cactccagcctggatgaaagagcgagactccatcccaaacaattaacaaaaataactgactgtgtatcttggagtgacagagctgtccctgcttgtgtaatgtgcctatccatgcattggcgaggcgtgtcgatcctgcagctgg

SEQ ID NO: 274400 - DNA, 40 bp, Homo sapiens
  chr19:49068459-49068499
  hypo
ggcatgagtcacggtgcccggcctaatccttacttttgat

SEQ ID NO: 274401 - DNA, 174 bp, Homo sapiens
  chr19:49076590-49076764
  hypo
ccactcaaatcgagcgatatcagcacgccaggccctggacgtgttttgtgggaacaaacaggcctgtttgtctacgtcccaggcgtagagaagttcgtcccggggccagatttgttttacaaggtggacagcaggcacagggtacctgttttaggaatgcgagaatgcagccac

SEQ ID NO: 274402 - DNA, 269 bp, Homo sapiens
  chr19:49102442-49102711
  hypo
tcgatcgtgcctaccgcaagcagatgcgggggatgccgaccttcccctgggatgaagacccggaggaggacggcagcccagatcctgagcccagccctgagcctgagcccaagcccagccttgagcccaacaccagcctggagcgtgagcccagacccaactccagccccagccccagccccggccaggcctctgagaccccgcacccacgaccctcataataaacacgtcgattctgtccaggttccttgatgcgctgtggcagggca

SEQ ID NO: 274403 - DNA, 96 bp, Homo sapiens
  chr19:49117307-49117403
  hypo
cctgctcatcagctctcacccgcagaccagccaggatgcctctccactgggcctgctcgctcagccttaaaggccgaaggcttggcaaacccttcc

SEQ ID NO: 274404 - DNA, 78 bp, Homo sapiens
  chr19:49130357-49130435
  hypo
tccatcctgggcgacaagaccgatactccatcacaaaaagcaaaacaaaacaaaaacgcaggcagagaaaagtgattt

SEQ ID NO: 274405 - DNA, 389 bp, Homo sapiens
  chr19:49132563-49132952
  hypo
cacttcccacccctgatgcccgggtaggggcctccacctgcggcccgcccgaccacctgctgcctccgctgggcaccccgctgcccccagactgggtgacgctggagggggactttgtgctcatgttggccatctcgcccagccacctaggcgctgacctggtggcagctccgcatgcgcgcttcgacgacggcctggtgcacctgtgctgggtgcgtagcggcatctcgcgggctgcgctgctgcgccttttcttggccatggagcgtggtagccacttcagcctgggctgtccgcagctgggctacgccgcggcccgtgccttccgcctagagccgctcacaccacgcggcgtgctcacagtggacggggagcaggtggagtatggg

SEQ ID NO: 274406 - DNA, 105 bp, Homo sapiens
  chr19:49143016-49143121
  hypo
cctccctctgaatctcgcctccgctcacgttgacaaagaggctgagaatggccaggccattggggccgcgggaggcagcgctgaaattcccgtagagttcctggt

SEQ ID NO: 274407 - DNA, 112 bp, Homo sapiens; identical to SEQ ID NO: 219615
  chr19:49173707-49173819
  hypo

SEQ ID NO: 274408 - DNA, 316 bp, Homo sapiens
  chr19:49179993-49180309
  hypo
aacacgacggcgagcgaggctgggaaatggggccttcccgtactgctggtggaaacggaaactggggcagccacctggcagctcccaaaacgattcaacgtagagttcaccctgtgacccagcacacaggttcgtggcagcactatttgcaacagccgaaaactggaaacaactccagtgcctatcacctgatgagtgaatacattgtggtctacctggacaatgggactttcagtcttgaaaggagtgaggcaattatctgggcgtggtggctgtacctgtagtcctacctgtagtcccagctactcgggaggct

SEQ ID NO: 274409 - DNA, 136 bp, Homo sapiens
  chr19:49180429-49180565
  hypo
aggcgtgaggctgtgacacgtgctatagtgtggatggaccttgaaacacggtgccgagtgaggaagccagactcggaaggccatggagtgtgtgattgcagtcacatgaaaaatcgagaataggcaaatccataaa

SEQ ID NO: 274410 - DNA, 558 bp, Homo sapiens
  chr19:49183432-49183990
  hypo
cagacacctgccccgggaggacctgttcactatcaactccaagggccgcctggggaaccagatgggcgagtacgccacgctgtacgccctggccaagatgaacgggcggcccgccttcatcccggcccagatgcacagcaccctggcccccatcttcagaatcaccctgccggtgctgcacagcgccacggccagcaggatcccctggcagaactaccacctgaacgactggatggaggaggagtaccgccacatcccggggcgctgtgtccgcctcacgggctacccctgctcctggaccttctaccaccacctccgccaggagatcctccaggagttcaccctgcacgaccacgtgcgcgaggaggcccagaagttcctgcggggcctgcaggccaagtgggcagggcaggcgaccttcgtgggggtccacgtgcgccggggggactatgtccgtgtcatgccgcgcgtatggaagggggtgctggccgaccggctacctgcagcgggccctggactggttccgggcctgctgccgcctcccggtctttgtggtca

SEQ ID NO: 274411 - DNA, 45 bp, Homo sapiens; identical to SEQ ID NO: 219618
  chr19:49207344-49207389
  hypo

SEQ ID NO: 274412 - DNA, 273 bp, Homo sapiens
  chr19:49218942-49219215
  hypo
aagaggaaaggggccgtgcccgagggcaaggccggggccagaggagggtctgaggctgagatccacgggtccggatccgagactggagagacggtgaaggaccctgagaggcctgcaggcagcaagccaggccgggaggagcaaggctgtgtggaaagcggggctccagggtgccggagggcaggccagggagcaagacttgattgctgggagatgggcgcctgaactggatctgagggcggaggtgtgggggggctccggttgctacattct

SEQ ID NO: 274413 - DNA, 138 bp, Homo sapiens; identical to SEQ ID NO: 219619
  chr19:49221485-49221623
  hypo

SEQ ID NO: 274414 - DNA, 127 bp, Homo sapiens
  chr19:49227955-49228082
  hypo
ctcccagccaaccttcacctcgttccatcagcgagttgagaagggatgcgttggagaagaagaacaagtagccaaaagtctgagacacgaggtcagggtgcagctcgcactggctggtcagctccaa

SEQ ID NO: 274415 - DNA, 225 bp, Homo sapiens
  chr19:49232014-49232239
  hypo
tctcaaaaacaaaagcaaacaaacaaacaaacaaaacccaaaaccccaaatccttcccgaggcgtcatgggaacagtagtatccagcccagctatgaaaagggttgaaggtagggaagggaggctggagaagggacttggggcgctggtggggctggacggcgattggggggcgctcacccagacggcctccttgatgagccgggccaggcggcccagcagtcgt

SEQ ID NO: 274416 - DNA, 98 bp, Homo sapiens
  chr19:49237047-49237145
  hypo
ctgagaatccatctcaaaaaaaaaaaagtgtgggggggagggggcagtgcactcctacgaagaaaacacaggcttatccagaacgtgatcccaggcaa

SEQ ID NO: 274417 - DNA, 76 bp, Homo sapiens; identical to SEQ ID NO: 219621
  chr19:49246879-49246955
  hypo

SEQ ID NO: 274418 - DNA, 136 bp, Homo sapiens
  chr19:49274076-49274212
  hypo
gggatttcaggcgtgagccaccgcgcccagtcgactcagagtgtcttatttttataatacagcctgaaaaacttgttctaagtcatagtattgtaataggttgggacatgagatgatttcacggctgtttgttcca

SEQ ID NO: 274419 - DNA, 90 bp, Homo sapiens
  chr19:49280159-49280249
  hypo
agcaatgtgaaacactgggacggacccacactaaaatatcagtggtttgaacaattgtttttttttttttttttttgagacggagtctca

SEQ ID NO: 274420 - DNA, 88 bp, Homo sapiens; identical to SEQ ID NO: 219622
  chr19:49281057-49281145
  hypo

SEQ ID NO: 274421 - DNA, 78 bp, Homo sapiens; identical to SEQ ID NO: 219623
  chr19:49287699-49287777
  hypo

SEQ ID NO: 274422 - DNA, 99 bp, Homo sapiens
  chr19:49305614-49305713
  hypo
tgacctacagttcccgaaattgagcctctagatacatttgcacttaaacaagtgactaaagaagggacgtgtgtactggattccttttttttttttttt

SEQ ID NO: 274423 - DNA, 182 bp, Homo sapiens
  chr19:49348663-49348845
  hypo
tcagggctggaagcccgggagaccctcggagacccaagacctggaaagacagaacgggacttggtgaggacgggaatttccgtaaagtcccacccaaccaggatgctcacctaagtgagggctggcgaggtctttgtcgcctccaggaggccgcccccagtcagtctcgggggacctagggg

SEQ ID NO: 274424 - DNA, 38 bp, Homo sapiens
  chr19:49402039-49402077
  hypo
ggggttctgaacacgaatgccgtgtgggggttccttaa

SEQ ID NO: 274425 - DNA, 93 bp, Homo sapiens; identical to SEQ ID NO: 219624
  chr19:49419216-49419309
  hypo

SEQ ID NO: 274426 - DNA, 42 bp, Homo sapiens
  chr19:49463919-49463961
  hypo
atgtttacaatttttgaagccgacttcaattgtgggtggcag

SEQ ID NO: 274427 - DNA, 41 bp, Homo sapiens
  chr19:49464192-49464233
  hypo
cacccccaccaccgcgccctcaccaccgcccctgccccacc

SEQ ID NO: 274428 - DNA, 101 bp, Homo sapiens
  chr19:49482062-49482163
  hypo
attacaggcatgagctgccgcgcccagctacccttaggtttctaggatagcaaggaaactgaggtgtgagcagggaagccgtgccctggggcctccaggct

SEQ ID NO: 274429 - DNA, 152 bp, Homo sapiens
  chr19:49490480-49490632
  hypo
aaagaggacagcgtcgttggcctcgcggtcgtaccacggcactccgatgttgcaggtatcccagagctctcccttccagcgctccagggcccaagctgaggcacccacgtccaggagcaccaccagagggcctccctcgatcagccagcgcc

SEQ ID NO: 274430 - DNA, 48 bp, Homo sapiens
  chr19:49509361-49509409
  hypo
tgtccccagatggcatgggccgtgctcgtccactcagccctcagcaga

SEQ ID NO: 274431 - DNA, 33 bp, Homo sapiens; identical to SEQ ID NO: 219626
  chr19:49525578-49525611
  hypo

SEQ ID NO: 274432 - DNA, 96 bp, Homo sapiens
  chr19:49540857-49540953
  hypo
gaaatgcgtgtgcttcgggtgatttaactgattattgaataggcccgcaggaggtgtgtcctgcccccgaggccgcagcctcggaggacattatct

SEQ ID NO: 274433 - DNA, 201 bp, Homo sapiens
  chr19:49545493-49545694
  hypo
ctgcctaggggtgccgctgccgggccccctctggtcttcctgctggagactggggcctttcgggagtcagcaggcgcccgggccaaccgcagccagcgaggggtgagcaatacttcactggcgagtcatcagggtgaggctggccgtgtgtgatgcagtcactggctgggtgacagacccccggaccgctgtggactcagg

SEQ ID NO: 274434 - DNA, 300 bp, Homo sapiens
  chr19:49600408-49600708
  hypo
tttatttctctagcttctggcaacacccacactgtcttcctgaaaaggtagcacccgagggttcggggaaggagcctggtagttcaagtgcccggggtgagaggtgaagtctgccttggcccttcgccactttaacacctccctttttctgtgtctcgagtttgttctgttttacttccatttgcaaaatagtaataaataaatatcagtgtccagcactgtgtctgggccatagtacgtgttcagtaaattatatgtctaatgttccattattggaacgctaagcatgtgggagttatt

SEQ ID NO: 274435 - DNA, 140 bp, Homo sapiens
  chr19:49600768-49600908
  hypo
aaaattgcaacctctggcataaatgggttaatgttattccttttctcatgctctcccagaatgtgacagggcttccgagggaaacactataccatggaagaaccggcagagtgtccttaaggccccggcaggagtcaggg

SEQ ID NO: 274436 - DNA, 163 bp, Homo sapiens; identical to SEQ ID NO: 219627
  chr19:49606743-49606906
  hypo

SEQ ID NO: 274437 - DNA, 115 bp, Homo sapiens
  chr19:49703628-49703743
  hypo
gcttcacatcttcacggtcaacaaacagctggggcccaagatcgtcatcgtgagcaagatggtgaggcaggggcggggccaaagtgggcggggacatagggaaaggggtggggcc

SEQ ID NO: 274438 - DNA, 87 bp, Homo sapiens
  chr19:49703773-49703860
  hypo
tgactttggggagcaatggggcgtgtttttgggatataggggtggggccagagtaggaaagggcggggccagactcagccacatctc

SEQ ID NO: 274439 - DNA, 141 bp, Homo sapiens
  chr19:49703914-49704055
  hypo
agcctatggcgtggccacggaggggctcctgaggccacgggacagtgacttcccaagtatcctgcgccgcgtcttctaccgtccctacctgcagatcttcgggcagattccccaggaggacatggacggtaggggggatga

SEQ ID NO: 274440 - DNA, 205 bp, Homo sapiens
  chr19:49705148-49705353
  hypo
cgcccggcagtcttcctgtctttcttaggtctctgtccccctcaccccatctctgaatgtctctcttcacagtggccctcatggagcacagcaactgctcgtcggagcccggcttctgggcacaccctcctggggcccaggcgggcacctgcgtctcccagtatgccaactggctggtggtgctgctcctcgtcatcttcctgct

SEQ ID NO: 274441 - DNA, 45 bp, Homo sapiens
  chr19:49890882-49890927
  hypo
cataaaaaggacaggccaggcgctgtgtctcacgcctgtaatccc

SEQ ID NO: 274442 - DNA, 504 bp, Homo sapiens
  chr19:49971403-49971907
  hypo
gagagtccgtctcaaaaaaaaaaaaaaagaaaggcggttatgcaggatgtttctcaccgcccgaacccccgtggaatgattcactttgaccagcgtctgcgaaatggcaggggcttccacaatggtgcggtttgggccaacaccaagtgttggggagaatgtagaggaactggatctctcatttactgcgggcggggctcccctgccccacacgtgacccacctgtccctgcaggtagccgggctgagaggccctgtgctgcgcctgcgggagccgctgggtgtgctggctgtggtgtgtccggacgagtggcccctgcttgccttcgtgtccctgctggctcccgccctggcctacggcaacactgtggtcatggtgcccagtgcggcctgtcctctgctggccctggaggtctgccaggtatagccccctgccttcctgcctctcctccccgtagcctcagggcagcagaaaaaggcgccccaaagtcggcaggagcttgtc

SEQ ID NO: 274443 - DNA, 131 bp, Homo sapiens; identical to SEQ ID NO: 219631
  chr19:49978920-49979051
  hypo

SEQ ID NO: 274444 - DNA, 490 bp, Homo sapiens
  chr19:49993764-49994254
  hypo
acaccaacccttcccgaggcccctaccacttccgggcccccagccgcatcttctggcggaccgtgcgaggtgagcagagcgtggggactgcaggtggtgacgggcaggcggccggtgatgagaacttctcccactcacattcgagtttcccgaccatgagatgactccacatgcactaccatctgaggccaccccatgggcccacctcagtggggtgggtgggcatccttatgaggccctctgactgggcctgctatctgtcacccaacaggtatgctgccccacaaaaccaagcgaggccaggccgctctggaccgtctcaaggtgtttgacggcatcccaccgccctacgacaaggtgagctatgccaaaccccacaggcagcggccttacctgtggcgtccatgatgttccgcaactacctacattgtttgatcctcatgaaagcagcactggctgagacgccagtccagccgacctccttccctgt

SEQ ID NO: 274445 - DNA, 180 bp, Homo sapiens
  chr19:49997366-49997546
  hypo
gcgtgagccatcgcgcccggccaattttttttttttttttattaagatgttctatagctgcactaactgatacacaatacacaagccactaaccccacttgtggctcctgagcacttaaatatgaatagagtgaggctgggtgcagtctcacctgttcccggaactttgggaggccgagg

SEQ ID NO: 274446 - DNA, 34 bp, Homo sapiens
  chr19:50001236-50001270
  hypo
tccgcaagtacaaccgcttcgagaagcgccacaa

SEQ ID NO: 274447 - DNA, 177 bp, Homo sapiens
  chr19:50027847-50028024
  hypo
cggagctgcaacttcggttcctgcggaatgggctggccgctggcaccggccagggtgacttcggccccaacagtgacggatccttccacgcctcgtcgtcactaacagtcaaaagtggcgatgagcaccactactgctgcattgtgcagcacgcggggctggcgcagcccctcaggg

SEQ ID NO: 274448 - DNA, 491 bp, Homo sapiens
  chr19:50028310-50028801
  hypo
tgctgctgctgctgctgctgcgggtcttcctggaatctgaccattcgttgtctgctatgcccgtcctcaccaagactgactgcctgctgctttgctactgcccgggcccatgagactgacttcccactgctctgcctgcctctccccactgcactggcacagccccgccttgccgctgctgatccattgccggtgtgaccgcggccgctcgtgctgtagctggttcttacgtccaacctgggggcagtctgcccagatcgcctgcctggcctcgcctctgcccatcagacacttggtgctggaatctccgaggctgggagggactgggagcgccccagttctgtgtcctgactgggtggggtggaggggctgctccacatctcacagcgttctctggctgcagaatctccagccaagtcctccgtgctcgtggtgggaatcgtcatcggtgtcttgctactcacggcagcggctgtaggaggagctctgtt

SEQ ID NO: 274449 - DNA, 120 bp, Homo sapiens
  chr19:50049637-50049757
  hypo
tcggtttttttttttaggtttacctgggctttttggagtgtacccatgcagccaggtgtggttcagggtcagctagatatttgagtagagttgggccgtgtgcggtgactcacgcctgta

SEQ ID NO: 274450 - DNA, 44 bp, Homo sapiens
  chr19:50056051-50056095
  hypo
ctttacaagtaactgtaattttctggacgcgctgcctgtgagct

SEQ ID NO: 274451 - DNA, 879 bp, Homo sapiens
  chr19:50059648-50060527
  hypo
cttctccacgcattcgagggtgaccacagccccactacggtgaggccgaaggcgggagactctgatcaggggccttcctggggacctactggccccaaagccggaccgccccgcaggttcccgagtggtcccttccctcccctcccaggtgactcacgagggccgcagcacagcgcagggggtggcgttgctcaggctgtcgcgggtcacggcacacacgtagcgctcgctgcgggtgatgagccccacgcggtccacggagctgtctagcggtgtgaagtgcacgggcgtcaggtccgacatgcgcaggggcttccctgacatggggcaggtcaccgtgcgggactgcaaggggcagagagaggcgggctcagtaggcagggctggcgcaggtggagagcgcgtggtccctgtgcgtgaggaggacggtggggaaccctggcgccctggcaccgtgcgtgccggggcgctgtgggggctcaccggcttctccagcttggtggccttggcttcgggcgtcagcgacgggatccagaagctgggcagcactttgtccttgtccttacttggaggacccacactgggcccaggttggacatcatctgtgggggaaggaagggactcagatgccgccccctgggcccgcccagcccgcggcgccccgccccccaacccacaagaagcccaacctgagtcacctgggctggtgcccgagagggccttggctgtgaaagggttgaggggccggctcacgatagccgactccttctccaggaagccccgcacatggtcctgcgaggccgcccgctgaagctccttctgctcctcgcgccgggtgccccgctgcttctcgtaggcctgcgtcggggaaagtgggct

SEQ ID NO: 274452 - DNA, 172 bp, Homo sapiens; identical to SEQ ID NO: 219633
  chr19:50060912-50061084
  hypo

SEQ ID NO: 274453 - DNA, 163 bp, Homo sapiens; identical to SEQ ID NO: 219634
  chr19:50061336-50061499
  hypo

SEQ ID NO: 274454 - DNA, 190 bp, Homo sapiens; identical to SEQ ID NO: 219635
  chr19:50063175-50063365
  hypo

SEQ ID NO: 274455 - DNA, 233 bp, Homo sapiens
  chr19:50129559-50129792
  hypo
cccgttctcgcccccgccccaccccctgctcccactaccctttgtctcttgctctttcttgggcttctgtacaactcaacttgtatacactgtgtacacacaaccagccaaacgaaaacccaacggcaaacactttaccggcaggctggagtgcctctgtcctgcggcgctggagtgggtggcagtggtagcaggggcagaggttctggaacgggactttcccagagccctgg

SEQ ID NO: 274456 - DNA, 38 bp, Homo sapiens; identical to SEQ ID NO: 219638
  chr19:50130457-50130495
  hypo

SEQ ID NO: 274457 - DNA, 80 bp, Homo sapiens; identical to SEQ ID NO: 219639
  chr19:50130728-50130808
  hypo

SEQ ID NO: 274458 - DNA, 35 bp, Homo sapiens
  chr19:50203510-50203545
  hypo
aaacaaaacaaaaaaaaaaacgctgattgctggac

SEQ ID NO: 274459 - DNA, 199 bp, Homo sapiens; identical to SEQ ID NO: 219640
  chr19:50208442-50208641
  hypo

SEQ ID NO: 274460 - DNA, 43 bp, Homo sapiens
  chr19:50215612-50215655
  hypo
aaaaggagggtgatgttgagaaaggatgcgtcagcagagaagt

SEQ ID NO: 274461 - DNA, 101 bp, Homo sapiens
  chr19:50218146-50218247
  hypo
acacaaccaacacaacgtccaactccaagctccaccatccccaccaaatatcccttctcatttccaccataacccacactttaccttgacccatagtgatg

SEQ ID NO: 274462 - DNA, 120 bp, Homo sapiens
  chr19:50240192-50240312
  hypo
tgctgggataaggtgtgagccaccacacccggctttccctgcattccaggggacttgtttacagtcttttaactttgaattcttttgttgttttaagtgtgtttctttctgtctttcttt

SEQ ID NO: 274463 - DNA, 98 bp, Homo sapiens
  chr19:50249077-50249175
  hypo
cttgctcaggtcactgccttcggggcactccctcctctgctcttggagaccccagccttgtcgccttccggttaagatctaggccgggcgcggtggct

SEQ ID NO: 274464 - DNA, 87 bp, Homo sapiens; identical to SEQ ID NO: 219641
  chr19:50274628-50274715
  hypo

SEQ ID NO: 274465 - DNA, 135 bp, Homo sapiens
  chr19:50289573-50289708
  hypo
tcactttgacactgaatcagcgtaaaaattattcacgagctattttatttgacatctgtgtttggtgctaagtctttggaatgcggcgttgcgggtgtctctcagtttggactcgctgcagttccagtgctctgg

SEQ ID NO: 274466 - DNA, 203 bp, Homo sapiens
  chr19:50291871-50292074
  hypo
cagagtcagggctcgggagatgcactgtggctcgggagatgagcgccatgacagagatgggaaggtggcccagagtcagggctcgggagatgcgcgccgtgacggagatgggaaagtggcctggagtcagggctcgggagatgtgcgctgtgacggaggtgggaaagtgccgtcacaaatggagcatcgtctgtggccaggct

SEQ ID NO: 274467 - DNA, 36 bp, Homo sapiens
  chr19:50292282-50292318
  hypo
gccgtagcaacaggcgtcagtcgggcgagtatctgc

SEQ ID NO: 274468 - DNA, 138 bp, Homo sapiens
  chr19:50297025-50297163
  hypo
cttcctgggggcggcgatcccagaattgagacttagaatacacatgcgcatctcctgggcagtcaggaagaggcctggattcgcaggcaaagagaagaacacaccagctcgtgcatccactcattgtttctttttttt

SEQ ID NO: 274469 - DNA, 39 bp, Homo sapiens; identical to SEQ ID NO: 219642
  chr19:50303027-50303066
  hypo

SEQ ID NO: 274470 - DNA, 278 bp, Homo sapiens; identical to SEQ ID NO: 219643
  chr19:50303126-50303404
  hypo

SEQ ID NO: 274471 - DNA, 101 bp, Homo sapiens
  chr19:50304785-50304886
  hypo
gccggctcccagctgcgcaatgctgacgtggagctgcagcagcgagccgtggagtacctcaccctcagctcagtggccagcaccgacgtcctggtcagagc

SEQ ID NO: 274472 - DNA, 226 bp, Homo sapiens
  chr19:50305176-50305402
  hypo
tgcctggggctgggtcctgccgggcgccgcctgtcctcaccgtgacctgcgcttcctacagtcgacgccctcgccctccgccgacctcctggggctgcgggcagcccctcccccggcagcacccccggcttctgcaggagcagggaaccttctggtggacgtcttcgatggcccggccgcccagcccagcctggggcccacccccgaggaggccttcctcaggtag

SEQ ID NO: 274473 - DNA, 294 bp, Homo sapiens
  chr19:50306203-50306497
  hypo
agcccaggtcctgaggacatcggccctcccattccggaagccgatgagttgctgaataagtgagtcctgggagtggtgggggaggggaacgggacaggtgcggagcccaggccaggtgcagacaggcacccccgtcatcttgcgccccctgccccctcaggtttgtgtgtaagaacaacggggtcctgttcgagaaccagctgctgcagatcggagtcaagtcagagttccgacagaacctgggtgtgtcccgggggactgtgggaatgggtcggagggagaccttggggaagg

SEQ ID NO: 274474 - DNA, 255 bp, Homo sapiens
  chr19:50308600-50308855
  hypo
gtccctcaaagacctgcaggcgggagctgccgggagctctggggttcctgacccagacctcccgggggcccacctcctctgtctggcttccttgactcctggcgggcacagctggctgtgcagaccaagcgcgtggcggcgcaggtggacggcggcgcgcaggtgcagcaggtgctcaatatcgagtgcctgcgggacttcctgacgcccccgctgctgtccgtgcgcttccggtgagtcaggtacggcgcggcc

SEQ ID NO: 274475 - DNA, 359 bp, Homo sapiens
  chr19:50308885-50309244
  hypo
ggcctaatggagcctccctttcacctcatcaggtacggtggcgccccccaggccctcaccctgaagctcccagtgaccatcaacaagttcttccagcccaccgagatggcggcccaggatttcttccagcgctggaagcagctgagcctgtgaggggtggggagggggcggagccaaagccgcgcctctgggtgggcgggtcgggccgtccaggtccctgacttgaaccttcccggtccccagccctcaacaggaggcgcagaaaatcttcaaagccaaccaccccatggacgcagaagttactaaggccaaggtgagagaccgcgggcgtgtttgccggcctatggctgctttgcttc

SEQ ID NO: 274476 - DNA, 120 bp, Homo sapiens
  chr19:50318974-50319094
  hypo
ataaaaataaaagataaaagaaaaatagaaacccaataaaaaataattttaaatgataaaggtaaaaacctttatcattaggctttctgtaagtacttttcaattggtgattattattat

SEQ ID NO: 274477 - DNA, 120 bp, Homo sapiens
  chr19:50319634-50319754
  hypo
acaggcatgagccatctcgcccggccgaagattatgttttaaaatatttactggccattcaaaattttgtgtgtgtgtttgtgtgaaactagtcaggtttctttttatttatttattttt

SEQ ID NO: 274478 - DNA, 161 bp, Homo sapiens
  chr19:50320054-50320215
  hypo
tctttctattaaaacaaatataaagtggcagggcacgatggctaacacctgggatcgctttagccgaggagtttgagacacgccagagcaacacagtgagaccccatctctacaaaaaatttaaaaattagctggaagtggtagtgcgcggctgtggtccc

SEQ ID NO: 274479 - DNA, 89 bp, Homo sapiens
  chr19:50326703-50326792
  hypo
catgtattaagtgccgtgtaagtgtttcctaggattttgtgcctcactctcctggtttgcaaatggataatggtcgcgtgtatctccgt

SEQ ID NO: 274480 - DNA, 57 bp, Homo sapiens; identical to SEQ ID NO: 219647
  chr19:50331699-50331756
  hypo

SEQ ID NO: 274481 - DNA, 216 bp, Homo sapiens
  chr19:50341934-50342150
  hypo
atatgcaaacaaatcgtgtctgtgttgaaagaatacaacctgaaacgccactatgaatcaaagcatagtaagagctacgaccagtacacagaacagactcgagatgccatcctcaacgaactgaaaaagggactcaaatgtcaatagggtttgttttgaaaagcgaattaacagaagtggcgcggcagtggtacgccgttccggaatcacgtgaga

SEQ ID NO: 274482 - DNA, 413 bp, Homo sapiens
  chr19:50352981-50353394
  hypo
tccagtcagccctcgggagcccctgggcaggaaaacatggacaggcctacgggttcttctgccatttcactggccactcctccgtgtcctttgctggttgcttctcattgtcgtgactgctaaagggatgagtgtcccagtctctttgtgagctcatccagtctccattcaaacactgatgactcccgaatttctctctccaggctatgacatcaatatctatctacattgtttagtcaacatccgaaacagaagtagggactccgtctctaacctcctacagctgtgtctatttctcctctctaccttcactcgactccgcccacactggctcccttttattccttctactttcaggatttgtctttgctgttctgtcctctttgcacacttttccagccatctggaatggc

SEQ ID NO: 274483 - DNA, 124 bp, Homo sapiens
  chr19:50353424-50353548
  hypo
ccttgcttgctaactttacctcgctatggtcatatcccatcgccctgtggatgtgcgctagttaacacttagcacagcctgtgattatgtctctccccagtggaccgtggggcctgtgagggac

SEQ ID NO: 274484 - DNA, 48 bp, Homo sapiens
  chr19:50361410-50361458
  hypo
agctcttccagagggcggggctgggggcaagagcgcctccccaggtgg

SEQ ID NO: 274485 - DNA, 471 bp, Homo sapiens
  chr19:50364773-50365244
  hypo
ggaacatcagaggggcggcaggcccaggggtcaggggaggaggggggtcagggggtgcagcccggggggtgtccgggctgagcgggctcacccggttgttgtggcgcgcctgctccagagtggcggtgaagaggaagcagcggcaggggacgcccgcggctcgggcacactggacgtacctgtgggggaaggagctggatgtgcaggccccgcccaccccgccgcaggccacctacggccccgcggtcacgctacctggcgcggctcgcggcgtctgggtttgtgttgtcgatggcgacccgtttcccttgcttcagggctgtctcacacgtggtcacacagcgctgccaggagcctagcgtgtcctggggacacgagaggtcacaaacagatcggcagacccagggggagagaagaccccgagcggggacggggaggcaatgatggaggaaagccgccccaaaccagttg

SEQ ID NO: 274486 - DNA, 204 bp, Homo sapiens; identical to SEQ ID NO: 219648
  chr19:50406382-50406586
  hypo

SEQ ID NO: 274487 - DNA, 173 bp, Homo sapiens
  chr19:50412838-50413011
  hypo
aagtgaagcctgtcgtctgtgtggccggagtctgggtggcaagtgagaacaggccggtggaaggggtacttgtggctggttggaagggagccccaaaattaaaccctccagtgccagaggtggagaaagaaaaccctgtagcaggtgtggttgttgccgtctttgcagtgcca

SEQ ID NO: 274488 - DNA, 39 bp, Homo sapiens
  chr19:50422097-50422136
  hypo
aaagctaggccgggcgcagtggctcacgcctgcaatccc

SEQ ID NO: 274489 - DNA, 347 bp, Homo sapiens; identical to SEQ ID NO: 219649
  chr19:50423833-50424180
  hypo

SEQ ID NO: 274490 - DNA, 325 bp, Homo sapiens
  chr19:50424485-50424810
  hypo
gagaggacttcagtcacctgcgtaaagtcccacaaccagtaagggctggcccaggtgtctggccccacagctgagctcctaaccgcaccgagcctctccaaaacatggtctttttttgctccccactgccaccaccatcaccgtcccctgcctcatccagtcccccttcccattctccagagacttcctgggccatctccatgaccttccagaccagcctgggcttcactctcaaatccaattcaggatgatccgcccgccccagctgcagacgatggcctgagacgcctgcagggaagagaggggcgtccgctgctcgccaacc

SEQ ID NO: 274491 - DNA, 196 bp, Homo sapiens
  chr19:50477609-50477805
  hypo
gtcctgagaaatgcacggttaggtgattctgtcgtgtgagcatccttgaatgtgcttacacagtcataaatggtacagcctaccacacgccgaggctatacggtatagcccattgctcctagactatacacctgcacggcatgttcctgtagtgaaagctgtaggcaattataacgcaatggataggttaaagaca

SEQ ID NO: 274492 - DNA, 148 bp, Homo sapiens
  chr19:50654426-50654574
  hypo
tggccccaactgtgacttgctatttgctcttccttctaccttttccccactactgctttcagaaaacacctacttttcttgcaagaacaagttcttacagcctctcctgcagtaaacgttctccgatttccaccgagctgagccggag

SEQ ID NO: 274493 - DNA, 37 bp, Homo sapiens; identical to SEQ ID NO: 219651
  chr19:50705041-50705078
  hypo

SEQ ID NO: 274494 - DNA, 53 bp, Homo sapiens
  chr19:50756058-50756111
  hypo
tctccaaatccacagcgtgagcacctttgtttcagaggcggaggtctgaacct

SEQ ID NO: 274495 - DNA, 592 bp, Homo sapiens
  chr19:50764723-50765315
  hypo
cctcacagatccaggcgctggaactggaccccaacctctaccgcgtgggacagagcaagatcttcttccgggctggggtcctggcccagctggaagaggagcgagacctgaaggtcaccgacatcatcgtctccttccaggcagctgcccggggatacctggctcgcaggtgggcagccacgctgtctcccggggtcctgttggccgagactgggtcagggaggggttgaccagatggctctaggtgtcagggcctccaggatgggtgcagggctgaggagcaggtggatggaggtgccgggtgtccaggcttcttggttctgcagtccctgaggggccctgtgggcagggcaggccctgttcagagtaagactggcaacacagaggctggacttagccgcagggtgaccagctgtcctagtgggcctgggtctgggtttcccagggtgcaggacttccagtgctaaaacagagaaagcccggggcaacccaggtcaagctgtccgctctccctggccagtccctcgaggggctccagtctggaggtgagacttccatgggcatagagtcccagtcccgggtgagacctgct

SEQ ID NO: 274496 - DNA, 123 bp, Homo sapiens
  chr19:50774468-50774591
  hypo
ataaatgcttgttgcgctaatgaatgaaatgggaaagccaataagagtttgatccttcccggcctcacccagggcatggacatctctgaaccacaagccgcggggatccgtgggccagccatc

SEQ ID NO: 274497 - DNA, 323 bp, Homo sapiens
  chr19:50782874-50783197
  hypo
agtgaaactctgtctcaaaaaaaccccaaaaaacaacagcacgcaatagatccatatacctttctattgccgaataatgcccgttgtatggatattccacatttgtttatccattcgtttattgatggacattggggctgttcccgcctcttggcgatggtgagtaatgccactgagaacattccggtacgagtttctgcatagacctatgcgttcatttcttttgggtatgcacctaggagcgggattgttgggtcatgtgggaaccctatgtttaagcatctgtggatctgccagactgttttccacggcagctgtaacat

SEQ ID NO: 274498 - DNA, 266 bp, Homo sapiens; identical to SEQ ID NO: 219652
  chr19:50784840-50785106
  hypo

SEQ ID NO: 274499 - DNA, 272 bp, Homo sapiens
  chr19:50789748-50790020
  hypo
aggagaaggcagctgtacttcgggcagtggaggaacgtgagcgggccgaggcagagggccgggagcgtgaggctcgggccctgtcactgacacgggcactggaggaggagcaggaggcacgtgaggagctggagcggcagaaccgggccctgcgggctgagctggaggcactgctgagcagcaaggatgacgtcggcaagagcgtgagcagggcccccgctccccgggacacactgggtgaggggagacacgtacatgcatgtatgctttca

SEQ ID NO: 274500 - DNA, 946 bp, Homo sapiens
  chr19:50826194-50827140
  hypo
tccacctgtgcccccgatccctgacgcccaggctcacctgcccggttgatctcaatcacctcctcctgagccaacgggcaaggctcgccgggggctggcagaggaggcagccccatgatccccagcccacccgctccccccctgagcagcccggggtgcgtgtggggccccgctgggtaggccccggccacagtcacccccatggagggtggggtgatgggtggcggcgggctgatgcccccgctgccgtggtgcgggtggggcgggggtggcgggggtgggtcaggcttgcagtagttgggcgagcccggttgcgggggccgggggatgtgtttgttcttcttcttgggcagcttctgcttggccatggccagcgaatagtacatgccaaagttgttgacaatgacgggcacaggcatggcgatggtcagcacccccgccagggcacacagcgccccgaccagcatccccgaccacgtcttggggtacatgtctccatagcccagggtcgtcatggtgaccacagcccaccagaagccaatggggatgttcttgaagtaggtgtggttggagcccaggatgtcatcggggtcggcgccaatgcgctcagcgtagtaaatcatggtggcgaagatgagcacccccagggccaggaagatgatgagcagcaggaactcgttggtgctggcgcggagcgtgtgtcccagcacgcgcagccccacgaagtgccgggtcagcttgaagatgcgcaggatgcggacgaagcggaccacccgcaggaagcccagcacgtctttggcggccttggagctgaggcccgagaggcccacctcgagatagaagggcaggatggccacacagtcgatgatgttgaggctgcttttaagaaactccaccttgtctgggcagaaggtgatgcgcatgaggaactcgaaggtgaaccaga

SEQ ID NO: 274501 - DNA, 90 bp, Homo sapiens; identical to SEQ ID NO: 219654
  chr19:50871401-50871491
  hypo

SEQ ID NO: 274502 - DNA, 76 bp, Homo sapiens; identical to SEQ ID NO: 219655
  chr19:50898815-50898891
  hypo

SEQ ID NO: 274503 - DNA, 502 bp, Homo sapiens
  chr19:50919573-50920075
  hypo
cccaggccccatgaccaccccgtgtccaccccggtgccctttccctggctgcccgggtgtgactgccatgtggccgcaggacccgctgttcgtgctggagcacagcctgcccattgacacgcagtactacctggagcagcagctggccaagcccctcctgcgcatcttcgagcccatcctgggcgagggccgtgccgaggctgtgctactgcgtacgggggcaccaggggactgggggcaccctgggggggcagaggagatcaccggcccaccacctgcctcctctcctgcagggggggaccacacgcgctgcaagacggtgctcacgggcaaggtgggcggcctcctggccttcgccaaacgccgcaactgctgcattggctgccgcacagtgctcagccaccagggtgagcggccctggccactgggcccccactggccctcaacctgctctgccgtcaccccagatcctagacacccaccccatcggctggcactgcca

SEQ ID NO: 274504 - DNA, 219 bp, Homo sapiens
  chr19:50938504-50938723
  hypo
aaggtgaggaggtgctccctcgggctcaaccgacctggcttctcatctccatcctcctcgctacgcctctccaggcctttccccagcctctatccttgaatctgtccccgcacagccccagggctgacccacgcctcccgtgctcccagccctcccggggctccctggcacccgcaggcagagcccagcccctcggctggcatcggctccggtcagctg

SEQ ID NO: 274505 - DNA, 83 bp, Homo sapiens
  chr19:50983972-50984055
  hypo
ctgttcaacacctcggtgcagctgcagccgcccaccacagccccagggtgagcctctgctgccttcgcggcgctcttgccacc

SEQ ID NO: 274506 - DNA, 1577 bp, Homo sapiens
  chr19:51020736-51022313
  hypo
gctgtgggagggaggggtcccggtcaggctgcgcccgggctgggacctgggtggggggctccacgcccctcgcccgcccggccccgccgcctcagatctgcgtctcttgcacgttctccttggagccgctcttgaagagcagaggttcgtggatggagttgaggccaggcgggcctttgcccccgcagcccccgccgctggggttgctgctgtagtgcgccttgaaggcggcagccacgtagtggtggtggttgaggtggtctcgctccagggcgggcagggccaggtggctgtccccgcccacaccacccccactggccacggcggccgcggcggccacggacacggccgaggcggcgggcagctcgtcctccacgttgatgatctccacggtgcgcgtgggcccgtggtgcttgtggagctggtgctgcttgcgcagcttgtagaaggccacgagcatcaccgcggccatgaacgtgatggccacgaagcagccgatgatgattttggtggtcttcatgacgtcgtccaggtccttgagggcgttctccgtcacatccgtgatgggcaccgtgaacgccttctccgtgggccgcgaggagcgcggggcgggtgccgtggtagaagacgaggcagggccggccgcgtccccaggccggcccccaccccagacaccgtctgtcgtgggccctggcggttccttctccgtcccccgcggctgcagggcctcctctccgggctgcgtctccagggtctccacggtcaccgtggtgaagtaggtgtagccgccactgccccctccaacaccaccactgcccccagggccgcccccgccgctgccggtgcccccggccgccacggggtccacggccgagacgttgagcgtggccgaggcggtggtgttgccggctgagttcgtcaccatgcacgtgtactggcccgtgtcctgcacggtgacgttggtgaagttaagcgtgccgtcatgcaggacggagatgcgcacgcggtaggagccgtgggtcatgagggtgccgttgggcgtcagccagttgacggaggtcatggaggtgcccgtgcggcatttgagctcggcagccatgccctcggtgacgttgaggtccgtgggcggctccacgatgacgggcgcatagcaggtgaaatgcgactggtccagctccccaatgtagcgccccttgaggccggcgggcgcatgacagcgggcgcagcacgtcgtgttgctgggcaccgtctccttgagccaccagctcagccagagcacgtcgcagttgcaatgccaggggttgtggttgaggtgcacgcgctcgaggcggtgcaggggcgtgaagaggtcgtggggcagcgacatcaggttgttgtgggacaggttgagctcctccagcgacttgaggtcgtcgaaggcgttgcgctcgatggtggctacctgggcgtgcatgagccacagcttgcgcaggctggtgagaccctggaaggagcccgggcggatcaggtccagccggttgcccgacagctccagctcctccaggcgcaccagggccgtcaggttggggatgtccttg

SEQ ID NO: 274507 - DNA, 44 bp, Homo sapiens; identical to SEQ ID NO: 219657
  chr19:51098421-51098465
  hypo

SEQ ID NO: 274508 - DNA, 272 bp, Homo sapiens
  chr19:51128562-51128834
  hypo
ggtcagtgaggaccgtggagggtggtgggagggcctgtccccaccccagccctcctgcctgacccccgcccgggccgcgcccctcaccagtcgtagtctaccacggcgatgctgagccccacgttctccacgctctcgggggccacgtcgaacaccagcgcctcattataggtggggttcagcgtgttcttcttgatggaggttttccgcttcttcagacgccgcccctcgctgatcagggaggccttcacgtaggggtctgggaacagcaa

SEQ ID NO: 274509 - DNA, 38 bp, Homo sapiens
  chr19:51269873-51269911
  hypo
tttttttttgagtcttactccgtgacctaggctggagg

SEQ ID NO: 274510 - DNA, 136 bp, Homo sapiens; identical to SEQ ID NO: 219659
  chr19:51293556-51293692
  hypo

SEQ ID NO: 274511 - DNA, 339 bp, Homo sapiens
  chr19:51295114-51295453
  hypo
gctctgggtctggccgcctgagctggctccgagaagcaagactgtcctcgagctggtctgtccagaccagggtgagccccggcccacgctgctctcctggatctgggagaaactgcgacaaagacgcaggggccgagagcccgggttcccccgacccgctgtgagacccaaggcaaggcacacggctgtcctctctgagactcagttttccccagctgctgaggttccccatgcgcagctgtccccgataccacgagctgctgcgggaggccaccgaggccgccgagtaccaggaggccctggagggctggacggtgagcagggcggcggtggggggcg

SEQ ID NO: 274512 - DNA, 105 bp, Homo sapiens; identical to SEQ ID NO: 219660
  chr19:51302699-51302804
  hypo

SEQ ID NO: 274513 - DNA, 695 bp, Homo sapiens; identical to SEQ ID NO: 219661
  chr19:51303006-51303701
  hypo

SEQ ID NO: 274514 - DNA, 60 bp, Homo sapiens
  chr19:51304555-51304615
  hypo
ccaccttcagaaggcgggaagcgctagtgccccgggccatttgctcggtgcctgttccac

SEQ ID NO: 274515 - DNA, 203 bp, Homo sapiens
  chr19:51535217-51535420
  hypo
acgctgctggttacgcggacgggcaggcgcagccgcagcagccggaggtcgtgctcgtggctcgtcgaggctcccaggtagccgggatgggtcacagagaagccgctgtgccggatctgctcggtccagtcgagctggctgaggctgtgttcccccaggcgcacccagtacctgctgccggtggcgacggctgagcgggtggc

SEQ ID NO: 274516 - DNA, 106 bp, Homo sapiens
  chr19:51589548-51589654
  hypo
tgccgtccccagcccggacctcagcacctgccgtgccgtggccaggttgctgggccctcttcccaccacatgctaggttcccagggtatctcgctcaccactccac

SEQ ID NO: 274517 - DNA, 327 bp, Homo sapiens
  chr19:51597216-51597543
  hypo
ttgcacatttgtccccatctcgccctttcctgtgctcattcttactcatctccagctcccggtttacacattacctctttcaggaagcgttccatgacgcaccgcactgagttagaagccccacctcaggcctcccctgtgtccctcctaagccccacggtggcacatatccctccggatcttgacttgccagtatccctgcccgcctccgctggcagacagggagcccattgagggcagggactggggctgactcagctgcattgccccaccgccctgcgcagggcccgccagctccaaggaggcgtcaggaaatgtttgctgcat

SEQ ID NO: 274518 - DNA, 253 bp, Homo sapiens
  chr19:51607194-51607447
  hypo
accagggtctcctcgccgccttctggagcatgcgcctgaatcccctttcaggtcccgcctcctcgcctgtgcattcgccccactgcctcggagagtgccgctctgcggcccgtactacgctcacctgtcacgatgtgcgtggctcccacgcggcgcgccccttcctccagcgcccggcgccgcagcactccacagaaggtgcagcaggagcggctgcggccggagccggctgtgctgcgggccacggcgtcca

SEQ ID NO: 274519 - DNA, 178 bp, Homo sapiens; identical to SEQ ID NO: 219665
  chr19:51607825-51608003
  hypo

SEQ ID NO: 274520 - DNA, 107 bp, Homo sapiens
  chr19:51684622-51684729
  hypo
accgtgtgactagcgactgagtgccttacaggggacgacctcctaagaggctgactggcaggagcccagctaactgctggccagggcaggccgtgggggcgcgttac

SEQ ID NO: 274521 - DNA, 54 bp, Homo sapiens
  chr19:51753980-51754034
  hypo
gcccacaaactacctggcaccgcccccagctgcggattggctcaagccctcaag

SEQ ID NO: 274522 - DNA, 353 bp, Homo sapiens
  chr19:51754291-51754644
  hypo
gtaaagtaagcccatgcagccgctgattggctgcgggtggatgcactcacctaaggatgcgagctagcaggtcttgcagcggctatcacgcccctcacgccgctatctctgtgcagccgactgaggatccctagtcgcataaggctgtgcctggcctgttggcgtccctggcagttgttgggttctggcggttgttgggtccctggcagttgttggcggttgttgggttccttcattgaaactgcactaactgggcttccagtcagcgtcagtcagcggatccttgggccgtggggcagccgcaggtcggttaggccaccagggcggctctcgtgccagtgaggcccctgaga

SEQ ID NO: 274523 - DNA, 192 bp, Homo sapiens
  chr19:51840539-51840731
  hypo
ggatgggcaggatccgaaaggtccaggtccctgggttccgaggtggaaggggcaccacggctgaccgctcctgaggccccaggatgagcagggagacccagtccctgtaggtggaagtcctgcccagagcaggcccatctggccatgcctggatctcaaaactgctgatcagggccccgcgctccacatccc

SEQ ID NO: 274524 - DNA, 165 bp, Homo sapiens
  chr19:51893083-51893248
  hypo
tggtatcaaaggtgcgtatgacagcgctgggtctggtaagtgctaaaacagtggacagctacgatttctccagccttctggggatccctggagtcttcacatttcttggtttattcttggaaatttctgttcgatgagtatctgtttctagctcttttttttttt

SEQ ID NO: 274525 - DNA, 205 bp, Homo sapiens
  chr19:51906688-51906893
  hypo
tgcttgcaaacctgcgccacctccttttgaaactggacatcttcctgcgggttaagcagtgagatctcagccaggccagaaaaagctgccatgccaaaagcggccgacactaactccacgcggtgctcctggaaacgtcgggctcccagctcccatgaggcagaaaacgggcatctattcttttaacatacgtatgtatacacag

SEQ ID NO: 274526 - DNA, 41 bp, Homo sapiens; identical to SEQ ID NO: 219667
  chr19:52026931-52026972
  hypo

SEQ ID NO: 274527 - DNA, 302 bp, Homo sapiens
  chr19:52058087-52058389
  hypo
ctttacataggaactggtggcgacatcagtgaaggcctctctgggcaacttccggttcacattggcgtccaggcgtgatttcttcagcatgtccattgacgcgcatgttcaatatcacttttggagctatgctctgcagatagttatcatggtgtaacgcggtggagggcgtgtccgttatttccattgtaaacttttcttcagcggctttgtcaggagaacaacatggtcgtgcccagatagagttggtcactggaggacgccatcttcaaaagatggtcgttccatacagccagggaagg

SEQ ID NO: 274528 - DNA, 482 bp, Homo sapiens
  chr19:52101647-52102129
  hypo
catttataacccacgtatataagagcagcagccacagctgcccctggtctattccaggcaggggcactatctagggaactcctcaaaggcaatgaaacatgtgtaacccgcctcctctcccggtctaggagaagctgtcccttcttgcaatgcccgccccgtcatgtgcctcctgccacgtggcatgcgcctccctccgccgtccatgctcgggccaagtgctgtgcggttcctgcttctgcaccgccttcgaggcggaggtgcagcacatggtgcttgtgggctacctgctgccgccaggcgcagtggtggccctgggcacctcgggcggcaaggattccacggtgctggcacacgtgctgcgcacgctggcaccgggcctgggcatcttactgcagctcatggctgtagacaagggcatcgggcgtggcttagcgggaggatcccagtaaggagctggggaaatacgcatgtgcctattt

SEQ ID NO: 274529 - DNA, 38 bp, Homo sapiens; identical to SEQ ID NO: 219670
  chr19:52289294-52289332
  hypo

SEQ ID NO: 274530 - DNA, 607 bp, Homo sapiens
  chr19:52342886-52343493
  hypo
tccccagcccttcccatcaccgatagccataatggcccccaactccgcatcgcttgctcgcttttcctggttccccagacaccgacttccactcgacgctgaggatgctccaatccagaccacagaagccctcagtggctaacccccagcttcagattccactgaccattccctgaagccttcttacaccgcaaacctccacaagtaccccatgctggtcgcatccggtcaaggaccccaacagcgctgggaaactcaccctacagctggagtcgcacaaacattcgcttgaggactagcaggtttccgtaacctcttcactcactgccgtagtcacgctcttgtgcagactcagtagcaccttcgcggaacacaagatgtctacagactttgaaaccaggcgtgcacatggaagcagcagtcttggaagatgcttcttacagatagcgagatggccattttctggcgactaaattccatcgtgctagaaaggaaagaggcaatgcagctgatcttctactgtccttttcaccacttccccagctgctaccagcagcgttgtgcattctcaggaacaacattcagcgttctcacctgtctacttcaa

SEQ ID NO: 274531 - DNA, 82 bp, Homo sapiens
  chr19:52350892-52350974
  hypo
acagctctaaacactgatgccggccctaaaagccctcaacaaccccgaagcggccttaaacggcaaccccagatggtactca

SEQ ID NO: 274532 - DNA, 41 bp, Homo sapiens
  chr19:52368627-52368668
  hypo
acgtgagccaccatgcccgcgccttcccaaagatttctaac

SEQ ID NO: 274533 - DNA, 47 bp, Homo sapiens; identical to SEQ ID NO: 219672
  chr19:52405665-52405712
  hypo

SEQ ID NO: 274534 - DNA, 93 bp, Homo sapiens; identical to SEQ ID NO: 219673
  chr19:52405954-52406047
  hypo

SEQ ID NO: 274535 - DNA, 152 bp, Homo sapiens; identical to SEQ ID NO: 219674
  chr19:52406167-52406319
  hypo

SEQ ID NO: 274536 - DNA, 120 bp, Homo sapiens; identical to SEQ ID NO: 219675
  chr19:52479228-52479348
  hypo

SEQ ID NO: 274537 - DNA, 82 bp, Homo sapiens; identical to SEQ ID NO: 219676
  chr19:52479588-52479670
  hypo

SEQ ID NO: 274538 - DNA, 77 bp, Homo sapiens
  chr19:52484729-52484806
  hypo
tagagatcggatttcagcatcttggtcaggctggccttcaactccggatctcatcacacacccgcctcagcctcccc

SEQ ID NO: 274539 - DNA, 320 bp, Homo sapiens
  chr19:52488648-52488968
  hypo
aggcgatatcatcacgaacatggaaaaagagattcaagaaattacatatttaaaaaagaaaatgctccctcagaaactcccaggcagattttcacatacatagttggctagaattgcaccatacgcctaagctcatttccatgtcaaacctatcactagcaatggcaattggaaccagcaagattggctaagaccaacaaggccttactaagaaactgggatttgggtcgccttgccacagggatgaatacttcacgaaatggagattctgttaagaaagtgtgaatataaggcgggcaagcaacactcactatatatta

SEQ ID NO: 274540 - DNA, 65 bp, Homo sapiens; identical to SEQ ID NO: 219677
  chr19:52530500-52530565
  hypo

SEQ ID NO: 274541 - DNA, 218 bp, Homo sapiens; identical to SEQ ID NO: 219680
  chr19:52569174-52569392
  hypo

SEQ ID NO: 274542 - DNA, 36 bp, Homo sapiens; identical to SEQ ID NO: 219683
  chr19:52718578-52718614
  hypo

SEQ ID NO: 274543 - DNA, 32 bp, Homo sapiens
  chr19:52780413-52780445
  hypo
ttctaaagagtcatgttggccgggcgcggggg

SEQ ID NO: 274544 - DNA, 120 bp, Homo sapiens; identical to SEQ ID NO: 219684
  chr19:52780745-52780865
  hypo

SEQ ID NO: 274545 - DNA, 35 bp, Homo sapiens; identical to SEQ ID NO: 219685
  chr19:52801591-52801626
  hypo

SEQ ID NO: 274546 - DNA, 34 bp, Homo sapiens
  chr19:52801866-52801900
  hypo
agagcaaaactccgtctcagggaaaaaaaaaaaa

SEQ ID NO: 274547 - DNA, 110 bp, Homo sapiens
  chr19:52838576-52838686
  hypo
caggacccatcgccgaacgatgggtatggtggcatgtgcctgtagcgtttttaacacacagggaagcgaccgccagactctcacggagatgccccgttcgttctgccttg

SEQ ID NO: 274548 - DNA, 96 bp, Homo sapiens
  chr19:52843261-52843357
  hypo
ctgcacctttaacccgtggaatctgtgcctatctccaagtagacagtagcaaagttgagttaacctgtgggacacacagctgcgagcgtgccacag

SEQ ID NO: 274549 - DNA, 42 bp, Homo sapiens
  chr19:52851166-52851208
  hypo
gcaatttctagtcctgcaagcgccattcatggtgagtgccct

SEQ ID NO: 274550 - DNA, 41 bp, Homo sapiens; identical to SEQ ID NO: 219686
  chr19:52860523-52860564
  hypo

SEQ ID NO: 274551 - DNA, 31 bp, Homo sapiens; identical to SEQ ID NO: 219687
  chr19:52861439-52861470
  hypo

SEQ ID NO: 274552 - DNA, 182 bp, Homo sapiens; identical to SEQ ID NO: 219688
  chr19:52917256-52917438
  hypo

SEQ ID NO: 274553 - DNA, 42 bp, Homo sapiens
  chr19:52927550-52927592
  hypo
ttttttctgagatggagtttcgctcttgtgtccctggatgga

SEQ ID NO: 274554 - DNA, 101 bp, Homo sapiens; identical to SEQ ID NO: 219689
  chr19:52927832-52927933
  hypo

SEQ ID NO: 274555 - DNA, 180 bp, Homo sapiens
  chr19:52931619-52931799
  hypo
gagcttcagcctgggcaacgagcgaaactctcaaacaaacaaacaaacaaaaaaaatgtctttctttcgttctttcttgtctctccctttttctcacacacaggcacagacacctacattcttttctttgttgcactatttctctctagtcttattttctttctttcttttctttttttt

SEQ ID NO: 274556 - DNA, 41 bp, Homo sapiens
  chr19:52978881-52978922
  hypo
ttataggcgtgagccaccgcgcctggctgagtgcagccaat

SEQ ID NO: 274557 - DNA, 76 bp, Homo sapiens; identical to SEQ ID NO: 219690
  chr19:53027352-53027428
  hypo

SEQ ID NO: 274558 - DNA, 201 bp, Homo sapiens
  chr19:53029365-53029566
  hypo
caagcgtgagcccccatgcccggtcctaaggtttatttattaacaaaatggtttttatttctttctctgttatcgtcgtggagatgatttctcatttgggataatattttttagttttcaattatattttgtcaacatttaaaaagcaaagtaaagaatatttcttgggccaggcatgttggctgacgcatgtaatcccag

SEQ ID NO: 274559 - DNA, 36 bp, Homo sapiens
  chr19:53045476-53045512
  hypo
gctgggatcacagtcgactttcaaaatgcttttggg

SEQ ID NO: 274560 - DNA, 38 bp, Homo sapiens
  chr19:53055548-53055586
  hypo
catgagccaccgcacccggcccaaaaattttttcaaaa

SEQ ID NO: 274561 - DNA, 79 bp, Homo sapiens
  chr19:53058376-53058455
  hypo
gtgtagtgagtgcagcaagacgttcagtcagaaggcaacccttctatgccatcgtagacttcatagtggtgagaaacct

SEQ ID NO: 274562 - DNA, 89 bp, Homo sapiens
  chr19:53071292-53071381
  hypo
atgcaacctgagtccggtggcatgcaggcgcaacttctacaagttttcctggccaggcatgcaggctcaggcctgtaatcccagcactc

SEQ ID NO: 274563 - DNA, 103 bp, Homo sapiens
  chr19:53074698-53074801
  hypo
atggagattgaggacgatcgaagaattggggagaaggagcaacaagagattaaataagacgtgaggatggagcccaggtaatttttgtatttttagtagagac

SEQ ID NO: 274564 - DNA, 331 bp, Homo sapiens
  chr19:53077051-53077382
  hypo
gagccaccgcaccgagcctctgcatgggatttggtcagggctgggtctgtgccctgaaagggagctcattccagcccagctccccactgctgcagcgtgtgagggcttctccaggagggaagcgagagttttcttatagaaatttattatccctggtgcagtgggcagcagaggtgaccatattttttcagagtgagggcacctttgtatgtgtcattgtgttacaggcaggaggtgtgttgattctgagcagtaaacaacatatttctaacattcaggattgacttctaaagacttggtacgtgaggaaaaaacacggaagaggaagagg

SEQ ID NO: 274565 - DNA, 33 bp, Homo sapiens
  chr19:53078219-53078252
  hypo
tgtttgtttgtttgttttttcgagacggagtct

SEQ ID NO: 274566 - DNA, 158 bp, Homo sapiens; identical to SEQ ID NO: 219692
  chr19:53089793-53089951
  hypo

SEQ ID NO: 274567 - DNA, 47 bp, Homo sapiens
  chr19:53090167-53090214
  hypo
cacctacatggctccgtgtcccctgcaggcctcgccccggagctcta

SEQ ID NO: 274568 - DNA, 64 bp, Homo sapiens
  chr19:53090869-53090933
  hypo
tttagctccttcaccgttcactggatcctggtgagaacaagtccgtaagcggagagcagaatca

SEQ ID NO: 274569 - DNA, 257 bp, Homo sapiens
  chr19:53100993-53101250
  hypo
ggccagagggtgatcgtcatcttgagggcaaggtctggaagtggtgttttgaagggcagggtctcgagggggcgggtcctggctttctcctcagctggaccccaggtgtcgtctgctgtcatcctcttgccctgcaggactagattctccgggtactaattggtggatagtttctgatgtgccgtgatattacccctaatatcacagggatgcctcctgtccattttagagacttgctctgtcgcccaggctggagg

SEQ ID NO: 274570 - DNA, 257 bp, Homo sapiens
  chr19:53101490-53101747
  hypo
ccggcccctaagttaatatttcaaacaatcgaaggtaaaacaacatattgtgttgggccacctgtactgaacgctgaatcgtttttcctcttaagttgaaaatggttttaatgcaaagcgccttttttgagcaggtagagtcacgcatccggcaggcggggcgagctcccctctgtctggggcagggtgggggagaggggcagggacctcggtaaaggggtggagtggcgcgctggttgccgcgggcactggcaatt

SEQ ID NO: 274571 - DNA, 40 bp, Homo sapiens
  chr19:53102422-53102462
  hypo
ggtatgaaccactatgcccggctaactttgtttttttttt

SEQ ID NO: 274572 - DNA, 44 bp, Homo sapiens
  chr19:53108414-53108458
  hypo
aaaaaaaggccatgcgcggtggctcatgcctgtaatcccatcat

SEQ ID NO: 274573 - DNA, 45 bp, Homo sapiens
  chr19:53114551-53114596
  hypo
gacttcctattggctgggcacggtggctcacgccagtaatcccag

SEQ ID NO: 274574 - DNA, 31 bp, Homo sapiens
  chr19:53163140-53163171
  hypo
aatattatcaagatatttctcggctgggtgg

SEQ ID NO: 274575 - DNA, 43 bp, Homo sapiens
  chr19:53213086-53213129
  hypo
tgggattgcaggcgtgagccaccatgcccggcaaagactagtg

SEQ ID NO: 274576 - DNA, 515 bp, Homo sapiens
  chr19:53228720-53229235
  hypo
ttttgagcaggaaaactatgcgataggaagtgtatacattgccctatagcagaaagaccggggacgggaccagcctccaagcgacttcaaacccaaaaggaagcaacttccagactcttatgggcgtctcaatttgctctgggtgaaggaagacaggcaagaatttccaggtctgtgaggaccccacgtcccagggacagaagtgccagggacctgggaagtgcagacttaatacaaggcagagcaaaactcacgcgcctcggtaggacctttactccacgtgatccacttccgggtttgctgcgcaggacagaagccagtcccgggtggggcccccgaacatggtggcggggcctgggtgggacagaggcggggcgcgaggcggagagaccttgccctttagaacaggcaaagggcggggccgggaccagacctgtgcatctctccgcctcgcacccagcgcctctgtttttcgggtgtttggaggtgagagcggccaggaaggctgaggcatg

SEQ ID NO: 274577 - DNA, 136 bp, Homo sapiens
  chr19:53233231-53233367
  hypo
atgcattgtccttcgttatctagtcaactgtgcaaaaaatatagaaagtgtactgggaaaatttatcaactgagatcacagaaaacattgtataaaacaaattgcacaataaaaccataaaaaacatgatgtaggc

SEQ ID NO: 274578 - DNA, 78 bp, Homo sapiens; identical to SEQ ID NO: 219694
  chr19:53241622-53241700
  hypo

SEQ ID NO: 274579 - DNA, 148 bp, Homo sapiens
  chr19:53242766-53242914
  hypo
accaaatgttattttaccttcgattgtttgaaatgttaactgaaaacgggcaggaagcctccctgtgatattaggggtaatatgacggcacatcagaaacaatccaccaatcagaacccgggggatcgagtgctggagatcaagagga

SEQ ID NO: 274580 - DNA, 42 bp, Homo sapiens
  chr19:53247899-53247941
  hypo
caaactgagcactaacctctcgagaagaaaagccacacactg

SEQ ID NO: 274581 - DNA, 99 bp, Homo sapiens
  chr19:53297749-53297848
  hypo
gtggctgattcccacgtgatggtctggaagcgccaataggctgtgttggtcttccttctctagaaaattccaggatgggccgggcatggcggctcaccc

SEQ ID NO: 274582 - DNA, 153 bp, Homo sapiens
  chr19:53316598-53316751
  hypo
ccagggagtggggcagggggcggcttattcactctggggattcgccatggacacgtctcaacagtgcaagctgctccccgtgtttccctgccccacttcgcccccgtaggggctgctccagggtaggcgggcgggggtggtaggaggtttttt

SEQ ID NO: 274583 - DNA, 41 bp, Homo sapiens
  chr19:53317558-53317599
  hypo
tggggctgggcatgatggctcgtgtctgtaatcccagcatt

SEQ ID NO: 274584 - DNA, 35 bp, Homo sapiens
  chr19:53398428-53398463
  hypo
gtcctggggccgggcgtggtggctcacaccttaaa

SEQ ID NO: 274585 - DNA, 150 bp, Homo sapiens
  chr19:53401587-53401737
  hypo
agcagggatgtgggcgaggtggcgagtctggggtcccggctactcaggaagcaggagccgcaagaccgctgagcccggaggtccaggccagcgtgggcgacaaagtaagaccctctaccccagagctccttcctccgcctcaataagaaa

SEQ ID NO: 274586 - DNA, 120 bp, Homo sapiens
  chr19:53412364-53412484
  hypo
tccagcctgagcaaaaaagtgagactccatctcaaaaaaaaaagaaaatgttaataccatatttttctgaataactgttacaaaattacctatatccatgtggaacaggcgctttgtaac

SEQ ID NO: 274587 - DNA, 34 bp, Homo sapiens
  chr19:53429315-53429349
  hypo
actacataagaagggacaatcggccaggtgcggt

SEQ ID NO: 274588 - DNA, 37 bp, Homo sapiens; identical to SEQ ID NO: 219696
  chr19:53438070-53438107
  hypo

SEQ ID NO: 274589 - DNA, 98 bp, Homo sapiens
  chr19:53460885-53460983
  hypo
agtagtaaccgccccggttgcccccctttccaaaaagactattgttataatcggagccatgggagttttatcaaagcaagctttctgttgccccagac

SEQ ID NO: 274590 - DNA, 90 bp, Homo sapiens; identical to SEQ ID NO: 219699
  chr19:53463666-53463756
  hypo

SEQ ID NO: 274591 - DNA, 153 bp, Homo sapiens; identical to SEQ ID NO: 219700
  chr19:53477544-53477697
  hypo

SEQ ID NO: 274592 - DNA, 78 bp, Homo sapiens
  chr19:53490184-53490262
  hypo
cacctttgggtaaacttgcctcttttcctctaacacttgccaatgtcgttctgctagtcttaccgtctgtaccaggag

SEQ ID NO: 274593 - DNA, 31 bp, Homo sapiens
  chr19:53506512-53506543
  hypo
gcgaaactccgtctccaagagaaaaaataat

SEQ ID NO: 274594 - DNA, 286 bp, Homo sapiens
  chr19:53507230-53507516
  hypo
gctctgagcccgtccggacttccccgatcccagccttctctcctttgaaaacactaagaatgacatcactgcatcagtttttactagagccaatcacctgtcgtgcctggaacagggatcgtacccagattgccctcagtcctgataatcaggaagcgcacatctataagaagcatgggagccagcgagtgaaagctcgtgaactcagtgagcacaatggacatatcacaggcattcactgggctcccaagagcgaccgcatcgtcacttgcggggtagactgcaa

SEQ ID NO: 274595 - DNA, 232 bp, Homo sapiens
  chr19:53507956-53508188
  hypo
agccacgacagcaccgttatctgttgctgatgcctcaaaaagtgtgcaggtctcaattctgaagacagagttcctaccactcctgagtgtgtcatttgtctcagagaacagtgtcgtggctgctggccatgactgctacccaatgctctttaattatgatgaccgcggctgcctgaccttcgtctccaagttagacattccaaaacagagcatccaacgcaacatgtctgcc

SEQ ID NO: 274596 - DNA, 120 bp, Homo sapiens
  chr19:53509014-53509134
  hypo
gatggcgccactgcatgccagcttgggcaacgaaagcggaaaaaagaggccgggcatggtggctcacacctttgggagcactttgggaggctgaggtgggtaaatcacctgaggtccgga

SEQ ID NO: 274597 - DNA, 160 bp, Homo sapiens
  chr19:53589028-53589188
  hypo
tacgagtttggagtcggaaatccaatgactcacttgttcggcttcaaatgcagttaccaatgaggcaggaaagctttccccttagtgttcttttctatgccagtgagcaggtacgtgtgcacctgacttcatgggcagcttctgttatcatggtttacac

SEQ ID NO: 274598 - DNA, 99 bp, Homo sapiens
  chr19:53589308-53589407
  hypo
tgcccagtgcagcctcttcccaagttcatgtcactggatcacgggagatggaatctaaacgagatgagagggactgagggaaggcgcgggtgagtgcta

SEQ ID NO: 274599 - DNA, 142 bp, Homo sapiens
  chr19:53601968-53602110
  hypo
caggacccctgactgcgagcgcatcacctgctggaaggcaaagcccctgcccaggatggccaccgggccccggtgatgtgtagagcgcggaagacccgggagctggagtaaggcggtggggacgcctcggcactggctgagg

SEQ ID NO: 274600 - DNA, 31 bp, Homo sapiens
  chr19:53627570-53627601
  hypo
ggcctcaggaagcttccgtttagggtggagg

SEQ ID NO: 274601 - DNA, 87 bp, Homo sapiens
  chr19:53653017-53653104
  hypo
cccccataataacccgaaaggacagggcctgaacaagcttcaggatagggaaacacacggaggctctgaggacgcccccaccgaccc

SEQ ID NO: 274602 - DNA, 93 bp, Homo sapiens; identical to SEQ ID NO: 219703
  chr19:53667653-53667746
  hypo

SEQ ID NO: 274603 - DNA, 159 bp, Homo sapiens
  chr19:53668465-53668624
  hypo
ccagtatgaattcttcgatgatttgctaagtgtgaatactgagtgaaaaccttgacgcattcattacatttgaaaggcttttctccggtatggatgatctgatgcttagttaagtttgaatgcatactgaaggctttcccacactcattacacttgtaa

SEQ ID NO: 274604 - DNA, 100 bp, Homo sapiens; identical to SEQ ID NO: 219704
  chr19:53685270-53685370
  hypo

SEQ ID NO: 274605 - DNA, 159 bp, Homo sapiens; identical to SEQ ID NO: 219705
  chr19:53685610-53685769
  hypo

SEQ ID NO: 274606 - DNA, 38 bp, Homo sapiens
  chr19:53693899-53693937
  hypo
aggtaggccgggtgcggtagctcatgcctgtaatcccg

SEQ ID NO: 274607 - DNA, 197 bp, Homo sapiens
  chr19:53701621-53701818
  hypo
aacatataacacttctgacagcaaatgtgtgggagtttttttcccacacactaggcaattctccagtatacaccagttgcgtgtcctataattcaattcaattctgacactgtgcgcctggagttagagtcagatccaacaggttaaggtcttagtcccacaagaccacccccctgcccccccgccgccacttcaga

SEQ ID NO: 274608 - DNA, 39 bp, Homo sapiens
  chr19:53702029-53702068
  hypo
atacagcaggtcctcgaataacgttgttttgttcaatgt

SEQ ID NO: 274609 - DNA, 152 bp, Homo sapiens
  chr19:53703492-53703644
  hypo
cctccatttctgaggcctcagctcagcctgggatccatagggatgtgagggcggctgtgctctgcatgaggtttgctcaaggccaggtgtgcaccctgaaggggagctcagtccagcccagctccccaccgctgcagcgtgcgtgtgggcct

SEQ ID NO: 274610 - DNA, 35 bp, Homo sapiens
  chr19:53728437-53728472
  hypo
acattttaaagagatttaaacggaagaaatacgtt

SEQ ID NO: 274611 - DNA, 34 bp, Homo sapiens
  chr19:53728772-53728806
  hypo
aaaaacaaaaaacgaaaaacaaaaacaaaaacaa

SEQ ID NO: 274612 - DNA, 40 bp, Homo sapiens; identical to SEQ ID NO: 219706
  chr19:53756649-53756689
  hypo

SEQ ID NO: 274613 - DNA, 88 bp, Homo sapiens
  chr19:53764646-53764734
  hypo
aataataaaaaggatattaattcaaacataggaaatattttaatatgatcctctgtaaattataaacggttataattttttaaattaa

SEQ ID NO: 274614 - DNA, 38 bp, Homo sapiens
  chr19:53786610-53786648
  hypo
cgtgagccaccgcgcccggcctcaggttctttatttga

SEQ ID NO: 274615 - DNA, 73 bp, Homo sapiens
  chr19:53793746-53793819
  hypo
tcctgtgttctgaccaggcacgatcaccaggttcccagtttttcagttttccgccacaacagaagcactgcac

SEQ ID NO: 274616 - DNA, 192 bp, Homo sapiens
  chr19:53794081-53794273
  hypo
acaccaggatttgcaggtttcgtggcactgtcttcaaaataaaagctgcggataaacctgcaattcggcgctgctttcttgtgtttgtcaactcctgagcccccacgttgccacctgtctaccgcttcagggcagctaaggccccccagggcgtctcctccaacgcgccgatgcccaggcaggcccaccacc

SEQ ID NO: 274617 - DNA, 449 bp, Homo sapiens
  chr19:53794303-53794752
  hypo
aatctcttctactaattcttcatcctcattgatgtctgcagacacatacgttttagatccttcgaaactgttcaaagttatcttctcttgaatataggacttgtccaccgtctcgcgccaggatagcggctccaaccgcccaggcgatcggccttgtcccaacgggagggtcccgcggagggacggtccgagccccctaccattggaaatgccaaaccctgccctaagccgggcccagccacccaggctgacgacccacgattagcaccgcgcgctctggggagccgccaaggtgcagccacttcccagagctccgaagggtcagcaagaaaagaggaagccacgaacgctcccagcctccagctggaaaccacgcggtggagtgggcgcttgcgcagtgagcacctcgtgccccacgcccgtgtctcgttcttttttgtgcttgtttc

SEQ ID NO: 274618 - DNA, 165 bp, Homo sapiens
  chr19:53806011-53806176
  hypo
gcgacgctgacacatatgtgcgtgttcacgccaggcttcgcacacatcactggccgtgtcatggggggacacgcaagacggaagcctccaggcgtgttcagcagaaacctcgagcccacactgtgcttcagagtctcccatgccgtccctaccttactccctaat

SEQ ID NO: 274619 - DNA, 97 bp, Homo sapiens
  chr19:53807087-53807184
  hypo
gagccggtcatggacggggagcctgcttcagccttcccccaggcttggactccacccattccacctgcctcccaggtgaccccgcagctcccgtact

SEQ ID NO: 274620 - DNA, 240 bp, Homo sapiens
  chr19:53813501-53813741
  hypo
aaagaaacaacatgcaatcacggtggagccgcagtacacgtgtcagaaccacccaataatctgcatgttcgcacatcagtgtgttcagccacctacactcccggcagcgtttcacagcaggagacagacaagcacatgcgactctgtacaggggtaaacaggagcgattcagtaacatgcttcattcatacgcaccaggaaataggatgcagtgtttccgagaaggaggtatagaaacat

SEQ ID NO: 274621 - DNA, 34 bp, Homo sapiens; identical to SEQ ID NO: 219708
  chr19:53821074-53821108
  hypo

SEQ ID NO: 274622 - DNA, 31 bp, Homo sapiens
  chr19:53827529-53827560
  hypo
aaaaaacttcgtctcaaataaataaataata

SEQ ID NO: 274623 - DNA, 33 bp, Homo sapiens
  chr19:53854271-53854304
  hypo
aaatcaaacagttgacgggtagtacaaaccgac

SEQ ID NO: 274624 - DNA, 93 bp, Homo sapiens
  chr19:53854364-53854457
  hypo
cgcatctgcctgaactccacatgtttcagaccgaagggaaaattggtaatcaagttgagaagtctatcaacagtgcttcgttggtttcaacat

SEQ ID NO: 274625 - DNA, 58 bp, Homo sapiens
  chr19:53859528-53859586
  hypo
gcctgtaatcccagcggttttagaggcccaggcaggtgggtgacgtgagcctagggat

SEQ ID NO: 274626 - DNA, 36 bp, Homo sapiens; identical to SEQ ID NO: 219709
  chr19:53859893-53859929
  hypo

SEQ ID NO: 274627 - DNA, 120 bp, Homo sapiens
  chr19:53873291-53873411
  hypo
cccagatatgtgaaagatacctctctaattttcaaggataggggtgataaagaccaacacttccattagctcttccaggcccccatgtaataattcaggtagctgggtgcggtggcccac

SEQ ID NO: 274628 - DNA, 326 bp, Homo sapiens
  chr19:53886595-53886921
  hypo
aatcaacaagcacacgttgcacgtcatcatagaattcatactggagagaaaccttagaaatgtgaagaatgtgacaaagtttacagtcgcaaatcaaacctcgaaagacaggagaattcatactggagagaaaccataaaaatgtaagagtttttgacaaggctttcggacgtgattcacacctggcacaacatcccagagttcacactggagagaaaccttacaagtgtaatgagtgtgtcaaagcctttagtgggcagtcaacacttattcaccatcaggcaatccgtagtgtagggaaacttgactaacgtaatgattctcac

SEQ ID NO: 274629 - DNA, 172 bp, Homo sapiens
  chr19:53936945-53937117
  hypo
gtagtctgcctggtcgcaattgcttctatagttgattgaatgctcttaacacggagaggtaagaggtaagggagtatcaaaccaattcttagtatggctagaactactcctattaaggttttgaatctactgaaggaggaaaaccagcctctaaagacggactcaagagtct

SEQ ID NO: 274630 - DNA, 197 bp, Homo sapiens
  chr19:53977470-53977667
  hypo
ctctgtcggatgcacggagcagttcggtaaagtttataaccaagttttcacaaggcatggctcctgcttcttgaattcttgggggccaagtgggcccccataacggttattctgagcacaggttaaacattgtttacaaatggctcaaatgacagcagagagccacagcacatagaaatggcactttcgtggccggg

SEQ ID NO: 274631 - DNA, 234 bp, Homo sapiens
  chr19:53982539-53982773
  hypo
ggaggctgcaatgccgaatggaggaggcaggaaccggagtgtgagcagtagctgggtgggcaccatggctgggatcaccaccatcgaggcagtgaagcgcaagatccaggttctgcagctgcaggcagatgatgaggagtgagctgagcacctccagtgagaagctgagagagaaaggtgggcccgggaacaggctgaggctgaagtggcctccgtgaacggtaggatccagct

SEQ ID NO: 274632 - DNA, 162 bp, Homo sapiens
  chr19:54017723-54017885
  hypo
ggattacaggcgtgagccaccgcgcctagccctaactaatatattttaaataactttttgctcttggcacatggactaaaaccacatcactaggccttcaatgacgtccaatgtctgccatcttatttccactccagctccgccccaggcatagttgctttt

SEQ ID NO: 274633 - DNA, 42 bp, Homo sapiens
  chr19:54048834-54048876
  hypo
cactcagtaggccacactcccgatcacccagccacagtccta

SEQ ID NO: 274634 - DNA, 42 bp, Homo sapiens
  chr19:54074926-54074968
  hypo
cagagggacctgtactgggacgtgatgctggagaactacagt

SEQ ID NO: 274635 - DNA, 397 bp, Homo sapiens
  chr19:54080852-54081249
  hypo
aggatacatacgggcgagaagccgtacaagtgcacagaatgtgggaaggccttcaattgtggctatcacctcactcagcacgagagaatccacacaggcgaaaccccgtataaatgtaaggagtgtgggaaggctttcatttatggatcgagcctcgtgaaacatgagagaattcataccggggtgaaaccctatgggtgtacagaatgtgggaagagctttagtcacggccatcagcttacacaacatcagaaaacgcacagtggggcgaaatcctacgaatgtaaggagtgcgggaaggcatgtaaccacctaaaccatctccgagaacatcagaggatccacaacagttgaagagccttttgaacgcagtagcccgctcgtatctatggtttcg

SEQ ID NO: 274636 - DNA, 97 bp, Homo sapiens
  chr19:54081309-54081406
  hypo
agaaataaagaattttaagtctcaaatggtgtgcccttctgagtagcgtgatgaaatctctcgctgtccggctccagccggccggggatgtgagtca

SEQ ID NO: 274637 - DNA, 42 bp, Homo sapiens
  chr19:54087417-54087459
  hypo
aaggaggtacatgagttgtacgcaaaagctacaaaacagttg

SEQ ID NO: 274638 - DNA, 463 bp, Homo sapiens
  chr19:54109746-54110209
  hypo
ccaatgtggacaaaagcctccggcaaggggttctcgggacatatcaggtagtaggggcactatgagggtgagcgccgctgagacaccaaaataggccaagaagcagatgaagatcgaggtcacagtgcccaaggggatggagcggtgagggtggaggcggtgagggtggagggcttcttctcctgcgggacaggtatatgcaccgggcggtgagggtggagggcttcttctcctgcgggacaggtatatgcaccgggcggtgagggtggagggcttcttctcctgcaggacaggtatacgcactgggccaggaaaatgcacggaagtgaaggtacaaaaccctcttccctcttccccatctgagaacagggtagcctttaatgaaacctgtgcccagcggcagcccaaacagtgcccaaacccccgatgagacagaatgaccgtgttacctgtggtggcaatg

SEQ ID NO: 274639 - DNA, 39 bp, Homo sapiens
  chr19:54115655-54115694
  hypo
agcatagaaataggattggacgtggccgggtgcagtggc

SEQ ID NO: 274640 - DNA, 140 bp, Homo sapiens; identical to SEQ ID NO: 219714
  chr19:54120021-54120161
  hypo

SEQ ID NO: 274641 - DNA, 108 bp, Homo sapiens
  chr19:54120403-54120511
  hypo
aatagatttcttcttctattcgttggattcgtctgtgtcctattgagtttttttcacggctagagtattcgtgagaatgaaactaccgggctctctgatgggttagag

SEQ ID NO: 274642 - DNA, 446 bp, Homo sapiens
  chr19:54135108-54135554
  hypo
gtggggctggtttgtggactcgcctttgagtcgttggtctccgctcaatcaatattagataaaatgacagtattgggagaaatccagggggctctggaggaccgagggatcatattggaggcagatagggcagagaaaggtggaggaggtgggagtcgggtgtggctgtggaggaagctacttaaatccggatttgatctttgctagttcttatccctggacctgaacccaggcgcacatctggattagaagatgccaggctcagaggatcttcgtaaaggtaagccagaaaaaatgagaaccgaagcaaagacacgtgaagaagtggaaagcagctggcggcgggaaaaggcagagggaccaggcggccgaagctggtgcttcgtccacgtgggtggcagggacttcccacagaggctgtcatcgtttttgttgttgttgttttg

SEQ ID NO: 274643 - DNA, 37 bp, Homo sapiens
  chr19:54136228-54136265
  hypo
aaccattttcaggcatgatgcgattcagatcttttag

SEQ ID NO: 274644 - DNA, 36 bp, Homo sapiens
  chr19:54137676-54137712
  hypo
tcacttgatcatcacgttgtacctcagtggaaagga

SEQ ID NO: 274645 - DNA, 42 bp, Homo sapiens
  chr19:54140111-54140153
  hypo
tagtccattttggctgctgccgagatcctaatatatactgcc

SEQ ID NO: 274646 - DNA, 86 bp, Homo sapiens
  chr19:54140568-54140654
  hypo
atccctgacagctaagcatgcggacgtacctggagggtggcatatccggggagggcatggaagctccgggcccctcgtcatacgcc

SEQ ID NO: 274647 - DNA, 34 bp, Homo sapiens
  chr19:54141502-54141536
  hypo
ttagaaagaacctactggcccggcgtggtggctc

SEQ ID NO: 274648 - DNA, 303 bp, Homo sapiens
  chr19:54150800-54151103
  hypo
agagacatgagtcacactgacggctttgcctgcctgcgatctctctatgtgtgttgattcttgcggaacaaggcgcttcgagcatctcctctgcccctacgcccgtgaccctgtccctcttcttgtctccattgccccccaagcgggtacatttgcccaccttctcacctgggacaccctgggcgtggatctcctcacctgcagcgctaggtgtgctcccagggtctccacatccctaacccccgcaaggctggcctctttacctgcaaagccccccgccgcggcctcctccctctaccatac

SEQ ID NO: 274649 - DNA, 225 bp, Homo sapiens
  chr19:54152258-54152483
  hypo
agaggggtccaggctgggcacggtggttcccatcagggcgcccattaagaggggtccaggctgggcacggtggttcgcatcagagcacccgttaagaggggtccaggctgggcacggtagttcgcatcggagcaccagttaagagggatgcaggccgggcacggtggctctaatccgagcactttgggaggatcacccgaggtgaggagttcgagaacagcctgg

SEQ ID NO: 274650 - DNA, 45 bp, Homo sapiens; identical to SEQ ID NO: 219716
  chr19:54153203-54153248
  hypo

SEQ ID NO: 274651 - DNA, 33 bp, Homo sapiens; identical to SEQ ID NO: 219717
  chr19:54161842-54161875
  hypo

SEQ ID NO: 274652 - DNA, 161 bp, Homo sapiens
  chr19:54170239-54170400
  hypo
accaatccagaccccaaaagcgggttcttggatctcttgctggaaagaatttcgaggcaagtcacaacacagcgaaagaagcaagctgaggcctgggctcaatcctcctgcttcgtcctcccaaagtgctgggattacacgcatgatcccctgtgccctgc

SEQ ID NO: 274653 - DNA, 40 bp, Homo sapiens
  chr19:54171164-54171204
  hypo
ctgggcaacagagcaagacgcttgtcttaaaaaagagaga

SEQ ID NO: 274654 - DNA, 240 bp, Homo sapiens
  chr19:54196084-54196324
  hypo
gcccggctatcaacaacttttcctacgtagaaattattcgggcactggtttatagaacctcacgtgggttcacgtagaattgaaggggacctcagcgtcccttgcagatgggatgtgcaatgtatttgagatgtactcgaacattgctgttgaggtgtgggcatcttttgctttttcctaattttaaatatgggactagtctgggtatggtgacttccaccagtaattctagcactttgg

SEQ ID NO: 274655 - DNA, 35 bp, Homo sapiens; identical to SEQ ID NO: 226562
  chr19:54207013-54207048
  hypo

SEQ ID NO: 274656 - DNA, 33 bp, Homo sapiens
  chr19:54212284-54212317
  hypo
atttttgtgtgtgtgtgagacggagtctcgctc

SEQ ID NO: 274657 - DNA, 172 bp, Homo sapiens
  chr19:54224588-54224760
  hypo
atttttgattttttgagatgcgctctcattccgtttcccaggctggagtgcagcggcaggatccctgttgaccggaaactccgcctcccagcttccggcgattctcccacctcagcctgccgaatagttgggaatagagatgcccgccatcgtgtcctgctagttattattt

SEQ ID NO: 274658 - DNA, 64 bp, Homo sapiens
  chr19:54254582-54254646
  hypo
agagaatgcttataatcagacgtggatgatgttgaagttttgcgtttgttttgttttgtttttt

SEQ ID NO: 274659 - DNA, 77 bp, Homo sapiens
  chr19:54256494-54256571
  hypo
ctgttgcccaggctggagtgcggtggcatttttaacatagatctcttgggctcgagtggtccttttttttggttcag

SEQ ID NO: 274660 - DNA, 109 bp, Homo sapiens
  chr19:54268118-54268227
  hypo
ccctagtaacaggtgggatgcgaggcagctctcgttgttgccgtagtgagcgatgcctgttcgtccagccctcaacaccttttactccgtggaagttatgcctgcactg

SEQ ID NO: 274661 - DNA, 82 bp, Homo sapiens; identical to SEQ ID NO: 219719
  chr19:54271336-54271418
  hypo

SEQ ID NO: 274662 - DNA, 240 bp, Homo sapiens; identical to SEQ ID NO: 219720
  chr19:54271718-54271958
  hypo

SEQ ID NO: 274663 - DNA, 406 bp, Homo sapiens
  chr19:54313979-54314385
  hypo
gcaccagggtccctgaggatcgtggaaagaaggcttgagctcatcgaagccgtcgatgatgaaaaggaggcgctcgggaactcggatgagctcctggagaggcgcgctgggctcaggccagcagctgaagatgaggtcttgcatgctgcattccgtggcactctggttcatctccctgcagttgatgtagaagagataatcaaatctgccttggaagagcttcccgtccgcccagtccagcatcaccttgtgtgccagcatggacttgcctatccctgccgcgccttgcatgaccacggtgcgcggtggctcggggcgctcctcgtctggctcaaagagggtctctatcttgatggggctagcctggtgtcccacggtcctcgcgtgtccccggcctgtgtccaga

SEQ ID NO: 274664 - DNA, 211 bp, Homo sapiens
  chr19:54317868-54318079
  hypo
tgctgggattacaggcgtgagccactgtacctggcctcttagccttccttgttgcccctgcgtgtatgagatggtttggtagccatctttcagccaggagatgacacgtgtcaggacaaaatgctgacgtggaaaggttgatgagttgaaacacaggaggaaactgcccctttgatggtgtcattaatccaccccacgaattcctcaatca

SEQ ID NO: 274665 - DNA, 132 bp, Homo sapiens
  chr19:54487090-54487222
  hypo
gtgaggcaggtgagcggggatcaaggtgaggccggagacacagacagggccagattgtgcaggggctcgtaggtcaggagttcagattttattctaggagtggtgagggccgtggaacgggtttaagcagga

SEQ ID NO: 274666 - DNA, 39 bp, Homo sapiens
  chr19:54498879-54498918
  hypo
gcacctgcacccttcgctcagtgacgtgaagcacccttt

SEQ ID NO: 274667 - DNA, 40 bp, Homo sapiens; identical to SEQ ID NO: 219727
  chr19:55609523-55609563
  hypo

SEQ ID NO: 274668 - DNA, 76 bp, Homo sapiens
  chr19:55631056-55631132
  hypo
ccagattttttttttttttaaaggacaaccttttgcattacttaagtctttccaaggcatgcgctggtacaacaca

SEQ ID NO: 274669 - DNA, 184 bp, Homo sapiens
  chr19:55721105-55721289
  hypo
ctgctgcacggatgcgggacgtggggcagaggatgagagcagggggtgctgagagaaaggccagctgactccctcgcctccctggtgggtgatcacacatcaagagcagcctggggcttagacctcatgcccctcgtccctggagcacgctcttccattcagcctctgacgcctttcccctctc

SEQ ID NO: 274670 - DNA, 147 bp, Homo sapiens
  chr19:55732005-55732152
  hypo
aagcaaggaaggctcgaccccagatcacacagggagaggtggacagacagcatggctccgcccatttgcagccatttctgggcctgtaggctctggcagctcctgggattgctgtcctcggtgctgaatacgcgtttgttgggggca

SEQ ID NO: 274671 - DNA, 104 bp, Homo sapiens; identical to SEQ ID NO: 219728
  chr19:55740668-55740772
  hypo

SEQ ID NO: 274672 - DNA, 147 bp, Homo sapiens
  chr19:55750624-55750771
  hypo
ggccacggccaacgcgtgcccaggaggggccacagctgcaggctgagcccacagggcatgtaggtgcgtgcaggggacagatacaagtaggcgcgcctgctgctgcagaggcaggacagggctgtgaccctgcgcaggagacactca

SEQ ID NO: 274673 - DNA, 92 bp, Homo sapiens; identical to SEQ ID NO: 219729
  chr19:55775276-55775368
  hypo

SEQ ID NO: 274674 - DNA, 460 bp, Homo sapiens
  chr19:55785505-55785965
  hypo
tgctgtgtgcaaagcgctcacgctgagggccaggtggtctccccgggaagtggtcacatctgctgcctggctagcagggggtttggccgagtgcgccactcactctgcccgcagcactcagccgtgcaggggtccaacaagcatgggaacaaacgagggaaggagatgcctctccctctgccccagcagatcccgggggcccacccggcacccccccccaccgccagcacccctgtccccagccccacccggacactcacaggagatggcgaagagggccttgacgcgcaccgtgtcgcaggcgtcgcggtccagcagccgcagcagcttacgcagggcacccaggcccagcacctgctcctggatggctgccacgttctgactgcacgtgccgatgagctgtgccgcccgccaccgcagtcccgcagcccccgcctccaggtaccggcccaccagcagg

SEQ ID NO: 274675 - DNA, 262 bp, Homo sapiens; identical to SEQ ID NO: 98312
  chr19:55798403-55798665
  hypo

SEQ ID NO: 274676 - DNA, 79 bp, Homo sapiens; identical to SEQ ID NO: 219730
  chr19:55799281-55799360
  hypo

SEQ ID NO: 274677 - DNA, 176 bp, Homo sapiens; identical to SEQ ID NO: 219731
  chr19:55824302-55824478
  hypo

SEQ ID NO: 274678 - DNA, 63 bp, Homo sapiens; identical to SEQ ID NO: 219732
  chr19:55838911-55838974
  hypo

SEQ ID NO: 274679 - DNA, 202 bp, Homo sapiens
  chr19:55842494-55842696
  hypo
gcaactccagaaaacgataaacatttacttcacctggtttttatgggtcatacatttcggaacggcttagctgagcgattctggttttggggtgcttggaaggttgcagtaagacatggaccagggctgcacagccacctgaagacttgatggacaccggaggattattgccggggtggcccaagcacgtggctgacgagct

SEQ ID NO: 274680 - DNA, 93 bp, Homo sapiens; identical to SEQ ID NO: 219733
  chr19:55848034-55848127
  hypo

SEQ ID NO: 274681 - DNA, 120 bp, Homo sapiens
  chr19:55849159-55849279
  hypo
gacagagcaagaccctctctcaaaaaaaaaaaaaaagaagggagcatcacttgaatgagcccctagagagaccctgtctctacaaaaattaaaggattagccgagcatggtggcatgcgt

SEQ ID NO: 274682 - DNA, 377 bp, Homo sapiens
  chr19:55856150-55856527
  hypo
ggttggctccagggcggcattgagggtgcaccctctggagcacagacctcgatggggcaccccgggaggcatgacaaagggatccagatttttggctccagagtcagaactgagttggggtcctggcgatgccacccctggcctttggtttttcatctcagatggggttggtgaggatctctggaactctgcgggctggtcaagtgtgccggagggttttggacagcgaatgcgtggccctggtctgacaccacacacagacgctgggggggatggaaacaaaaggcggcattcggagaggctctgcagggccagtgtgctccagccaccttgagcacacgagagggcggccagctctccagcgatctagaaccatc

SEQ ID NO: 274683 - DNA, 209 bp, Homo sapiens
  chr19:55857843-55858052
  hypo
tctccccttcacccggtctcccaggaaaggtgaaggagctttccgaaccaggcctagggagcccgcgttgccaccacggcccctggacaagtaccagctgcgtgagaccaagcggcggctgcagcaaggcctggacagtggcagccgacagggcctgctgggccctcgggcctgcgtgcacccatccccgctgcgccgggacccattct

SEQ ID NO: 274684 - DNA, 36 bp, Homo sapiens; identical to SEQ ID NO: 219734
  chr19:55858739-55858775
  hypo

SEQ ID NO: 274685 - DNA, 404 bp, Homo sapiens; identical to SEQ ID NO: 219736
  chr19:55872208-55872612
  hypo

SEQ ID NO: 274686 - DNA, 212 bp, Homo sapiens
  chr19:55912229-55912441
  hypo
atcagatgattcaaggggaccgaaccttggcccagtccagaaccagacagacgaggcgagcctcatgccagactgctggcacctggccgtcctgagcaggaacaccactgccacaccaacgtggccattattctagagggagaagtatagggcagtgccgctcaggccaccaggagcagctccaggtcctcgccccattttagattggaaat

SEQ ID NO: 274687 - DNA, 161 bp, Homo sapiens
  chr19:55944091-55944252
  hypo
aggaatgtcatggaacaaggcgtcgtctctgttattataccacaagaaggaagcctctgaggacaccatagaacatggacatggcctccagcgctgacctcacgggccggcctcttcctctgtgatgacctcatgggaacgaggctttgtccctgtgatga

SEQ ID NO: 274688 - DNA, 136 bp, Homo sapiens
  chr19:55976221-55976357
  hypo
ggatatggacctggcgtgcgtcggcggggggcagagaatggtgcctggagatggccaattaagggaacaaaggcctcgttcgggaggcgaggccgccagtaagtcaaatgcagcgattgagcgtggaggaccctta

SEQ ID NO: 274689 - DNA, 108 bp, Homo sapiens
  chr19:55976811-55976919
  hypo
tggacccccaccctcgggggtctgctctgggaagccaggatgtttcccgaaattgatgtaacaaatgaccacggctcagtacctagaaccgcacgcgctgattctcct

SEQ ID NO: 274690 - DNA, 513 bp, Homo sapiens; identical to SEQ ID NO: 219740
  chr19:55986210-55986723
  hypo

SEQ ID NO: 274691 - DNA, 396 bp, Homo sapiens
  chr19:55990560-55990956
  hypo
gggcagtgagggagcgaggtatcccggaggccagggggaggcgggccacggacccagtgacaagtgggccattgcgggccacgcgccgcccaggccatggagtgggggcacccgcgtgggactgaaggggtttgcgctgggaaagagcgggctgacacttgagctgctctgctgtgaaggaatggagaaacgagtctgcagctggacagggaagtggagtgaagagctttttggtttttaaagatgggagacatagattgttggttctgcagatgggaacgtccaggagaggaggaaaagtggaggatgtgggtgggaaggcacagtccacgggcactgggtcaggcctgtggggaaggattgcgcagggtttctggacctcgcactgctgacatt

SEQ ID NO: 274692 - DNA, 133 bp, Homo sapiens; identical to SEQ ID NO: 219741
  chr19:55993945-55994078
  hypo

SEQ ID NO: 274693 - DNA, 96 bp, Homo sapiens
  chr19:55995221-55995317
  hypo
aacctgctggttgttcagagcggggcagctgaggagttgctcactggcccgggccccggggaggcgggggatggcgaggccagcactggtgtggtc

SEQ ID NO: 274694 - DNA, 43 bp, Homo sapiens; identical to SEQ ID NO: 219742
  chr19:55998067-55998110
  hypo

SEQ ID NO: 274695 - DNA, 118 bp, Homo sapiens
  chr19:56047529-56047647
  hypo
gtcctccagcgcgcgggcagcctcctggccctgctggagctcctctaatgtcaggccgcccagaccctcctcctcgctgtcctccgaagcccctgcctccgccggcccttcctcagac

SEQ ID NO: 274696 - DNA, 108 bp, Homo sapiens
  chr19:56089714-56089822
  hypo
cgtggcgcgccaggtcggccaggcgcttgaactcccgctggcagcgcacgcactggaaggggcgcgctcccgagtgggtcaccccgtgctgccgcaggtgcgcccggc

SEQ ID NO: 274697 - DNA, 82 bp, Homo sapiens
  chr19:56104273-56104355
  hypo
gggccgcggccgacgcaaagaaggtcccgcagtcgcactggtacagggtgtcttccgagggctcggcggccgccgcaggtgc

SEQ ID NO: 274698 - DNA, 81 bp, Homo sapiens
  chr19:56104956-56105037
  hypo
gagaagcggagctcgcagaccaggcagcagtagggtttctcaccagtgtggacgacctaggggtgcgggaggaagggcaca

SEQ ID NO: 274699 - DNA, 260 bp, Homo sapiens
  chr19:56108941-56109201
  hypo
tggtgcagcaggccggtggagtcgcggaaccccttggggcaggcagagcagcggtagggccgctccccggtgtgcgagcgcaggtggttggctaggttgaagctgtgcttgaaacccttgccgcagcgcggacatgcgtggggcttgagcgctgtgtgccgggcaaagtggcgccgcaggtctgagcggtagcggaagctcttgccacattcactgcagtgaaacgggaccctgggggcggcagcggcgggcggtgctgg

SEQ ID NO: 274700 - DNA, 303 bp, Homo sapiens
  chr19:56113855-56114158
  hypo
ctccgacctggagcgccacagcatctcgcactcagagctgaagccgcaccagtgcaaggtttgcggcaagaccttcaagcgctccagccacctgcggcggcactgcaacatccatgccggcctgcggcccttccgctgcccgctgtgcccccgccgcttccgcgaggcgggcgagctggcgcaccaccaccgcgtgcactcgggggagcgcccgtaccagtgccccatctgccggctgcgctttacagaggccaacacgctccggcgccatgcgaagcgcaagcacccggaggccatgggggt

SEQ ID NO: 274701 - DNA, 38 bp, Homo sapiens; identical to SEQ ID NO: 219743
  chr19:56115323-56115361
  hypo

SEQ ID NO: 274702 - DNA, 205 bp, Homo sapiens
  chr19:56125726-56125931
  hypo
gggagaggccctacgaatgcggcgtctgcggccgcacctacaaccacgtgtccagcctcatccgccaccgccgctgccacaaggacgtgccaccggccgcggggggcccgccccagcccggcccccacctcccgccgctgggcctcccagcacccgctgccagcgccgccaccgccgccgccccctccacggtgtcctcgggccc

SEQ ID NO: 274703 - DNA, 91 bp, Homo sapiens
  chr19:56126761-56126852
  hypo
tgagcaagcatcacgtggtgcacacgcgcgagcggccctacaagtgcgagctctgcggcaaggtcttcggctacccgcagagcctcacccg

SEQ ID NO: 274704 - DNA, 878 bp, Homo sapiens
  chr19:56163306-56164184
  hypo
cgtgagccaccgcgcatggcctgtcctgggtttacttttaagttttggtccaccgtcgagggcagggccaccttgggcacctccttaactttcatcagtaaggaggaggtgcgcagtaggacctacctcacggggagggtgagacttgaataagtgaattcacctgaggcagggagacgagggtgatggctcggggtgtcggggggtgctgggaccgcgtgggttgaacccggcctcttggctcattttgtctcctcactctccttcctgggcctgcctcttcccatttcccactggtccaagatctggctgcgattcttcccctcctctctgccccttccttgcctgttgttctccgtctccacctgcaccggcccgtgcctctgctcgccgagatcctttcttcccatggccgtttcccttcccgtgtccgccccctcagtcttgtgccctgcccctcactttcgtgtccccgcctccacccctcagtgaaggacgccgacggggtcctctgccggtacaagaagatcctgggcaccttccagaagctcaagagcatgtcgcgggccttcgagcaccaccgcgtggacaggaacaccgtggcgctgaccacgcccatcgccgagctgctcattgtggcccccgagaagctggccgaggtgggcgagttcgacccctccaaggagcgcctgctcgagtactcccgccgctgctttctggccctggacgacgagacgctcaagaaggtgcaggcgctcaagaagagcaagctgctgctgcccatcacctaccgcttcaagcggtgatcgcaccacgcctccgcgcctccacccgggccttcctcccccgtggaccccggtggatgacctgcccctctc

SEQ ID NO: 274705 - DNA, 87 bp, Homo sapiens
  chr19:56164403-56164490
  hypo
ctccgccctggccccgcggaggagctgcccacctgattcccggacagacctccccaactccgcgtgagacagagaattattcagata

SEQ ID NO: 274706 - DNA, 139 bp, Homo sapiens; identical to SEQ ID NO: 219746
  chr19:56170493-56170632
  hypo

SEQ ID NO: 274707 - DNA, 54 bp, Homo sapiens; identical to SEQ ID NO: 219747
  chr19:56176622-56176676
  hypo

SEQ ID NO: 274708 - DNA, 78 bp, Homo sapiens; identical to SEQ ID NO: 219748
  chr19:56176926-56177004
  hypo

SEQ ID NO: 274709 - DNA, 213 bp, Homo sapiens; identical to SEQ ID NO: 219749
  chr19:56178938-56179151
  hypo

SEQ ID NO: 274710 - DNA, 813 bp, Homo sapiens
  chr19:56179451-56180264
  hypo
ctgagctttaatgggagccttgcctgggtggctgtcagagaaggggtggggtgtgttgtgactcaccagtaggtcccgagcccaggtgacctgccagcattccacagcagcaggtagcagatgtgggtgtgaactttgtgcctttggagcgttctggaggatgttctagtttgaggttcccctgaggctgggcagatttgggagacatggtgcgttctccccgaggagcctctgtgtgccactgcccaggaccctcactggtcagataaggctggggtggggtgggcacgtggcgacccctccctcgtcagatcaggcaggaagtgttctctttggcaattgaggagctcgccgtagactgtccaggttttgggagataacctggtactggaattgaagtcctcctcttctctacccataggggttgtgtccactgtggtccccgactctgcccacaagctgttcatcgggggcttacccaactacctgaacgatgaccaggtaacttccctgcctccctccagacccgtccccccaccccgccccacctcatcccagccctgatggactctcggctactgcaggtcaaagagctgctgacatcctttgggcccctcaaggccttcaacctggtcaaggacagtgccacggggctctccaagggctacgccttctgtgagtacgtggacatcaacgtcacggatcaggtgagtccccggtcgctggccgctgccgcgtctgtccttccctgccctgcgctgttgccaagccatggtctcccctcctcaggggacggggcgggaggcggccaac

SEQ ID NO: 274711 - DNA, 94 bp, Homo sapiens
  chr19:56190515-56190609
  hypo
cctcacagcagccaagtttccgctctgggccccatctatgaatgcctctcaggcaggtgtgtgctccccgtggcacaggcgatgccacgctggg

SEQ ID NO: 274712 - DNA, 780 bp, Homo sapiens
  chr19:56198986-56199766
  hypo
ggggtgtggtcctccctgtgcgctggcctcacctgtgccccacgctgcccttccatctgcccatcccctcagaaggccgcttacccacccaagtccgtcaatccctgctggttctctcgtcctttcctcactcataaccccagatggtcacccttcggccccgctctgccacccacatgctccctggagcatcccatgcacccagccctgctgggcacaccacacgggggccagcctgggggcccctggacccggtgcaggtggggccgccagacagctgcctgctgcggctccgggcaaggggagccagggcctgctcgtcagggagaggcctgggcctggggagtgggttgggtggggacacaagtacaggacacaggtgcaaggcggcgtcttggagctggagcagacagaacttgctgaccagtgcacagtggttgggagggcggggcaggagaggcagggtccgccctggggctttggaggctggggcaatggccctgtgctcggcgggcctagggcctggttggagcctgtcctctgcactgtggaggggggcaagggtccacaggccttgggggtggagagaacagtgtcaggacagagtttgagggtaggcggggttgctgagaggatgctgcagtggaggccggggatatctcagcagcctcctggagggtccggccctgccttcctgtgtcctctctctcccttcccctcctgctcttggaaccaagggctcctcgctagcccactccctaaccccgactaggccttgga

SEQ ID NO: 274713 - DNA, 409 bp, Homo sapiens
  chr19:56200285-56200694
  hypo
tggccgcagagcagcggggaggaggagctgcagctccagctggccctggccatgagcaaggaggaggccgaccaggtactgggcgtgcagctggggctgtctgtccgccacccgcctccacgcctcacttcaggctccctcccagccaggcgtgggcctggccctcactgtcgctgctccacatgctgtcactcgtctcctccccagtcctgcctcatcctcaccccgccgtccctctgcgtgtcactctctgcctgtccctcactggttcagggacccccagccctctctttcttcggctctatctgaccctggctctgcctctgactctgcctctggcccctcccgtcatgcccctcacactctctctcccccagcccccgtcctgcggccccgaggacgacgccca

SEQ ID NO: 274714 - DNA, 465 bp, Homo sapiens
  chr19:56201480-56201945
  hypo
tgctgggctgaggccggtgactgaccaggctgccctgcggccacctcctgtggtcagcgctggccatcccccttcgggctgagcaccgtgagggccaccaccggccgccacagctgaatggggaggcccagaataggccaacagcctggcatggccacagggaggagggtgcagggctcgccccatctgtcacactttgtcgggcacctccttggtgccaggccgtgtgctgcacacccagggcctgttggtgagcgaggaggcatggtcccgccctcgcgaacactgtttctgtggcgtccccatgctctgcagctgagtagcaaaccctcccacaaccttgtgcttccaggtcacgcttcagtacttccctgtgacgggcccgctggctggttgtttcgtgtcatggctgaggtcactcatgcctctgggcccggggtgtccgcactggccttgccctccagc

SEQ ID NO: 274715 - DNA, 94 bp, Homo sapiens
  chr19:56205701-56205795
  hypo
tgtgtactcaaggagcgtctgagggcaggctcctctgagcctggaggcacctgtgaacacgcccccgctgccttcccccgcgggcctatagacc

SEQ ID NO: 274716 - DNA, 50 bp, Homo sapiens
  chr19:56223263-56223313
  hypo
cagtgttttgcaggcgatgagtgctgcggcgatgtcgtcgcagcaggcac

SEQ ID NO: 274717 - DNA, 162 bp, Homo sapiens; identical to SEQ ID NO: 219755
  chr19:56227938-56228100
  hypo

SEQ ID NO: 274718 - DNA, 55 bp, Homo sapiens
  chr19:56320360-56320415
  hypo
acttttccgggtcacggtccaaatgtttcatgtatcccaccgagtaccacttgaa

SEQ ID NO: 274719 - DNA, 219 bp, Homo sapiens
  chr19:56369328-56369547
  hypo
cagagaactgagggagttgccgccaacgagtttggctgacttgatttccagagagtggcctgaccccgctgctcctataacagagatcgtgtctcaaccggagagactcttgttcgtcatcgacagcttcgaagagctgcagggcggcttgaacgaacccgattcggatctgtgtggtgacttgatggagaaacggccggtgcaggtgcttctgagcag

SEQ ID NO: 274720 - DNA, 130 bp, Homo sapiens
  chr19:56372690-56372820
  hypo
tgttacaagtggctcgtgttgaccgcctgcctgtggaaagctcgtcctttcttgaccacaggtcggattacagcctcatctgttggcatcacatctgctctgtgctcaccaccagcgggcacctcagaga

SEQ ID NO: 274721 - DNA, 322 bp, Homo sapiens
  chr19:56461801-56462123
  hypo
cacacacacacagagacacacgtacgcagttgatcctcattgttcatggattctgtattcgtgaatgtgcctactcattaaaatgtattcgtaacccccaaatcaatacttacagcgctttcaagatcattcccagacagcaacgcagcaaaaaaatcgagctgacctcctagccgaggtcaaacaaggtgacgctctgccttctggctttagctctcaccccgtaagccagtgtcatttccacgcctatgtggtgccacacttttgtgctttgagttggtggttttgctgtttaaaatagcacccaggctgggcacgatgg

SEQ ID NO: 274722 - DNA, 334 bp, Homo sapiens
  chr19:56465555-56465889
  hypo
agggctgagagaatcgtgatgctgctggacctgaaactatggcgccactgaacctaatttcaacagctttacgcccgccatacttctcacgtagaaagcagtccttgttttgtttaagccacttcaagctgagttttctgttcgttggtgcttcctagttgacacagcagtatcaggaaaggttatttcatttatgcaagggcatcacggggcttcacgtagacatcgagactggttttcttattgctctattagttcttgcaattcactctgatgtcataccctttatttctcccatctcacaaatctaggtaaaatacggcggtataaatcg

SEQ ID NO: 274723 - DNA, 86 bp, Homo sapiens
  chr19:56467208-56467294
  hypo
taaatgtgacccaccttctccgggcagtggggtcccgcagttattctactgtctgcatgaaatccgggaggaagcctttgtaagcc

SEQ ID NO: 274724 - DNA, 35 bp, Homo sapiens
  chr19:56475820-56475855
  hypo
gtagaagaaatagccggtcgggcgtggtggctcac

SEQ ID NO: 274725 - DNA, 813 bp, Homo sapiens
  chr19:56538404-56539217
  hypo
cttttgattcagaccggtggggcttccggcctcgcacggtggttctgcacggaaagtcaggaattgggaaatcggctctagccagaaggatcgtgctgtgctgggcgcaaggtggactctaccagggaatgttctcctacgtcttcttcctccccgttagagagatgcagcggaagaaggagagcagtgtcacagagttcatctccagggagtggccagactcccaggctccggtgacggagatcatgtcccgaccagaaaggctgttgttcatcattgacggtttcgatgacctgggctctgtcctcaacaatgacacaaagctctgcaaagactgggctgagaagcagcctccgttcaccctcatacgcagtctgctgaggaaggtcctgctccctgagtccttcctgatcgtcaccgtcagagacgtgggcacagagaagctcaagtcagaggtcgtgtctccccgttacctgttagttagaggaatctccggggaacaaagaatccacttgctccttgagcgcgggattggtgagcatcagaagacacaagggttgcgtgcgatcatgaacaaccgtgagctgctcgaccagtgccaggtgcccgccgtgggctctctcatctgcgtggccctgcagctgcaggacgtggtgggggagagcgtcgcccccttcaaccaaacgctcacaggcctgcacgccgcttttgtgtttcatcagctcacccctcgaggcgtggtccggcgctgtctcaatctggaggaaagagttgtcctgaagcgcttctgccgtatggctgtggagggagtgt

SEQ ID NO: 274726 - DNA, 146 bp, Homo sapiens
  chr19:56543708-56543854
  hypo
tcaaaaaaaaaaaaaaaagatctgattcaggagctggcggttcccagtcatgcctgcataccccctcgggtatcggtatatccgggaggcagggtggacaccgggctagtcatgcaaagtgtgatggcagccgctaagttgcctca

SEQ ID NO: 274727 - DNA, 270 bp, Homo sapiens; identical to SEQ ID NO: 219758
  chr19:56564933-56565203
  hypo

SEQ ID NO: 274728 - DNA, 207 bp, Homo sapiens
  chr19:56602175-56602382
  hypo
gcaagactccatctcaaaacaaaacaaaaacgcttatgctcaggcctccctccagacgcactgtatgagaaagtgccgggccgggcctgtgcttcagcaagccccccaggtgattctgatgccagctccagtgtgagaatcactattccaaggcagagagtattcgaatatggctcttgaacctgcggcagaagaaaacactccagg

SEQ ID NO: 274729 - DNA, 155 bp, Homo sapiens; identical to SEQ ID NO: 219759
  chr19:56615755-56615910
  hypo

SEQ ID NO: 274730 - DNA, 546 bp, Homo sapiens
  chr19:56617295-56617841
  hypo
cccacggcagtcaccgcgcattcccccctccgcgcccacggcagtcaccgcgcattcccccctccgcgcccacggcagtcaccgcgcattccgcattcccccctccgcgcccacggcagtcaccgcgcattccgccctccgcgcccacggcagtcaccgcgcattcccccttccgcgcccacggcagtcaccgcgcattcccccgccgcgccctgcagcctctgaactcctttccgtccctctggacttgctgccgtgtgctctgcacaggagagggacagcatctgttcctgcgtgtctgactcttccacacagcatggtgctgcggcgtgccagcgtgtcgctcctctctcgggctgaaccccactccactgtacggcggccacagtggtccatgcacccacccatcgctggaggacaactgtgagctgcttccacagcgggcattgtgtatactccagcttcaacgccgcgtccatccatttatttctgtggacgttcgcgttcatctctctgggaaggagaagcctgcgcaggccccagccc

SEQ ID NO: 274731 - DNA, 388 bp, Homo sapiens
  chr19:56642159-56642547
  hypo
ccatcacgcctggccggaagatgactctttggataatgtaccctatattgtctgaccctgttagggcaaacacctcacaggtgtggccagtgctaaatgagatgcatgaagccgctaaacccagtgctcagacacataagaagtgctcacaaccgtgagtagttattaccattatggcgattgtctaaagtggaatggagaagtgtctcagtctgggttcgagagaggaaacaggtaaatagaccccacgccaggtattttatctaccaaagggtttaatgtagggaattaaatgttcacaaaattattgaatgggctgagcctcctgcgataactcagagaaccacacggaactgtcccagcaaggagccaccgcctttgaggactc

SEQ ID NO: 274732 - DNA, 228 bp, Homo sapiens; identical to SEQ ID NO: 219761
  chr19:56658488-56658716
  hypo

SEQ ID NO: 274733 - DNA, 271 bp, Homo sapiens
  chr19:56663680-56663951
  hypo
acagagtgagactctgtctcaaaaaaaaaaaaaaaaaataccgttgccgggattttactcttagatttgaagttgcggttatgaggtgattcgggcctcagcttcagtaattttttaactgaatgtctccattctcctgttgaaggacatttgggttgattccagggttttgttttttttttttttttaatagagctggtttacgtctctgaataggtttctgtgtgaatacacgtttacatttatctagggtaagcgcccaggagtgcag

SEQ ID NO: 274734 - DNA, 462 bp, Homo sapiens
  chr19:56671132-56671594
  hypo
gagtgcggcaaaacgtccctgaaaccagctcacctgctgcgccaccggcagagccactcgggcgagaagccgcacgcctgccctgagtgcgggaaggcctttcggcgcaaggagcacctgcggcgccaccgcgacacgcaccccggcagccccggcagccccgggcccgcgctgcgccctctgcccgcccgtgagaagccccacgcgtgctgcgagtgtggcaagaccttctactggcgcgagcacctggtgcgccaccgcaagacgcactcgggagcgcggccctttgcctgctgggagtgtggcaagggcttcgggcgccgcgagcacgtgctgcgccaccagcgcatccacggccgggcagcggccagcgcgcagggggcggtagctccgggcccggatggtggaggccccttcccgccctggcccttgggttagccgcctcccggccagcgccatctc

SEQ ID NO: 274735 - DNA, 40 bp, Homo sapiens
  chr19:56686391-56686431
  hypo
aagatgtctccagccgggcgcggtggctcacgcctgtaat

SEQ ID NO: 274736 - DNA, 294 bp, Homo sapiens
  chr19:56688203-56688497
  hypo
agtggggcagaaggcatgggcgctgggggaccaggtcggcctgatccgatgatgggggaaggagaggcttaattgcttgcacacgtccaaactcctcaagatgtgtacattaaatgtgcgccatttttgtatctcgatgatgcctccataaagctaaaaaataaattcctctgtccttatcggaaatgcacctggcccccgcttcggaaaatgactggccgctctctccttgcagcgtgttccgcagctgtaggcacctgtcgtcctgccttcgatggctcctccctccgtccc

SEQ ID NO: 274737 - DNA, 405 bp, Homo sapiens
  chr19:56707986-56708391
  hypo
aaagtaaattaggcctggtgcgatggctcactcctgtcaccccagtgctctgggaggcggaggtggcaggatcacttcagcccagcagtgaaccgcgattgtgccactgtgctccagcctgggagacacatccagcggccatctcgttttgtttatttattaagtaaatcgatacattttttaaaagcatacagatatgagaaaaggcagcctgaaattctgggaattaaagaggttttcccgccaggttccctaagcgcccctgctcagaaagcggagatcgaggctgaggcgggcagattgcttgagccgaggagttcgagaccagactgggcaaagcagcgagaccacgtctctatagtaaataaaaaaatgcactcgggcggtgtggtggtgtgctcctgc

SEQ ID NO: 274738 - DNA, 268 bp, Homo sapiens
  chr19:56727701-56727969
  hypo
tggtccccgccctccgctcgttatcgtgttgagaatgaaatgagaggacatgcttggcacctggagatgattggatattacagctgtgcgccataagggcaaatggttccattgtttgatgagccgtcctggcggtgggtgggtcggtcacttctaaacagataaggaatggctagaaagctcttgtaccaaaccagcttgaagcaacctcacccacaccgaatccctccacgtttcttttcttttttctttcttccttttttttttt

SEQ ID NO: 274739 - DNA, 64 bp, Homo sapiens
  chr19:56761106-56761170
  hypo
tcctcagtgttgatacgatggcctcctcttccttcttttccatccaaggcgccacattgccttg

SEQ ID NO: 274740 - DNA, 79 bp, Homo sapiens
  chr19:56805613-56805692
  hypo
tactgggcgattcacgtgggctctttctcccggaccctcacattaacccaggatgcaagtggttcggtggagacagcct

SEQ ID NO: 274741 - DNA, 166 bp, Homo sapiens
  chr19:56806261-56806427
  hypo
atgactctgtctctacgacatgtccacagcaggcaagtccacagatagggaaagcagcttagtggttgcctaggaccgcgggagaggggggtgagcccagagagatggggagtgactgctcaggggcaccaggtttggaggcaatggccaacgggtacacggtttc

SEQ ID NO: 274742 - DNA, 216 bp, Homo sapiens; identical to SEQ ID NO: 219764
  chr19:56806989-56807205
  hypo

SEQ ID NO: 274743 - DNA, 107 bp, Homo sapiens; identical to SEQ ID NO: 219765
  chr19:56807587-56807694
  hypo

SEQ ID NO: 274744 - DNA, 42 bp, Homo sapiens
  chr19:56829441-56829483
  hypo
cagagctctcaccaccacagcgccatttaggtggactgtttg

SEQ ID NO: 274745 - DNA, 79 bp, Homo sapiens
  chr19:56863413-56863492
  hypo
ttctttatgccctgcgcttgggtatgctttggtggatagtgtggggtttttttgtttgtttgtttctttgtttttgaga

SEQ ID NO: 274746 - DNA, 31 bp, Homo sapiens
  chr19:56877557-56877588
  hypo
gactgaaacctttgggaggccgaggcgggcg

SEQ ID NO: 274747 - DNA, 33 bp, Homo sapiens
  chr19:56936856-56936889
  hypo
gcgtgagctaccgtgcctggcctaaaaagtcat

SEQ ID NO: 274748 - DNA, 213 bp, Homo sapiens
  chr19:56981663-56981876
  hypo
acatgctctatgcacgtgctcaggtgtgtgtgctgaatgtgctccatgcctgggcagcagcgtcacctcctcagttaatgacgatgagaatgaaagctgtgctggctcctttctatgcatcacaccatctcctttaaccttgaatggcaaatcaaccacccagggtcctcatcttccatcgcggggatgagagagggacgatgacccgcctgt

SEQ ID NO: 274749 - DNA, 56 bp, Homo sapiens
  chr19:56987542-56987598
  hypo
caggagtcaacaccagacagcggggcgccacagtccatgctcttatttttccaagc

SEQ ID NO: 274750 - DNA, 663 bp, Homo sapiens
  chr19:57133006-57133669
  hypo
agtaagccccccatgccctgcgaggagaagaaaacctacgactgcagcgagtgtggcaaggcctttagccgaagctcgtccctgataaagcaccaaaggatccacacgggagaaaagccgtttgagtgtgacacctgtgggaagcacttcatcgagcgctcgtccctcaccatccaccagcgggtgcacacgggcgagaagccctatgcctgcggggactgcggcaaggccttcagccagcgcatgaacctcactgtgcaccagcgcacgcacacgggcgagaagccgtatgtgtgcgacgtgtgtggcaaggccttccggaagacttcctctctcacccagcacgagcggatccacacgggggagaagccctacgcgtgcggggactgcggcaaggccttcagccagaacatgcacctcatcgtgcaccagcgcacgcacaccggggagaagccgtacgtgtgccccgagtgcgggcgagccttcagccagaacatgcacctgaccgagcaccagcgcacgcacaccggggagaagccgtacgcctgcaaggagtgcggcaaggccttcaacaagagctcctcgctcaccctgcaccagaggaaccacaccggcgagaagccctacgtgtgcggcgagtgcggcaaggccttcagccagagc

SEQ ID NO: 274751 - DNA, 170 bp, Homo sapiens; identical to SEQ ID NO: 219770
  chr19:57134013-57134183
  hypo

SEQ ID NO: 274752 - DNA, 1448 bp, Homo sapiens; identical to SEQ ID NO: 219771
  chr19:57175022-57176470
  hypo

SEQ ID NO: 274753 - DNA, 488 bp, Homo sapiens
  chr19:57181878-57182366
  hypo
gggtcccgggcacacgtagctacacacacacccagccccacacgtagctccctgtgtgaagaggtgcacagagacgcacaaggtcacacatgccacctgctccacacaggccggccattactgggacacacccacaggggatggctggacacatgtgcagtcacactcggtggatagagctccagcatagccaaagcccacatgtgcagcgtctccatcatgtgcagatgcacacacttcagacagcacggcactctacaggctcgcacagccaggtcacccatcattgtgctggcaggcacacgggccgagccagcctacacggcggcacacccagacatgcacacgtggggtcacacacctcacatccaggagaactttcagacttgcccaaaggcagccacacgtgtatgtgacatgctgtgatatgcagacaccgcttcacatgaacgagcacataacacaccgataaagtgttacatgccttt

SEQ ID NO: 274754 - DNA, 32 bp, Homo sapiens
  chr19:57189204-57189236
  hypo
ttttttttgagacagattctcgctgtctggag

SEQ ID NO: 274755 - DNA, 39 bp, Homo sapiens
  chr19:57190503-57190542
  hypo
ttattggtaaaagaaaaattcggccaagcgcggtggctc

SEQ ID NO: 274756 - DNA, 91 bp, Homo sapiens
  chr19:57254044-57254135
  hypo
ccaaggtgctgggattacaggcatgagcctcgtgcctggcccagtgaaggaatttctatgggaagcgcacgtggcctccagttacatggat

SEQ ID NO: 274757 - DNA, 311 bp, Homo sapiens
  chr19:57328579-57328890
  hypo
acagcctttttgatcgtgaatcgagcccttcccatctgtgtcaaaatgatagcgcctctttctttcaagaactctctttctggaaacaagggttgaattaaacctaaagcctcccctaaatgcattcccttcataaacccgctgctggatcactgactccctcttgttcaatgaaatgtccttccagttatcatctgacattctggggaatctctgtgaccggtcgcttgactcccttgctcttcccgatttggaactgcgtgacacatccttgatgaatttttccattatcactccgtgggaagattcat

SEQ ID NO: 274758 - DNA, 50 bp, Homo sapiens
  chr19:57349850-57349900
  hypo
gcgcctgcacaacccgcctcgcagctcccccactaagccgcccccataca

SEQ ID NO: 274759 - DNA, 34 bp, Homo sapiens
  chr19:57349930-57349964
  hypo
acaaagtcttggtcaggcaacaacaggggaaggg

SEQ ID NO: 274760 - DNA, 412 bp, Homo sapiens
  chr19:57350029-57350441
  hypo
aagcataaatggctccgcggccgctaaggcaaactctttaggcacgtctcccggctcccccagatgcggggactgagccagtcccactggcaaaacagcctggcgaccagcacacacagcccaaggagcgcggcactccacagctttccatcaccgcaaggcaggcaagcacagcaaccgtggccccgcccctccctgtggacaaccccacacctatgcggcaaaccgcagccgccccgatcaaagatggcacccaggtgggcggggcttgaacagaccgtcccgcccatgccacctgcagccacttcagccttgccccgccgcatctgccgccaaccaatccgggcaacgcctgcgcggcaaacctcagctgcccccatcaaagatggcgcccaggcgggcgggccttgtc

SEQ ID NO: 274761 - DNA, 115 bp, Homo sapiens
  chr19:57388569-57388684
  hypo
gtaggtactaaagctgaaagcgtgcacaccctctgaccccgccattcttattcagggagcccagatgaccactccacaaatgtgcactgagcgcggaataataataattgccaat

SEQ ID NO: 274762 - DNA, 92 bp, Homo sapiens
  chr19:57425614-57425706
  hypo
aacctgtatataagcggactcgcacatttcaaacctgtgttgtttgagggtcaactgtatagtatataatgcaatataatatgtaatatagg

SEQ ID NO: 274763 - DNA, 163 bp, Homo sapiens
  chr19:57477086-57477249
  hypo
tcaggtgatctgcccaccttggccgcctcccaacgtgccgctaatagaggcgtgagctaccgcacccggccggattttcccttgcgtgactggcttatttcacttagcctaatgtcctcaagcgtcatccacgttgcagcacgtgtcagaacttctttccttt

SEQ ID NO: 274764 - DNA, 158 bp, Homo sapiens
  chr19:57491359-57491517
  hypo
ggatgggccaccctcaggggcggttctgtaggccacctcgcgggactccatgacagacgttaagcatggagcctggagaggaggaccccaggtggaggccctggtcccgcctttacgaatgggtagaaagggcttccgtctactgagacaggggtctt

SEQ ID NO: 274765 - DNA, 32 bp, Homo sapiens
  chr19:57501950-57501982
  hypo
aacaaaaaataaaaacaggccgggtgcggtgg

SEQ ID NO: 274766 - DNA, 87 bp, Homo sapiens
  chr19:57543653-57543740
  hypo
ttccttaacaattttaattgcggtaaaatacatgtatcataaaacgtaccatttgagggccaggtgttgtggctcacgcctgtaatc

SEQ ID NO: 274767 - DNA, 42 bp, Homo sapiens
  chr19:57579643-57579685
  hypo
ctgttgttgttgttaaggagcgaggctctgaggagtgggtaa

SEQ ID NO: 274768 - DNA, 42 bp, Homo sapiens
  chr19:57583563-57583605
  hypo
ttgtgaagtggtgatacattcgcagagtcaaaatgacatttt

SEQ ID NO: 274769 - DNA, 76 bp, Homo sapiens; identical to SEQ ID NO: 219773
  chr19:57604471-57604547
  hypo

SEQ ID NO: 274770 - DNA, 75 bp, Homo sapiens; identical to SEQ ID NO: 219774
  chr19:57604847-57604922
  hypo

SEQ ID NO: 274771 - DNA, 35 bp, Homo sapiens
  chr19:57627883-57627918
  hypo
ttttgttttttcttttgagacggagtctcgctctg

SEQ ID NO: 274772 - DNA, 34 bp, Homo sapiens
  chr19:57628158-57628192
  hypo
cgtgagacacggcgcctggccaatcccaggtatt

SEQ ID NO: 274773 - DNA, 86 bp, Homo sapiens
  chr19:57630721-57630807
  hypo
taagacttttaagtctcttccgcaccctctcttctgtctcttccacctggaggatgaccgcttttttgggggttttgttgttgttt

SEQ ID NO: 274774 - DNA, 386 bp, Homo sapiens
  chr19:57631107-57631493
  hypo
caattcccggcgtggtttctagcaccagcccacctaccacaccccacctcgcttgaggctgaatgggtaacaggatgaacccgcccctgggctggttttctctgaaccctaactcctgccgttacgccccaccagctctaggccaggaactctatgtgccccggccacgctagagcccgtacctagacccgtaggtcgggaggcctgcgcccggcactgcgcagacgcagcgtgctgtgcccagaactcttctgttcccaggagaatcaggggagtcggcgccggaaggggcgggtccgagctgagatttccagagccatgggagccggaagtccaaggaactgtacctccatcatgacgactccggttacgtaaaaacattcaaa

SEQ ID NO: 274775 - DNA, 32 bp, Homo sapiens
  chr19:57631762-57631794
  hypo
atgacttgagccttggggatcgagggtgtagt

SEQ ID NO: 274776 - DNA, 90 bp, Homo sapiens; identical to SEQ ID NO: 219775
  chr19:57689867-57689957
  hypo

SEQ ID NO: 274777 - DNA, 41 bp, Homo sapiens
  chr19:58177292-58177333
  hypo
gatacttaaaatatctttgcgaggcccaagtaggtttacag

SEQ ID NO: 274778 - DNA, 42 bp, Homo sapiens
  chr19:58180749-58180791
  hypo
tggaccttgttacattttaccgcagattttgtatttttgtgt

SEQ ID NO: 274779 - DNA, 42 bp, Homo sapiens
  chr19:58184721-58184763
  hypo
gccataggcatagtagctcacgcctgtaatcccagaaaggct

SEQ ID NO: 274780 - DNA, 32 bp, Homo sapiens
  chr19:58200878-58200910
  hypo
ttatcagaaaatagtctggccgggcatggtgt

SEQ ID NO: 274781 - DNA, 32 bp, Homo sapiens
  chr19:58201150-58201182
  hypo
agtgagactccgtctccaaaaaaaaaaaagaa

SEQ ID NO: 274782 - DNA, 81 bp, Homo sapiens
  chr19:58298051-58298132
  hypo
gagcgagactggccgagggaccggcttaggcaaaggcctggaggcacgactgcgccaggaggattcggaacacagggacat

SEQ ID NO: 274783 - DNA, 266 bp, Homo sapiens
  chr19:58304691-58304957
  hypo
acaggcatgagcccccgtgcctggccaaaactgcacatatttaaactgtaaagtgtgataagttttgacattaataagcctgtaatatgatccatcaccttcatatttacctggagtctggtaacgtctttacctctgccttccagatgaccattgataactttgctttataatagattattttacattttctacatttttatacgtgatttgatgtcgtgaagtgtttaatctttatccctggatggtatcgtgcggtatattta

SEQ ID NO: 274784 - DNA, 39 bp, Homo sapiens; identical to SEQ ID NO: 219779
  chr19:58316856-58316895
  hypo

SEQ ID NO: 274785 - DNA, 38 bp, Homo sapiens; identical to SEQ ID NO: 219780
  chr19:58317135-58317173
  hypo

SEQ ID NO: 274786 - DNA, 58 bp, Homo sapiens
  chr19:58465096-58465154
  hypo
tgagcctcttctgaagcctgcgcatactcatggcttcggctgcagcagcagctaaagg

SEQ ID NO: 274787 - DNA, 33 bp, Homo sapiens; identical to SEQ ID NO: 219781
  chr19:58472252-58472285
  hypo

SEQ ID NO: 274788 - DNA, 44 bp, Homo sapiens
  chr19:58484262-58484306
  hypo
gctcatgcctgtaatcccagcgaggaaggcagatcacgaggtca

SEQ ID NO: 274789 - DNA, 91 bp, Homo sapiens
  chr19:58524545-58524636
  hypo
cagagggtcagggaggtgagcggcgtgcagctgagagctctgttgttggccccgaccacaggtgtgtctcggtgcttcagaacagtctgag

SEQ ID NO: 274790 - DNA, 120 bp, Homo sapiens
  chr19:58544602-58544722
  hypo
tcccgagttctgggattacaggcgtgagctatcgcgcccggcctccttgtttttcttgagtttacatataactgaggtttcttttttctttcttttttttgggggtggggggacggagtc

SEQ ID NO: 274791 - DNA, 683 bp, Homo sapiens
  chr19:58551437-58552120
  hypo
ctgaaccctgcttcagcagtcgtcctctgtgcactctgtgcacacagccccggggggcttggggagcagagggctcacagtgctcgggcctccctagttagtcagtgctgcagtgtgtgtcctcgtgggcttctggaggcgcacaggggtgtggagtatgagtgaagagggtacttgtcttcagcggccctcggtgtcaccacaggttcctgcccagcagccacatggagggacagaatgacagccctgcagccactcttgcctgcgcctcaggggtgctgcagggatgttcggggaaagtctgccctccccagaaggcctggagaattgggggctctgggaagaacaggcccctctcacgatccctttctcccgcacagttctggtatctctggactcggtcgaaccccaggactggagtttcggtgaggaggaagatgggaagagtccaaggtcccagaaagaaccatcgcaggtgagcccggggcccccagctccgtgctcctgcaccccagggcatgcgtgccgcttctgggacggcctcaaggatgccccatccaaggactgtgtgaggttgtccccagcgctcccaggaagcccggcctccaaactccccgcctgccccacagattccccaagcttcctggggctcagtgctgggcgagggcagtcagtgcagctgt

SEQ ID NO: 274792 - DNA, 31 bp, Homo sapiens
  chr19:58555625-58555656
  hypo
gcgaaactccgtctcaaaacaaaacaaaaca

SEQ ID NO: 274793 - DNA, 343 bp, Homo sapiens; identical to SEQ ID NO: 219784
  chr19:58556344-58556687
  hypo

SEQ ID NO: 274794 - DNA, 146 bp, Homo sapiens
  chr19:58556945-58557091
  hypo
gctggagctacagcttcctgcgcttccagctcacgatgcggctgcgctccataaaggcagaggacaagctgtttgctgaggaaggggtggacagcctgaacgtcaaggagctgcaggcggcatgtcgggcacgaggcatgcgggcc

SEQ ID NO: 274795 - DNA, 38 bp, Homo sapiens
  chr19:58557381-58557419
  hypo
gctgcagaagcattcggaggtggcgaaggatgttgaac

SEQ ID NO: 274796 - DNA, 318 bp, Homo sapiens; identical to SEQ ID NO: 219785
  chr19:58557757-58558075
  hypo

SEQ ID NO: 274797 - DNA, 184 bp, Homo sapiens
  chr19:58563696-58563880
  hypo
agcatcagcatcccaaagcacgggaacaacaggcgcgacaccgcgcactgccctgggacagagcctttggggatgacgcccgttccttggttgttcggtggtggtggggaggatggctcctgaggggcagctgccgaacagtcctgtgcttgccattctaggcgtctgagctgattctggatgc

SEQ ID NO: 274798 - DNA, 736 bp, Homo sapiens
  chr19:58564632-58565368
  hypo
cttgtatcttaaaggacagaacggaggacacaggggccgtattgagcagaggaagggcctggacttggctcagtcactggggtcctccgtgcccctggggagcacagggagatgccaaggccatccactcactacaggtgacccatctccctcgccctccacagggtcccgggcccgcttgcctctgaagccgagtatctgggacgagcctgaggaccttctcgcagggccctcctcagacctgcgggcagaagggactgtgatctcgagccccaagggtccaagtgctcagagaatcagtccccgaaggagaaacaggaacactgaccagagcggccgccaccagccatccctcaagcacaccaaaggtggtacccaagaggctgttgcaggcatctcggtagtgccgcgtgggccccgaggtgggcggcccttccagtgtgccgactgtgggatggtcttcacctgggtcacccacttcatcgagcaccagaagacccatcgcgaggaagggccctttccgtgccccgagtgtggcaaggtcttcctgcacaactccgtcctcactgagcatggcaagatccacctgctggagccaccgaggaagaaagccccccggagcaagggcccccgggagtccgtcccacccagggatggagcccagggcccagtggcccctcgcagccccaaaagacccttccagtgtagcgtctgcgggaaggccttcccctggatg

SEQ ID NO: 274799 - DNA, 35 bp, Homo sapiens; identical to SEQ ID NO: 219787
  chr19:58593733-58593768
  hypo

SEQ ID NO: 274800 - DNA, 481 bp, Homo sapiens
  chr19:58595753-58596234
  hypo
tcaaataacctagcatggggcggcactaaatggctgcaggaaagccgagtcttcttccacatccggcggctcccctcggatgcgagcgctggcccagggtgtgtttacagaggtgagggcttcccgtggacccttctcgttgggagcgcttagcctcaggagcggattcagggcacaggcagaggacgtccacaaacaccacaggaagccgccacccaggggcgtggaaaggcccaatgcctcgtctgggattcacggccggcaaagcggcccctccggaacgggacagcacagcggctcacctctgcgcctctgggggtgcggggggagcctcgccctccacgctctctgggggaccgcccgccctagcccccgcctgggcttcgcgggtggacggttgggggccccgggcgccccccagcgcgtagcttttctccttctcgtgggtcttctggtgctcggctagggccaggctgaagtg

SEQ ID NO: 274801 - DNA, 199 bp, Homo sapiens
  chr19:58596709-58596908
  hypo
caggcgcacccagcgctctcctgccgcctcccgccttctggaacaaggtcagagccctagcgtgagcgccccgcccagggccagggagaggaggacccagccgagcctcagctgccggaacagcgcacagggctccgggctctggatccccgcggggctcacggctgtttggaagcagcgctgtccctcccaggcagcc

SEQ ID NO: 274802 - DNA, 365 bp, Homo sapiens
  chr19:58598368-58598733
  hypo
tcagcttctgaaacattagtcgtggctgagacctcccacctgccctagagaagggaggacccgccgcagccccacagccacaggagcaggctaggagccagccctggccagggactctaacccaggtgcactgcaggaggcagcccccttcgcaccacaaagattccgccctcacgctcccaccagggtgggttctgggcctcagcgctgtggacgtttggggccacagccctctgctgagcactggtgatggggagggggatgcctctaagctgaggccaaggcccctcacccacctgctcgtgcccacccacctgctcggtgttggcagggccgtcctcttcggtctttgcttctctgaccct

SEQ ID NO: 274803 - DNA, 42 bp, Homo sapiens
  chr19:58605134-58605176
  hypo
atcacttttttttttggagacggagtctcgccctgtcaccca

SEQ ID NO: 274804 - DNA, 156 bp, Homo sapiens
  chr19:58711831-58711987
  hypo
ttggtgggggacaagcgaggtacgggtgggcagcagtagttcagaactaagtaggaagatggttctgaggaggtgacgtttgagctcagacctgaatgggaaaggcgaaccaggtgaagatgttggggaaggtgaaccaggcgaagatgttgggga

SEQ ID NO: 274805 - DNA, 816 bp, Homo sapiens; identical to SEQ ID NO: 219791
  chr19:58830534-58831350
  hypo

SEQ ID NO: 274806 - DNA, 157 bp, Homo sapiens; identical to SEQ ID NO: 219793
  chr19:58872591-58872748
  hypo

SEQ ID NO: 274807 - DNA, 120 bp, Homo sapiens
  chr19:58874823-58874943
  hypo
cgagactccgtctcaaaaaaaaaaaaaaaaaattgagtcgggatctcagaagctaagcagggtcgggcctggttagtacttgggagaccgtctgggaacaccgagtgctgttggctaaaa

SEQ ID NO: 274808 - DNA, 118 bp, Homo sapiens; identical to SEQ ID NO: 219795
  chr19:58878556-58878674
  hypo

SEQ ID NO: 274809 - DNA, 32 bp, Homo sapiens; identical to SEQ ID NO: 219796
  chr19:58915038-58915070
  hypo

SEQ ID NO: 274810 - DNA, 31 bp, Homo sapiens
  chr19:58915310-58915341
  hypo
gagcaactccgtctcaaaaaaaaaaaaaaaa

SEQ ID NO: 274811 - DNA, 144 bp, Homo sapiens
  chr19:58964117-58964261
  hypo
agcagtcaggcgtgcggagttacagcttgagggtaaagaaaaccggctggggtgcctgaggctatcaggggaggagttcggcaggtggctgaataggagagggtggcagcaatgtgggaaagaaattgcgggagcgctgagatc

SEQ ID NO: 274812 - DNA, 99 bp, Homo sapiens
  chr19:58990990-58991089
  hypo
tgatgggccacatccgcaggaggagtgggggctgctggaccggtcacagaaggaactgtactgggatgcgatgctggagaagtacggcacagtggtctc

SEQ ID NO: 274813 - DNA, 160 bp, Homo sapiens
  chr19:59003735-59003895
  hypo
accatctgagccatcgctacagcatctgcctgtatttctcacatgcttacatgaaaggcattatttattcacttggacaacaaaggctgcttttcgtgagagtcactggtcctcccatgagggcatccaccgatacttcaagaatccttcctggggccgg

SEQ ID NO: 274814 - DNA, 149 bp, Homo sapiens
  chr20:276872-277021
  hypo
actggaaagtgcaaacggcccaagtcagtggctcccctgagaccaataccagcagttgggatgaagggaatctgcctgttaacaaggtttcctaggatctgatgcacagttcttgatccacggcgtcagaaataaagtggttaaataaa

SEQ ID NO: 274815 - DNA, 43 bp, Homo sapiens
  chr20:304449-304492
  hypo
caggtgtgagccaccgcgtcccgtctatcataagttttattga

SEQ ID NO: 274816 - DNA, 61 bp, Homo sapiens
  chr20:309115-309176
  hypo
ctcctttaagcttggtgctccggctctgggcctttcttgcgctctattttttttttttttt

SEQ ID NO: 274817 - DNA, 242 bp, Homo sapiens
  chr20:371970-372212
  hypo
atgcgcggctgcccccgcacaagcatgtggctcggcccactgaggtcctggctggtacccagctcctctacgcctttttcactcggacccatggggacatgcacagcctggtgcgaagccgccaccgtatccctgagcctgaggctgccgtgctcttccgccagatggccaccgccctggcgcactgtcaccagcacggtctggtcctgcgtgatctcaagctgtgtcgctttgtcttcgct

SEQ ID NO: 274818 - DNA, 298 bp, Homo sapiens
  chr20:399991-400289
  hypo
tctgggcttcaaggacctcacgctgcagccgcggggccctctggagccaggccccccaaagcccggggtcccccaggaacccggacgggggcagccagatgcagtgcctgagcccccaccggtaagctgtccttggcctcagtatcctcttctgtgcccctcccttgcctcaccctgcccagtcgggctcacagcaccctctgctcccaggtgggctggcagtgccccgggtgcaccttcatcaacaagcccacgcggcctggctgtgagatgtgctgccgggcgcgccccgaggcct

SEQ ID NO: 274819 - DNA, 266 bp, Homo sapiens
  chr20:400917-401183
  hypo
ccttagccctaccccgcccccatcgtgacacacgcactaatgacacagacattgatccccgagtgctccccattctgatctcacccctggccccacctgcattccccttggacccggtgctgcccctggccaccccactcctgttcccgtctcagctcctcggcttcgtcacttccccacccctgacgttgagtggctccaccagccctggcccgggccctgccctgctacctgactcaccactcagaccccggcccccttcctta

SEQ ID NO: 274820 - DNA, 469 bp, Homo sapiens
  chr20:401567-402036
  hypo
gaggagcctggtgctgaacacggagcccgccgagtgccccgtgtgctactcggtgctggcgcccggcgaggccgtggtgctgcgtgagtgtctgcacaccttctgcaggtgcggcccccagtcccacccccggcaatgcagcttaatcaaagccgccaattacgcagggctggacgtgggtggggccctgtgctctgatacctcattggacgcccgcgaaaacctacgaggtaggctccgtctccccatgttgcggacgaggaacctgagggaaagagaggcccagcgccttaccccaggcccacggctcatgagagaagcagcctagacgtgagcgcaggcgtggggggagactcccttcccctctacctttcgccgcccgggctcctgcagccacgctgctctcagcctcgctgtgggcatctgccagtttctgagtctcctgtcatggcccccccacccctgaatg

SEQ ID NO: 274821 - DNA, 55 bp, Homo sapiens
  chr20:402066-402121
  hypo
acccttgtggagccgcccctgggtgacaggctccgtgcctgcctcctgcagctta

SEQ ID NO: 274822 - DNA, 116 bp, Homo sapiens; identical to SEQ ID NO: 219801
  chr20:413054-413170
  hypo

SEQ ID NO: 274823 - DNA, 43 bp, Homo sapiens; identical to SEQ ID NO: 219802
  chr20:417445-417488
  hypo

SEQ ID NO: 274824 - DNA, 149 bp, Homo sapiens; identical to SEQ ID NO: 219803
  chr20:488507-488656
  hypo

SEQ ID NO: 274825 - DNA, 34 bp, Homo sapiens
  chr20:540395-540429
  hypo
gcatgggccgggcgcggtggctcacgcctgtaat

SEQ ID NO: 274826 - DNA, 91 bp, Homo sapiens
  chr20:631995-632086
  hypo
gttctggccctcagagcctacggttctagcacggaaggcaggtgtctagacaggacgttaaaagccagtgggctgtaatcccagcactttg

SEQ ID NO: 274827 - DNA, 68 bp, Homo sapiens; identical to SEQ ID NO: 219804
  chr20:688357-688425
  hypo

SEQ ID NO: 274828 - DNA, 361 bp, Homo sapiens
  chr20:745878-746239
  hypo
tacagggcttggtacgctgtctgatatctcagtgacattgacgcaggtagtgagaccggagccctgggcaagagccaccagggcgggcaagaggccgctgagtccttcacccacaaagaaggtggtgaggtagtaggtgggcagccggctcatgaacggcaggaaggtcactgaagaggtgcagtccaccagggccaggaagaaggtgaggaccaagaaggcgatgctgtggtggccgtccagcacccaggaggtcatattccagaggaaggcaaagatgatgcaggtgacggttcccacgcccagcagggtgaagatgatgggcacttcggaaaggcagctgggccggaagtgatggagc

SEQ ID NO: 274829 - DNA, 137 bp, Homo sapiens
  chr20:773017-773154
  hypo
tccgccccctgtggcggcctcagccgggagaaatcagaacccacccagtgcgaggaacaacccgagctgtcagcaacaggggggaagaaaactggccggcaacctagcttaaagaatcctcacatactgcagcgacg

SEQ ID NO: 274830 - DNA, 38 bp, Homo sapiens
  chr20:923177-923215
  hypo
ggaattacaggtgtgagccaccgcgtccggccgaaacc

SEQ ID NO: 274831 - DNA, 213 bp, Homo sapiens; identical to SEQ ID NO: 219808
  chr20:926439-926652
  hypo

SEQ ID NO: 274832 - DNA, 40 bp, Homo sapiens
  chr20:1094603-1094643
  hypo
gattacaggcgtgagccaccgcgcccggcctgggttacgg

SEQ ID NO: 274833 - DNA, 36 bp, Homo sapiens; identical to SEQ ID NO: 219809
  chr20:1276610-1276646
  hypo

SEQ ID NO: 274834 - DNA, 154 bp, Homo sapiens
  chr20:1277696-1277850
  hypo
actttgggccgcagcggcctggcagtgttcgcccagtgtccgcagctgcccgccagccagaacgagcacctgcctcttcttcctgcctccaggcgcacctctccacctgtgagcgtgcgggatgcctacggcacctcttcgctcagcagcagca

SEQ ID NO: 274835 - DNA, 158 bp, Homo sapiens
  chr20:1323452-1323610
  hypo
caggacacccaaacacgtatgcaatgcgtacactggaagttaaggtccatgacgacggggactcttttgtttactattgtgttataggaccttaataaatatttcttcagtgagtcactggaaccacacttacagtatattaaaaatatgcatagaac

SEQ ID NO: 274836 - DNA, 192 bp, Homo sapiens; identical to SEQ ID NO: 219810
  chr20:1435437-1435629
  hypo

SEQ ID NO: 274837 - DNA, 248 bp, Homo sapiens
  chr20:2104364-2104612
  hypo
gtaaattttaaaatcgttttaggtgagaagttgggaccgccagtactaaataggtccactctatgacttcctggcccagctctcaggatggccaggaactagctcctgccttacaggactgccctcccttgcctgtacctggtgcctggctgaggagtgtggcagcctgaggggttaggctgtgaagaagggcagcagcgccaaagatgaccaaaacggcagtgattcatggtcgtccctgggctgag

SEQ ID NO: 274838 - DNA, 116 bp, Homo sapiens
  chr20:2113456-2113572
  hypo
acttactagctgggcggctttgggcaagtgatctaccttctctgggcccccatttccttgtctggtcagtgcagtaagtgttgctcactgtaggctgtgtccggcgcagttcctag

SEQ ID NO: 274839 - DNA, 304 bp, Homo sapiens; identical to SEQ ID NO: 219812
  chr20:2308758-2309062
  hypo

SEQ ID NO: 274840 - DNA, 124 bp, Homo sapiens
  chr20:2321102-2321226
  hypo
aggggtcccgggtccgttttgatatcctgccctcccggagtggcaccaagcaactgctcgccgacttctcctgcaacaagttccctgcaatcaaggccatgttgtccatcgatgtagccgaatg

SEQ ID NO: 274841 - DNA, 255 bp, Homo sapiens
  chr20:2397896-2398151
  hypo
ggtgtacagcaaggcggtgaacaggctgttcggcgtggaagcctctggaaggagaatctggatccgcagggctgggggtcgctgtctctggcgtgacgacctcctggagcctgccaccaagcccagcatcgctggcaagttcaaggtgctagagcctcccatgctgggccacgacctgagactggccctgtgcttggccaacctcacctcccgggcccagcgggtgagggtcaacctgagcggtgccaccatcct

SEQ ID NO: 274842 - DNA, 130 bp, Homo sapiens
  chr20:2444391-2444521
  hypo
cctgttgggatggcccgccaaccccacggactggcccagcaagtcctgcaggagcctggggcatgggaaccccagctgggattcctctgccagcagccctgccgatccctgggcccccggcagctccagc

SEQ ID NO: 274843 - DNA, 33 bp, Homo sapiens
  chr20:2489142-2489175
  hypo
atttggccctggcagaactcaaccccacagccc

SEQ ID NO: 274844 - DNA, 106 bp, Homo sapiens
  chr20:2636506-2636612
  hypo
ggagcagggctgtcgtgcaactgggcaggtcagcagttcatttctctgactgcttccttgactctctctccaggtaggtgcacgtctcatcgcacatgctggcagc

SEQ ID NO: 274845 - DNA, 207 bp, Homo sapiens
  chr20:2739580-2739787
  hypo
tttcactctccagcccgggggcttcagggcctggcatactcctaattacggtaggtctctggctgggtctggcctcccccgccccacctggccctgagatgtgcttgctctctaaaggccttcatcctgtgctcaagcctccccgctagcagccccacagggatggggagctggggtccaagtcttcctccccggggcccatctaga

SEQ ID NO: 274846 - DNA, 219 bp, Homo sapiens
  chr20:2797288-2797507
  hypo
ggcatggctgggtgcgctggtgggtgagccacatgcccccgagctggatccagtggtggagcacctcgaactggcggcaaccgctgcagcgcctgctgtggggtctggaggggatactctacctgctgctggcactgatgttgtgccatgcactcttcaccactggctcccacctgctgagctccttgtggcctgtcgtggccgcggtgtggcgccacc

SEQ ID NO: 274847 - DNA, 291 bp, Homo sapiens
  chr20:2820435-2820726
  hypo
ggagtcccccaagatgaccacgaacttgttgtgtagcagctgctggacttccgaggcctggaagtggaccatgtcgcttcgcagcgggcggcgcggctcctcgctcgacagacagaagaccatgccgccaccagcaacgacaggctgcagggagaggccactaagcagcgcgatggtggggactctgggcaggtcagcctcagggctagcccctccggggctgctcaatgctaaagggaggaggtgacggcagcagagccatggtggcgccagccttggtcacacttggta

SEQ ID NO: 274848 - DNA, 31 bp, Homo sapiens
  chr20:2907825-2907856
  hypo
ttacagtcgtgagtgccgcgcccacttaata

SEQ ID NO: 274849 - DNA, 178 bp, Homo sapiens; identical to SEQ ID NO: 219815
  chr20:2939675-2939853
  hypo

SEQ ID NO: 274850 - DNA, 129 bp, Homo sapiens
  chr20:3003332-3003461
  hypo
agtgcaggtgtagggcgtacaggtacctttgtcgtcattgatgccatgctggacatgatgcatacagaacggaaggtggacgtgtatggctttgtgagccggatccgggcacagcgctgccagatggtg

SEQ ID NO: 274851 - DNA, 68 bp, Homo sapiens
  chr20:3017788-3017856
  hypo
ctctgttgcagcgccggggcaggaaggacggggaccttctgtgccctgagcaccgtcctggagcgtgt

SEQ ID NO: 274852 - DNA, 45 bp, Homo sapiens
  chr20:3109208-3109253
  hypo
aagccaagaaaaaacaaagccgggcggagtggctcacacctataa

SEQ ID NO: 274853 - DNA, 96 bp, Homo sapiens
  chr20:3199943-3200039
  hypo
cagggttcaagcatagaatgttaattcttggccaggtttggtgatttacacctgtaatcctagcactttgcgaggccccagcgggaggctttcttg

SEQ ID NO: 274854 - DNA, 423 bp, Homo sapiens
  chr20:3202086-3202509
  hypo
catctggcttgtccacggagttcagggtacttagcttcctattaggagaaaacgttttctgtctatctttctttctgtctatctttcaaagtagcctcattgttcttcagtgatgtcccaatttgtcccgggtgtggctggcgagggcgcgtggccccggaggtgctggtggtcctgtgggtccatgcctcctccctgtgtgtgagggaagagctgccccgctctgctttttattgtattcagcaaacatttgcaggtgctgtaggggccttgcaactacattttgcgtaagttgggtcaaatcaaattcacagactcaccaaactcatactggccactgccctcctcgtgcttgtcctctggacccagttacacacctgtcccccctttcctgtggcagggccggatcgtggcacccagagg

SEQ ID NO: 274855 - DNA, 32 bp, Homo sapiens
  chr20:3203126-3203158
  hypo
ttacaggcgtgagccaccgcgcctggccacat

SEQ ID NO: 274856 - DNA, 135 bp, Homo sapiens
  chr20:3208371-3208506
  hypo
ccagagccagcctgggaggacgtggagggctggcgaatggggcgtgggcagggtctgccagtcaaggcctgtgctcagcgtccatgacatccaagtacttggcttcaatgattcggggcagcaggatatagctgt

SEQ ID NO: 274857 - DNA, 41 bp, Homo sapiens; identical to SEQ ID NO: 219818
  chr20:3208779-3208820
  hypo

SEQ ID NO: 274858 - DNA, 116 bp, Homo sapiens
  chr20:3209206-3209322
  hypo
agggaggtgagcgcgatgtagaggaagaggccatagagcacgggcttggggatccactgaagcgggaccggcagcagcaacagggacaggcccaccaggacgctggcgcccagcga

SEQ ID NO: 274859 - DNA, 75 bp, Homo sapiens
  chr20:3211428-3211503
  hypo
gcccagagaagagcgcgtagagcaggcccccgatgctctgcccggctatggtcttctgcacgtctgtgggggtgc

SEQ ID NO: 274860 - DNA, 34 bp, Homo sapiens
  chr20:3211814-3211848
  hypo
tacaaggggaacctgcgtgcgatgtcctcccgga

SEQ ID NO: 274861 - DNA, 154 bp, Homo sapiens
  chr20:3214742-3214896
  hypo
ggtgccccggcatcggtgaagagcatggccatgagcaggtccaggttgcagttgggctcattgttgtcagggtccctggcgaagcggcgaagcatggtccgcagcacgttatccagggaggtggccgtctcgttcaggacgatgctggcctgcg

SEQ ID NO: 274862 - DNA, 41 bp, Homo sapiens
  chr20:3635386-3635427
  hypo
gcagagcagcttcccgagacatcctccgatccagggcttcc

SEQ ID NO: 274863 - DNA, 221 bp, Homo sapiens
  chr20:3635666-3635887
  hypo
ttgcacctaatcaccgggctccacaccaggatggacattcatgagccgtgaagtttccagtaataaatccacagatgcttccagcacctgccttttcgcatcacctccactcccagccacctgccaggcaacaggtaacagagacccagtcacaggagggcagtgtgggggcaggactgcagtctcccaaagcccatgcacaaaaccgacagcgccctggc

SEQ ID NO: 274864 - DNA, 209 bp, Homo sapiens
  chr20:3637823-3638032
  hypo
tcggcttcctccagttttttttttttttcaatgcttatattttactctaattaactgagtcaaaaatggagaatagttgaatacactttcatgtaaggcgaatcatttagccgatacttaactctgcatttgggctaccatgccgctgtggttagcggggcaaggtgatgagccctgtctcaacacacacaccccgcctctccccagcc

SEQ ID NO: 274865 - DNA, 337 bp, Homo sapiens
  chr20:3763166-3763503
  hypo
gcacctgaccggaccgctgcctggtttctcatggctttacctaccttataggggctttgtgagcatctaaagcatttagcacagagcaggggccctattagtatcagctggtactatcattaatgagacagtctcagttccagcaagaactgttctttttcgcaggagacaaatggaagtaattcgtcttgttggaacctgcggtgaggtagctgggttaaacaggagcacctgggcaagcaggcaatgctcctcctgctcactcgagagcaggtggggcttccttgtggccttctggtctccaactccagggctcggatttcgggagggaaggtgg

SEQ ID NO: 274866 - DNA, 377 bp, Homo sapiens
  chr20:3781113-3781490
  hypo
agtttgccatcagacgcttccagtctatgccggtgagtgtcttcgaggcctgactgaggcttaggcatgctagccaggcatggggtagatgagcaggatgcattcagggatcacctcccagctgggtgtccccaggcaggctgtaggagatggggtttcagaggtaggtaggtaagtgggaggagctggaggagaggtggagaaggtagggcctgggctcgtgccggaggaatgcagccttcattcctctgcctgccgccctgcctggctctctaggtgaggctgctgggccacagccccgtgcttcggaacatcaccaactcccaggcgcccgacggccggaggaagagcgaggcgggcagtggagctgccagcag

SEQ ID NO: 274867 - DNA, 36 bp, Homo sapiens
  chr20:3797904-3797940
  hypo
acaagcgtgagccactgcgcccggctatcccattct

SEQ ID NO: 274868 - DNA, 36 bp, Homo sapiens
  chr20:3820918-3820954
  hypo
gtcgtcccactgcactccagtcgctgcactctcgcc

SEQ ID NO: 274869 - DNA, 441 bp, Homo sapiens
  chr20:3838303-3838744
  hypo
cactctcagggaaccgggacaccctctggcatctcttcaatacccttcagcggcggcccggctgggtggagtacttcattgcggcactgaggggctgtgagctagttgatctcgcggacgaagtggcctctgtctaccagagctaccagcctcgtgagcgtcctgcccttgccctcctggacccccagcctgctccctggcctccgctctccttttctctctccctgtacttcctgcctttctctgtcatcctctttcttgtcactgtgaagcgatgaataaacctgggtgtagatccaggctgagccacttaccagctgtgtccctttggccaagtcccttaatttccctgagcctcaggcctctcttctgtaaaatgaagctcatggcagcatctgccgcggggagctgcagtgggtgatactgcgggacgatgcgtgt

SEQ ID NO: 274870 - DNA, 120 bp, Homo sapiens
  chr20:3857969-3858089
  hypo
cacgatcacagcacttccaaaaaaaaaaaaaaaaagacctgactccagtggactgaaactcatcaaataggcttttaaaatccatgagttggccaggcgcggtggctcacgcctgtaatc

SEQ ID NO: 274871 - DNA, 149 bp, Homo sapiens
  chr20:3909805-3909954
  hypo
gcattttcttttcaaagtgtgtgcacagagtgaggaggccagcctgggcaacatagtgagttgagacctgtctctacaaaaaaataattacgaaaattagccaggtgtgctggtgtgcacctgtagacgcagctacagactgaggcggg

SEQ ID NO: 274872 - DNA, 95 bp, Homo sapiens
  chr20:4085052-4085147
  hypo
caaaactcatgttgtagaggcgcaaaagccattcggcaccctttcatgtttttgttgtataaattctttcagtaaattttggattcccggctggg

SEQ ID NO: 274873 - DNA, 218 bp, Homo sapiens
  chr20:4270513-4270731
  hypo
tggctgccctccctcggaagtactttcttggagacctggaaagggcctttcagtttatggatcccctgactcactttacaaatgagggagcagagttccattaaagtgaagagacttgctagaaagagtgggagcccagcaagagccccagatcctgcccgttcagcgcgttttgtgagatcacttctttctccagcaggggacgccagtcagtagct

SEQ ID NO: 274874 - DNA, 42 bp, Homo sapiens
  chr20:4786435-4786477
  hypo
ttggggaaagggtgtgctgccggatgaaacgtggggtgacag

SEQ ID NO: 274875 - DNA, 34 bp, Homo sapiens
  chr20:4786507-4786541
  hypo
cgaggaccgcaacgtaggcagaggtgccaccttc

SEQ ID NO: 274876 - DNA, 146 bp, Homo sapiens
  chr20:4869816-4869962
  hypo
tgggactctgcaggtgcagtcgcttgagcgagtcttaaagaacgagaagtgcttcgccacgtgtgtgggggattatgggtattccgggcagagagaggggaggtgcaaaacaagagccacaggacggacccaggaaccctcagagg

SEQ ID NO: 274877 - DNA, 217 bp, Homo sapiens
  chr20:4951348-4951565
  hypo
ctccaccctgggtgatagagcaagaacctgtttcagaaaaagtaagaaaaggaaaaggaaacacaactggagattgtgttttacacgcacctaagtgatgtggcgtagacctgtccatatgctttccattacaattcgctgagttacatttgcttatgcaccaaggtccaagttcaaagccgtatgagaagtccccgttagtggagtcaagacctag

SEQ ID NO: 274878 - DNA, 105 bp, Homo sapiens; identical to SEQ ID NO: 219827
  chr20:4966924-4967029
  hypo

SEQ ID NO: 274879 - DNA, 35 bp, Homo sapiens
  chr20:4968207-4968242
  hypo
tatgtggccgggcgcggtggctcacgcctataatc

SEQ ID NO: 274880 - DNA, 53 bp, Homo sapiens; identical to SEQ ID NO: 219828
  chr20:5072894-5072947
  hypo

SEQ ID NO: 274881 - DNA, 46 bp, Homo sapiens; identical to SEQ ID NO: 219829
  chr20:5178251-5178297
  hypo

SEQ ID NO: 274882 - DNA, 37 bp, Homo sapiens
  chr20:5593413-5593450
  hypo
acttgggtgacagctagactctcgcaaaaacaacaac

SEQ ID NO: 274883 - DNA, 37 bp, Homo sapiens; identical to SEQ ID NO: 219831
  chr20:5610249-5610286
  hypo

SEQ ID NO: 274884 - DNA, 174 bp, Homo sapiens; identical to SEQ ID NO: 219832
  chr20:5610576-5610750
  hypo

SEQ ID NO: 274885 - DNA, 35 bp, Homo sapiens
  chr20:5649290-5649325
  hypo
agaacctgcccaggcgagcccgctggaggatgaga

SEQ ID NO: 274886 - DNA, 180 bp, Homo sapiens; identical to SEQ ID NO: 219833
  chr20:5734498-5734678
  hypo

SEQ ID NO: 274887 - DNA, 196 bp, Homo sapiens
  chr20:5762408-5762604
  hypo
gctaccacacccggccaatcttacactacttctttccttccagctccaatcaaaaagctcctctgccttgttttcgggactctgtgtaatctgctgcctggaatatttgttcaaaatatttaataaccaatacagcagtattgcaatatttcaacaaccggcacgactgtacaggtgcacacgagctgaatagagg

SEQ ID NO: 274888 - DNA, 92 bp, Homo sapiens; identical to SEQ ID NO: 219835
  chr20:5765408-5765500
  hypo

SEQ ID NO: 274889 - DNA, 35 bp, Homo sapiens; identical to SEQ ID NO: 219836
  chr20:5801860-5801895
  hypo

SEQ ID NO: 274890 - DNA, 137 bp, Homo sapiens
  chr20:5812853-5812990
  hypo
tgggattacaagcatgagcctctgcgctgggcctctcttcatttctagagaataatggaagtgaatccaggagacagacttctccacattgttaaaagctcctcgggcagagtggaactgcacgtgttgccactttg

SEQ ID NO: 274891 - DNA, 90 bp, Homo sapiens
  chr20:5934379-5934469
  hypo
aagtgctaggattccagacgtgagccaccgcacccagccgcatactttttttttttaggaaaactagacgtttgaggtccaggaccctcc

SEQ ID NO: 274892 - DNA, 154 bp, Homo sapiens; identical to SEQ ID NO: 219839
  chr20:6021570-6021724
  hypo

SEQ ID NO: 274893 - DNA, 278 bp, Homo sapiens
  chr20:6022708-6022986
  hypo
ggctgcgctgggcgcgacggtggtaccctgtgcgtaggtggagcggttgaagcaaggtgggtgtgaagccccgagagtggtgctttggtcggactggcacactccgggcagctgggagagtgacagggaggctgagaaggggccgctggatcccgcagctggcgcgcacatagtgtctgctgccctggaggggaggccaaccagttagaagacgtctggcttcagggacacttctgcgcagagctttgaatcctcattgccgacgtcaccccctgcca

SEQ ID NO: 274894 - DNA, 120 bp, Homo sapiens; identical to SEQ ID NO: 219841
  chr20:6302507-6302627
  hypo

SEQ ID NO: 274895 - DNA, 143 bp, Homo sapiens
  chr20:6663946-6664089
  hypo
accatttctttagtaagctgcgaggttatatttcttcctcctgtcacagaagcagaatttgatctgtgtttgttggcgcgggtagatgtgtgaagatcaaacgcaagctttgtcaaacagacggtagtcttctactgaggaaa

SEQ ID NO: 274896 - DNA, 34 bp, Homo sapiens
  chr20:6732281-6732315
  hypo
aaggcagaattggccaggcacggaggctcactcc

SEQ ID NO: 274897 - DNA, 34 bp, Homo sapiens
  chr20:6732555-6732589
  hypo
aaaaggagactccgtctcaaaaaaaaaaagaaaa

SEQ ID NO: 274898 - DNA, 169 bp, Homo sapiens
  chr20:6759075-6759244
  hypo
aaaacctgcaacagccaactcgaaattccccgtgaccagacttttggacaccaggttggtgaatcagaatgcaagcaggtgggaaagttttgatgtcacccccgctgtgatgcggtggactgcacagggacacgccaaccatggattcgtggtggaagtggcccacttg

SEQ ID NO: 274899 - DNA, 161 bp, Homo sapiens
  chr20:6837485-6837646
  hypo
agctctccaaactcacgctggctccagtgcacccctgctagaacccaggccaagacaattgtcataactgaccatcaggaaatatcaattaagagtgtggatattattaacgttctgttagataccctaacacattatactgcatatcgattttttctttt

SEQ ID NO: 274900 - DNA, 35 bp, Homo sapiens; identical to SEQ ID NO: 219844
  chr20:6861141-6861176
  hypo

SEQ ID NO: 274901 - DNA, 147 bp, Homo sapiens
  chr20:7958418-7958565
  hypo
agctaataacaaatacgattaaaccacttcagaaacacgtcaaagttgtacgagtcacacatatacagtgtcacagtctacataaagctttactgagaataagccatctgaagggcatgtcccgggctgaagcgatcaaagggcttt

SEQ ID NO: 274902 - DNA, 33 bp, Homo sapiens
  chr20:8731861-8731894
  hypo
attacaggcatgagccaccgcgcccggccggaa

SEQ ID NO: 274903 - DNA, 149 bp, Homo sapiens
  chr20:9546626-9546775
  hypo
gatgcatacgatgccggttgagccttccccgattttgataaagttggccaagtattccctggggtctcctgggctgaccaccagctgcagggccgcccgaaactgttcatgggacaccctggagggctgctggtcggaggaggagcccc

SEQ ID NO: 274904 - DNA, 167 bp, Homo sapiens; identical to SEQ ID NO: 219845
  chr20:10515152-10515319
  hypo

SEQ ID NO: 274905 - DNA, 42 bp, Homo sapiens; identical to SEQ ID NO: 219846
  chr20:10571270-10571312
  hypo

SEQ ID NO: 274906 - DNA, 32 bp, Homo sapiens
  chr20:10686677-10686709
  hypo
gagaggagccagggcgtcggctcggcacagaa

SEQ ID NO: 274907 - DNA, 205 bp, Homo sapiens
  chr20:10687193-10687398
  hypo
tgaggaaaggatggtgggaacggaaggagcctgaggcctggagggggattcggaggccccgacggaccgcactgtggaggagctttctgtagagcgcaggatccacttaagctccgcgtgtgtgtagggattgtgtgtagggatacggcaaatatcctgcagttgattgccagacgtacagatcgattgcaacttcagtcccttt

SEQ ID NO: 274908 - DNA, 361 bp, Homo sapiens
  chr20:10774348-10774709
  hypo
cagtggctgcaaagcggctttttgtcctcaaagtttaggctccttgaggccccagaatgacaaaatggagaggcagggccaggggaagagggcctggtgagacccgccctggctcccgccggccttctgccaatgcccgcagatggtgggggcccatggccgggacgcccgctcaggccctggcagcctcatgtgccccagcacctccttaaaagctgattatccggcttgtctcctttgtgagccggctcattaccatttcattgtgtggtggcaattcttacccgcaccatgaatattgactttatgcttgcttttctacctgaattacaggcgggcaggccggcggctcgcattgctt

SEQ ID NO: 274909 - DNA, 42 bp, Homo sapiens
  chr20:11209700-11209742
  hypo
tgtgacagataacacggcgaaaccccatctctacaaaaaata

SEQ ID NO: 274910 - DNA, 414 bp, Homo sapiens
  chr20:11589406-11589820
  hypo
gggtgactcctccactgtttcgtcctccttcaggctccaggaagccctccgtgtgcagcttactctggtacacaaagacgtccactgggggatcgagcgcgaccctggctagggcggtcatggacaggaagacaaaccccaagcccacgttgaaccgcttacagatgcccgcatcgtgcagcagctgaggcttgtccgccggcggggccgtgtcctccggcacctctttaggcgcctcctctgccaccttagcgcagccacctgctaactgctggttggacacggagcccagggtcgtcagctgagcccgcagccctgggtccctggttgggcggctgctggccccagagaagtccgaaggcttcaaccttcttcactacctatgttttcaacggctgtgtaaaagaatgcata

SEQ ID NO: 274911 - DNA, 185 bp, Homo sapiens
  chr20:11903619-11903804
  hypo
gggctgaagtagaatgccaacgacaagatctggcgttgagcattgaaaataaacgcaaggttctaggaaaggcactttacttgatccgcatacccacaatggccctcgatgattttgcaaatggtgctgcacagtccggggtattaactctcaatgagaccaacgacatcttcctctggtatact

SEQ ID NO: 274912 - DNA, 128 bp, Homo sapiens
  chr20:13279833-13279961
  hypo
ctggagagcaccacgctggcggcacagcactgctgctacggcgacaacatgcagctcatcaccaggggcaagggggcgggcacgcccaacctcatcagcaccgagttctccgcggagctccactacaa

SEQ ID NO: 274913 - DNA, 153 bp, Homo sapiens; identical to SEQ ID NO: 219852
  chr20:13417379-13417532
  hypo

SEQ ID NO: 274914 - DNA, 252 bp, Homo sapiens
  chr20:13881180-13881432
  hypo
gagtaggagatgaactttggcgaactcttattgttataatcttaaaaacccggcccagggaggagcttattctccattttctatacaggcgacatatgtagaaacataatccgccgctgtgcctgtgcggccaggactccctctctacacgcaatgattcagctgaccagcccaagacatgctcggttttcacgcctgtttgtaggggcactgctttggggcactacctccggtgtcctccttacttgtttc

SEQ ID NO: 274915 - DNA, 58 bp, Homo sapiens; identical to SEQ ID NO: 219853
  chr20:14812474-14812532
  hypo

SEQ ID NO: 274916 - DNA, 180 bp, Homo sapiens
  chr20:15011645-15011825
  hypo
cacacctgccaagggtgagctaggcacggagcagtgaagggtatgtgagggagctcagggtctggccactgtgcacagccaggctgtggtggggcgggcagcaccaggtgcctgcacaggcgccagctctatgcaaggctccagctgaaccaggcatactgcaaatggcttccgctgtgg

SEQ ID NO: 274917 - DNA, 66 bp, Homo sapiens
  chr20:16431607-16431673
  hypo
tgagtgtatgaagagagtgccgcgcatcttctgtcatacctgcgcgtttacagacaggtctgggtc

SEQ ID NO: 274918 - DNA, 409 bp, Homo sapiens
  chr20:16510876-16511285
  hypo
tcccagtgattgcccggcactcacaccctgtcgtgtgcgatccttgcccttgactatgggctggacctggtgagtcacttctaatgactacaacacaaacacacccaagtgatggtctgtcacttcccaggcgggctttcaagactgtgacttctgtcttgctggctctctcttctgccctctctgtttgagccctggcagtgtgaaaagtcagggacgacagagtgaggacccctgtggacagacccagccagcaggaaacaggggcccgctagcagcacgccagacagcctggcagggcacgctccccaagcccgcaccgggacatgatgatgagagatgactgggaagccgtctggcaccctgactgcagcgctaggggagagccggagtcagaggaccctgctca

SEQ ID NO: 274919 - DNA, 208 bp, Homo sapiens; identical to SEQ ID NO: 219855
  chr20:16543130-16543338
  hypo

SEQ ID NO: 274920 - DNA, 35 bp, Homo sapiens
  chr20:16554698-16554733
  hypo
aagggagttaaaggcgaacacaactggtatttttt

SEQ ID NO: 274921 - DNA, 275 bp, Homo sapiens
  chr20:16555033-16555308
  hypo
tatcttaaggcttagggcctctggtagaagtgagctccacctcccttcctgtgtagaaggtaaatgcattcattcattcagtgaatcgagcatgcatgaaatcgtttgcgcacacccagaagcccacctgcgagccacaggagcagccattccaggaagccaagctataatgggagacgcaaggaatggaggcggaactcctgtttttaagtcctagctccaacactagccttgtcagcctgtaattctgaattactgggcgcctctgaggcttc

SEQ ID NO: 274922 - DNA, 207 bp, Homo sapiens
  chr20:16955527-16955734
  hypo
accccctgccgcctcggccccctccagactttggttgctgacgagtgccgggggaaagccaaggtgggactgagggcagctacctgctggcttgcaggtgacccttggcgctagcagcctgggcgccacggacagcggcaggaggcaggaaaactcctgggtggaaggggacgggtccccggtgagcccccaccttcaagccaggga

SEQ ID NO: 274923 - DNA, 38 bp, Homo sapiens
  chr20:17460141-17460179
  hypo
ttaaccacacaagaatcatacggccgggcgcggtggct

SEQ ID NO: 274924 - DNA, 266 bp, Homo sapiens; identical to SEQ ID NO: 219857
  chr20:17481118-17481384
  hypo

SEQ ID NO: 274925 - DNA, 384 bp, Homo sapiens
  chr20:17489362-17489746
  hypo
caggccagagcagagcgcttggccacccactcagaaaaccccgtttctgccaggaacataggatatgttcagcgtgtgacagctcctcaagctgcatgcgtgtgcctgcgcgtaacacctccatgaaacatgtgggaagccccaatgcacacgcggcagactcgagcgtacctgtgcctgcagctccactctctgcgcctgcaggtgggagagcacctcccggccctcctccagctgactccgcagggcggccacctcccgctccgtcaggagcttctcctgcacagagaaggccagagtcagactcatgggacatgcagagaggaaaagggcagagaaggtgcggggccctggtatggacggaatatccgtgtccccctgaat

SEQ ID NO: 274926 - DNA, 42 bp, Homo sapiens
  chr20:17512774-17512816
  hypo
ggcctgtaataggtggttcacgcctgtaatcctagcactttg

SEQ ID NO: 274927 - DNA, 64 bp, Homo sapiens
  chr20:17625935-17625999
  hypo
gagtgttctcggagcggcattctcataaatctttattaaaactttctaacgtaattccattcta

SEQ ID NO: 274928 - DNA, 383 bp, Homo sapiens
  chr20:17674235-17674618
  hypo
aaattaatgagctccgtctttggcatgggctagaaaattccactgtggcattggcagggtttatgcagaatcagaactttaaagcaaccctgcgctgaatgctgcgaggaacaaaggtaaggcagattggtctgacttccttgctcacggtggggaagagacggcggggaaaggaggcaaggacaaatcacctggctaggagaggtgtgtccagtgggaggaggtgctttcccgaattctgaattcttttcggaacgtgtctctgcaggcagcacaatgccctccttattcccgcatcttcacaccacggtggctgacttggagcctgatgggcagtggcaagcgttcagatctatggccgacgggcacgtcttggacggatt

SEQ ID NO: 274929 - DNA, 42 bp, Homo sapiens
  chr20:17971881-17971923
  hypo
tgtaagtgcataaaagaaagcgtcctcggctgggcgcagtgg

SEQ ID NO: 274930 - DNA, 36 bp, Homo sapiens
  chr20:17987479-17987515
  hypo
ggtgtgagccaccgcgcctggccatggatacttata

SEQ ID NO: 274931 - DNA, 36 bp, Homo sapiens
  chr20:18041677-18041713
  hypo
acaaacctgcacatgtacccccgaatctaaaattaa

SEQ ID NO: 274932 - DNA, 107 bp, Homo sapiens
  chr20:18122802-18122909
  hypo
gggaccacctgttcgggatgttactgaaatctgtttcttacgtttttagaggcttcgtgacggagttatcagagacattgagaggcaaattcggaaaaaagaaaaca

SEQ ID NO: 274933 - DNA, 311 bp, Homo sapiens
  chr20:18233318-18233629
  hypo
tatcttctcagacacgcaaagtcccaggttttgttttccgagtcttggcgtccccagccaaagttcctgggtactggctgccacccatgggagaggggaacacccaccagctccaccccataggacattgctagggccttagtcacctagaaaagccctccacgtatttgcctggttaatgcaacaatagaagggttacgccccagcaactttggtctcctcactcggtcacctcaagaaagcctcatcaaacctttgccatgaaagcacaatgccagaaacgcggctgcgtgcctggcttagccatactt

SEQ ID NO: 274934 - DNA, 155 bp, Homo sapiens
  chr20:18489632-18489787
  hypo
gggattacaggcgtgagccaccgcgcccggccgccagtgccttttaataaagaacgttttgagagagagacggttatttaatgaaatctgctgacatacttgctgagagttgtgatagaacttgctttcattccgactttagttatccctttgct

SEQ ID NO: 274935 - DNA, 72 bp, Homo sapiens; identical to SEQ ID NO: 219863
  chr20:18724827-18724899
  hypo

SEQ ID NO: 274936 - DNA, 33 bp, Homo sapiens
  chr20:19182182-19182215
  hypo
gccaccgcgcccggccctttagtaataactctt

SEQ ID NO: 274937 - DNA, 44 bp, Homo sapiens
  chr20:19207656-19207700
  hypo
aaaaggcatgcccatcgtaaaggctcacacgtactatcatgtaa

SEQ ID NO: 274938 - DNA, 90 bp, Homo sapiens
  chr20:19264552-19264642
  hypo
tccagctactccctgcagagcgagtctgtcagcaggccacaccgcaggtagctcaggtctaaacagaccgtcatctagacaggaggcttc

SEQ ID NO: 274939 - DNA, 184 bp, Homo sapiens
  chr20:19497029-19497213
  hypo
attccattctagttatttatcgctgtgaagcgagctccccacattcagtggcatgcctggtcaccatgttgttttgttcttgggttgtttgtgttgagtgctcagaaggagcacagtgggaatgctgctccacggaatccagggcctcagatggaccgactccgatggctgtggctagaccagt

SEQ ID NO: 274940 - DNA, 199 bp, Homo sapiens
  chr20:19565476-19565675
  hypo
gccccaggtcccatcggtcctactctcgctgaagccccagtctttgcttctcagggcttggactctcgggtgtcacagtcacctctcttccgagatggaatcccaactcacctgtgctttgtctttgctcctctgtagcgcctgcacctcagtgaagatgtggctggggccacattcatggcagcgggaagttcggccc

SEQ ID NO: 274941 - DNA, 220 bp, Homo sapiens
  chr20:19673882-19674102
  hypo
ggcctttttcatttttccagcgggtaaactggaaacagtgaaatgggcgttcacctggccgctgagtttcgtcttatacttcactgtacccaactgcaacaagccgcgctgggagaaatggttcatggtgacgtttgcttcctccacgctgtggatcgcagccttctcctacatgatggtgtggatggtgagtgcaatcgggaccccatggcactgttaa

SEQ ID NO: 274942 - DNA, 245 bp, Homo sapiens
  chr20:19999397-19999642
  hypo
gttctgagtgcccacgtaataatccagttaatcctcacgattctttgaggtgctgtcacccccattttgtgtatgagtaaaccaaggcatggcaagcacaagtgaattggcccaggtgagaatgagtaaagcgaggaacttcatccaaggatattggctctggagcagtggttctgaaagacttggtgcctgtggtcaggggaccatgttagaaacgcacattccgtttgcgatccactgctctg

SEQ ID NO: 274943 - DNA, 33 bp, Homo sapiens
  chr20:20367698-20367731
  hypo
caagaagtgggaaccggccgggcgcggtggctc

SEQ ID NO: 274944 - DNA, 172 bp, Homo sapiens; identical to SEQ ID NO: 219865
  chr20:20372436-20372608
  hypo

SEQ ID NO: 274945 - DNA, 691 bp, Homo sapiens
  chr20:20376599-20377290
  hypo
aactgctcgccttccgcctgtgagcctgggaggtggtgcagcccaggccacacgggacagggttttcagacagccttgccaaggcggctgccatccatcagagcgctctgggcagggcctggaccccagacccaggacagaaaggcaggctggggaggtcacacctgccatggccagcctatcctctgggtcctagaccgcagcccattcctaggtctccaccctctgcgctcccgcagcttttgtccgcttttccttccccagctgttccattcagcagcccccgccacaacctgccctccccgcatggaggtctcagaggcctccattaaggctggcggtcaaaggccggcccagcacgtgccgtgtcttatcggcccatctcaagaccctgctccttcaggcctgggcaacaaaaaagggggcggccccagcgcccgctggctccctgcagccccacacacaaaagggcaggcgacaaagacattttccgggatggcaggtgttggtgtcggattcctccccgagtgcacgggcagaagaaaggcaaggctgggcttccccgggcagcgcagacatgcaggggcaggagtgtgggcagggcccccggggaggggaaggcccaggagggcgaggagcactgatgcagggtccgctaccgagggcagccgattagaaaagtcccaccccc

SEQ ID NO: 274946 - DNA, 168 bp, Homo sapiens
  chr20:20378095-20378263
  hypo
ccatcctatttcctacggcggggtttccttggcaaatgcatcctctttctgcgtcaggcagtagcttctcctgaactctcagcccccacaactctcctgaattctgtgtcagtagacgaccatcagatctggacaaaggacatttatcagtgacgtggaccattgtct

SEQ ID NO: 274947 - DNA, 222 bp, Homo sapiens; identical to SEQ ID NO: 219868
  chr20:20392201-20392423
  hypo

SEQ ID NO: 274948 - DNA, 119 bp, Homo sapiens; identical to SEQ ID NO: 219869
  chr20:20392662-20392781
  hypo

SEQ ID NO: 274949 - DNA, 220 bp, Homo sapiens
  chr20:20394640-20394860
  hypo
acggctcggccctccgtgcatggccccagcaagccgctggtccggggaacagcaggacgttaggcctgagtggccgtctggcgaacaggcactctgacactaagctggcacgtgctggcccagcaggggctgagcgaggcgtgacaaattactcaaagagctgagctaaacttatggctgacaaccacctgagcctttggaccgccgtggcccgctgtca

SEQ ID NO: 274950 - DNA, 269 bp, Homo sapiens; identical to SEQ ID NO: 219870
  chr20:20421239-20421508
  hypo

SEQ ID NO: 274951 - DNA, 283 bp, Homo sapiens; identical to SEQ ID NO: 219871
  chr20:20435758-20436041
  hypo

SEQ ID NO: 274952 - DNA, 32 bp, Homo sapiens; identical to SEQ ID NO: 219872
  chr20:21115585-21115617
  hypo

SEQ ID NO: 274953 - DNA, 164 bp, Homo sapiens
  chr20:21213373-21213537
  hypo
ttgaatattggcagcggtgcattcgagacaaagacagctaacaaaattgcttcggaagctagtttttcatctagtgaaggaagtcctttgtcaaggtaaagttgtgaaagcctttctgaatagcagcaacaagatgagaaatgtcacagcgcaatgaattaaac

SEQ ID NO: 274954 - DNA, 154 bp, Homo sapiens; identical to SEQ ID NO: 219873
  chr20:21371533-21371687
  hypo

SEQ ID NO: 274955 - DNA, 192 bp, Homo sapiens; identical to SEQ ID NO: 219874
  chr20:21555354-21555546
  hypo

SEQ ID NO: 274956 - DNA, 35 bp, Homo sapiens
  chr20:22324533-22324568
  hypo
gtccccgcacgcccacgttccgcatgggacctgac

SEQ ID NO: 274957 - DNA, 31 bp, Homo sapiens
  chr20:22876830-22876861
  hypo
ttttttttgaggtagagtctcgctctatcgc

SEQ ID NO: 274958 - DNA, 31 bp, Homo sapiens
  chr20:22877101-22877132
  hypo
gaaccaccgcgcccagccacaacacagattt

SEQ ID NO: 274959 - DNA, 299 bp, Homo sapiens
  chr20:23015050-23015349
  hypo
gggtaattccaggccggaacccctttctttcccgacctctcgaccacagtcctccccaggcacattttagtggccagggatggagacccgcggataatgactgaaccaggtcacagggtgaaggttctgagatgtccggctcccgtagcttctgccagttcccgagggagctagcacaggcttggccttctttggtggcatctctgcctccacctgtccgtctccattccttgtgcccatagcacctcagctgctcggacacagaagttaaaaggtccggcatctgcacttgtccagag

SEQ ID NO: 274960 - DNA, 301 bp, Homo sapiens
  chr20:23016426-23016727
  hypo
gtggcctcgtcggccgccctgcgccactggcccttcggctccgtgctgtgccgcgcggtgctcagcgtcgacggcctcaacatgttcaccagcgtcttctgtctcaccgtgctcagcgtggaccgctacgtggccgtggtgcaccctctgcgcgcggcgacctaccggcggcccagcgtggccaagctcatcaacctgggcgtgtggctggcatccctgttggtcactctccccatcgccatcttcgcagacaccagaccggctcgcggcggccaggccgtggcctgcaacctgcagtggc

SEQ ID NO: 274961 - DNA, 123 bp, Homo sapiens
  chr20:23016803-23016926
  hypo
cctgtgctacctgctcatcgtgggcaagatgcgcgccgtggccctgcgcgctggctggcagcagcgcaggcgctcggagaagaaaatcaccaggctggtgctgatggtcgtggtcgtctttgt

SEQ ID NO: 274962 - DNA, 244 bp, Homo sapiens
  chr20:23092302-23092546
  hypo
ctctgagctcggggcgaaccaaagatgggagaggagcatcagtgcccccctccccatcaccacattagaatcctgcgggaactggctgggttctcgaaggcgttgttatcgccctgtgctcacacataaggaccctgagacccagggccactagggtgaggcgacagggcagggcctgatgcacctgtcgaaatccacttctagctcccaccctgcccccagagacatgcgccccatgggccgg

SEQ ID NO: 274963 - DNA, 245 bp, Homo sapiens
  chr20:23117579-23117824
  hypo
cagcagcagctgtggcctctcgcgggcaggcgggaaaccgacaccgttcactggtaggtattctgctggttaggcgtgagtcagcgcctggcccagattccaccctggaggggctgcaccagggcgtgaactctcggggcgtggctccccaaccctctttagaaacattaccttgaacaccatagctcagagcagtaatcaccagtccactgaggcagcagaggggcctacggctgggactgtgg

SEQ ID NO: 274964 - DNA, 166 bp, Homo sapiens
  chr20:23137428-23137594
  hypo
gagaggatagccaaagacatcgaggcacaggcgaggttgaggagcttcgacagtggccctgaaaggtgtatggagaccacgtttcaggactttggccacagtggaatcccccgactgtttttggggactgtggtcagggtgacccggctgtggcacatagtgccca

SEQ ID NO: 274965 - DNA, 135 bp, Homo sapiens
  chr20:23138481-23138616
  hypo
agtgtcttctgagtcttccaagggttgggcaattttccctccggtcatggagctgagccgatttcactgtgctctgattctctaaatactgctactcacgtagggcaattctgttcaacacggtgagctgggccg

SEQ ID NO: 274966 - DNA, 42 bp, Homo sapiens
  chr20:23283473-23283515
  hypo
aagtagtgtgtacagtgtggcgatgatggagaggttgaagga

SEQ ID NO: 274967 - DNA, 91 bp, Homo sapiens
  chr20:23336930-23337021
  hypo
gtagggtacagggcgtgcgtccccacctacactagcctggttgcaggcggcctccaagggcacagcgggaagctccgcccttgccatgccc

SEQ ID NO: 274968 - DNA, 155 bp, Homo sapiens
  chr20:23337306-23337461
  hypo
gctgaggagtataatcagcacgcagtgcgagttcttatagtggccacgtccacaaaccctgtgttgtggaagaacagaaggcgttctgctttctgtgtttcaccgtctctccctcgctttaacttccaggtcccggagtagtggtgacagcaagg

SEQ ID NO: 274969 - DNA, 383 bp, Homo sapiens
  chr20:23346218-23346601
  hypo
atgagggcggcggcgagcggcaccgctgcggccagtgcggcaagggcctgagttccaagacagcgctgcggctgcacgagcgcacacacacgggagaccggccctacggctgcaccgagtgcggcgccaggttctcgcagccgtccgcgctcaagacgcacatgaggtacgcggggagccgtccggaggggtccctgcgcactggaagggtgtgtcaagcactgaggtcgtcctgggatttgatgtctcactgcttaatttctccgctccaaacctgggggcttatttcgagacagcgtttagttctctgtcaaggtacaggggctgcgagtgatggctctgctcccttgttctgagacccctggggcgcccctgctggccgg

SEQ ID NO: 274970 - DNA, 157 bp, Homo sapiens
  chr20:23380018-23380175
  hypo
ctgccttgttccttccaccacgtgaggacatagcaagaaggcgccatcgtggaaggtgagaacagtcctcaccaaatacgggatctgctggcaccttgatcttaaacgacccagcctccagaactctgaacaatacgttcattttctttataaatta

SEQ ID NO: 274971 - DNA, 42 bp, Homo sapiens
  chr20:23426501-23426543
  hypo
caaaggcaaaaggtgcatggcgctaggtcaggagaaaaccag

SEQ ID NO: 274972 - DNA, 89 bp, Homo sapiens
  chr20:23669395-23669484
  hypo
gcacctgcagcgggcgtctgtagtactcatcttcggtggccttgttgtactcgctgatggcgaagtgaagggcacgctgtacccactca

SEQ ID NO: 274973 - DNA, 120 bp, Homo sapiens
  chr20:23969312-23969432
  hypo
tccctcaggtttaaaaggcgcgttgcccggcagcagaagaaactgctggcttcgcctttggccgagttggcggctggacgaggacgcagagcccagctctcgagagttcaagcaaccgac

SEQ ID NO: 274974 - DNA, 240 bp, Homo sapiens
  chr20:24188722-24188962
  hypo
tgcgcgtgcgtgtgtgtgtaatctcccatgtgtgtgcacgcacgtgtgtgtaatctcctgtgtgtgtgcccgtgcgtgtgtgtaatctcccgtgtgtgcgtgcgtgtgtgtgcaatcgcctgtgtgtgtgcatgcgtgtgtgtgtaatctcgtgtgtgtgcgtgcttgcgtgtgtaatctcctgtgtgtgcgtgtaatttcctgtgtgtgtaatctcctgtgtgtgtgtgcgtgcatgtg

SEQ ID NO: 274975 - DNA, 258 bp, Homo sapiens
  chr20:24189022-24189280
  hypo
tgtgtgcgcgcaagtgtgtgtaatctcctgtgtgtgcccgtgcgtgtgtgtaatctcccgtgtgtgcatgcgtgtgtgtgtgtaatctcgtgtgtgtgcgtgcgtgcgtgtaatctcctgtgtgcgtgcgtgtgtgtttgtgtgtgtaatctcctgtgtgtgcgtgtaatttcctgtgtgtgtaatctcctgtgtgtgtgtgcgtgcatgtgtgtaatctcctgtgtgtgtgtgcgcgtgcatgtgtgtgtgtaatct

SEQ ID NO: 274976 - DNA, 76 bp, Homo sapiens
  chr20:24236950-24237026
  hypo
cccaccttcaggtagaaagacgcaggaggcctcagcctgtagggagctgtgcggcggtggtcactgggggtgactg

SEQ ID NO: 274977 - DNA, 35 bp, Homo sapiens
  chr20:24467578-24467613
  hypo
cgccgtgcgcagccgagagtgtgcatttctaacaa

SEQ ID NO: 274978 - DNA, 43 bp, Homo sapiens
  chr20:24484894-24484937
  hypo
ggagagcagttttatgctttgcggactttcattggtgtggcta

SEQ ID NO: 274979 - DNA, 216 bp, Homo sapiens
  chr20:24523924-24524140
  hypo
cagcaggagtgagccgatgcagcagctgctggaccccaacaccctgcagcagtcagtggagtcccgctaccggcccaacatcatcctctattcagagggcgtgctgcgctcctggggggacggtgtggccgccgactgctgcgagaccaccttcatcgaggaccggtcgcccaccaaagacagcctcgagtacccggatgggaagttcattgacct

SEQ ID NO: 274980 - DNA, 230 bp, Homo sapiens
  chr20:24570954-24571184
  hypo
ggtaggggtaactaacaaggcggggccaacaggggcagaccccgagactctttaggctgtgaccgagcggggcttccactttgggataagaagcctcgggggtttgagcggaggagaagcccctgtggccacatgctcccgggagccttcagagaacagggcggagggggaggcgcagggcgacgacggcagtggtcaaacgcagaaccgtggagtcctgtgctgcagga

SEQ ID NO: 274981 - DNA, 177 bp, Homo sapiens
  chr20:24646765-24646942
  hypo
tcaggatgtcaagccacctccggaacgtgtctacactccacagctaccccgcagcaatacgcactcttgggacctcgctgatctaggatggggaggcaggccaccgcccctcccaagactcctcaagaaagagccccgcggttgctccggaaactcgaggcactgcagctatgggca

SEQ ID NO: 274982 - DNA, 406 bp, Homo sapiens
  chr20:24944573-24944979
  hypo
ttctccggaaggcaccgctgtcgctgagttctaggacgaggctgtaccgcggcacaaacttcatcaccgtctcttgactaaagagctagagggaagcacagtgcagggaaagttcaccagctggccaagaacactgtgcgcagatcaaccgtgccgcccccaccatccaggaacggtctgactccttcccatgacagggcagccccacagggcagtgccccacaggacagctaatccagctcccactcccagcccaggggccccaaagcaggccccaccccacccctgtccctgtgaagatcaggccaaagaggctccccagcacaaggacagcaacgcaagcacatctctggatggcctggctgaactgagagagacatatcacatccgacgtggtcacagcact

SEQ ID NO: 274983 - DNA, 173 bp, Homo sapiens; identical to SEQ ID NO: 219888
  chr20:24947029-24947202
  hypo

SEQ ID NO: 274984 - DNA, 37 bp, Homo sapiens; identical to SEQ ID NO: 219889
  chr20:24950217-24950254
  hypo

SEQ ID NO: 274985 - DNA, 109 bp, Homo sapiens
  chr20:24997316-24997425
  hypo
gagatgccccgcagcgctggtggacacgctgggagactgcgacagcctgcacccagccacggggctgtgaccacacaagccagggtaatccccacggcaaagcaggtcc

SEQ ID NO: 274986 - DNA, 239 bp, Homo sapiens
  chr20:25000500-25000739
  hypo
ctttctaccagatccggtctggcattgcgtgaattcacacatacaaagccgggcagcttcatgactgaagtcctgctgaagcccgtattggctctgagggtctagggcaagcacaacctctcctgctgcagggcaggccgctcacctgaccccagggtccgcagggaggagcgatcatacttcttcacccaggcatcaccgtatttcagcaacagccggacagccgttggggcgccata

SEQ ID NO: 274987 - DNA, 465 bp, Homo sapiens
  chr20:25012785-25013250
  hypo
catgtcgtccaccacgttgcctatgtctatggtgtgcgcatgcccttcctctctggccactctggggcctatcaccaggttcacccaccactcagggcgcatcatctctctgggcaagctgattggctcagggccgacacgtgacccaacctggtccagtcagagtcaaccatactcaactccgggaaaactgggagcaggcgagagccgccaacttgccggccatgcggtgcgaagtggaggaagtggaagcgatcccaaggttgtctttcctttcggcgcctcatccctctgaatctggacctggcaattgcattaaccactttcccactcttgctgtactgactttaattaattatttgcaataaaaagagctaacacagaacgaagaatgaggggaagccaaggccctttctctctgggcggggcagaccaccagcccgcgacccctgccctctgcagggg

SEQ ID NO: 274988 - DNA, 281 bp, Homo sapiens
  chr20:25028526-25028807
  hypo
caggcaggctagaccggcttttactgtgtttcattctgcttgcgttcacatttacttttcctggataagagagcacttgcaaagccaaaatgcactccctgagactcagacggcccctccctgacagccagactcagcacacaggactgggctgggcgcctccctcgcaccttgaacattcgagggcacagtacctgtaggtgatcctcacttccgttccaggctcatcgcgctcccagatcaaagcaacgctctcgggggacttccgaacatgctggtcc

SEQ ID NO: 274989 - DNA, 55 bp, Homo sapiens
  chr20:25030308-25030363
  hypo
aattactgcaagagcctccacggagacagcgcccgcaccaccagcatctcccatt

SEQ ID NO: 274990 - DNA, 51 bp, Homo sapiens
  chr20:25039530-25039581
  hypo
ccagttgctgcagcatctgtagcctgagttcaaactctgtgaccttgagca

SEQ ID NO: 274991 - DNA, 212 bp, Homo sapiens
  chr20:25040600-25040812
  hypo
ctcttccttcccacgcctgcaccgcctgcacatgatggtgtgctgctctgtccagaggaggaccctggctggctggattgctttggccagtacagcctggtgggagggatgctgtgacagttccatgtggaggtcctgagagaccccgtagccccagcttatcctcccatggaacccagctgcgagctgtgaggaagcggggctggccttcc

SEQ ID NO: 274992 - DNA, 488 bp, Homo sapiens
  chr20:25187625-25188113
  hypo
tttgtccctgggcctggggacgtctgactctccttggatcctagcaccctaacgtgcttttcctgcctctccccccttcccaccagcagccgcagcacggtccttggcaaacaaggatgagaaaaatatccaaccacgggagcctgcgggtggcgaaggtggcataccccctggggctgtgtgtgggcgtgttcatctatgttgcctacatcaagtggcaccgggccaccgccacccaggccttcttcagcatcaccagggcagccccgggggcccggtggggtcagcaggcccacagccccctggggacagctgcagacgggcacgaggtcttctacgggatcatgtttgatgcaggaagcactggcacccgagtacacgtcttccagttcacccggccccccagaggtacccgcctctcatggcagggctctcgggatctcctcccctgtgctacagtgttggccgggtcccctgccacagactca

SEQ ID NO: 274993 - DNA, 127 bp, Homo sapiens
  chr20:25202580-25202707
  hypo
agccagacagtgaagctcatcgggaaagccttccaagagaaataacacggggcggggatctgagagggcgatcgcagctgtaactaggacagccaaggacggcctcgtggggtaacatgggatctaa

SEQ ID NO: 274994 - DNA, 230 bp, Homo sapiens
  chr20:25223054-25223284
  hypo
tctgtgttcatttgcaaacacgaaattgaccagcacagatctgccagtggcgttgctgggatcccagagagattttccctccgcacctgcggtctcaagggccggcggtgcttctgagtcactcatttcaccagcgatcaatgagacactcttcaggtcctcaagaagcttaagcctagccgaccaaaaatgtctgttttccacaccccgcttctaagtcccacagcatc

SEQ ID NO: 274995 - DNA, 195 bp, Homo sapiens
  chr20:25230760-25230955
  hypo
aggcgtgagccaacgcacccgacccgcaacatcatttttattgtctaagtggcggatggcaaggacatagctctgccttcacattcaagggcatttccttggagctggaccaggactcagctctacaccttagggtgcccattggagtatttatgtataatcacatcctggagaggccagcgatgggctcaggga

SEQ ID NO: 274996 - DNA, 331 bp, Homo sapiens
  chr20:25231671-25232002
  hypo
ttgtggtacatagcgaaagagtagaagttggggtgttcagaggaagatttgtcaagctttgccatgcttggcaaatcagcacgtcaaaacatctggctaacatggagagctttgtgcttggcaagaggtggcggttggtcatgaagacatttaatggattctctgaagtggtggcaaggtggcaaggagagtccaacctgaagctgcagagcctgggattgcgctgcatggagaagaaagggtgtgcgtgattccacgctccttttcatcctggcctttccattcggtctgtgcaactgtgggcttgggcggatttctttgccattattgg

SEQ ID NO: 274997 - DNA, 79 bp, Homo sapiens
  chr20:25236291-25236370
  hypo
gggacaggaggggaccggtttcagaccagatctgcctgtagaatgaggctcttcatcttggtgaaagcagccgcccaac

SEQ ID NO: 274998 - DNA, 103 bp, Homo sapiens
  chr20:25240119-25240222
  hypo
aaggaatgggttggcggggctgctctctgtttttgagagtagaaagtaagaatcgaacggaccgcaagcgtggggttgaattgggatgcgaaggtgtggaggt

SEQ ID NO: 274999 - DNA, 177 bp, Homo sapiens
  chr20:25251531-25251708
  hypo
ggcccctggtactgcggtgtttgcacaggtggacattgatttgtatgcagccagctgccactgctgtgccggcttcactcaggagtagggtgaggcttgatgtgttgatgtgtccctgctgtcagaacagcctgggtttcagtggaacgtgcaagggattggcgaggcctcagcctc

SEQ ID NO: 275000 - DNA, 224 bp, Homo sapiens
  chr20:25254265-25254489
  hypo
cgaatctgcagggccgcttttagtgtgggggttggtttcatgtagttactcgtctctagtgccactgggcacagattctgggaataagcttcttcttggaagccctcccggaacagcttgtcttcctgggtgcatccagggcgtcctcactgccagctgccaacttggccccagcacttgcggatttgcagtgtcactttctttcttttttaattttaatttaa

SEQ ID NO: 275001 - DNA, 43 bp, Homo sapiens
  chr20:25254609-25254652
  hypo
gagtgctgggactgtaggcgtgagcctccgcctggccagtgtg

SEQ ID NO: 275002 - DNA, 196 bp, Homo sapiens
  chr20:25255135-25255331
  hypo
tgatctcgaccgcacggtctgctgggtccaggacagggcggtggcctgggacatctgcgctgagggtgccctcacagctggcttctttccaggtagaggaggccgatgactggctgcgctacggcaacccctgggagaaagcgcggcctgagtatatgcttcccgtgcacttctacggacgcgtggagcacacccc

SEQ ID NO: 275003 - DNA, 33 bp, Homo sapiens; identical to SEQ ID NO: 219893
  chr20:25278858-25278891
  hypo

SEQ ID NO: 275004 - DNA, 33 bp, Homo sapiens; identical to SEQ ID NO: 219894
  chr20:25284746-25284779
  hypo

SEQ ID NO: 275005 - DNA, 163 bp, Homo sapiens
  chr20:25290092-25290255
  hypo
agagtggccccagatgtacacggggttgtcaccacttcttgctttgatccagtcaaaaacgtggagtgcgtcataggtcatgccccgctcagatggcgttcccactgagtcaccccaacctgggagggagaaacggcaggacggggaggtcaaaggcagctca

SEQ ID NO: 275006 - DNA, 170 bp, Homo sapiens
  chr20:25300608-25300778
  hypo
ctgcttcatgtaaacgtcacctaaactccgccttccctcaaccccttcagaactctgcctttcccttcgttcttgggaggctctccctcattgcagtgggtcagtacacccaattttgtgggaccgcaggttgctcctgctggtttccggcagaccgggccaggacattc

SEQ ID NO: 275007 - DNA, 189 bp, Homo sapiens
  chr20:25310088-25310277
  hypo
tccaccctccagtcacgtcatcatgtaccagcaaccacaaacatcaacgggcaggatggagaatggatcctgcacacatgggtgccgtggagggtgaagaagtgagaatgtgagtgaatggaaaacgacctgctctgtcatacttcttttagctcacctgcaaaatatttgttgcgggaaaggctgaaa

SEQ ID NO: 275008 - DNA, 272 bp, Homo sapiens
  chr20:25320327-25320599
  hypo
aacctcgtatcaggaaagagcggcctcctcaggcctcccgatccgtcttctgtgagacaactgcaggcaggcgtaggttacttattagctcctggtaggaagcacgtagaccaaggacatcaacagaacctgcctgaccaggtcctcagagagcaggaggctaagaactggcacggtgtgtccttgcatttacgcgtgggcgagcccctctgtacccacccaacagaggacccttttccaggcccgtcaagccaggtcgccagcccagggtc

SEQ ID NO: 275009 - DNA, 47 bp, Homo sapiens
  chr20:25322420-25322467
  hypo
agaaagactcaggacgttatcctgagagaaaacgaaaagcccattaa

SEQ ID NO: 275010 - DNA, 102 bp, Homo sapiens
  chr20:25344142-25344244
  hypo
gcacctggctgacatttacttttcattataatgttggttgatgagatggatgcctttaatcaatatttaattttaagggggcaggcacggtggctcattcct

SEQ ID NO: 275011 - DNA, 199 bp, Homo sapiens
  chr20:25377963-25378162
  hypo
ataaaggtaacatgcgagtaagggcggcagtattttggtgcagaagcatgtgagacacttgagcttgctgaaacacagaaccaatcagcttgtctgctttctcattacctagagatagtggcccaggaagttgtgtgtgaaagtgaatatgagaaatatgaaaaagagcttcaggagagcgaatagcttgttgaagtct

SEQ ID NO: 275012 - DNA, 131 bp, Homo sapiens
  chr20:25434107-25434238
  hypo
ggcaatcctactgacgagtttgttgagagcgcgaactttttcttccaagaggcggctttgtttctcggcgcctcgctgcttctcctcggtggcctgaagtgctctcaccaggtgggcgttctccacgtaca

SEQ ID NO: 275013 - DNA, 172 bp, Homo sapiens
  chr20:25459745-25459917
  hypo
gcacgctgacctcgcgcctgcgagcctgctccatgtccttcctctccttctcaaagttccttttcagtgccgcaatttccctttcgtagtaatttacctaaaacgagaaacatgagccccgtggaccaggagaccctaagaatgatcttgctgctgacgtaacacagaaaca

SEQ ID NO: 275014 - DNA, 166 bp, Homo sapiens
  chr20:25470595-25470761
  hypo
atctccttctgtaggcgactgttttcctaggagacacaggccagtggctcatcaggctcctgcaggacggaggggatgtgtgcaggatggaggtgagaggcttgcttctcataggactgggcatcaggaaagaacccccacccaccgcaggcgaggcacctggtgc

SEQ ID NO: 275015 - DNA, 38 bp, Homo sapiens; identical to SEQ ID NO: 219897
  chr20:25605596-25605634
  hypo

SEQ ID NO: 275016 - DNA, 38 bp, Homo sapiens
  chr20:25605874-25605912
  hypo
caggcgtgagccaccgcgcctggctaagggtgattttt

SEQ ID NO: 275017 - DNA, 196 bp, Homo sapiens; identical to SEQ ID NO: 219898
  chr20:25971830-25972026
  hypo

SEQ ID NO: 275018 - DNA, 218 bp, Homo sapiens
  chr20:25972702-25972920
  hypo
cggagagcagaacacggcagcttcaggggctgcctgggggtgagtgttaccgtgccactgccctatgtctttttgcgtttgtgtgtgtgcgtaagtctctctcttatttctctctctcctttctcggtctttcgctctgtgaccgtctgtgtgtgcgtgtgtgtgttgggacacatgtgccctgtgtgccagagggcggtatcttgtacgtcagcctt

SEQ ID NO: 275019 - DNA, 35 bp, Homo sapiens
  chr20:26062267-26062302
  hypo
gaaggtgatggggttcgcagcgccaggggacccag

SEQ ID NO: 275020 - DNA, 156 bp, Homo sapiens
  chr20:29873906-29874062
  hypo
ccctgtcctccactcgtacaccgttgagtttccccgcttctgcacgaaccacagcattggcaacacctgctctgtggggctatcacacacaaaccccacagaggcctggtacacttcgatggcttcccccagggactgctgcgccgctgccccagt

SEQ ID NO: 275021 - DNA, 180 bp, Homo sapiens; identical to SEQ ID NO: 219899
  chr20:30134131-30134311
  hypo

SEQ ID NO: 275022 - DNA, 154 bp, Homo sapiens; identical to SEQ ID NO: 219900
  chr20:30139496-30139650
  hypo

SEQ ID NO: 275023 - DNA, 139 bp, Homo sapiens
  chr20:30153940-30154079
  hypo
ttggggtgctgggcacggccctgaggcagtgccgtgcccagcatggcttcaccagcctgtgtcctctcatagcctgccctcctatacctggtccccgcctgcatcggttttcctgtcctggtggcgctggccaagggag

SEQ ID NO: 275024 - DNA, 35 bp, Homo sapiens
  chr20:30174477-30174512
  hypo
aaagggatttttttttgagacggagtctcaccctg

SEQ ID NO: 275025 - DNA, 77 bp, Homo sapiens
  chr20:30181219-30181296
  hypo
gtcatagtatttgaggagtacagctctgaagcggcctgaggtgagggtgcagctggaggcgccgccccctggtgact

SEQ ID NO: 275026 - DNA, 81 bp, Homo sapiens
  chr20:30297085-30297166
  hypo
ctgtctgggtggttcttacccgtctggcctgctcgtgtgtgtgtgtgcgcgcgtgcacgcgtgtgtaactagcctgatctt

SEQ ID NO: 275027 - DNA, 39 bp, Homo sapiens
  chr20:30306171-30306210
  hypo
gccggggccaggcacggtggttcatgcctgtaatcccag

SEQ ID NO: 275028 - DNA, 35 bp, Homo sapiens; identical to SEQ ID NO: 219903
  chr20:30334935-30334970
  hypo

SEQ ID NO: 275029 - DNA, 41 bp, Homo sapiens; identical to SEQ ID NO: 219904
  chr20:30468561-30468602
  hypo

SEQ ID NO: 275030 - DNA, 35 bp, Homo sapiens
  chr20:30521657-30521692
  hypo
gaaggtgaggaagccgggctcggctatgcacgggt

SEQ ID NO: 275031 - DNA, 779 bp, Homo sapiens
  chr20:30584445-30585224
  hypo
gcattgccgcccgcggcctggccttcgcgctcttcgccagcgtctacaagctctattttggcatcttcatcgtggcccactggtgcgtcatgaccttctgggtcatccaaggggagacggacttctgcatgtccaagtgggaggagatcatctacaacatggtcgtgggcatcatctacatcttctgctggttcaacgtcaaggagggccgcagccgccgccgcatgaccctctaccactgcatcgtcctgctggagaacgccgcgctcaccggcttctggtactccagccgcaacttctcaaccgacttctactcgctcatcatggtctgcgtagtggcctccagctttgcgctgggcatattcttcatgtgtgtctactactgtctcctgcaccccaatgggcccatgctgggtccccaggcacctggttgcatcttccgtaaggcctcagagccctgtggcccacccgctgacgccatcacgagtccccccaggtccctgccaaggactacaggtgctgagcgggatggggcctcggcgggagagcgtgcagggacccccaccccacctgtcttccaggtgcggcctggcttgcctcccacaccagtggcccgcaccttgcggacagaggggcctgtcatccggattgacttgcctcgcaagaagtacccggcctgggatgctcattttattgaccgccggctccggaagaccatcctggcactggagtactcctcacctgccacgccccggttgcagtaccggagtgtggggact

SEQ ID NO: 275032 - DNA, 40 bp, Homo sapiens; identical to SEQ ID NO: 219907
  chr20:30713763-30713803
  hypo

SEQ ID NO: 275033 - DNA, 188 bp, Homo sapiens; identical to SEQ ID NO: 219908
  chr20:30720874-30721062
  hypo

SEQ ID NO: 275034 - DNA, 100 bp, Homo sapiens
  chr20:30753240-30753340
  hypo
agactgattggagtggaccacggccaagcttgctccgtcctcggacaggaagccaccctgcgtgggggactgcaggcacgcaaaataaaataactcctgc

SEQ ID NO: 275035 - DNA, 330 bp, Homo sapiens
  chr20:30770377-30770707
  hypo
tctgtagtaggagtcgggaatgggctccgggacatttattgcctcaattccaagactgcctggaaaagggcggtactgccttgggcagtagagagttcctatcgctagagatacaaaccccagaagggccttcagcaggcatctgatgccttcatacatgctgtcgcctcgcccaccaggaagaccctcctgaacctcaaagatgtgacacatgcattcattcatttcacaaagaactacttgtgccaggtgctgctctaggtaagggggatttagcaatgaataaaacaaagtgcctctgggtgtggcggctcacgcctgtaatcccag

SEQ ID NO: 275036 - DNA, 270 bp, Homo sapiens
  chr20:30772697-30772967
  hypo
tacgttaaccacgccgcacattttcccatccagtgccttcgctcatgttgttcgctctgccaggaattcccttctctggctccactttccaaactactgcctattctttaacacccagctcgtgacccaacttcagagaagtctccgccctctggtcccacatcatcacatacctggtgaactataagccacgttgaacacagttgggttttgtctccttggatgaccgttggataccagttacacctcttgccccggtgtaattattag

SEQ ID NO: 275037 - DNA, 289 bp, Homo sapiens
  chr20:30810304-30810593
  hypo
ctcattggctagtacgagggcacatgggccatacctagctgcaagaagtacttagaaatgtctgtctttctttttctttcccccacctcgcccggggtatgtttggctgataagaagtgtctttattttaggctgccacgtatccagctgaaaactgggttcgagggaaagaggataagaggtatttcttctttaccacgtgatttctgaggatccttccagctctgctcgttctgagcctgtgaatagcctggcacagctctaattcagctgacgcttactgcacatt

SEQ ID NO: 275038 - DNA, 147 bp, Homo sapiens
  chr20:30864850-30864997
  hypo
gagccaccgcacctggccgcatgatctgttttaaataattactctggccaccttatggaaaatggattgttcggacagagctggacaaaagaatggaaacagaccagatatttcaggcaggctagagatgagcgtggcctggccttg

SEQ ID NO: 275039 - DNA, 171 bp, Homo sapiens
  chr20:30915287-30915458
  hypo
ctgtcagtgtcttccgagtgctggttccacaggactccagccagggctttaacactgcagttcatttccaggaaccagcagatgatgaagcggccagtctcagccgtgggatataagagaccattgagccagcacgcaagaatgtccatgatgattcgtccagaggcccga

SEQ ID NO: 275040 - DNA, 37 bp, Homo sapiens; identical to SEQ ID NO: 219909
  chr20:30935781-30935818
  hypo

SEQ ID NO: 275041 - DNA, 50 bp, Homo sapiens
  chr20:30996046-30996096
  hypo
ttctatgtacggttcgaggtagtcattcaggtttgcgtttttacgtgttt

SEQ ID NO: 275042 - DNA, 357 bp, Homo sapiens
  chr20:31051294-31051651
  hypo
ctccccactgtggcaaagggcgactccttcatctgggcaggacccggagcccaccacctgtgcccagaatgcctacgggcagggaaggactgccgtgtccgtctatttgaacatggggcaatgtgctgctattcaaatggaggaattagtgatgaatgggggaaattgttcctccctctgtcccgtctccagaaggagacaaaaaccccttttacctcagcaaacaatgcccttatgtgggcgccagtgccccgcagcccgcacaagcccagctctgtgcgaaccaccaatcgccacaccgcgctctggggcccacagccagtggcaccctctcccggtgggcgactcccaccagct

SEQ ID NO: 275043 - DNA, 64 bp, Homo sapiens
  chr20:31081013-31081077
  hypo
tgtgagactaacttacgttcactcggtccaaggaagccatgcagggaaacgggcaggttaccaa

SEQ ID NO: 275044 - DNA, 193 bp, Homo sapiens
  chr20:31108566-31108759
  hypo
tcttagatggcccccgccctagccctccagcacgccacccctgctacctttgggttccaggccattggagttaaagtgcatcctcttctgacactccgtacagctcatcaggaaccgggtcacggcctctctcgggaggaaggcataggtctctgcgatctggaggagagaagagcttcgcttgttatatgga

SEQ ID NO: 275045 - DNA, 155 bp, Homo sapiens
  chr20:31115684-31115839
  hypo
atgccctctggctccgacaggccatctgccccctgcgacagggtggacaagctgtgttagtgtcaggaatgatggcggggtgagaactgggccctgaggccggggcaaggggtcaggacgggcaatgcctccgacagtgggtcttggggtgggga

SEQ ID NO: 275046 - DNA, 88 bp, Homo sapiens; identical to SEQ ID NO: 219923
  chr20:31115869-31115957
  hypo

SEQ ID NO: 275047 - DNA, 358 bp, Homo sapiens
  chr20:31144446-31144804
  hypo
tccaggcatatcagcgaaggcatctggtgacacaagtgtcctcagccccaggggaaactgctctacctcctccattcattccactgggcaggtcgggtctgagccgaggtgggcctggcagaggtcctgggcctctgccactgagagcacgtgacctgcccaaggccacacaaccggttaacagtggagccagagctggacgtgccggagccacagtgcctcgccacacggccaccttgctccttctgcaccagcgacgtgactatgcaggaggcagcttgtgtgatattgatcgagctcctgatgcaaagcagggtgggaaatcctaggaatcaggtagacccgattttaaatccag

SEQ ID NO: 275048 - DNA, 56 bp, Homo sapiens; identical to SEQ ID NO: 219924
  chr20:31146689-31146745
  hypo

SEQ ID NO: 275049 - DNA, 425 bp, Homo sapiens
  chr20:31151693-31152118
  hypo
cctaagcgtatcctcggcagccacctgctaattagccaggcggctcctgcctgctcagtggctgctttggagcaattctcccaggaaaggccgagcttgcaggagcaggaaaggtaattgctaatttgcacgagaggagacaaagggacaaaggcgcccttggctgcccggtgcagcctgagccagcttcacatccagagctccctgccacttgccatccaccacggcgggccccaggatgtctgtctgtccccatgacacatccacacagtctctgttcggtgtaggccacccggccgcgccccaggaaggccagaagagaccattaacgtggccctgtcatccttcagagcactgcaggggaggtgtacagggagctaacgattgaaaaagcggatgattcccacgaacgttccagcatcttc

SEQ ID NO: 275050 - DNA, 106 bp, Homo sapiens
  chr20:31196057-31196163
  hypo
aggcccctggagacccggcctcagccccctcccctgtctcttcctcccctgcagatctgcccccatctccctggaggtggcctgttctccacgccaccctcacagg

SEQ ID NO: 275051 - DNA, 347 bp, Homo sapiens
  chr20:31213874-31214221
  hypo
tcacccccacagcgcgggttccgcctcagtcctgtgtctcctacctcattctcacccagcccacgcccagacgcacttgtgggatcaggggattaacacccaccttctcagtaggctgcgagcttcccacttcccagcatgcctgtggtgactagcgcccacccggagcgccccaggagaccagagccaaaagggaccttggtgagcatcgaggtccgcccccacgtgttgtaacaacaataataaaaaataatatttccaacaacaacagcagcagctaacactgcccacgtgccaggcgtttcgccttccgtgcagtttcctcgaatccacgcaacaaccccata

SEQ ID NO: 275052 - DNA, 31 bp, Homo sapiens
  chr20:31279910-31279941
  hypo
gtgctgggattacaggcgtgagccaccacgc

SEQ ID NO: 275053 - DNA, 35 bp, Homo sapiens; identical to SEQ ID NO: 219925
  chr20:31332339-31332374
  hypo

SEQ ID NO: 275054 - DNA, 34 bp, Homo sapiens
  chr20:31332614-31332648
  hypo
agagcgaaactccgtctcaaagaaaaaacaaaaa

SEQ ID NO: 275055 - DNA, 180 bp, Homo sapiens
  chr20:31334705-31334885
  hypo
ccaccgcgcccggcctttttccagtctttttccacatcgcaggtcactggggttgtgtgatttgttttcgttttacatacacaggactctcgcatttcaccaagttatttaataatccctcatactccacgtgtggttccttggaccagcagtgcaggcgttacctggaagcttgttaga

SEQ ID NO: 275056 - DNA, 68 bp, Homo sapiens; identical to SEQ ID NO: 219927
  chr20:31367769-31367837
  hypo

SEQ ID NO: 275057 - DNA, 59 bp, Homo sapiens
  chr20:31392269-31392328
  hypo
gtaggcacggttcccgttctcatgtctgagttgtttggccttgacgttcctaacacagg

SEQ ID NO: 275058 - DNA, 88 bp, Homo sapiens
  chr20:31556103-31556191
  hypo
catccgtaagttgccggtgtctgtggggtgcccgttttaaccaactaggcgactgcatcccacataggggttttttttgagacggagt

SEQ ID NO: 275059 - DNA, 305 bp, Homo sapiens
  chr20:31647792-31648097
  hypo
caagcgctgcagcacgctcctgggccacatcagcctgttctcagggtgagtctgcaggttccagcctgcaaccctgacccgctcaggatcatctcgcacccatctgggcatctcccaggtctccctggagctgccagctgcgggggcctgaactcgtcctacccctgcttgtcccgccggtttcaacccacttcacagaccgacagattgagtcccaccactgacagggactccggcttaatccatagcttgtgccacccactcctgggcaattcctctagtctggttcacgggatcctgccgtc

SEQ ID NO: 275060 - DNA, 81 bp, Homo sapiens; identical to SEQ ID NO: 219928
  chr20:31900463-31900544
  hypo

SEQ ID NO: 275061 - DNA, 253 bp, Homo sapiens
  chr20:31936115-31936368
  hypo
acctggagactgtgcggagagactgcccatcccctccctgctgggccccagggctcacccagactcccacaggtgctgaaacctcaatccgctttaacaggagccaggaaatgggaaatctgggccccgccatcatccccttgaccagacttgttctctccaaactccttttgttcactcactccctgagtctcacctcctgcattagacaatgaggaattctttcctccaagaaccccgcagagggtgaggg

SEQ ID NO: 275062 - DNA, 37 bp, Homo sapiens; identical to SEQ ID NO: 219929
  chr20:32151830-32151867
  hypo

SEQ ID NO: 275063 - DNA, 173 bp, Homo sapiens
  chr20:32250055-32250228
  hypo
ggtgaggtcagcccgtgaggtcacaatgttgccagggcccagggggcagagcagacggagtgtgggccatcgtccccagtggtgaccagccctgccatgggaaactatagttcccacaaaaggaccaaagcacccaagcaggcccgcaaggagaggccggctgacatggacaa

SEQ ID NO: 275064 - DNA, 258 bp, Homo sapiens
  chr20:32266840-32267098
  hypo
agcatgatgactggcgcgaaggcgagagggggaaaataaaacaagaataaaatatctatgccagacagatctcaccgagggcatgagaagccaggatagtggtgacctggcggtgtgaggggttggcaatgactggaaaggggcacaagagaaccttctagggtgttgaaaatgctcttatcttgatctgaatggtggcaacccagatgaataaatatataaagctgcgcggggcgcagtggctcatgcctgtaatcc

SEQ ID NO: 275065 - DNA, 42 bp, Homo sapiens
  chr20:32270661-32270703
  hypo
agcaaaacactgtcacagggcgatatatttatatgatccctt

SEQ ID NO: 275066 - DNA, 210 bp, Homo sapiens
  chr20:32284902-32285112
  hypo
acaaattgtggtgacgtgggcttcgttttgagaggttgagtacagcatggtgttctggtttaggagagagccacgttcaaagtctgattcttatacaccccaaatgcactcatggagaggtaaaagtgaacaatgtggaaggaaacactgtcactagaatcccttctgcagcttcagtgtggaaggctgcagcggcgagcatcaaacaag

SEQ ID NO: 275067 - DNA, 316 bp, Homo sapiens
  chr20:32301637-32301953
  hypo
cattaaacactagaccgcaacccgttttctgagaagtgccttgagggaagagctacgggagatgacaggaaggtgaagatgcttcagcgagagacaagagatcagggagctttgaggaggaagtgatcctcagagaactggtctggattgccaggagggaagtaaaggtggagtgcgagccaaaggcactcctggcgggggtgctgcgtgagcagatgtgtgcaggtggagctatacacatggcatgtgcatggaatggcagcgagttctgtgtgccaagggcacgccagggtggacacaacgggggtcagctgag

SEQ ID NO: 275068 - DNA, 100 bp, Homo sapiens; identical to SEQ ID NO: 219932
  chr20:32311064-32311164
  hypo

SEQ ID NO: 275069 - DNA, 248 bp, Homo sapiens
  chr20:32332873-32333121
  hypo
ggcctcttcccactactctgcgggtatgaccccagatgacgaggatgtatttctctgcgggaagtgtaagaagcaattcaactcgctgccagcgtttatgacccacaagcgggaacagtgccaggggaatgcccccgccctggccacagtctcactggccaccaacagcatctacccaccttcggcagcacccacagcggtccagcaggccccaactcctgccaatcgccaggtatttgttcatttat

SEQ ID NO: 275070 - DNA, 164 bp, Homo sapiens; identical to SEQ ID NO: 219933
  chr20:32370539-32370703
  hypo

SEQ ID NO: 275071 - DNA, 200 bp, Homo sapiens; identical to SEQ ID NO: 219934
  chr20:32376690-32376890
  hypo

SEQ ID NO: 275072 - DNA, 968 bp, Homo sapiens
  chr20:32378463-32379431
  hypo
gtgggtggcctcaggcgtcacggcccctccctgagcctgagatgacctggcaaagcgagccaaggtgcagagagtgagcagctgttccaggcagaggagaatggcaagtacaaaggcgcagagggaggagccagcgtggcatctctgaggagagcgagtgtggctggcgcagagagtggctggaagaaggcagacgacgagggtggagagagctggggccagatcacacaggtgctggtggggaaagagcctggattttattcccagcgcagggcactgttgcggggtgaaggtctggatgcttctcactgactttcccttgccctccaggcatgaagctccacaaatgcgccctgtgcagcaagtccttcagccgccgtgcccacctcgccgagcatcagcgcgcccacacgggcaactacaagttccgctgtgctggctgcgccaagggcttttcccgccacaaatacctcaaagatcaccgctgtcgtctcggcccccaaaaggacaaggacctgcaaacccggcggcccccccagaggagggcagccccccgcagttgcggcagtggtgggcgcaaggtgctgacccccttgcctgacccgctggggctggaggagctgaaggacacaggggctgggctggtgcccgaggctgtccccggcaagccgcccttcgcagagccggacgcggtgctgtccatcgttgtgggtggtgcggtgggcgcggaaactgagctggtggtacctggacacgctgaggggctgggctccaacctggctctggcggagctgcaggctggggccgagggcccatgtgccatgctcgctgtgcccgtctacatccaggcctccgagtgacggacctgaggtgtctgtttcctgggcaggcctgatgctcctgtttgggtccagggcccctgggggcagaccggtgatccttaccagtggaagcgagccatcgagcca

SEQ ID NO: 275073 - DNA, 35 bp, Homo sapiens; identical to SEQ ID NO: 219937
  chr20:32381768-32381803
  hypo

SEQ ID NO: 275074 - DNA, 214 bp, Homo sapiens; identical to SEQ ID NO: 219938
  chr20:32413015-32413229
  hypo

SEQ ID NO: 275075 - DNA, 255 bp, Homo sapiens; identical to SEQ ID NO: 219939
  chr20:32436253-32436508
  hypo

SEQ ID NO: 275076 - DNA, 223 bp, Homo sapiens; identical to SEQ ID NO: 219940
  chr20:32441362-32441585
  hypo

SEQ ID NO: 275077 - DNA, 110 bp, Homo sapiens
  chr20:32450378-32450488
  hypo
cccggctggcttgtgtttatttaaggaatggaagcgttcactcaagccagacttcaggggcaaatgtacattgggaatctccaagggacatctcccaaactacctgacca

SEQ ID NO: 275078 - DNA, 31 bp, Homo sapiens; identical to SEQ ID NO: 219941
  chr20:32584928-32584959
  hypo

SEQ ID NO: 275079 - DNA, 35 bp, Homo sapiens
  chr20:32630021-32630056
  hypo
acaaagacgatccccgctcccgccgaggcagctgc

SEQ ID NO: 275080 - DNA, 99 bp, Homo sapiens
  chr20:32669099-32669198
  hypo
ttccaggcctggcacgtactcctcctgctcctactttctctacctgggaaatagccgctcaggacgaagctgctgctgtggtgtcgccacctctgagaa

SEQ ID NO: 275081 - DNA, 294 bp, Homo sapiens
  chr20:32677610-32677904
  hypo
acatctagaatgacaagtttcgcactgtaggaaatagagtcgtgtgtccttctgcaggattgtgtccggtgatcggcatgtgtgacaagtgacatattcctctgcaaataaagcaacacacagaattacctggtggctgcagtgaggtagagaagtttctgccttcttaaatacatctacaaagaactccacaagcccaggctgagaatttagctgggcacccagaccagggaagcgcagctattcgaggggtaagaaaacacaagctgtctgctgtggcgcttccggcactaa

SEQ ID NO: 275082 - DNA, 41 bp, Homo sapiens
  chr20:32768414-32768455
  hypo
caggtttagaaaacttcaatcgaaatattttctgggccgtg

SEQ ID NO: 275083 - DNA, 42 bp, Homo sapiens
  chr20:32772602-32772644
  hypo
aaagttatatgaacaaagcccggtatatagaaaagatagtgc

SEQ ID NO: 275084 - DNA, 60 bp, Homo sapiens
  chr20:32772952-32773012
  hypo
gctcagctttggtttcttctcggttcttttggtcagtccggatcttgctcatcaacaatt

SEQ ID NO: 275085 - DNA, 92 bp, Homo sapiens
  chr20:32950143-32950235
  hypo
gggaggatttgaatccggtcagtgtaactctcaagtgtacattttttttcttttattttctttttaaccacgccctttaatgtacattgtta

SEQ ID NO: 275086 - DNA, 100 bp, Homo sapiens; identical to SEQ ID NO: 219944
  chr20:33085651-33085751
  hypo

SEQ ID NO: 275087 - DNA, 139 bp, Homo sapiens; identical to SEQ ID NO: 219945
  chr20:33112448-33112587
  hypo

SEQ ID NO: 275088 - DNA, 243 bp, Homo sapiens
  chr20:33131628-33131871
  hypo
gtgagcagggccggcgtttcagggaagtggcagcttctcgggaggtgccgcagctgccatctcccgtcagcactcatgcctccgcctcagccctggccacggctccctggaattctgatcctcctctgtgagctggtattgctgtttctccaaaaattaaaaatgctcaaaggattataggttttctcctctttcgtatgtttggctctgagacactgcatgttggcacgtttttcattgaga

SEQ ID NO: 275089 - DNA, 244 bp, Homo sapiens
  chr20:33134796-33135040
  hypo
gggctggcgtcctgcgcacagtggaaggactggccttaggaacagggacagtgattccactcagcatagccagggagcggcccagatggcagggcaaggtctctgtggagtgagggcagcagggaaggtgcctcgcaggagaggagagaaaacatacacttccctggggacgcgggcggggagtttgacgggttcggcaggtggcccttttgcagcatctttttcagccgggggtgcagcagtc

SEQ ID NO: 275090 - DNA, 155 bp, Homo sapiens; identical to SEQ ID NO: 219946
  chr20:33183817-33183972
  hypo

SEQ ID NO: 275091 - DNA, 89 bp, Homo sapiens
  chr20:33265773-33265862
  hypo
tgtttttaaagagtgttaaatgtgtattttttaaaaaatttattctggcagttgtttgttaaacgccaactattttccaggcactatgt

SEQ ID NO: 275092 - DNA, 121 bp, Homo sapiens
  chr20:33265892-33266013
  hypo
gactgatttattagctagttcaacaagtcgcttaacccttgtgtgctgaaaaatgtgctgattataggctaactagggacagttgaggaaggcttagaaattttttttttgttttggaaac

SEQ ID NO: 275093 - DNA, 42 bp, Homo sapiens
  chr20:33410314-33410356
  hypo
gacacacccatctccgtgtccttatagcgtttaataactctt

SEQ ID NO: 275094 - DNA, 134 bp, Homo sapiens
  chr20:33447337-33447471
  hypo
gccgatgcagcaacgagccaggtagtggcgggcggcccgatggcaggaacgtctcccggaagcgctcggacatgttgggtggcagctgttcagccagggcacgggctaggggcagggacgggaggctgggcagg

SEQ ID NO: 275095 - DNA, 31 bp, Homo sapiens
  chr20:33464795-33464826
  hypo
gagggttccatgggagctggggagttccctg

SEQ ID NO: 275096 - DNA, 76 bp, Homo sapiens
  chr20:33544843-33544919
  hypo
gagaccctgtcctaaaaacaaaacaaacgagcagcgaaggcatataattctgagggttgctcggcttgttttacag

SEQ ID NO: 275097 - DNA, 78 bp, Homo sapiens
  chr20:33547578-33547656
  hypo
tttcctcactttcaaagtgaaatctgttttttcctaacaataactaccctttattgatctggtcgctaagtgtcaggt

SEQ ID NO: 275098 - DNA, 194 bp, Homo sapiens
  chr20:33572633-33572827
  hypo
ccccctcacccccaccgccccagggcacccttgaggatcaaatcatcgaggccaaccctgccatggaggcctttggcaacgccaagaccctgaggaatgataactcctcccgctttgtgagtggctgaggtgggaggggtggcggggatgccgtaggccaccagcggcaggtcgggcacaggtggggacagtgc

SEQ ID NO: 275099 - DNA, 80 bp, Homo sapiens
  chr20:33579658-33579738
  hypo
taacagtctggcctggagatcgttccttatccccaggcgtatgcctgccatcgtcatccgtttttcttggctgtgaaaca

SEQ ID NO: 275100 - DNA, 34 bp, Homo sapiens
  chr20:33696514-33696548
  hypo
cgacagagacttcgtctcaaaaaacaaacaaaca

SEQ ID NO: 275101 - DNA, 81 bp, Homo sapiens
  chr20:33803020-33803101
  hypo
ctccattttctgccaattaaaacttcacacagtcttccattgcttgtaacttttgaacacgtgtgtggtaatgttctgtgt

SEQ ID NO: 275102 - DNA, 194 bp, Homo sapiens
  chr20:33834616-33834810
  hypo
atctttttctttcccgtgtctttcagaactggttaaagtcctatggctatctgcttccctatgactcacgggcatctgcgctgcactcagcgaaggccttgcagtcggcagtctccactatgcagcagttttacgggatcccggtcaccggtgtgttggatcagacaacgatcgagtaagatttccataggaca

SEQ ID NO: 275103 - DNA, 228 bp, Homo sapiens
  chr20:33854997-33855225
  hypo
ctctctccaggacccccagccgagcctctggagcccacaaggccactccctacactccccgtccgcaggatccactcaccatcggagaggaaacacgagcgccagcccaggccccctcggccgcccctcggggaccggccatccacaccaggcaccaaacccaacatctgtgacggcaacttcaacacagtggccctcttccggggcgagatgtttgtctttaaggta

SEQ ID NO: 275104 - DNA, 117 bp, Homo sapiens
  chr20:33864189-33864306
  hypo
ctgtccactcacatgaaactcgtgttaggccctgggaggccgacggtaactctcaccgtgccctcagatgaagcacagagaggttgttacttgcccgggccatccagtgggctggct

SEQ ID NO: 275105 - DNA, 111 bp, Homo sapiens
  chr20:33876236-33876347
  hypo
cccccttgcctcctcgtgcctgctcacctgtaactgcccgccaccacttgctcacagtcaatgaggacgaacttctccagggcctgccccgtgaagcggcggccagccttg

SEQ ID NO: 275106 - DNA, 649 bp, Homo sapiens
  chr20:33879776-33880425
  hypo
cttcagagagcaggctgaggcggtctggcccggaggcctcctgcccctgagcctcgctgagctcagggcccccgcgcacatggctggtcatgtagtccacatccagggcgctcaggaagggcagctcccgctcctcggagatgacccgcaggtaggcagcctcaccccgctccaggagggcgtcggccgccagccgagccgcctcgctgtgccgcagcaccagcggtgagctctcccgccaccacggcagcttcagctcttccacccggccccgcaggggtcccgccatgccctgggctcccaggaccccaggccccgggcctccgaacatgcctgccacgcggctgcctcacccgccggcagggcccatggcccgcacgctgggctggctgcagcaggaagaggagaccagcagaaccgccttctgcccgcccgctcgctgtgtgtgtggcagggcccccaaactgttgccaccctaaatcagagccacgctccaccctattgcccctggcctctggaacctgtcaggtcagccccacctgtctgcctgtgttgggactcgcctgcccagggaagcggcagtgccaggccctcggtgcacactcctgcctccctctcttcctcccagcaacgccgccccatccccacc

SEQ ID NO: 275107 - DNA, 41 bp, Homo sapiens
  chr20:34041981-34042022
  hypo
atttatacacaaggccgggcgcggtggctcacgcctgtaat

SEQ ID NO: 275108 - DNA, 191 bp, Homo sapiens; identical to SEQ ID NO: 219950
  chr20:34055202-34055393
  hypo

SEQ ID NO: 275109 - DNA, 49 bp, Homo sapiens
  chr20:34092136-34092185
  hypo
agagcagcatctcctcgagcaggcagaattgagccgcagtctggaggcc

SEQ ID NO: 275110 - DNA, 43 bp, Homo sapiens
  chr20:34110881-34110924
  hypo
ctgtaggggttcaacggtactgtcgaagcgtctgtcaaaccag

SEQ ID NO: 275111 - DNA, 273 bp, Homo sapiens
  chr20:34147085-34147358
  hypo
ctggcctctgcccacgggcacccaccgtgaggatgtacacattgccacccatgtctgtgaactccaggtcttctggccggcccttcctcctcctctgctttcgcttcttcttgccagcctgagcctcctgcgcctcccgctccacgtcctctgcctccttcagcttcactaccggccaccagcccctcaggcggcggcagcgaaacagattgcacctcggcccggccccattgcgggccagctgcacagagcagagctcggggccccgggccc

SEQ ID NO: 275112 - DNA, 366 bp, Homo sapiens
  chr20:34147940-34148306
  hypo
gcactgcaggctgccggaactccgcctcctccagggcaaagggtccagacctgcgccagacgctcacctcccgctccgtgggcaggtagtcaaagcggaacacaaagcgccaattgaagttcccctccccagtcagggagttgaagtgaacgtctgtctcctgcttgtcatgctccaaccccttcacccagctggggccggggtgggtgagcgtcagggctggagctacatggagaacccactcctcaccccgctctcagcaccacggagggcctggggtcggggctctggactcagcccgagggcccacacccatttgcaatccccctagtgcaccgccgttgccccgcccggccagcagcctac

SEQ ID NO: 275113 - DNA, 96 bp, Homo sapiens
  chr20:34166313-34166409
  hypo
ggattacaggcgtgagccaccgcgcctggccccttctactttaatgtggctactacaaaagttaaaattacgtatgtggctcgtgttatgtctttt

SEQ ID NO: 275114 - DNA, 171 bp, Homo sapiens
  chr20:34171852-34172023
  hypo
tgcactcaccgtcccggtgtaggctggagggcagcccggctgagggctcgggcagcaaatccgggggcagctcagaggtgcaggccttggcttgcttgcccaggcccagccgcaggaagagctccagcttggcacagacctcaccaggggctgccccgggtgcctgtgtgt

SEQ ID NO: 275115 - DNA, 36 bp, Homo sapiens; identical to SEQ ID NO: 219951
  chr20:34176526-34176562
  hypo

SEQ ID NO: 275116 - DNA, 73 bp, Homo sapiens
  chr20:34195358-34195431
  hypo
tcggtcgtgggtgccggtcagccctgttagtcgttgcacgcgttaccgtcagagccatggtcccagtggcact

SEQ ID NO: 275117 - DNA, 44 bp, Homo sapiens
  chr20:34195461-34195505
  hypo
ccaccagcccgcccacctgaatcgcctctgactcactggactca

SEQ ID NO: 275118 - DNA, 83 bp, Homo sapiens; identical to SEQ ID NO: 219952
  chr20:34200333-34200416
  hypo

SEQ ID NO: 275119 - DNA, 116 bp, Homo sapiens
  chr20:34312502-34312618
  hypo
gtactatgattggcacgcctaaaactcgttggccagttaatcctattgctagaggcactgagctaacatcgacgaactccacataagcaattcctttggaacgtcttgaatttctg

SEQ ID NO: 275120 - DNA, 40 bp, Homo sapiens
  chr20:34472079-34472119
  hypo
ttaacgtaagtaagcggaaatagggcgggaccatgaccat

SEQ ID NO: 275121 - DNA, 94 bp, Homo sapiens
  chr20:34655043-34655137
  hypo
ctgaaattgtggtccttggacgagcagtatctggaccacctgggaacttattaaaatacaaattctcaggtcaggagatcgagaccatcctggc

SEQ ID NO: 275122 - DNA, 86 bp, Homo sapiens; identical to SEQ ID NO: 219954
  chr20:34670678-34670764
  hypo

SEQ ID NO: 275123 - DNA, 82 bp, Homo sapiens; identical to SEQ ID NO: 219957
  chr20:35088673-35088755
  hypo

SEQ ID NO: 275124 - DNA, 186 bp, Homo sapiens
  chr20:35089002-35089188
  hypo
caagagttgggtctgcgtctggcagacctaccacaggtgcggcctggagagatgaggcccacaaggcagcgacaggacctggattcagtgaggagaggggactcgcggggtagaagccaggaactgggaaggcgaggaggcgtgaaggcaccacctactgccaacccggctcgagctggtcacttt

SEQ ID NO: 275125 - DNA, 36 bp, Homo sapiens
  chr20:35145389-35145425
  hypo
ctcacgcctgacctcgtgatccgcccgcctcggcct

SEQ ID NO: 275126 - DNA, 430 bp, Homo sapiens
  chr20:35155297-35155727
  hypo
ccagcgacaagcagcgccaggaggcccgcaagagactcctggcggccaagcgggcagcttctgtgcggcagaactcagccaccgagagcgcagacagcatcgagatttatgtcccggaggcccagaccaggctctgagaccatgcaggaggaaagaaacgattttaaatcattaaaaacacaaaaactaagtgcgaacggaacagagttttctcaacctttgctatggttattctgtctagagaccctgagccaactttcaaattgacgcatacaagggctcacaatttggcttttttgggtccctcccagctttaggttatgaagattttactcacaaaaaaaatcaacaaaaatcacgaaactagaaaactttttttttcctcttgctggccgtggtggactagatagatggacgtcggcaactcccg

SEQ ID NO: 275127 - DNA, 214 bp, Homo sapiens
  chr20:35168997-35169211
  hypo
gatccttgctgggtcgctcctcacaggtcccctgctcgtggactcggccccctctgcgctattttcaacacatcacccagaaggattccgtcaaaacccaagccaggtcgtcaccccctgctcggaaccctccgacaccccacatggcctacagggagccacagaggggtccctgctgcttctcagcccctccggctcccgcccccatcctcct

SEQ ID NO: 275128 - DNA, 128 bp, Homo sapiens; identical to SEQ ID NO: 219958
  chr20:35441117-35441245
  hypo

SEQ ID NO: 275129 - DNA, 83 bp, Homo sapiens; identical to SEQ ID NO: 219959
  chr20:35442203-35442286
  hypo

SEQ ID NO: 275130 - DNA, 876 bp, Homo sapiens
  chr20:35443720-35444596
  hypo
cttggtgtccctggggccctcgctgttgtcgggggcctcatgcagccggaagtcagcacactcgttgtccagacacagccggaggccagccgtgaagccattggcatcagccaccaggacatcgatggccttactgaccagggcggcctgctctctcagcccaggcagcacctcggcctccctggctctgcagagtcggaccgcatgggactcgtgtgtctcgcccaggggagcaggcacacactgggcagagtccccggcctcggcgtccgtctccagcatgggccgcgtactctggcaggaggcgaggtcacagcgctggaggttggagaggagcacgcggttctcgtactgcagcttcttgaccttgccgctgagctcgccgatctgcagcttggcggccgccagctcctcctgtgaaggttcgctgagcacagaacaactgtcctccgacagcgccacgtccagctcgtgctccgagcggaacttggccagctcgttcagcagcagcttgttctggtcctcgagctcggcagaggagcgccgcagcagctcggcctcctcttcgacaaactgcaggtgtcgccgcagctctgccaagctctccccgcactctccgccacccagcgcggagaaggccaggcgtgcctcaggacccccacagccacctccatgatccttcatgtcgtccatctcagcccgcaggcctcggttctccacctccagctccacgatgcggcggctcagcaggttggcttcctcctccaccagcttcaggtgcaccttcagctcggtctcccgcgagtggggggcatcggccagctcctcggctgacagcgcgctgtccaggtccccatagagcgagcggtacttcag

SEQ ID NO: 275131 - DNA, 84 bp, Homo sapiens
  chr20:35467712-35467796
  hypo
gtactgcaggatgcggcaggtcttgctggcctggtccagctgctgtcgcagctcctgcagctgatacacgtcctcctccatata

SEQ ID NO: 275132 - DNA, 42 bp, Homo sapiens
  chr20:35470832-35470874
  hypo
atacctactcttaatgtgaccgaatgatttaaataagattgt

SEQ ID NO: 275133 - DNA, 145 bp, Homo sapiens
  chr20:35506571-35506716
  hypo
tcatgcgttacctccggcaaattgcttcttctctcggggctttgctttcccttcttgtaaaatcatccagtgttgctagcacctccctctacactgggccaggaggttaaggaggtaaagaaagaggctaggacgggcgcggtgg

SEQ ID NO: 275134 - DNA, 97 bp, Homo sapiens; identical to SEQ ID NO: 219962
  chr20:35615275-35615372
  hypo

SEQ ID NO: 275135 - DNA, 163 bp, Homo sapiens
  chr20:35753148-35753311
  hypo
attttaataatatcccaaagtgattgtggtttgtgtgcatattaaatctgagaaggactagtgtacagggcatgaacaaacaagtcataaaagaaatacaaacggccaattaaaaacatatacaaggctgggtgtggtggctcacgtccgtaatcagcatttt

SEQ ID NO: 275136 - DNA, 36 bp, Homo sapiens; identical to SEQ ID NO: 219963
  chr20:35788336-35788372
  hypo

SEQ ID NO: 275137 - DNA, 136 bp, Homo sapiens; identical to SEQ ID NO: 219964
  chr20:35812619-35812755
  hypo

SEQ ID NO: 275138 - DNA, 87 bp, Homo sapiens; identical to SEQ ID NO: 219965
  chr20:35833168-35833255
  hypo

SEQ ID NO: 275139 - DNA, 93 bp, Homo sapiens
  chr20:35860693-35860786
  hypo
ggcagcacctgttccgcgagcctgagaagaggccccccaccgtggtgtccaatacattcactgccctgatcctctcgccgttgcttctgctct

SEQ ID NO: 275140 - DNA, 516 bp, Homo sapiens
  chr20:35874023-35874539
  hypo
gaaaaatagcactccgtcttaagtaggaccctccccggagtgggaagctcccagctcctctgcggggcaagtggagtctctccgacgccattcgtgccgtggttaatggtatggagcactggagttgttgctatggtggtttttcccctataattgcattcacctccaaaaccacaagtagcagcaggtcccagcagtcgttattttatttgaaaaactaattggaagttgaaagagccctcggcttttgcttttgtcaggataggccaaggaaagagatgagcaggtgggtctgggaggaaggagggggtcttggggcaggccgggcgcgcctcccattcacagccccttcctttgtgcctgcctctcttggttgaagtgggccacctgccctctaaggccagccttttcctccgagggggcttttgtctcccattgttctgattgtctcctccgtggagccgcctcagtggccccctgcagacggtttcccaggcttcacgttttttttctcag

SEQ ID NO: 275141 - DNA, 321 bp, Homo sapiens
  chr20:35907656-35907977
  hypo
tgctttttcacccacgtatgtgtcacctagcatagtgcctggtgcatagctgggactcgaaatatttgttgaacgtacaagaattcctgaattccaagggcttgccattaatatggtgttcttgccccgcggccagctttctcactcagcctgctgcacgtgttggatggggctgggtgttgagacttgtcccgcccatctctcggtggggaatcaggatcccatcaaggtaaatcagtgcctgaagatgtggctttggcttctgtcatttctgttaaatcctctccagccagctctgacccttgccgagctacattcctt

SEQ ID NO: 275142 - DNA, 279 bp, Homo sapiens
  chr20:35924130-35924409
  hypo
tggtggtgaagtatgcgagttgctgcctgtaaagtgctgttcgcaacacctggccgttcatttgccgactgctgctgctgctggaacaatggccagggaacaaaacctgtcacagccagtcgaaggggtgtctcctagttgagatctgcaggatgaataggacttgtttgactttggtcatcaggaaaggaaagcccagaaatactggcaggagggctgggaagtaaagcacagaggtgcagagagaactagatgagagccgtacggcgcacagtgtgt

SEQ ID NO: 275143 - DNA, 137 bp, Homo sapiens
  chr20:35925946-35926083
  hypo
gctctgtttacttacgaaggttgtttttattattcttcggttacttcatgttggaaacatggtgcaaagcagtgaagcagcagagccaaggtggcggcaggcctttttttttttttgagatggagtttcactcttgt

SEQ ID NO: 275144 - DNA, 93 bp, Homo sapiens; identical to SEQ ID NO: 219968
  chr20:35929626-35929719
  hypo

SEQ ID NO: 275145 - DNA, 102 bp, Homo sapiens
  chr20:35940186-35940288
  hypo
gcctgttgtcattgttttaggaaaatcgactctgaaaggaacgtaaagtaaactctgacgagcatggggaggtagaggcacgggcaggagagtctgtgggag

SEQ ID NO: 275146 - DNA, 282 bp, Homo sapiens
  chr20:35956277-35956559
  hypo
gaaagggcctctcctccccccgctgcggggcttggagcctgtgagttcacggaactggacagtggccgagctttcagagactgccgagtccaactcagttttgcagacgaggaaacctgggctttcacatttatggaaacggagccaggagcagggccgaggccatgtgaatacgacccatccccactgctggcgggcctgtgggccgaggccatcttagtacgacccatccccactgctggcaggcctgtggttcatcccgcatcactctaagcttcagcc

SEQ ID NO: 275147 - DNA, 150 bp, Homo sapiens
  chr20:35987182-35987332
  hypo
ctgggctgcaggccccgtccccagtgcacccctccatgtctgccggtgtccgccccggcctgccgtctccaccccagccccactggcagagccggtttgagtctactgtccctgagcatgttcgcgccgcggacacgggaccaggcatgt

SEQ ID NO: 275148 - DNA, 419 bp, Homo sapiens
  chr20:36151088-36151507
  hypo
gaagctggcatacacggtgtcgcggaccgggcggcaggtgttgggggagcgcaggcagcgagcccccaactgaggccccagctcccagccctgggcggccgtatcatcaggtgctcctgtgcatctcggccagcacgggagccagtgccgcgcaggaatgtggggtcccctgtgttccctcgccagaggagcacttggcaaggtcagtgaggggccagtagacccccggagaagcagtaccgacaatgacgaagataccagatcccttcccaacccctttgcaccggtcccactaaggggcagggtcgagagaggaggggggatagggggagcagacccctgagatctgggcataggcaccgcattctgatctggacaaagtcgggacagcaccatcccagccccgaagccagggccat

SEQ ID NO: 275149 - DNA, 154 bp, Homo sapiens
  chr20:36474778-36474932
  hypo
ttatcctggttctccgactgtgggcaaacagttgaactgccctatccttattttctttctggatggtgtttgttttgtgtttaaggtgtatgtcccagtttgtgtactttgagaagttatgtatgtagggatatggtgtcggtgaatgtattat

SEQ ID NO: 275150 - DNA, 32 bp, Homo sapiens
  chr20:36475443-36475475
  hypo
tattaaggaagatacggcgagtcaccctgcgc

SEQ ID NO: 275151 - DNA, 285 bp, Homo sapiens
  chr20:36493723-36494008
  hypo
actcacagttaatccggctggacatgaaaaggagcccaaagatccagggaagctgtacggaaggcatggcttcttttttattttttattattgtagtaataatttatcgttttgactattactaccatcactaccatctatccacaggcctttttttcatcttgcaaaactggaattgcccgttcctccctccccccagcccctggcagccactattctgcattctgtctctgtggctgcctgcatgggaagggtttccgcaggcagctacgcatgggcattgtt

SEQ ID NO: 275152 - DNA, 46 bp, Homo sapiens
  chr20:36498751-36498797
  hypo
gtcgaagtttgtgtcgggggactgcaccccccgacagcccctccct

SEQ ID NO: 275153 - DNA, 50 bp, Homo sapiens
  chr20:36532325-36532375
  hypo
cacctgcagacacactggtgcgcgcgcgcgcacacacacacaggcacaca

SEQ ID NO: 275154 - DNA, 208 bp, Homo sapiens
  chr20:36572548-36572756
  hypo
tcctgcatctgcccgaagcccctcccgccgcgcccgccccgccgccccccaagccaggcaaggagctgaggaagcgctcggtggaccaggaggcctgcagcctctagactgatgcccctgcccccgcccatccgcccccacgctgtacagagtgcatgaggagccgccggaccaccggggaccgactgcctgcgtccagccgcgcccc

SEQ ID NO: 275155 - DNA, 32 bp, Homo sapiens
  chr20:36666710-36666742
  hypo
ttttttttttttttttgagacggagtctctta

SEQ ID NO: 275156 - DNA, 205 bp, Homo sapiens
  chr20:36753455-36753660
  hypo
ccccgagaaggccccgcatagtgcctggcgcagagtgtgactcaaaaacattgattcctttttctccatccctttgaactttcagaacccttgagtattgtattttttttaaaattcacattgaagtatatcatgcatacaaacagagtgcgatcatgcatatgcggttgacacatcttcccatgttgaacgtgcttgtttaccc

SEQ ID NO: 275157 - DNA, 581 bp, Homo sapiens
  chr20:36760812-36761393
  hypo
ccacgaggagggcccgcaccttgatgaggttggactccgtaaggcagtcacggtatttctcatagaggatgcaaagaggaacgctcttctctgcagaaggggagaaaggagggtgctcatgatgcagaatcacccctcccaactctcttgcaactccaagaggcacagagaggggaaggaatgtgcttggggtcacacagcgggggaatggctgggcggatccctgaactccccactgtggctccagggttcccagcgaggagctggagagtggacactgagcagcgggtagaggacgcacttggactcccacgggccttggttctaatcctgcctttgcctcttctaatgggtgaccccgcgtgagccactccacctcccaggtcctcgatgtttggatctgcgtggcacaggcactcctaaggctgtgggaggatgagctgagcgagtgtcccggaagagcctggtgcgctcgggactcagggtgtgtgagccgcgggcccttcatcctggggaggatcagagccgacatctgcttgctgcaccaggcactgcacttcccacggcgggctcctacttca

SEQ ID NO: 275158 - DNA, 280 bp, Homo sapiens
  chr20:36764034-36764314
  hypo
ctgtctcggactctcggggcctggatgagcagcgagggccgggtcctttctacaccaccgaggtgtcagggacacaggaacccccgagcccagggctgacaccactgcctgggacagaaggtgttcaggaaaggtcccgggcttctcgcctccccacgcctcttagcactcgcactcagggaggagtgagggccccaccgtgtgctggtgctgctgtgccctttccagatacctcctgagcacgcatcctctccctcagtcctcacggctgcgggcgcat

SEQ ID NO: 275159 - DNA, 217 bp, Homo sapiens; identical to SEQ ID NO: 219973
  chr20:36765891-36766108
  hypo

SEQ ID NO: 275160 - DNA, 306 bp, Homo sapiens
  chr20:36766575-36766881
  hypo
cccattgtagctgacggtgcgggcacagagcaggaggcggcagacgtactcctcagcggtgttgttggtgatgtgggcaaagacgtcaaagtcactgcccatgttcatgctctggcccacacggatccgcatggccatccctgtctcctccttctcggccagtttgttcaggtggttcgcccttgtgaaggcctccctctcctctgaggaccctgtaggggttgagaagagagcctcaatcacagctggaatagatcacaggaagggggctgcaacagggcgagctgtcttcgcagaggcctgatg

SEQ ID NO: 275161 - DNA, 353 bp, Homo sapiens
  chr20:36767670-36768023
  hypo
tgaagatggagtatagcctacggggccattgctgtacgtaggctaccaattaaaacacacgcacacacatacacgagcctgccgggctgggaaaactggatgcttatcttcaaggctgcattaaagactctgagggcacataccctctgggtatttgtaggtgtgggtgatatcctcccgctcgtctcggcccacgctcttagtgctgatcttcagcccaacgatcagggaacggttgatggatttgtgcacagacccatcgtcctgctggatccagtctaccacgtcggcattgacctccgcaaagacaaagggcgcatcgtacttggtgctcaggtcgccctccttgatgg

SEQ ID NO: 275162 - DNA, 279 bp, Homo sapiens; identical to SEQ ID NO: 219976
  chr20:36770537-36770816
  hypo

SEQ ID NO: 275163 - DNA, 78 bp, Homo sapiens
  chr20:36774950-36775028
  hypo
tattggataaaggaccggagagggtggtcacaggctctaggccacatagcgcattgagagtgttggtggcagggggca

SEQ ID NO: 275164 - DNA, 160 bp, Homo sapiens
  chr20:36779359-36779519
  hypo
atgttcttgatgaacttggccgagccctggtagataaagccctgctgggtgaggacatactcctgccgctcctcttccgagtccaggtacacagcatccgctgcaggcaggaagaaagggacctcagctctgggtctgcggaggcccagggtccctgcaa

SEQ ID NO: 275165 - DNA, 189 bp, Homo sapiens
  chr20:36802859-36803048
  hypo
tgatctggttactgcgccgatggttttgtctttccagaatgtcataggcatgaaatcacgcagtatacagccttttgtgtctggcttccttcgcttaccgtaatgtatttgattcatccctgttgttgcaggtatcagcggttcattcctttttattactgagtactattctgtcgcatgaatatacca

SEQ ID NO: 275166 - DNA, 43 bp, Homo sapiens
  chr20:36990663-36990706
  hypo
gtcagggctgggcgcggtggctcacgcctttattttttgtttt

SEQ ID NO: 275167 - DNA, 120 bp, Homo sapiens; identical to SEQ ID NO: 219977
  chr20:37036241-37036361
  hypo

SEQ ID NO: 275168 - DNA, 49 bp, Homo sapiens; identical to SEQ ID NO: 219978
  chr20:37054866-37054915
  hypo

SEQ ID NO: 275169 - DNA, 43 bp, Homo sapiens; identical to SEQ ID NO: 219979
  chr20:37114343-37114386
  hypo

SEQ ID NO: 275170 - DNA, 177 bp, Homo sapiens
  chr20:37145084-37145261
  hypo
ttattagaaaacatccgaaggaaaagatgaacagatttgatgacaaataacaagcgaggaaaaattatttgcaacaaataaaatagccagagggttatcgtttctatgtaaatatttagattggtgcaaaagtaattgcggtttttgccattaaaagtaatgcggccaaaactgcag

SEQ ID NO: 275171 - DNA, 232 bp, Homo sapiens
  chr20:37536535-37536767
  hypo
agtcatccttgagccggaggacctccagcgcaggcagccgtgggtgagtccggggcagggcagccaggagtccctgtgtgtgctcctgcctgtggtgcctgggtgcagcctctaggacccactttgtcctctcaggaaggtggtgcggcgagccagcctgtcggacaggaccaacctgtataggaaggagtatgagggagaggccatcctgtggcagcggagtgcagctgag

SEQ ID NO: 275172 - DNA, 120 bp, Homo sapiens; identical to SEQ ID NO: 219984
  chr20:37540091-37540211
  hypo

SEQ ID NO: 275173 - DNA, 145 bp, Homo sapiens
  chr20:37549578-37549723
  hypo
gttctgagggaagccgcgtgctcctcaggagagagctgtttaggttttccgatctttttgctcaggggccaaacactgaaggcacgtactgcccaacccactgagcgcctgaggccattccctccttttccgcatgcctcctgcc

SEQ ID NO: 275174 - DNA, 120 bp, Homo sapiens
  chr20:37588339-37588459
  hypo
ctccatctaaaaaagaaaaaagattatgatccaataatacaggcatggccgatttactgtctcttcataaacaggaaggtttcattatatgagtaatagataaaatagataagttatttt

SEQ ID NO: 275175 - DNA, 147 bp, Homo sapiens; identical to SEQ ID NO: 219985
  chr20:37596755-37596902
  hypo

SEQ ID NO: 275176 - DNA, 85 bp, Homo sapiens
  chr20:37622329-37622414
  hypo
ttttttttttttttcacgttggctatttttcaagggctctatagccacaggtggctagtggcttatgcatcggacagtacaaata

SEQ ID NO: 275177 - DNA, 198 bp, Homo sapiens
  chr20:37632409-37632607
  hypo
gtgtcgatgctcatcgagcaggctcgagcactagctcgcactgggatgaagagacacctccgagttctccccatgtatgcaggactgccttcctttgagcaaatgaaagtgtttgaaagggtgtcacgcagtgtcagaaaggtgagactatcctgatgaccaagggtgttggcagccgtctataatcataatgatgct

SEQ ID NO: 275178 - DNA, 43 bp, Homo sapiens; identical to SEQ ID NO: 219986
  chr20:37632981-37633024
  hypo

SEQ ID NO: 275179 - DNA, 282 bp, Homo sapiens
  chr20:37646803-37647085
  hypo
gagatttgggtgggaacacagccaaaccatatcactcatttagtatgagaagggcacaggacacgggatgccatcgataccatcctggcacatctgtggcctgtccggtcctggaggtggtagaaagtccagacagtgagggggcaatggagatggcagagaaccaggagagttgggggccgggagctggcgaagagtagttccaagaagcagcggccagcagagccgagtgctgctgaggccatcaggaagatgccttgcgtttggtgctacccagttgtt

SEQ ID NO: 275180 - DNA, 151 bp, Homo sapiens; identical to SEQ ID NO: 219987
  chr20:37656985-37657136
  hypo

SEQ ID NO: 275181 - DNA, 44 bp, Homo sapiens; identical to SEQ ID NO: 219988
  chr20:37659950-37659994
  hypo

SEQ ID NO: 275182 - DNA, 75 bp, Homo sapiens
  chr20:37671509-37671584
  hypo
ttgctggaacagggcgtctccttgcctgcttaagtgcggccaaagagattcccagcgcagcgttcccccaggccc

SEQ ID NO: 275183 - DNA, 167 bp, Homo sapiens; identical to SEQ ID NO: 219989
  chr20:37673288-37673455
  hypo

SEQ ID NO: 275184 - DNA, 34 bp, Homo sapiens
  chr20:38483396-38483430
  hypo
tttttaaatatcaaataggccgagcgtggtggct

SEQ ID NO: 275185 - DNA, 81 bp, Homo sapiens
  chr20:38809044-38809125
  hypo
cagaaccatgtcaccattgtcgcagaggaccagctgcgttaaagacctgtgattttatttcatagagatgatccattggct

SEQ ID NO: 275186 - DNA, 103 bp, Homo sapiens
  chr20:38888178-38888281
  hypo
gttaaaggaacttgaaaaaccgcagatccaagaaggacactctgatcttccttccatctctcaaaagagagagatgaaggccggacgtggtggttcatgcctg

SEQ ID NO: 275187 - DNA, 44 bp, Homo sapiens
  chr20:39054744-39054788
  hypo
tacaggcgtgcaacaccgcgcccggccctaagacccatttctaa

SEQ ID NO: 275188 - DNA, 38 bp, Homo sapiens
  chr20:39076958-39076996
  hypo
tagaaatgcctctgcttggccgggcgcagtggctcacg

SEQ ID NO: 275189 - DNA, 90 bp, Homo sapiens
  chr20:39436088-39436178
  hypo
caagagggaaaaggagtgagcgaggatgaagggtacaaaaagcaaatcaataaacaggttagcgtctgcgtcattattaactctcagcct

SEQ ID NO: 275190 - DNA, 97 bp, Homo sapiens
  chr20:39632546-39632643
  hypo
cacctctacttcttcggggacctgcagtgtctaacaccgactagggtacacagtgacactcaaaaatgaggcataggcatataggccgggcattgtg

SEQ ID NO: 275191 - DNA, 42 bp, Homo sapiens; identical to SEQ ID NO: 219990
  chr20:39672622-39672664
  hypo

SEQ ID NO: 275192 - DNA, 42 bp, Homo sapiens
  chr20:39695464-39695506
  hypo
attacaggcgtgagccaccgcgcctggccacttctgtgcctt

SEQ ID NO: 275193 - DNA, 220 bp, Homo sapiens
  chr20:39791147-39791367
  hypo
acatgcgcttcctccgagagcggctgacggtaagtgccacccagggctgtctgtagatgggggcaggggaagccaagagcccttcagctgggggcctgactgcctgactggcactcctgctctataccatgcaggacctggagcagcgcagcggggacatcacctacgggcagtttgctcagctgtaccgcagcctcatgtacagcgcccagaagacggt

SEQ ID NO: 275194 - DNA, 42 bp, Homo sapiens; identical to SEQ ID NO: 219991
  chr20:39831202-39831244
  hypo

SEQ ID NO: 275195 - DNA, 128 bp, Homo sapiens; identical to SEQ ID NO: 219992
  chr20:39989813-39989941
  hypo

SEQ ID NO: 275196 - DNA, 539 bp, Homo sapiens
  chr20:39990755-39991294
  hypo
ccaatgttgctaggcgctcctcgaggctctgcacgcgctcttccagcatggtcccaaagccgcccactccccacccccccatgtccaacctcagacagcatccccttgctccaccctctgtcccattgagcgtctccagaccctcaagcagcccgtccacacctccctcgagcatggcagcagagagcctcgtaagctcatccccggccggggcaccggggcccctttgggtctcggtgactgcctgcagggccctctcaaggccatccatacgggcattgatcaaggctagttgcccacagcagctgcccctgccagacacgctcaggccctgcagctggctgcccagctgtgacagctcctggcgcagggccagctcccggccatcaaggctctggtgcagcctccggctggcggcctgaccctcctcacattgccgccgtacctcctgcacccgcaggtcacactcactctggacgccttgcagcttctgctcaaagccatccagcaggctcccccagagtcggtgcagccgtcgg

SEQ ID NO: 275197 - DNA, 322 bp, Homo sapiens
  chr20:40020281-40020603
  hypo
agaatcatggtggaaggcaaggagaagcaaggcacatcttacatgagggcaggaggtggcggggcagagagagagagcgcgcctcaatggctttcaatagttcaagtgcattcacaccaggcgcattcctgcgcttgagattcctagcatcagccaggagcggcttagtgggagaaagagctgcgacggtgatgatagtgacattccaaagttttgtggcaacatgaaggaggaggtgtgtctgcgcttgcacagtgactgcagcccttgggcagatgtggagaatgtgtgaggctaaaggctcccacgcagcatggggcat

SEQ ID NO: 275198 - DNA, 64 bp, Homo sapiens
  chr20:40161663-40161727
  hypo
tcagagaagggagaaaggaacgtacctggccttcctggacttcgtcctggctgcagagtcagtg

SEQ ID NO: 275199 - DNA, 41 bp, Homo sapiens
  chr20:40352413-40352454
  hypo
ctaaaacaataacttagtagcggtttttttttgttgttgtt

SEQ ID NO: 275200 - DNA, 36 bp, Homo sapiens
  chr20:41967667-41967703
  hypo
gagacgagggagggaggagaccgtggaaagcaggag

SEQ ID NO: 275201 - DNA, 341 bp, Homo sapiens
  chr20:42088445-42088786
  hypo
ggcagagacaaatacggaccacctgttcgtacagaatacaggcttattgtagaaaatctttctagtcggtgcagttggcaagatttaaaggtatgttttgtaattcaagatagaaatgatatgactaatgctttaaagtaaactccttttatattcttatttctgggaatttattatggtatatagatgttttaagatttccgagtctgaccaatcttgtctttcaggattttatgcgacaagcaggtgaagtaacctatgcggatgcccacaaggaacgaacaaatgagggtgtaattgagtttcgctcctactctgacatgaagcgtgctttggacaaa

SEQ ID NO: 275202 - DNA, 130 bp, Homo sapiens
  chr20:42142557-42142687
  hypo
ccggagcaagtggccggctgcgaaccagtttctgccaccgtcctgccgcagcttagcgccgggccggccagctccagcaccagcacagtgcggcttctggaatggacagaggccgcggccccgcccccag

SEQ ID NO: 275203 - DNA, 143 bp, Homo sapiens; identical to SEQ ID NO: 219995
  chr20:42192721-42192864
  hypo

SEQ ID NO: 275204 - DNA, 91 bp, Homo sapiens; identical to SEQ ID NO: 219996
  chr20:42193732-42193823
  hypo

SEQ ID NO: 275205 - DNA, 182 bp, Homo sapiens
  chr20:42199170-42199352
  hypo
cgcagccgcacagggcggggagcaggtgcaccctagccctacagcagccacccaataactcctgtcacactcctcctcccctccagctcttcttccacctgcagcgggagcgccggttcctggagccccgggccaggttctacgctgctgaggtggccagcgccattggctacctgcactcc

SEQ ID NO: 275206 - DNA, 120 bp, Homo sapiens
  chr20:42215917-42216037
  hypo
tcggacagaacgtgagcggtaacacctcataaattcagaacaccctgcacttgtgggatggattgtgcttccttacttcagtggaaaagtggttcgtttcggctgggcgtgctggctcac

SEQ ID NO: 275207 - DNA, 44 bp, Homo sapiens
  chr20:42218620-42218664
  hypo
tccagtgacagaaattgtggaaagcaacacgagttgtatgtgtt

SEQ ID NO: 275208 - DNA, 169 bp, Homo sapiens; identical to SEQ ID NO: 219997
  chr20:42314843-42315012
  hypo

SEQ ID NO: 275209 - DNA, 261 bp, Homo sapiens
  chr20:42345995-42346256
  hypo
tcttgatctaaagccgaggaggggcgggggctctgtgcttcccaccctgcaccccgcaccccgcagcccatgtggctgggctgcatgcacctgcaggttccatggatgaaccacacctaactcacgccctgagcttttgtgatttgtcagcatggagcctatcccctccccaacttcttccccaaggtctgtcactggccgctccctacagtccttggtcacccaaggtggatgacctgtgccccacggtgaggatggagg

SEQ ID NO: 275210 - DNA, 54 bp, Homo sapiens
  chr20:42712323-42712377
  hypo
ccaggtgaagagaacgtgaccggggctatcctgaggctgcgggtggccagggac

SEQ ID NO: 275211 - DNA, 42 bp, Homo sapiens
  chr20:42774216-42774258
  hypo
ctgagcgacagagtgaaactcgatctcaaaaaaaaaaaaaaa

SEQ ID NO: 275212 - DNA, 182 bp, Homo sapiens
  chr20:42804039-42804221
  hypo
gagcatttagactgcgttacatttttcccgtaacaatcccaaggccttgctctctggctcgcctgcaaggctggcaccaaagtcccttcccatggcttccaaatgccgctgtccatcaaatctccatagtctctggtttcctgggatcaccaacagacaacccgaagcggaggagctggcgg

SEQ ID NO: 275213 - DNA, 96 bp, Homo sapiens
  chr20:42826253-42826349
  hypo
agttgactgctggaagaagacgctattgtactgcaatgtataaactttggaggatgaaggacaggagacttagaacgtcgacgacgctgagttctc

SEQ ID NO: 275214 - DNA, 210 bp, Homo sapiens; identical to SEQ ID NO: 219998
  chr20:42833284-42833494
  hypo

SEQ ID NO: 275215 - DNA, 113 bp, Homo sapiens
  chr20:42885825-42885938
  hypo
tgcgaggagcgggacgtgagcctgccacagagcgagcacaaggagccctggttcatgcggctcaacctgggcgaggaggtgcccgtcatcatccaccgcgacaacatcatcag

SEQ ID NO: 275216 - DNA, 156 bp, Homo sapiens; identical to SEQ ID NO: 219999
  chr20:42924601-42924757
  hypo

SEQ ID NO: 275217 - DNA, 151 bp, Homo sapiens
  chr20:42931304-42931455
  hypo
catttatattacaagacatacggggaaaaacaggagcaactctagccataaaataacccgtatatgacaagttaaattgagaaagaattacctactttcacgaagtgcgctgaggtttattgggctctgcgcttccttaagagtattagaa

SEQ ID NO: 275218 - DNA, 238 bp, Homo sapiens; identical to SEQ ID NO: 220000
  chr20:42965898-42966136
  hypo

SEQ ID NO: 275219 - DNA, 37 bp, Homo sapiens
  chr20:42980255-42980292
  hypo
aaagaaagaaagaaaggaaacccgctttcattcgtct

SEQ ID NO: 275220 - DNA, 195 bp, Homo sapiens
  chr20:43019103-43019298
  hypo
agtttccatggagaccgcctcccaccatccctgaaatctcattgtgaccagtattaagggattaactctgcccagcggccctcgcagggtctggggtgctgagaggggccagcaggagctccctcaaggatgaagaggttgtgcactgtgcgggaccccatagcagcaggaggaggatgtcggactggggccagg

SEQ ID NO: 275221 - DNA, 130 bp, Homo sapiens
  chr20:43052653-43052783
  hypo
gtagatgccaaggggctgagcgatccagggaagatcaagcggctgcgttcccaggtgcaggtgagcttggaggactacatcaacgaccgccagtatgactcgcgtggccgctttggagagctgctgctgc

SEQ ID NO: 275222 - DNA, 40 bp, Homo sapiens
  chr20:43154801-43154841
  hypo
ggaacgagccactgcgcccggccctactattttcaagagt

SEQ ID NO: 275223 - DNA, 154 bp, Homo sapiens
  chr20:43219720-43219874
  hypo
agactagtagcagtagtctgcggtaggtccagagggctagtgggcagagggtgctgcggcttgaaaggtatgcaggagatgacttggagaagagtgggcggggacaggctgggggcttgcggagcagcacagcgaaggcctggaggcttggggg

SEQ ID NO: 275224 - DNA, 165 bp, Homo sapiens
  chr20:43243175-43243340
  hypo
cctgaggagcgatgcgacaggcatgatggaggtcgagtcctcctactcggacttcatctcctgtgaccggacaggccgtcggaatgcggtccctgacatccagggagactcagaggctgtgagcgtgaggaagctggctggagacatgggcgagctggcactcga

SEQ ID NO: 275225 - DNA, 83 bp, Homo sapiens
  chr20:43329106-43329189
  hypo
agtaataacaacagcgttgagcactcacactgtaccagagcaggggtggcgccgcgctgcacacctgccgcccagggtctcca

SEQ ID NO: 275226 - DNA, 199 bp, Homo sapiens
  chr20:43356086-43356285
  hypo
acaccaatattaacacgctgcctggtctgtctggatcccgaggtatggcagaggtgcaagacctagtcccctttcctctaactcactgcctaggaggctggccaaggtgtccagggtcctctagcccactccctgcctacacacacagcctatatcaaacatgcacacgggcgagctttctctccgacttcccctgggc

SEQ ID NO: 275227 - DNA, 222 bp, Homo sapiens
  chr20:43465519-43465741
  hypo
ttgtgcccggaagtcgtgaagacttctgggatggattcatcctgcatcaatgagggctagttgttttcagctaaagcttgtgagtatgagggcacagggaccgtgcttgtgagtaagcgggccggcatgctgctgggggtgcgtcaggtagagagactatagcgtgtgcatctgttcctctctctcaatgtctgcccgaatctccttcgccctccccagagt

SEQ ID NO: 275228 - DNA, 135 bp, Homo sapiens
  chr20:43530111-43530246
  hypo
cgtttcctaggccccgaaacctgacatttgctctttctttttctcttgctcttgttctagggaatgacaatggataaaagtgagctggtacagaaagccaaactcgctgagcaggctgagcgatatgatgatatg

SEQ ID NO: 275229 - DNA, 199 bp, Homo sapiens
  chr20:43568748-43568947
  hypo
catttgtacccagtcgaggatgactccctgtttttttcttcagcccagtcaactcttaagagcacctgagtcacctctcttacattccaccgcctacctgccatcagctcctggttatcttggtaacactcatgtctaaattcaagcttatgatttaactaagtttctttctttttcattccttggttctttttttttt

SEQ ID NO: 275230 - DNA, 52 bp, Homo sapiens
  chr20:43587085-43587137
  hypo
aaacagcagtggtgcggtggaaagggcatcaaccctgcgatccggacaagtc

SEQ ID NO: 275231 - DNA, 101 bp, Homo sapiens
  chr20:43660156-43660257
  hypo
aaagaaaatacaaccgaaaagtttaaaacagaggaatggaaaaagatacactaggcaaatactcactaaaagaaagtgggtgaaacaatattgatatcaaa

SEQ ID NO: 275232 - DNA, 31 bp, Homo sapiens; identical to SEQ ID NO: 220001
  chr20:43717047-43717078
  hypo

SEQ ID NO: 275233 - DNA, 173 bp, Homo sapiens
  chr20:43926537-43926710
  hypo
cccgagagagatgcgctcacctggacagatgctgcctctgaggttctccagcaggtgcgtcatggtgccgaagtccggggcataggacacgtgcagttccgctggctccgaggcgatctcgcgcagctccgcctccaccgccttgcccacgcccacggcgtacatgacgatgc

SEQ ID NO: 275234 - DNA, 138 bp, Homo sapiens
  chr20:43977555-43977693
  hypo
tattcaaactcgagcgtcgtagctcaaaagcagccataaatactaaaggaatgagggcagctaggtcctaataaaacattatttatagacaccgacatttgaatttaatataattttcatgtgtcacgaaatattatt

SEQ ID NO: 275235 - DNA, 343 bp, Homo sapiens
  chr20:44005912-44006255
  hypo
gcttatgcagttcttggatccggcggtttgagctcttgagtagcttcaagagcgacaagttttttaacacctgccagggtcaagaaaccaggtaaatagaagcttcagctttcctggacagcctccctctcccctgcctgcctctggctccgctcagccaagggccggcctgctggctcccctgggccactcagcctggcaaccaggggcagtactgcatgagtatatgagcttccccaagctggggccaaaacagggcgtctcaccgttctcagacggttccgctcaattactttgctcacaggctgctctgtctcgtcccgcagtttctcatcttgcatct

SEQ ID NO: 275236 - DNA, 188 bp, Homo sapiens
  chr20:44463585-44463773
  hypo
atgtgtctgcagaacggagccccccacctgatgggcagtggggcagtcagctcctggcgcggcagctgcaggatttctggaagaagtcccggaacaccttggcaccccagcggctgctcttcgaagtgaccagcgctaacgttgtcaaggacccgccctccaagtacgtggtgagtgagggtctagaa

SEQ ID NO: 275237 - DNA, 77 bp, Homo sapiens; identical to SEQ ID NO: 220004
  chr20:44469456-44469533
  hypo

SEQ ID NO: 275238 - DNA, 41 bp, Homo sapiens; identical to SEQ ID NO: 220005
  chr20:44502012-44502053
  hypo

SEQ ID NO: 275239 - DNA, 32 bp, Homo sapiens
  chr20:44560012-44560044
  hypo
gggttttgttttgtttgagacggagttttgct

SEQ ID NO: 275240 - DNA, 34 bp, Homo sapiens; identical to SEQ ID NO: 220006
  chr20:44560415-44560449
  hypo

SEQ ID NO: 275241 - DNA, 100 bp, Homo sapiens
  chr20:44573535-44573635
  hypo
tggcccccacgtctcggccgcagccaaggactccgtggaaggcatctgcagtaagatctaccacatctccctggagtacgtcaaacggatccgagagaag

SEQ ID NO: 275242 - DNA, 111 bp, Homo sapiens
  chr20:44574035-44574146
  hypo
ggcgatgcagttctcgttcttctgcctggcagcacaacccacgggcctgagccttcttgcctgacagcccaaggcacggcatacggggccctgcttcggtactgagtgtgt

SEQ ID NO: 275243 - DNA, 132 bp, Homo sapiens
  chr20:44578453-44578585
  hypo
caccaggtgctgtacggtctggccatctgccgtggtgatctcttggatgtaggcggcttcctcctgccaggaccaagacagctctagcctcatttctctaccccaacccctgcctgtcgctggccagagggc

SEQ ID NO: 275244 - DNA, 300 bp, Homo sapiens
  chr20:44601783-44602083
  hypo
tgggcgacagagcgagaccctctttcaaaaaataaataaatacaagtcaactacctatcctttaaaagtggagaaagaaaaaaaattttaattaaaagtcagctgcccttaaggtatgtccttcctccggaaatgtcaccttctgttttaagacttttagcagtttgcagtggaagagcacaagagggagtaaggcgctctggtttttgtccctaagtctctgtagttccataggctattttccttaattgaaagatacaaattttgggggaaaaaaatctcaaaaaaactcctaagcag

SEQ ID NO: 275245 - DNA, 120 bp, Homo sapiens
  chr20:44602323-44602443
  hypo
ttgccttccagcctggggaacaacagcggaaactcttgtctcaaacaaacaaacaaaaagtcctaaggagaagacctattaataaggagaaaaggtccgggctcggtgggtcacacctgt

SEQ ID NO: 275246 - DNA, 169 bp, Homo sapiens
  chr20:44707476-44707645
  hypo
aaaagggagaccttcgagagctggagtgttttgccctttttatttcccctcaaacagataacccaagtatgtaagcaaacaggggatctgcagcacaggcacagcggcaatctctcaagcagcactttccgtaaacctgggttaacatctggaccggcagccatttgga

SEQ ID NO: 275247 - DNA, 98 bp, Homo sapiens
  chr20:44707992-44708090
  hypo
cccaaggtaactcacggcttcagggtactttaccttcgtgtggggctgggtcttgatggagccgtattcatatttcttctttccgctgccttattaat

SEQ ID NO: 275248 - DNA, 120 bp, Homo sapiens
  chr20:44720742-44720862
  hypo
cctgcagccagccatgcccgagtctctccgccccaccaaccctcctccctcgggctcctgcgcggcctgagccttcctgacgagcgcagccccctgctccaaggtgcctggtcccatcga

SEQ ID NO: 275249 - DNA, 202 bp, Homo sapiens
  chr20:44893574-44893776
  hypo
gactccttggctagcactgctcacctgcccaggggcaacctgttagaaccctccacctcaggtgcccctggcctgcacctgtctccctgccctgcccccaccctgcccgtgtgccggtgccaccggcagagccgtgctgtacatcatgttgacagtagaaattacatcccgagctgctgttttacaccgcgccctgtcagaa

SEQ ID NO: 275250 - DNA, 76 bp, Homo sapiens; identical to SEQ ID NO: 220011
  chr20:44978787-44978863
  hypo

SEQ ID NO: 275251 - DNA, 157 bp, Homo sapiens
  chr20:44982233-44982390
  hypo
gctcagcagaactgcaaaggcgtcggcaaattgaagggaattcggggaagagcagcataagtaatgaaggcgcttgggggattaatttaccagaaaagattaaaggagctaaatccatgcagctttgccaagtgacgactaccaggggctttcagat

SEQ ID NO: 275252 - DNA, 109 bp, Homo sapiens
  chr20:45242089-45242198
  hypo
tgttcttacctggccggctggactccaacaagcatcaggatcttgagggcgattcgccggtgcaggttccactcctcaatggcgctggccatgatcagcccactgagga

SEQ ID NO: 275253 - DNA, 141 bp, Homo sapiens
  chr20:45337750-45337891
  hypo
tctgttttgttcttcggcccatcccaagcctagcgtagtgcctggtatgtggtggtgtccaaacccaagcgtggagtgaatgagggatgaatccatgagagagtgagcggctccagtgggtatgcgcgagtgtctcactcg

SEQ ID NO: 275254 - DNA, 128 bp, Homo sapiens
  chr20:45343199-45343327
  hypo
acaaggacagtgcacgtaggaggcccagcacgtgcagtggtggagcggcatgaaagcatacagtatgtgccgggaacaaacatgttggcaaggtgtgtggggcggggctgtggcgacagagtccggga

SEQ ID NO: 275255 - DNA, 121 bp, Homo sapiens
  chr20:45380533-45380654
  hypo
tttcattttcttgccgctttctaacagtatcactcatacatttcagagagtcccatagactttccgtaaggggtggagtcacagaagcgggcatctgttgcttggacgccatccacttcca

SEQ ID NO: 275256 - DNA, 66 bp, Homo sapiens
  chr20:45628462-45628528
  hypo
gaccttcggagccccggtttcttcatctgtacaacggggttaatggcatcgcgtgctcagagcgct

SEQ ID NO: 275257 - DNA, 112 bp, Homo sapiens
  chr20:45803228-45803340
  hypo
cgtgttcatggctgcggtgctaatgcagcccacgtgctaagcgcggtcctggcagtagctaatgtttaaggagcactcgctctgccagttttgccaccgttttcatggacta

SEQ ID NO: 275258 - DNA, 32 bp, Homo sapiens
  chr20:45829044-45829076
  hypo
agccatctcttagccgccggctaaataaacag

SEQ ID NO: 275259 - DNA, 276 bp, Homo sapiens
  chr20:45833334-45833610
  hypo
gttattacaaaacccgaaggattacagcatggaaagcctcagcacagagccccacgtggggcaggcccacatcagcgacacttggaggaatataggtgacctttgcttctctagactaaagaaaataaataagaatatagatggggtcctgatgtaccctgatatgaaggtggcagctaaatgctgacctttggaaaactcaactctgattatcgccactcgactgtatagtttaaaatggacggtcggccgggcgcggtgactcatgcctgtaat

SEQ ID NO: 275260 - DNA, 196 bp, Homo sapiens; identical to SEQ ID NO: 220014
  chr20:45837756-45837952
  hypo

SEQ ID NO: 275261 - DNA, 69 bp, Homo sapiens
  chr20:45878125-45878194
  hypo
gactgttgctggaccgactcgctcagctccttcaaatccatctcagctttgcttcgatctgaaagaaac

SEQ ID NO: 275262 - DNA, 40 bp, Homo sapiens; identical to SEQ ID NO: 220015
  chr20:45880361-45880401
  hypo

SEQ ID NO: 275263 - DNA, 107 bp, Homo sapiens
  chr20:45885508-45885615
  hypo
gacttccaagataccgctttatgcacaaaaagaaaggatgcctcctgtcattaacagtggagaaataaacagaaagtctcggggtgtgacgacgttccctggccctg

SEQ ID NO: 275264 - DNA, 33 bp, Homo sapiens
  chr20:45908164-45908197
  hypo
aagcgagaccccgcctcaaataaataaataaat

SEQ ID NO: 275265 - DNA, 100 bp, Homo sapiens
  chr20:45938702-45938802
  hypo
tccaagaaagccggcgcttacaaggatccagaggttcagcgctactagctggcctctgtcccaccagtgaggacaccgttcccagcggctgctttacctg

SEQ ID NO: 275266 - DNA, 141 bp, Homo sapiens
  chr20:45949054-45949195
  hypo
tgaaacgccaggtacgaagggacaggccctccacagtcaccttgtcacattcctttggggagcgaagagttcagacccaacatgtcacccaaattaccctggccagccaccacgtaaagatgctgcggctgtgcatggtgg

SEQ ID NO: 275267 - DNA, 36 bp, Homo sapiens; identical to SEQ ID NO: 220017
  chr20:45968504-45968540
  hypo

SEQ ID NO: 275268 - DNA, 120 bp, Homo sapiens; identical to SEQ ID NO: 220018
  chr20:46011002-46011122
  hypo

SEQ ID NO: 275269 - DNA, 197 bp, Homo sapiens
  chr20:46013566-46013763
  hypo
cagtactaaagctatagtgttgtgatgagagtccggcgtgctccctgaatgccggtgcccgattcataacctagtgcattcgttcacacattattcattcaacagataagcttttgcgtgcagtactattctgggtgctgggaccaccgaaatcagcagaacagacagaatctttgccttcacggatgcctcctgcc

SEQ ID NO: 275270 - DNA, 31 bp, Homo sapiens
  chr20:46175277-46175308
  hypo
tttttttttttttttaagaccgaatttccct

SEQ ID NO: 275271 - DNA, 465 bp, Homo sapiens
  chr20:46234979-46235444
  hypo
ctcaacgtgtggtgcgtggactcccggtagtctctgagaaccttttaagggttctacatggttaagactattctcataataatgctaatgtgttatttgctattttcatcccgttggtgtttgcaccgatggtggaaatgcggtgatgcataaaattgctgacaccttaccatgaattaaggcagtggcgccagactccgctcctaggtagacattgcattcttcactgccaggagctcataaagaaaaaaaaaaatcagttttccactgaggattgtccatgatgaagcagcaacactacacctggccctcattcccttttttccttaagtacctttcactgtacccttaagtactgtcgttttaatgttctgtgtgatgagaatggaaaatgtgcacaaagacttctgcctgccaaagtatgatggctgtctccgggaaaagcacttgcgcagtttgcgttgt

SEQ ID NO: 275272 - DNA, 252 bp, Homo sapiens
  chr20:46305160-46305412
  hypo
ggctctcagagcctcgcaggtcagggccggctgcagtcaggagggggagccgttgggagggaagggagccttcttacctgtcccagctgctcacacgccgtctggtactcagcacgctgacacaggtccttcacacgctggtacttgggcagaaagttctcctcctgggcgtccaccttgtcattgtctctcttgtgtagcagcttgctatggggcagagagcaggagccgcggggccggcctctcagctct

SEQ ID NO: 275273 - DNA, 170 bp, Homo sapiens
  chr20:46315385-46315555
  hypo
ctggcctggtacgtcgggacttcagcagcgtctcagatatcacaatcgtccggggcagaaattgtgacgctgccgctggggtagcttggcagctgtggacaccgttgctatgtaaggcgggaggtgagtcactgtctccaaggctcccctggactcggctttctcagccc

SEQ ID NO: 275274 - DNA, 337 bp, Homo sapiens
  chr20:46365437-46365774
  hypo
cctgctcacctgtccggtagccagtgctattgaggtacacggcaaaggtgcggctctcgtgctgtgcctgccaggagggcgaggagcagttctcattgttggtgtaggtgttgtggttgtggacgtacttgccagtgaggatggaggagcgtgaggggcagcacatgggtgtggtcacgaaggcgttgatgaagtgcgccccgccctgctccatgatgcgccgggtcttgttcatcacctgcatggaacctgcaagtcaagggtggaagtaaggcgcagggcaggagacccgggcggcaccggcaccagggggctctcagcacgtggcatccctagg

SEQ ID NO: 275275 - DNA, 121 bp, Homo sapiens
  chr20:46390913-46391034
  hypo
ccatgtccctccatcgggaaacactacgggatgctttgcacttgaaactacgattgcagcagccagcgttctaagatgcacattcacgttccttcagagagacagacgtggagtgctaata

SEQ ID NO: 275276 - DNA, 140 bp, Homo sapiens
  chr20:46429634-46429774
  hypo
tccccgggccagggcgtcagctgagtcctggcagtgcaggcagcccccaagctgggcatctgggcagcagggaggggggggagcttcagggaggacgcggtgggtagcacgtgtctcaggggacacgtgtgcgtgtgaga

SEQ ID NO: 275277 - DNA, 59 bp, Homo sapiens
  chr20:46489240-46489299
  hypo
cagactggcttcatgctgtgcggcagaacatgatcacccgtgaccgggagctggtgcag

SEQ ID NO: 275278 - DNA, 83 bp, Homo sapiens
  chr20:46798541-46798624
  hypo
atgtgcatccgcaccgcagacgcaggagtgctcagcgtctaacagagtgtacgtgccaagtcacatgacggtgcttcttaata

SEQ ID NO: 275279 - DNA, 311 bp, Homo sapiens
  chr20:46823364-46823675
  hypo
tgcaccatcaccgccgtggggcccacaggtaatgggagatgcccccaggtcctggtttgtgcttcgccagagccctcctagagctgcaggcgatgatgggagcttttcaaacaccagcagggcctagatgagctgctccagggacaggagtgttgcgggcgaatgagctggacgagggccagccctgcagggcgcgcagacttgcggctctcttcgcaggcttttggcccaaacagctctttggaaaagagcacaggaatggccccggaaggtgggacctgtttccatggtgcacgcgcaacattggagga

SEQ ID NO: 275280 - DNA, 207 bp, Homo sapiens
  chr20:46846106-46846313
  hypo
tcatccattcagtacgtattcattgagctcccactctgtgccaagcaagattccaggcatcggggcgtgaaacgctagaaaaaagacacagatgaaatatagtctaatcaggtgagataaagacaggaggcaggaggaaacgatgggaggagggagtgagggaggaaggacaagcgaatgccagtgaattgccggtttgctcatgca

SEQ ID NO: 275281 - DNA, 105 bp, Homo sapiens
  chr20:46888889-46888994
  hypo
tgcagtacccggcacgaggaggtgctccagaaatgcttgcagaacaaatgaacaaatgactacacagtagtattatgcacatgtgtgttccgatgagcacgtgtg

SEQ ID NO: 275282 - DNA, 187 bp, Homo sapiens
  chr20:46972057-46972244
  hypo
cagcgcctcagctccgcccatactcgctccgccctggtgggctccagcctttccctttccctggggctcagcctcccaatcagtcaaatgggcagattaacacccatggccttgactccgtcagagactgggggaagaaatcgtgagtcagggcagcgaggtctgcggggagcgttgtgaaggtgtg

SEQ ID NO: 275283 - DNA, 84 bp, Homo sapiens
  chr20:47027449-47027533
  hypo
gggtggggctcctgcgcgctctgtggagtgggaagcccaggcctgcagccgtggtatgaatggctgcagcggcacctggggagc

SEQ ID NO: 275284 - DNA, 260 bp, Homo sapiens
  chr20:47117551-47117811
  hypo
cctcgaagatgccacgtcatcagcctctggcccgagggcttcccagagcctccctttctccgttttgggtgacttgggcaggcactggcgtctacatctgtgtactcttggcccctagtgggtgtgacctgggccctcccatcagacacacttcaatctcatcccacacagcccagggccaggccttggcacctcatgcacagactcagacaacgcacctgcgatccgggcgctgagactctgcacgtggcctcatccca

SEQ ID NO: 275285 - DNA, 264 bp, Homo sapiens
  chr20:47252919-47253183
  hypo
gggcaagggctccctcgacccggcctgggcgggcaccagtgggtgggccagcggggccgccctcccgccccactcactcaccactgtggctggcgagagcagggactggcagtgcagcaggacgcccgtggccgccacctgctccagccacttgcggctggcgtcgcggctgctctcctcgtactcgccattgttgttgtagcggtagcccagggccgccagcagctgcttggagaaggtgcacacggcggccaccagggcctg

SEQ ID NO: 275286 - DNA, 46 bp, Homo sapiens
  chr20:47268239-47268285
  hypo
ggcaggagtacattccgccagagtagagaggcgagtggggaagtga

SEQ ID NO: 275287 - DNA, 142 bp, Homo sapiens
  chr20:47273537-47273679
  hypo
agagggagggctgccggacaccccgccctgggacactcactctttggccttcgtggccaccaggaggcgcagagggcggcgggagcagaaggactggttgaggatggactccacctctgaaaacggccgcaggaacaccagg

SEQ ID NO: 275288 - DNA, 151 bp, Homo sapiens
  chr20:47274121-47274272
  hypo
aaggtcaacctagccgctccggccatgggtatgtcgctccttgcagcccaaagcattcctaattgccacaggggcaagctgggctccagccagcacggcaggtgcatctcccccacccacctgcacacgccccaggcaaagccggaaggcc

SEQ ID NO: 275289 - DNA, 170 bp, Homo sapiens
  chr20:47296131-47296301
  hypo
agggtggaggtgaacgaggccagctgagtcagagtcacaggggcggagggcccctaccttggacatgatgtcctccagctcacttcgggccttgtaggtgccatcgtcgtagcggaagcgatacatcacctgctcattcttgaactggtgcttgtcggaaactggagaga

SEQ ID NO: 275290 - DNA, 155 bp, Homo sapiens
  chr20:47490312-47490467
  hypo
aaagcacaacaacagcggaaaatacgtcaccatgctcctcatcccaccatcttccccctactccctagaggtaaacacttttcccaggcgtttacacacagagaaagctattttgcccccttggtgccgagacagtcttgctctgtcacccaggc

SEQ ID NO: 275291 - DNA, 43 bp, Homo sapiens
  chr20:47563131-47563174
  hypo
gcttccgaaaaccccgacttccccaggctcaggtgatcctccc

SEQ ID NO: 275292 - DNA, 219 bp, Homo sapiens
  chr20:47659758-47659977
  hypo
tgtccagacatgatcgtcttggcacagcttgagggttttctacagaaactggtagagatgctagacagacacaagatgccagccagcctcctttgcgattggctcttagaggtggaaaatggtaaagtcatcaggctcattctccctaggactagaggaacatgttaattatattaaagtagattagtgggccgggtgtggtggctcacgcttgtaatc

SEQ ID NO: 275293 - DNA, 158 bp, Homo sapiens; identical to SEQ ID NO: 220020
  chr20:47688821-47688979
  hypo

SEQ ID NO: 275294 - DNA, 120 bp, Homo sapiens
  chr20:47698961-47699081
  hypo
tgattcaccacgcctggcctaggttttaaatttttgtttgtataaatgacatcatactatgggtttcatttttctgttttttgttacttgtttgttttgagacggagtcttcgctctgtc

SEQ ID NO: 275295 - DNA, 78 bp, Homo sapiens; identical to SEQ ID NO: 220021
  chr20:47713209-47713287
  hypo

SEQ ID NO: 275296 - DNA, 157 bp, Homo sapiens
  chr20:47713759-47713916
  hypo
aatgggatggcggtcgagagtacttgagactgtggatgttttgatctctttcatctctgctgttccctggagagtggaggttacttggaacttttcaaaccctgacaccttagaaccgtgaagtccagtccagtggtggatccggccggatgcctgg

SEQ ID NO: 275297 - DNA, 95 bp, Homo sapiens
  chr20:47765230-47765325
  hypo
gatttcataggacccggtgaaaactcagcccagaagaacatgtctacaacagccgctgccctcaggactgtgccaaccaacgctgctctagtgag

SEQ ID NO: 275298 - DNA, 60 bp, Homo sapiens; identical to SEQ ID NO: 220022
  chr20:47766303-47766363
  hypo

SEQ ID NO: 275299 - DNA, 38 bp, Homo sapiens; identical to SEQ ID NO: 220023
  chr20:47799076-47799114
  hypo

SEQ ID NO: 275300 - DNA, 31 bp, Homo sapiens
  chr20:47805438-47805469
  hypo
tgagataaaagacaatggcccgggcgcgttg

SEQ ID NO: 275301 - DNA, 39 bp, Homo sapiens
  chr20:47816848-47816887
  hypo
ggagcggccaggtgcggtggctcacgcctgtaatcccag

SEQ ID NO: 275302 - DNA, 288 bp, Homo sapiens
  chr20:47836968-47837256
  hypo
tccagtgtattcttcgcttagcagcagagggatctctgcgatacagtcacgttagagacctcccttgcttaaaactctccagcctgctggtagagacccccgggcctgtccaccttgcaaagactcctcaggcagcgtctgggtcccgtacactgtcgccatttccccgatgtcccctgtgggcgcgggcggccacccaggcctgctggctgcggccccctctcggacaggccttggctcagcccgctgcgtgggaggtcatgggccagtccccgaggagccaggccc

SEQ ID NO: 275303 - DNA, 67 bp, Homo sapiens
  chr20:47845272-47845339
  hypo
tgcctgttttggagcgtctgatttataaaccccgccaggctccagtcacccgcgtgctggtgctagt

SEQ ID NO: 275304 - DNA, 272 bp, Homo sapiens
  chr20:47865551-47865823
  hypo
aaacaaggggacaccggtgcccttcctgacagatgaccttctggcatggcttcatgcattggaactccttgtgtgaagagtcataagggtggcaggcacgggtgcagacatgcccacagcccaggcggaactcgcagggcaggctgcagcctccttcgggtactttttggaagtcagaagctttggatactaaggtgtgggtttcagggtggttctggcagcagagccggagcatggggcctatttgattgttctctcgaagtgtatgaatg

SEQ ID NO: 275305 - DNA, 253 bp, Homo sapiens
  chr20:47905350-47905603
  hypo
taaacattttgccaacgcaggtacaatatgggattcaataaaagtacagaattaaagttgtcttattagagattgggaagtttcccagctccgtttatcggtacttggccgtaccgataaaggggatggacttggagtgaccaggtcttagtcacatgtattttcataccctaaacaagaagcggtatagaccagaatggagcactgattgtaatccaccttctttcttagaaactggcgatggaatatgaga

SEQ ID NO: 275306 - DNA, 105 bp, Homo sapiens
  chr20:48124419-48124524
  hypo
ggcagaggcgagcacgtggatccatctgctccctgtgtcatgggcggatgcggtagcggacgggcacgtcgtgttccggctgcatcagaccgaagccgtacctgc

SEQ ID NO: 275307 - DNA, 229 bp, Homo sapiens
  chr20:48209645-48209874
  hypo
cctccaggcacaaccgtcttccctcccttccactttcctccctcctcctcaaacccttgcccaggtgccccccggctggctgggttcaccagaggatagatgaccacatactaatcccagcctcctgtggaggttagtcccaccctccaccgaggtggaaaattcctgcaggtagagtcagcagtggttcaagtcccaccgttgtccatgagatcggactacacagcac

SEQ ID NO: 275308 - DNA, 139 bp, Homo sapiens
  chr20:48252796-48252935
  hypo
tcggactgctttcttggtggcggtgggtaaagcaaacgtacattctctcctctcagtactcgttcacctgagccagctcgggtgtcaggttgacagttatgtttttatacaaggcgtcgtatgtgatgtttgcaaagta

SEQ ID NO: 275309 - DNA, 122 bp, Homo sapiens; identical to SEQ ID NO: 220026
  chr20:48259015-48259137
  hypo

SEQ ID NO: 275310 - DNA, 76 bp, Homo sapiens; identical to SEQ ID NO: 220027
  chr20:48300266-48300342
  hypo

SEQ ID NO: 275311 - DNA, 86 bp, Homo sapiens
  chr20:48350345-48350431
  hypo
ccgtttacaatactttctaaaacaatgtaggtagagaagagggctaattataatcaaacaaacaaaggtaacgcctgcctaggtta

SEQ ID NO: 275312 - DNA, 120 bp, Homo sapiens
  chr20:48395183-48395303
  hypo
ccagcctataaatgagtaaataaatgtatgtatccatacaatggagtcttactgagcaataaaaagaaatagaggctgacacttactacaatacagattaactggaaaaacatgttaaac

SEQ ID NO: 275313 - DNA, 211 bp, Homo sapiens
  chr20:48477265-48477476
  hypo
taataataataaaatgatatcgattcatgacatggtgattgatgaagctgaatattactgttgactattctttgtttcatttactgagtcaacaaaaaggtattgactgtcttttgtgtgggaggctctgctttaagccccggacataaggcagcgaacaagatggacacaggcttcatcctcatggaatgaggcacgacagtttcccatg

SEQ ID NO: 275314 - DNA, 37 bp, Homo sapiens
  chr20:48489294-48489331
  hypo
tacaggcatgagccaccgcgcccggccgattttcacc

SEQ ID NO: 275315 - DNA, 535 bp, Homo sapiens
  chr20:48498753-48499288
  hypo
gagtgagccgtgctcgctcattttctccacttcttcaccgcctgtccacggggctggaattggccttggcaggtcaccagtgacctcccgcagccagacctggaggggaggcgtccgcccccgtcctagcctacctccttcccactgcccctaccttctggcgaggaccacttcactctcttccccggcctctgggccatgctcctcctttctctcctttgacgtctccttgggctcgtcccccttcgctgacccctcaaatagtggcttcttcaggacttggccccagccccacttctgttcacgtgttctgcacttcactgagtgcgctcacccgtccactggccttcacttccacctagtcccaaagctgttcccgcgaacccagacctccctctgggatccgtactcctgtttccagctgcctgtttggatgccgtggggatgctgtcatccctatgcctttgcatcccccttgcccaagaaatcctactttgaattgcccggtggcctggctagccggtactaagcactt

SEQ ID NO: 275316 - DNA, 353 bp, Homo sapiens; identical to SEQ ID NO: 220028
  chr20:48504343-48504696
  hypo

SEQ ID NO: 275317 - DNA, 114 bp, Homo sapiens
  chr20:48520118-48520232
  hypo
gaccacagtgcgtccgtgatgacaggtacactggactttccctcctaggatgtgttagtcattcctgcttttgtccatagggtaagttacgtggcatcacggttggttagaaag

SEQ ID NO: 275318 - DNA, 672 bp, Homo sapiens
  chr20:48524517-48525189
  hypo
gccgggccagaaacggttcagaggtgatgctggagagacggggaaggttcggagcccggaaggatctgagagcacaggatggatgggatcagactggcatagcctctcaggagggactgccaggggcaggaagagagaaggagggcctgtatggaggctgctccaggacctcaccttgatgcttctgaattccttcttccacgggtagaggaagaggttgatgcccaccgtctccagcatgctgaaggcgccgtgcagagcccgcaggctagaggagctgagcgagcgcaaggagctctccaccacctcatagaactggatcagccggaatcgataaaagggatccaccttgtgcaggctgagcagggttgaggctgccacccgcaggcactcatcgctgccaggccgctgcctgctggtggtggtatccactttgctctcatggaactgcacgtacttccgaaataagtcatccttgaatttagtatccattgaactgggcttccccatccgatcgaggggggctaccttatctcctccatggcttctggattagaggcagggacatcactaaaagcatggacatgttgccgcctggaccagcggagtgctctggaaggaggggaacaagaagcatgtcattcctcgatacggtcgcgcttcggcttcagg

SEQ ID NO: 275319 - DNA, 39 bp, Homo sapiens
  chr20:48549957-48549996
  hypo
ttacttgtccaggccgggcacggtagctcacacctgtaa

SEQ ID NO: 275320 - DNA, 130 bp, Homo sapiens
  chr20:48673854-48673984
  hypo
ttcctcctgcccctccgcttgtgcggctgaatccaggatttttcccttgacttgccccgcacagtgaggcctggcattttcttcccgctccccatgctggcacgtgacacagccccgggcacatgggagg

SEQ ID NO: 275321 - DNA, 120 bp, Homo sapiens; identical to SEQ ID NO: 220031
  chr20:48707851-48707971
  hypo

SEQ ID NO: 275322 - DNA, 80 bp, Homo sapiens
  chr20:48720257-48720337
  hypo
taaaagctataaagcttaattagaagccaggcagtcaggagaggccctctcagagaccccggtcccggtcccaaacacct

SEQ ID NO: 275323 - DNA, 120 bp, Homo sapiens
  chr20:48720799-48720919
  hypo
agggccagactccgtctcaaaaaaaaaaaaaaaaaaggcagtatttcctattgtaaactctaatctactgggtccaaaatattggacactgttgccatataattaacatacctggctggg

SEQ ID NO: 275324 - DNA, 141 bp, Homo sapiens
  chr20:48744175-48744316
  hypo
cccagctgattcatgctattttgtttgctgcaggagcctacgcccaaagcaccatggcatgtggtaggtgctcaataaatacgggatgatgggtggctggaatcacaacgccatgaagtcgagggagagggctttgtcagt

SEQ ID NO: 275325 - DNA, 231 bp, Homo sapiens
  chr20:48755328-48755559
  hypo
cctgggggcagcttcggcttggttaccacccttccccgcagaacactgggacaaggagagggatgggagacggctcaccccaggctaccctgactcacgggggaacttgaggtagtcgctgggcccgtgcgggcttccatttccccagaggtcacccagctgggacttcctcacccctccctgcccacctcaaaggcctggcgtggagatggaaggcgtggctgaggagcc

SEQ ID NO: 275326 - DNA, 79 bp, Homo sapiens
  chr20:48767152-48767231
  hypo
gccaccactgggcacgtgagacagttatttgtcaagtttatggcccggctatttactaaaatgccagctccgttttttt

SEQ ID NO: 275327 - DNA, 57 bp, Homo sapiens
  chr20:48771303-48771360
  hypo
taaccgacaacaaagtatgcaataatttctcatagaaattccatacaggcagccggg

SEQ ID NO: 275328 - DNA, 42 bp, Homo sapiens
  chr20:48791873-48791915
  hypo
agctgggcctacaaatgtgcaacaccacgcctggctaattaa

SEQ ID NO: 275329 - DNA, 39 bp, Homo sapiens
  chr20:48853284-48853323
  hypo
gaattgctgcatcaacggggatcacgaggtcaggagatc

SEQ ID NO: 275330 - DNA, 49 bp, Homo sapiens
  chr20:48860989-48861038
  hypo
tcctctgtggatggggacagcggtgagcgaggtggtttatgctggcaac

SEQ ID NO: 275331 - DNA, 216 bp, Homo sapiens
  chr20:48863409-48863625
  hypo
attgccacggggtacggcggagcttggatgctgcacccaggactgaaagggggacctgtgggcggcctctgcctctccccgcgcagcgtcaggacacaggcccacattccctcctggcttctccctgaagggagagagaataatagttggttcaaatgtcaggcctgctccgtgctggtggggagactggttgagcaggtccgcaggagggacgga

SEQ ID NO: 275332 - DNA, 79 bp, Homo sapiens
  chr20:48868294-48868373
  hypo
gctgggattacaggcgtgtgccaacacacctggctaatttttcgcatacaaaatcccttctcgacgaaaaatactcctg

SEQ ID NO: 275333 - DNA, 42 bp, Homo sapiens
  chr20:48936571-48936613
  hypo
gaggctttccagctccctttcgtcctccctgtgatgccaagg

SEQ ID NO: 275334 - DNA, 140 bp, Homo sapiens
  chr20:48968284-48968424
  hypo
cctggagggtagctgcgactcagcctccacggggaacgcatcccagtcatgccaaaaagccatcttcctcaagagaagccagagatccagattttgatagaaactctcccaatttttaggccaggcgcagtggctcacac

SEQ ID NO: 275335 - DNA, 87 bp, Homo sapiens
  chr20:48974138-48974225
  hypo
tgaacacggggttgcgtaggtaggattcgaacccaggccctgcagacagcagagactggcgctgctgagagtcgactgtggaacacg

SEQ ID NO: 275336 - DNA, 54 bp, Homo sapiens
  chr20:49008038-49008092
  hypo
ggtcagcaggagcttcgtcctaggcctcttcactcccctcgctctgacctggtg

SEQ ID NO: 275337 - DNA, 98 bp, Homo sapiens
  chr20:49046546-49046644
  hypo
aggggttttcttcagcgggtctagtgcagtgggtcttaaccagggacacttttgtaccctgggcgacatttgacaatgcccggaggcatttttttttc

SEQ ID NO: 275338 - DNA, 218 bp, Homo sapiens
  chr20:49046944-49047162
  hypo
cagccctgcattttcaatcaccgcgactgggagaggaagccaaccgccggccctagtgggtggcagccaggaatgctgctcggtaccctacagcgcacaacacggcccttgccagaaagaatcaacagggctgtgggcgaggagccctggtctcacgagaggttgcccacccctcacctggtgccccaggaggtgggaggcttcgcgggctccaggtc

SEQ ID NO: 275339 - DNA, 141 bp, Homo sapiens
  chr20:49150322-49150463
  hypo
ggaacagggctgctcgctagaactccagattgttccacaagtgccttctggcagagaatgatggaagcttccgtgatttttttttctccttaatagttatgagcacagaagaggagcagattgtctggctatagaagctgt

SEQ ID NO: 275340 - DNA, 199 bp, Homo sapiens
  chr20:49178934-49179133
  hypo
gacctagacttggtgtagaacgtgtgcctcttggcctgccaccatggttccctgcctggttttgtgtgtcagctctgccgcttaagaactgagtggcttcgggcaagttgttctctctcataggagtgtgtgaagatgaagcaacataagctgcttagcccagcgcccagtacctcacgcagacataagtgctcagtaa

SEQ ID NO: 275341 - DNA, 144 bp, Homo sapiens; identical to SEQ ID NO: 220035
  chr20:49197043-49197187
  hypo

SEQ ID NO: 275342 - DNA, 195 bp, Homo sapiens
  chr20:49197873-49198068
  hypo
agccaaaggggagccgtcactgcccgagaaggacgaggaccatgcactgagttactggaagcccttcctggtcaacatgtgcgtggctacggtcctcacggccggcgcttacctctgctacagggtatgtttccactgacagacgcgctggcgagatgctcgtgtgcagagagcactggccgctagcccgatggt

SEQ ID NO: 275343 - DNA, 246 bp, Homo sapiens
  chr20:49203141-49203387
  hypo
catccaccagccgccgtctgtgagctccaccagcactcgcagcaagtcagtcgggctgagagtgtggttgtagaaaccctggctttgtgccttcccaccttccccagctcaccaaggtgacacctggctgctgctgaaatggcctgagcagtcttgcattagcagggccagccacctgccagcctgctgcatccccagtgcctcttgacgcagaagtgccgagcagctgaccggcagcgaggcctg

SEQ ID NO: 275344 - DNA, 708 bp, Homo sapiens
  chr20:49204054-49204762
  hypo
cctctaggatgttccgctgaatgggaaccctgccttgcctctggcttctatcccaaaggtctaagaagacagcgaacactccctgccaccccagccatggaggaggcctgccttggcaggatgctacaaagggtggaggtcggctctgtgccagggctgctaacggtgcccatcccaggtgccccagagttgttctgcctgctgggagagctgggtgtggcctctcgcagattctaagggccccaggcaccccgctgcgctgcacagtttgtgccactttttaccgaacgacagtgtggtttcccgggctgccgcccgcacggcctccaggtcagactggcacaggctggcagtctggtcgatgctttcaatgccctgttcgagattaggagaaaaagaaccctttagggggccttctcaacagcaggtagagtccacttagtggccctgcagggccagtcctagcatggtctctggggcctcagccccttccttttctccaggcttccaggttttttaggtggcctcaggttcatgagaggcacctctggactctggaagcgtctcgcctcttcagcccttacacccgctagggagccaggctgttagcagaactcgtcatcctggatgcctgctgaaaggctagaattgaaaaggagacctgctgctttctggaccttcctgcctccctcacgctctccttgccct

SEQ ID NO: 275345 - DNA, 255 bp, Homo sapiens; identical to SEQ ID NO: 220039
  chr20:49206899-49207154
  hypo

SEQ ID NO: 275346 - DNA, 161 bp, Homo sapiens
  chr20:49210377-49210538
  hypo
aggcaaattctggggaagaacgcagtccagccagcatttctagataccctcgtgggcccctgcctgcctcccttcccataaggttcattctttacccgtcaggctctggtgggaggcatggaatctgtccccagaaaaatgctctggcggccgggcgcagt

SEQ ID NO: 275347 - DNA, 42 bp, Homo sapiens
  chr20:49214096-49214138
  hypo
ctggaaggaggtgcactcaccggagaccctgggagcccccaa

SEQ ID NO: 275348 - DNA, 320 bp, Homo sapiens
  chr20:49218571-49218891
  hypo
caaagcagggccaccgcccggggcggggtggccataccttcagccggtcccggaagccgaggacctggtactccagctcccggagctggggctgggtggagtccgtgggcctcagcaactccaggacctcctgcagaggcccctcgagggccacgccaggcccgtcctctctgtccccggttgccccttcctcgtggccgttctggctactcgaggctgtgccgctgtggaacagggagccctgtggcaggctggggctctcccctcctaagttcctccagccaggctgctctgcaaacgggcctccagagaggtgggcc

SEQ ID NO: 275349 - DNA, 583 bp, Homo sapiens; identical to SEQ ID NO: 220040
  chr20:49223638-49224221
  hypo

SEQ ID NO: 275350 - DNA, 484 bp, Homo sapiens
  chr20:49224900-49225384
  hypo
tctccccaggctggacgggactcacttccactgcacctccagctgcagcttgatggtacccaactccgtgatgtccaccacgatgacctgcggccgcgtcgtgaagaagtcggcgatgtcacacgtcactgcacccacagccagcgagcccaggccccgcaactccgtcacctgggggtgggggctggagggtggtgtctgagccgaacacccaggcaccccagccctgcccccgggccccatccccaccttgatgtccaggttctcatgcagcgtggggatgaaggccttctcctcttcgtcccaggtctggctgtcatctgactcgatccgacccttgagcttccaacgctggcggcccagacgcatgagcacctgtgaaccagcccgagaggggccgcgtcagcccaggtgggtgtccccttgctgtccgcccagggccctccctgccaggcagagccccagctgcaaccctggttcccag

SEQ ID NO: 275351 - DNA, 42 bp, Homo sapiens
  chr20:49225976-49226018
  hypo
ccacaggcagagagacgcctccttggggcccagaacacctcc

SEQ ID NO: 275352 - DNA, 99 bp, Homo sapiens; identical to SEQ ID NO: 220043
  chr20:49230488-49230587
  hypo

SEQ ID NO: 275353 - DNA, 173 bp, Homo sapiens; identical to SEQ ID NO: 220044
  chr20:49236429-49236602
  hypo

SEQ ID NO: 275354 - DNA, 160 bp, Homo sapiens; identical to SEQ ID NO: 220045
  chr20:49240802-49240962
  hypo

SEQ ID NO: 275355 - DNA, 101 bp, Homo sapiens; identical to SEQ ID NO: 220046
  chr20:49244321-49244422
  hypo

SEQ ID NO: 275356 - DNA, 144 bp, Homo sapiens; identical to SEQ ID NO: 220047
  chr20:49247308-49247452
  hypo

SEQ ID NO: 275357 - DNA, 238 bp, Homo sapiens
  chr20:49261866-49262104
  hypo
gtcataggacagagcctgttcgcaatccatcctgtgtctgcggattctcccaggtctgtaaggcagcagggagatgcggcctctcccactccacccaacacgtagccagggcgaggtggggccgggggagaggctgacattcaaaggcatctgagtggtaagaggtgagcgagtgaggtgaatggggactacgttagaaggaccctacgttagaagggtgaggcgctagggccatagc

SEQ ID NO: 275358 - DNA, 150 bp, Homo sapiens; identical to SEQ ID NO: 220048
  chr20:49264294-49264444
  hypo

SEQ ID NO: 275359 - DNA, 203 bp, Homo sapiens; identical to SEQ ID NO: 220049
  chr20:49282236-49282439
  hypo

SEQ ID NO: 275360 - DNA, 97 bp, Homo sapiens
  chr20:49284101-49284198
  hypo
tacaggcgtgagccaccgcgcccggccgctgctttaagttcttaacacgtcctcaccgcggctcagctcactgtacggcccctgcatagagagggga

SEQ ID NO: 275361 - DNA, 145 bp, Homo sapiens
  chr20:49286718-49286863
  hypo
aagagggcgctctgagccaaggtagagccaagtcaaccaggcaggcggaggcccagagcatgagttttacctactgccggtttcggccaaaatgccagaaagccaagcagcaatcttgggcatcggacttggctagaaatccctc

SEQ ID NO: 275362 - DNA, 180 bp, Homo sapiens
  chr20:49289683-49289863
  hypo
ggctgcttctgtctgcgtcccagcctccactcttctctagataccatcaccaccatgacaactgcagttaacacttagtgaagacccctaggtgccacgcgcccatgcaatacccacagacccctctgaggtaggccctgtaatggtccctacgttagggaggggcggtcccaggcccag

SEQ ID NO: 275363 - DNA, 378 bp, Homo sapiens
  chr20:49290277-49290655
  hypo
catgctctcctcagcgtcaaagaaacagccttgtcctgccagggccttcgccaggcccggcctgggaagtcagggctctctgacccaatggagcgaatcgttgcgagcatttatttaatagcattatcttgatgatgaataaatcacaccttcatgaaccatttttccatttgtagccccaagtcaagactcccaaaatgttaccagatgtcaggcatgaaatatacacccctggcaagctctgccatgcacaggagtcatgctgctttcaatccacgggagagccggacacgagcgttccaaggcaggagcagaactccatgttggccattataaagacaagattccttttcccccgctttttatagcctctctggg

SEQ ID NO: 275364 - DNA, 217 bp, Homo sapiens
  chr20:49294480-49294697
  hypo
ataggcatgagccaccgcgcctggccttattattcgtcttcttagtctgctttcagatgaggacacggagccacaggagttacaagggtggaggtgctgggaagtcaggaccaaaatcagcctcctgactccccatctcattttctcaatcatcatgggttttgccccccaagaagagaaccagccaccatgggtgctaaaccggtggctgatatag

SEQ ID NO: 275365 - DNA, 76 bp, Homo sapiens
  chr20:49302564-49302640
  hypo
gaatggcctgaaagcatagacgcctggctctttctttgttttttttaagaaggagtctcgctctgttgccccaggc

SEQ ID NO: 275366 - DNA, 90 bp, Homo sapiens
  chr20:49318873-49318963
  hypo
tgctttttataatatttaagccatcctctttattcccccacgcaacccgccgcctccatccctgagaaacatctgcggcaggggccgtgc

SEQ ID NO: 275367 - DNA, 35 bp, Homo sapiens
  chr20:49323815-49323850
  hypo
cagacagctttaaaaggtgacgaagggggccgggc

SEQ ID NO: 275368 - DNA, 76 bp, Homo sapiens; identical to SEQ ID NO: 220052
  chr20:49331494-49331570
  hypo

SEQ ID NO: 275369 - DNA, 196 bp, Homo sapiens
  chr20:49345551-49345747
  hypo
cttatacaacccaggcgcacgggttgaaataattttccttaagaaatccaggaagctctggcctggccctccctctagaaaggaaagtccaagtaaagagggatgccacacctggggaagggagagaggatgtgacgacacctccaggaatgcagggcccacgcaggtgcactggcacccacgaacttcctgataa

SEQ ID NO: 275370 - DNA, 211 bp, Homo sapiens
  chr20:49346548-49346759
  hypo
cccatctgagtacccgctgggagtcgggttctgtgccactcaatgccagcaaagcacaagccgtccctgcgccttcgggagctttcattctaggctggtggcagattactcacaaaactcagatgcacacaaaaatgggaaacctgtaacttgtaacaagtgctgggcaacaggggtacaagtgttaggaggcctccgaggtgggcaggga

SEQ ID NO: 275371 - DNA, 43 bp, Homo sapiens
  chr20:49355686-49355729
  hypo
aagtagcttgagagcggccaggcttggtggctcacgtgtgtaa

SEQ ID NO: 275372 - DNA, 101 bp, Homo sapiens
  chr20:49358022-49358123
  hypo
tgtctggtttaccatcaggtcgcagcatctaaatctggcagacttacttagtgtactataatgcatgcactcttttttttgtggagtggggacggagtcta

SEQ ID NO: 275373 - DNA, 40 bp, Homo sapiens
  chr20:49358363-49358403
  hypo
tgagccaccgcgcccggccgcactctgtcttttaagcaaa

SEQ ID NO: 275374 - DNA, 138 bp, Homo sapiens
  chr20:49377933-49378071
  hypo
ttcctaaattggtaaaatctgattcatcagaattgcaattttgatcaaagccagtaactcctcacacaaatccttctatgtgtgcagaaagtgagcgtctgaaaactccaggcggagtttttgcgctaggttatctac

SEQ ID NO: 275375 - DNA, 77 bp, Homo sapiens
  chr20:49381163-49381240
  hypo
agtctcaaaaaaaaggatggataaaatatttaacagtggtcatacataattcattcctgagtcgacacccatttcca

SEQ ID NO: 275376 - DNA, 69 bp, Homo sapiens; identical to SEQ ID NO: 220053
  chr20:49406843-49406912
  hypo

SEQ ID NO: 275377 - DNA, 193 bp, Homo sapiens
  chr20:49467237-49467430
  hypo
gagtgggcccctgagcggcgtccctgcccagccagcatctggcctaccgtgctcactcttggtgcctgctggtgtgtttgagtctcccccccggtagagcacatagtaggtgttcaataaatagtcatcagcagatgttctgaaggcttcttgcctgcctcccagatttcttagggggcgtgtccaggcactg

SEQ ID NO: 275378 - DNA, 77 bp, Homo sapiens
  chr20:49468873-49468950
  hypo
agtggccaggccttgcgctttttgtggctttgtgtgtgtgtgtgtgtgtgttttcttttttcttttttatagttaca

SEQ ID NO: 275379 - DNA, 480 bp, Homo sapiens
  chr20:49487403-49487883
  hypo
ccctgtggcagaggcgggccttgggctgggggtgggctgcggaggagctcacagccgtgtcaggtttctgtgtcttgacctatcctatcccagagcagagaacattcctgcctgcggcccgggaggagggggtggggagctggattccaaagggttggacgcacctcctggaccccagcggggactcattcccagccggagggcgagaggtgggacgtggagagctctgaagtcttctctgagattttcaaaggtgaaaaccccagggtttgagtttgctgctccatcctcaaggagccctagagggcgatgggcaagggctggtcttggagctggacaggccgaggggaccccagctccagtgctccctccctcccgggacccctgagacatagcgactcctcccttgcaggctgccatgatagtccaagagagaacgggtgtgaaagtggtttccatggcatgcgggtgtgccggtga

SEQ ID NO: 275380 - DNA, 33 bp, Homo sapiens; identical to SEQ ID NO: 220054
  chr20:49556446-49556479
  hypo

SEQ ID NO: 275381 - DNA, 105 bp, Homo sapiens
  chr20:49620547-49620652
  hypo
gcaggcagggcaggcgtgtcctccgcgctcagttattgtctctggtgtccgaggaggcacttccgaacaagatgtcactgtcctgggacacgctcagctgcgact

SEQ ID NO: 275382 - DNA, 459 bp, Homo sapiens
  chr20:49620878-49621337
  hypo
ggcagggatgctggtgaactcggggctgtcggccatctcgttctcgatgacgtagagcaggggcgcgaagagggcgatggccacgcagaggaagagcagcaggagcccgaactcgcgggtgcagcggcgggccgtgagccccagcgtctgcagccccagggagtggcgcgccaggcgcatcacgtacaggatgcgcagcgcccgcagcacgcgcagcaccagccccaccttgtccaggtagctgttgcccgcgccgggcttgcgacggcctgcggcggcgccgtccaccagcagcgtgatgtagtagggcaggatggccaccaggtcgatcagcgtcagcgggctccgcaggaaggcgaacttgctgggcgcctgaatgagccgcaggaggaactccagggagaaccagcccacgcacaccgactccacgatgaagacgttgtggcacatctgggaaca

SEQ ID NO: 275383 - DNA, 182 bp, Homo sapiens
  chr20:49948210-49948392
  hypo
cagcctgcccaggacgcgccgttctgcggggaccacagctcccactgcgagcagggccagccaggcagagccttggaaaaatgctgcggcggggtacaccctggcactcggctgtgctctgtgccgccccaaatccgcccgtggcctcctgccaaccgagtgggattcggtacattggttta

SEQ ID NO: 275384 - DNA, 91 bp, Homo sapiens
  chr20:49969377-49969468
  hypo
ctgtcacttttatgcgtcctaatttttctataatatacatacattatttgagtaagaaaaataaacatgtttgtagcgggatcagatttac

SEQ ID NO: 275385 - DNA, 117 bp, Homo sapiens; identical to SEQ ID NO: 220055
  chr20:50084694-50084811
  hypo

SEQ ID NO: 275386 - DNA, 60 bp, Homo sapiens
  chr20:50104487-50104547
  hypo
ggcgctgagacgggctctgtcggtgacctggggagaggcgggacccactggcagatcaac

SEQ ID NO: 275387 - DNA, 413 bp, Homo sapiens
  chr20:50150222-50150635
  hypo
gtgccttccaggcaggctgccgcaaggccaggcgcccaggacacaggactgaggtgatccacaagcaatgaggcttgcagactggctctggcatgaccgcttgcaaaaacacacgaacccacgcgctgacacgtattgcttttggataggggtggagaaatgtatggaatctgcaacccgcaggcctcaaggtcaccttttagatgggggcagcagggcccaggcatgtggcacacataaggactcatctccatcttcaaatctggatgggaagaactgtctcttgctggtttcaagccatttcctggggccctcctgccttggagaattccagagatattcctatttttagtcattctaatagcttatgtccactgtgccgcaagctttcacgtgtacgctcccctgttctc

SEQ ID NO: 275388 - DNA, 367 bp, Homo sapiens
  chr20:50199790-50200157
  hypo
ccttaagtcaacaccgacgcggccacggtgcctggcaagatgaatttcttttttcaattcagccacaaccttatttatttattggatgctaacacctggtatttctttcgtctggaagttcgcggcttgctttggcacgttttaggttcagtaccgcggggtggctgagctacctgacggggtgacaggaggcctccctctgaggtggatccatggagcagaggcagcacaaaccaacttccaaggacatagtctagaccgaaaaggacaccctgaccctcgttttcaagctttactggctaggagaattccgtccacagaagctgctatccttgagagcgcaaagcatagccgatcgtgagtgctc

SEQ ID NO: 275389 - DNA, 320 bp, Homo sapiens
  chr20:50208575-50208895
  hypo
tcttttccacagcctgttctcgtttattctttctttcttccggaggaatttgaacacagcctgggctcccgcagttcatgactgcaaaaggcttcgccttcgaaatctgacccaagtgggcatattcgggaaatgtggcagcttcgaagaacatgagccagttaagttttctctacctattcttcctccgcactcacctcccagttctaggcagctggtttatgcagcctgctttccaggactgtcgaaggaaaaggcacctctgccaaaagcaccccaggctacagggctgaacagagacccatcgtatcattcgctgg

SEQ ID NO: 275390 - DNA, 79 bp, Homo sapiens
  chr20:50213712-50213791
  hypo
aaaccatgctgtggcggagaagacagattcacgggtaatgccgctttggcctgagaagatgcttcggagctccaggtgg

SEQ ID NO: 275391 - DNA, 200 bp, Homo sapiens
  chr20:50293891-50294091
  hypo
ttaaattaaatacagcgcccaccctccctagccctgtttcatggccatataagctagtagctacctcatggaacagagaagacccagagccttctccttttaccacaaaacttgtactggtgaatgctggtctacggggcccagcggcttctaatggaaggtgactggggaaaggcgtggcttgccgtttgtgcctctgg

SEQ ID NO: 275392 - DNA, 31 bp, Homo sapiens; identical to SEQ ID NO: 220056
  chr20:50326111-50326142
  hypo

SEQ ID NO: 275393 - DNA, 102 bp, Homo sapiens; identical to SEQ ID NO: 220057
  chr20:50337348-50337450
  hypo

SEQ ID NO: 275394 - DNA, 41 bp, Homo sapiens; identical to SEQ ID NO: 220058
  chr20:50346533-50346574
  hypo

SEQ ID NO: 275395 - DNA, 212 bp, Homo sapiens
  chr20:50378297-50378509
  hypo
caaaaaaaaaaaaaaattagcacaacttgagtggcttaaaacaatgcaagtttattaccctacagttaggtccgaagtccaaaatgggcctcatgggactaaaatcaaggaaggtgtcagcagagccgtgttccttctggaggctccaaccgagtccgtttccttaactcttccaacttctagagtcccccgcattccttggctcatggccc

SEQ ID NO: 275396 - DNA, 93 bp, Homo sapiens; identical to SEQ ID NO: 220062
  chr20:50390636-50390729
  hypo

SEQ ID NO: 275397 - DNA, 79 bp, Homo sapiens; identical to SEQ ID NO: 220063
  chr20:50405412-50405491
  hypo

SEQ ID NO: 275398 - DNA, 208 bp, Homo sapiens
  chr20:50406978-50407186
  hypo
agcgccggtgctgccgttctcacccacggtcattggctcagaacccgtaaagtcacagggattctctggcaggggcgtgttgggaatctgaccgcccatgtgcatccgaatatgttgctgcagcatcacggcattagtgaacttcttctggcagatggggcacgaatgctgcgtcttaatggatgtgttggttcggtgaaccccaagg

SEQ ID NO: 275399 - DNA, 193 bp, Homo sapiens; identical to SEQ ID NO: 220064
  chr20:50407493-50407686
  hypo

SEQ ID NO: 275400 - DNA, 155 bp, Homo sapiens; identical to SEQ ID NO: 220065
  chr20:50407905-50408060
  hypo

SEQ ID NO: 275401 - DNA, 149 bp, Homo sapiens; identical to SEQ ID NO: 220066
  chr20:50408300-50408449
  hypo

SEQ ID NO: 275402 - DNA, 178 bp, Homo sapiens
  chr20:50408658-50408836
  hypo
gctcagtacagctccggagaagtcttctgaaggcacaggcccctcgctgtcattcatgatgaggacaggtggatttttagtgcaatttttcttatgttccaggaactcagagatgctgaagaactccgcacagcatttctcacagacgtgcgtctcctcccgacgaagccgctttact

SEQ ID NO: 275403 - DNA, 38 bp, Homo sapiens
  chr20:50411955-50411993
  hypo
aaacaaaaacagataaaaatgttcgtcaattcccagaa

SEQ ID NO: 275404 - DNA, 212 bp, Homo sapiens
  chr20:50419259-50419471
  hypo
ggctggggcggggacgaaatcagagggggacccatccttgctccagctatctcagtccttggagaggaaaagaaaatggggagaaatgcgtactcattaaaaagtaggagcttacgtagaagttttggaacggctttatttggtagttacttgctccaaagattacttggtaaggttgatgtccaccagccgagaagggagatctcttcaca

SEQ ID NO: 275405 - DNA, 31 bp, Homo sapiens; identical to SEQ ID NO: 220067
  chr20:50430800-50430831
  hypo

SEQ ID NO: 275406 - DNA, 38 bp, Homo sapiens; identical to SEQ ID NO: 220068
  chr20:50441826-50441864
  hypo

SEQ ID NO: 275407 - DNA, 157 bp, Homo sapiens
  chr20:50451581-50451738
  hypo
cacaaaaacgtgcctggcgtgtggcaaatgttgtcggtgtgggctttcgctattattaacctaaagtgttgtactttcacataacaactccattgagcgtcttcaggcatctcaaacttccccgtccagttggctcgttttctaatcctacccatct

SEQ ID NO: 275408 - DNA, 42 bp, Homo sapiens
  chr20:50591574-50591616
  hypo
ttagtataaaaatggcgatttcggccgggcgcagtgcctcac

SEQ ID NO: 275409 - DNA, 300 bp, Homo sapiens
  chr20:50602381-50602681
  hypo
cccagctccaagctgcttctttcttggttctctgctttgcagagtcaaatgacctcattgccgaagatggcggcatccaagttccaggcagcaagatggagaaaagaacaaagagaaagcaaagatacccacccgaggcttgacacttccatttatatcccattggccagaacaaagtcacgtgaccgtacctaagctacaagggaggcttggaaaggtagcgtttctttctgaaaaaattcagccctgctgagaattcaattccatggaagaaagagacaggatcttgacaactagaac

SEQ ID NO: 275410 - DNA, 200 bp, Homo sapiens
  chr20:50633365-50633565
  hypo
ataaaataggtatctcctattttaacgcatgatgtggctgttgcaggtggcattatcggcgggaggaccacacccggtagagcatataatgcctctgtaaggtgagcctcagcatgcacatagggacctcactggggatagtgaagtttctcctttttgtgttttgtaatgtgagtgagggacttcgatgactccaacca

SEQ ID NO: 275411 - DNA, 34 bp, Homo sapiens; identical to SEQ ID NO: 220070
  chr20:50805266-50805300
  hypo

SEQ ID NO: 275412 - DNA, 120 bp, Homo sapiens; identical to SEQ ID NO: 220071
  chr20:50805540-50805660
  hypo

SEQ ID NO: 275413 - DNA, 33 bp, Homo sapiens; identical to SEQ ID NO: 220072
  chr20:50805900-50805933
  hypo

SEQ ID NO: 275414 - DNA, 42 bp, Homo sapiens
  chr20:51794668-51794710
  hypo
tcttttaccttccatttctgcgctaccctgctgttcctcttc

SEQ ID NO: 275415 - DNA, 139 bp, Homo sapiens
  chr20:51870537-51870676
  hypo
ttgccttctcggtccgtctcgaaacccagcctgttcagctcggtgcagttgtaccgacagagcagcaagatgtgcgggactgtgttcacaggggccagcagattccgatgccgacagtgcagcgcggcctatgacaccc

SEQ ID NO: 275416 - DNA, 43 bp, Homo sapiens; identical to SEQ ID NO: 220073
  chr20:52179947-52179990
  hypo

SEQ ID NO: 275417 - DNA, 338 bp, Homo sapiens
  chr20:52198075-52198413
  hypo
ttcatccagaggggcggcgaggtcaggagaacacgtccccggctgcctcccgtccacagacatggtgggcgactccgcgccggccctccggtccttcttgtggaccctggagtgcaagaccagctggtggtaggttctgaaagctttgccgcactcggagcagtgagtgggcttctccttgctactgggtaacttgggatccgcgtccacggagggcgcttcgccgtgggagtgtttgcacttctctttctcttgcgagaggcctgcacaactgcccttatttgtttctccaagctccttctcggaactcgaatcgtcgttgtcggtgctcccttctt

SEQ ID NO: 275418 - DNA, 182 bp, Homo sapiens
  chr20:52214813-52214995
  hypo
catgcacgtgaacgcggagtctgctgttggaaatgtgttgggaagggagagttcccggtaagaattatgtatttaggagctttccaaatactgatggcatgttgagccatcagactggataaaatcacacgaaagaggtgctagtattgggcccttgggtggttcagcgcctggaagtcaag

SEQ ID NO: 275419 - DNA, 250 bp, Homo sapiens
  chr20:52234390-52234640
  hypo
tccctaggcatgtgggacctcgaagatgccgaatcagctaaacgggaggtggcttgagtaggatttgctgccagctaaagcgtgagatgctattgcatgtgcaaggcaaggctttcttcagcggcatcatcttccaaaatagcccaggtatatctcaccagaattaaaccgggctgcaggtggcctttcctcatacttgaccaatgacgtgattaatttagatctgttcggaagtatttatttaaatcca

SEQ ID NO: 275420 - DNA, 32 bp, Homo sapiens; identical to SEQ ID NO: 220075
  chr20:52281658-52281690
  hypo

SEQ ID NO: 275421 - DNA, 39 bp, Homo sapiens
  chr20:52305003-52305042
  hypo
tcaagactgtttctacaggccgggcgcggtggctcacgc

SEQ ID NO: 275422 - DNA, 77 bp, Homo sapiens; identical to SEQ ID NO: 220076
  chr20:52311776-52311853
  hypo

SEQ ID NO: 275423 - DNA, 153 bp, Homo sapiens
  chr20:52341604-52341757
  hypo
ggcccggccatatttttcatctcctcttccggatctcctctccgaccctgccctccggcctccgtggtggccttccctggacggtattcacacgttcccctactctatagtttccagttgggtttagccaacgggagacacctggaggagatg

SEQ ID NO: 275424 - DNA, 198 bp, Homo sapiens
  chr20:52374063-52374261
  hypo
tgtgagccaccgcgcccggccttaagtttgttttcaaagtgcgtttcaaacttaaataaacccaggctcagcaatgaaaggattcaggttattacattctgattgtccagggagcaggcagtgcggctggctccccgggagaatgctggatcgttcattcagcgagtgcgcatgcctagaagacgatctgccagctgc

SEQ ID NO: 275425 - DNA, 182 bp, Homo sapiens
  chr20:52481243-52481425
  hypo
gagggaggagaggatcgtgactgaggaaaagcgttctgacagaaataactgcaaatattgcaaggttgagcttctaccaatgctagtttttcctgacccaggagaactcacatagtgttatgaattttaatatcacagcaattttttatcgagaacctaacaggagccgcacattggattaa

SEQ ID NO: 275426 - DNA, 259 bp, Homo sapiens
  chr20:52538411-52538670
  hypo
tgatgtaaatgtgccgcgttgtggtggtggtggagaggttgtcggagcctattaatgttaaaaggaaaagtgcgcactcaatcagcctgcaggtgcaattctttacctgccctagagaaatgaaattctcatgggtgcacagggagaagtggtaaagggtgccctttgttgtattattatttgtttcagtgaagaactagaaacaacctaaacgtgcatcaggagttcaagaccagcccggccaagagaccagcctcgc

SEQ ID NO: 275427 - DNA, 216 bp, Homo sapiens
  chr20:52685953-52686169
  hypo
ttgtgttaacataccgtttatctccatgactgagttttttggcatcccttacatttcgtgcccaaggtgagagtctcactggctgcaccctcatcccaggcccgactggactccagttccacagcatcctttccatgagacctggaaccagatgcagctccctcttcacccagcttcatgttcctagttgtaaaatggagacgatggtaacagcga

SEQ ID NO: 275428 - DNA, 161 bp, Homo sapiens
  chr20:52758814-52758975
  hypo
tgtggccggttccttacaggccacagactggtactggtctgtgccctgggggttggtgacccctgttgtatgtgatacattcttctaagtcataaagtcgttagtaatttcttacgtagcagcagaaaactaatataagtaccttacgttgtatctacacc

SEQ ID NO: 275429 - DNA, 172 bp, Homo sapiens
  chr20:52773806-52773978
  hypo
ggatgtcgtatttgcggacaatctgtaatgcacacgcacacaaaaacagaattacccctctcttcttctgccttgtgaaacagcacagaacataattgcagaaaccggtaaaggttttacccaacaaagagccaaatgcagttgaagctctgctaatcggcgaccaatgcac

SEQ ID NO: 275430 - DNA, 34 bp, Homo sapiens
  chr20:54522657-54522691
  hypo
gaggaggaagaggagaactcgttgagttttatct

SEQ ID NO: 275431 - DNA, 70 bp, Homo sapiens
  chr20:54681487-54681557
  hypo
cggggcagggagcacgggatcatggagacaagacggaccaaggagcacgggaccacggagacgagatgga

SEQ ID NO: 275432 - DNA, 38 bp, Homo sapiens
  chr20:54747158-54747196
  hypo
ttgagtcaaaaaagaccagccggtgcggtggctcatgc

SEQ ID NO: 275433 - DNA, 141 bp, Homo sapiens
  chr20:54880315-54880456
  hypo
ttccgctacccctgcgctttcccctaacgcccacaacttggtaataattgggaggccagcgccagactgagtggattcaacagtcattaagcaaaatgcaaaagttaaaccagagcctcgctggatcgcacagctgttcct

SEQ ID NO: 275434 - DNA, 42 bp, Homo sapiens
  chr20:54931802-54931844
  hypo
gcctggtgacaagaaaatcacgggcgctttgggaggccgagg

SEQ ID NO: 275435 - DNA, 128 bp, Homo sapiens; identical to SEQ ID NO: 220079
  chr20:54944844-54944972
  hypo

SEQ ID NO: 275436 - DNA, 103 bp, Homo sapiens
  chr20:55026766-55026869
  hypo
atggggagccactgaaggagcggcggagtgacgatgagatttaaacaacgcactcgcgccctctttggaaagctactaacccggcaactatgtgtggttctcc

SEQ ID NO: 275437 - DNA, 86 bp, Homo sapiens
  chr20:55071606-55071692
  hypo
atcagtcagtcaatcaatcaatcaatcaatctatctgctgctgttgctgctgactgcacaggcatccatatcggtgggtctttctt

SEQ ID NO: 275438 - DNA, 50 bp, Homo sapiens
  chr20:55091876-55091926
  hypo
catgtgactagcatcggtcagtcagacagggcacccgggacaatgggcag

SEQ ID NO: 275439 - DNA, 113 bp, Homo sapiens
  chr20:55667945-55668058
  hypo
gacttgctgggagccgggaagatgccagcctgcttttctgctctccctccttcaatccgcaccggggtctagggagcaggcgctgtcgtgatgatgcccgctttacggagagg

SEQ ID NO: 275440 - DNA, 32 bp, Homo sapiens
  chr20:55668445-55668477
  hypo
tgactcgggcagtgcgacggctcatgtctgcg

SEQ ID NO: 275441 - DNA, 619 bp, Homo sapiens
  chr20:55685233-55685852
  hypo
tctccagctgaccactgttccgtgaggctgtctgagcaggcttcgctatgcacgcataatagcgacagcgcaaacagcagcagcagcagcagcctcagctggctcggcggggcttggctcagcgtgtgcggggtgctgagctaagtcttcccaaacggcgtgtgcggggtgctgcgctgtcttccagatccgcttgtgcagggcgctgtgctgtcttctggttcggcgtgtgcggggcgctgtgctaagtcttccggctgggcgtgtgcggggcgctgtgctaagtcttccggctgggcgtgtgcggggcgctgtgctaagtcttccggctgggcgtgtgcggggcgctgtgctgtcttccggttcggcgtgtgcggggcgctgtgctaagtcttccggctgggcgtgtgcggggtgctgtgctaagtcttccggctgggcgtgtgcggggcgctgtgctgtcttccggttcggcgtgtgcggggcgttatgctaagtcttccggctgggcgtgtgcggggcgctgtgctgtcttccggttcggcgtgtgcggggcgctgtgctaagtcttccggctgcattcgcactctttccctccgactcaaccatggcagtgagg

SEQ ID NO: 275442 - DNA, 152 bp, Homo sapiens
  chr20:55692780-55692932
  hypo
accccatcaaagcaccgcccacccaccccacctaagcactgcccaccccaccccatcaaagcaccgcccacccccaccccatcaaagcaccgcccacccccacctaagcaccgcccactctcccgcacctgcagcaccgcccaccccacccc

SEQ ID NO: 275443 - DNA, 240 bp, Homo sapiens
  chr20:55740618-55740858
  hypo
ccctgatcaggacccactcccgtgagcgcagacttctgttctgttacctgtacccactgcccgccatggtgcctggtgtacggtggacacacgatgaattagtgagtgagcagatgaagaatgaacacttccggccaaagaggaagctcgtgctgtccccagagcccaccctgctcctagaaagggcatcgcatcgcactttggctgccccaagccaccgtggtcatccttatttatggc

SEQ ID NO: 275444 - DNA, 171 bp, Homo sapiens
  chr20:55742062-55742233
  hypo
ctacccgtgtgcagcgtccacggtacagcaggctggccatcggccccacccaccagagaagctaacactcagcgttggtgcgcacagaggaaggccctcaggcagtctggaagcaggagggagaccgagccctgagcaatggtccaggaactcagtcgtcagggcccaaca

SEQ ID NO: 275445 - DNA, 122 bp, Homo sapiens
  chr20:55748184-55748306
  hypo
gcagcaggatctggtggccccgcagcctgcccggcccaggtgaccacaccccaagatggcgtgacacccaccagcgtctgcacgatggcgtggttggtggcgttcatgtaggagttcagagg

SEQ ID NO: 275446 - DNA, 39 bp, Homo sapiens
  chr20:55797062-55797101
  hypo
tggacccagctaaatcgatggaaacgtaaagagagcaga

SEQ ID NO: 275447 - DNA, 229 bp, Homo sapiens
  chr20:55904350-55904579
  hypo
aattaggatgacacgttaggaacttcctggggttcttaagggaattagaagagggacctgagtgcaaagggctttggaggcattcaactgctatgaaacgttagtaaggacagggattgcgttcacctcaatcacagctgaacccattgccgagaactgttatcccacacagctggatcttcatcattatgtgttttaatgaaaaatcgctgatattgctgtccctaaa

SEQ ID NO: 275448 - DNA, 220 bp, Homo sapiens
  chr20:55925381-55925601
  hypo
agtaagagtagttcacgtatgatttcacttgaccctaattaggaacagccctggcatcattttccccaccatgcagcaggaaactgaggcccaaagagccccgaggtgggctcagggtaccccagtgggcaaacagggagaggccagggcgggaaacccgcggccgacctcgccttgttcggaggcagcgttagagcagcttctcggaggttggccttgg

SEQ ID NO: 275449 - DNA, 64 bp, Homo sapiens
  chr20:55936563-55936627
  hypo
tttgcggatttattcggaaatagttcttgaaattgagcatacgtgcatgcgtgagcatctattg

SEQ ID NO: 275450 - DNA, 105 bp, Homo sapiens
  chr20:55959114-55959219
  hypo
tgacaatccccagcatcctacgggcccgaatccacactgcggattccgtcagctcactggcggcagcactctctggtgtctttttttttttttttttttttgaga

SEQ ID NO: 275451 - DNA, 225 bp, Homo sapiens
  chr20:55959339-55959564
  hypo
ggagtgaaccactgcacctggccttctcttgtgtcttttgtctttcatttctcttcttcactacccgtcagcatgataggtttcttcctcctcttatgaatcccagtgtcaagatacagcctgatcgccccttaatacggtgccgccattactccagacccctctgcaagcattggtcattcatcagctttcacgaggtgaactggggacgaggcaggggcttgg

SEQ ID NO: 275452 - DNA, 71 bp, Homo sapiens
  chr20:55969232-55969303
  hypo
tccctaatgccagttgatcacgtgtgtgtgctcacgcatgtgcgcaccacgtagattccattgagagagac

SEQ ID NO: 275453 - DNA, 218 bp, Homo sapiens; identical to SEQ ID NO: 220085
  chr20:55969522-55969740
  hypo

SEQ ID NO: 275454 - DNA, 165 bp, Homo sapiens
  chr20:55981561-55981726
  hypo
agccgacggggtgacgcacccagtcacagtacgggtctccccccagcgtgggcgctggcgagtatggcagctgttggcgccatcatctctgtggtcaccgccattgcactcctttgctccagcattcacgcagtcactctcacatcctcacggagctgctgcagg

SEQ ID NO: 275455 - DNA, 62 bp, Homo sapiens
  chr20:55996755-55996817
  hypo
ctgctgaaactccttcccaccgcggggccttcgcacataccgtgtccactgcctggagcacc

SEQ ID NO: 275456 - DNA, 260 bp, Homo sapiens; identical to SEQ ID NO: 220086
  chr20:56001371-56001631
  hypo

SEQ ID NO: 275457 - DNA, 133 bp, Homo sapiens
  chr20:56031269-56031402
  hypo
acagcagggtgtgacgctgatggtttctggggcagaggcaagccaggcaggccacgtcggccacctccttggcgctccccaggtatgccgggcacatttcagccccggggcctttgcacggcctggaaggctc

SEQ ID NO: 275458 - DNA, 274 bp, Homo sapiens
  chr20:56076054-56076328
  hypo
ggtggccagtagcccggccttgggtttctacaatgtgcgctgatgaactgtgggtcaaatttcaccggtctgtcttctccagtaaaggactgtgcttactattcactcgtttattcaacaagtggtgacttaacgagcaatgctgaggccaggcctagtgccaggagctggggacggacccgatgggccaggcccgccttggaggagcctgcggtgccctgcatgtgggaatccggcacttattaaagaaccaaataagcgtgaagtgtgcagg

SEQ ID NO: 275459 - DNA, 205 bp, Homo sapiens; identical to SEQ ID NO: 220087
  chr20:56099534-56099739
  hypo

SEQ ID NO: 275460 - DNA, 119 bp, Homo sapiens
  chr20:56115074-56115193
  hypo
ggacagacatcgatcgaggtgtccttgtgctgagggtgttgctagcatgtgctttactcagtgagcagcagtgactcagcacagggcaggccggccgccgtctgcgtcaggaggctgta

SEQ ID NO: 275461 - DNA, 371 bp, Homo sapiens; identical to SEQ ID NO: 220088
  chr20:56126192-56126563
  hypo

SEQ ID NO: 275462 - DNA, 155 bp, Homo sapiens
  chr20:56167908-56168063
  hypo
cagggatgcgaagccgggcgagcctgctgcagctgccacctctttgggtgggagcgtgcctcactcgagggcttgctctctgtgtgaggctttttcttgtccaacaaacactcacttgctgtgtgtcaggcctgtccaagcgtgacaggtgtcca

SEQ ID NO: 275463 - DNA, 148 bp, Homo sapiens
  chr20:56186966-56187114
  hypo
gtggcgtggaccggcggaacctggcaggggacagtggcacagcctcaccggagattactgcaggcttcttcctttccctcaccaccacacgcaggcctgtcctctgaattcttcctggacaccatcgaactggcggccaaagacttca

SEQ ID NO: 275464 - DNA, 103 bp, Homo sapiens
  chr20:56227531-56227634
  hypo
tggcaggtcgatctcgtgctgcaggtacggataggtgggctggaagcggtggaagcgctcccgctgggcgaagggcggcacggccaggcggtcggtgggccga

SEQ ID NO: 275465 - DNA, 649 bp, Homo sapiens
  chr20:56239140-56239789
  hypo
cagtgcctgctggcgaggtcggtcgcaaaccagagacccaagggcacgcgcaccgaccgtccctggccccagccgtgttcccacctggcatcacgggagcagggctgtgggcagccaccctctccacaggcctggtcccgggactcacctggcctgggacagccacgccctgacactgtcggtccccaccccacaccaccccagggatgcctgagactcagcatgcgggcctctacgacgcactgatcagggcccactcaggccgagttcatcaagcatgggctccctccccacactaagtcccacacatccctctgggcaggcaccgtgaatccaccagcaaagaccccttgggggagagaaaggtgcctccccgcaaaggccttggagtcaagttcaaaacatgatgtgtgtatgaagcggcaccaatataaacacggctctccacccgcggcagctcgcagaatcctcttcgtgcctgcatttgttccgaggagcgcagggaggctgctggggcccattcccagtcgcagcttgagagccggactctcaggatcagatgcctcgcgggcaagggaaggaaccccagcaggactgccaacgcgaggcggaaggagagaaggcccagcgcggccgcatccctccctct

SEQ ID NO: 275466 - DNA, 102 bp, Homo sapiens
  chr20:56262196-56262298
  hypo
gtaggttctagaaccgatctgccaacgcggaggaatgagttcaagatgtggagcaatgttctttttccgttaaggggttcaactgagcgacttccttcttct

SEQ ID NO: 275467 - DNA, 145 bp, Homo sapiens; identical to SEQ ID NO: 220089
  chr20:56264917-56265062
  hypo

SEQ ID NO: 275468 - DNA, 38 bp, Homo sapiens; identical to SEQ ID NO: 220090
  chr20:56265326-56265364
  hypo

SEQ ID NO: 275469 - DNA, 153 bp, Homo sapiens
  chr20:56265963-56266116
  hypo
ctgcgcctgataaacgctgatgcctctacaccccgaggcctggggatcccgcttacaaggctaccagagaagcagggttagagaaagctggtcctggtgcctcctcctcgtccctaccggcccctcggtcttttcctacgggacttctgaaaa

SEQ ID NO: 275470 - DNA, 140 bp, Homo sapiens
  chr20:56270430-56270570
  hypo
tctggtacccgttacgggcccagattcaggttacaaaatgttttccccgctgaagcacctggcatttcaccgctagagaatcggacctccagcccagcttggccctttcacaatccgtctgccctgcttaaaactgcagg

SEQ ID NO: 275471 - DNA, 180 bp, Homo sapiens
  chr20:56271495-56271675
  hypo
tcaaatcctgctctgcggtgtgctgggcaatccctggcaggtgacttagctccacctcctccatgcgatggggttgccatgaggattagtgagacagggtgtgcaaagagctcagtgagcacctgccactgtcagtaggaattgctagggttcaaaaagccgcgacgtcaccggcaagaa

SEQ ID NO: 275472 - DNA, 95 bp, Homo sapiens
  chr20:56299650-56299745
  hypo
ttttgcaggagtcaccctctttggtttctgaaatgcggacacacgttacaatggaaacgagcacttggggctccctgtctcggaaaagttgttga

SEQ ID NO: 275473 - DNA, 77 bp, Homo sapiens
  chr20:56323232-56323309
  hypo
agcataggcacccacgggcagggctggctttcagggacgtgctgctgctggtgcaggaggcccgcctgggttcagat

SEQ ID NO: 275474 - DNA, 67 bp, Homo sapiens
  chr20:56717706-56717773
  hypo
cagggtcttaaatacgagataaagtggaagtgacagctgagttacaggcaaacgagagccagatcat

SEQ ID NO: 275475 - DNA, 303 bp, Homo sapiens
  chr20:56772089-56772392
  hypo
tcttaccaccaccccgtcaccggggccacctctcctgggcctcctcctctcccactccaccccgtcaccggggccacctctcctgggcctcctcctctcccactctgccccgtcaccggggccacctcttctggccctcctctcccactccgccccgtcaccggggccacctctcctggccctccgcctctccctcgcttcttttctccttgctaggtcagcagatctttgaggacggagccaggctcacacttctgtggcactgatgctgtcccaccagcacaccgtcgtaagcattcacga

SEQ ID NO: 275476 - DNA, 1031 bp, Homo sapiens
  chr20:56780190-56781221
  hypo
aaaatccaagcccatttctacggcctctgtgggattaagacgtcggttccaattcttcagcctctctgcctctgcccctcgccgtggcctcatcggagggaggcatcgctccctgaccctcgactttcagcttggccactcgactcgcttggcttcccacctacagccaggagtgacggcataacaggtctgcgcccgcccctgaagacgcctcccacgtccccgctccccacgtccgcgcccacacctgaagacgcctcccacgtccccacgtctgcgtccgcacctgaagacgcctcccacgtccccgcaccccacgtctgcacccacacctgaagacacctcccacgtccccgcaccccacgtccccacgtctgcgcccgcacctgaagacgcctcccacgtccccgcaccccaagtccccacgtctgcgcccacacctgaagacgcctcccacgtcccgtctgcgtccgcacctgaagacgcctcccacgtccccactccccacatctgcgcccacacctgaagacgcctcccacgtctgcacccacacctgaagacacctcccacgtccccgcaccccacgtctgcgcccacacctgaagacgcctcccacgtcccgtctgcgccgcacctgaagacgcctcccacgtccccactccccacatctgcgcccacacctgaagacgcctcccacgtctgcacccacacctgaagacacctcccacgtccccgcaccccacgtccccacgtctgcgcccgcacctgaagacgcctcccacgtccccacgtctgcgcccgcacctgaagacgcctcccacgtccccgctccccacgtctgcacccacacctgaagacgcctcccacatccccgcaccccacatccccgcgtctgtgcccgcacctgaagacgcctcccacgtcgacgcctcctaggtctccacttcccacgtccctgcttgtggagcctgtgccccggccgacctgctggtgccaggacagtgagagacgcctgcagcagagctgcccag

SEQ ID NO: 275477 - DNA, 35 bp, Homo sapiens; identical to SEQ ID NO: 220095
  chr20:56941012-56941047
  hypo

SEQ ID NO: 275478 - DNA, 336 bp, Homo sapiens
  chr20:56941588-56941924
  hypo
agtccattacacattcgatacaggtatcaaaatatcataggcacctcaaagacatgtacaactcttaatttaacatttttgaaagaaaaaaaaaccggccagagcattaaaacaaataaaataagaaacacagaggccagtgttaggtgaagaactccgctgcttcagaaagagaatagcagcgctcgcttaccgtgggaacacggccagttaacaaaatgggttttggttttttgttttgttttgttttaccattggtaataagatagttaacataagtggtcagaacttcgctgaatttgtaataaagcatttgttaagcgtgtaaaagtccaa

SEQ ID NO: 275479 - DNA, 154 bp, Homo sapiens; identical to SEQ ID NO: 220097
  chr20:56977720-56977874
  hypo

SEQ ID NO: 275480 - DNA, 83 bp, Homo sapiens
  chr20:56999385-56999468
  hypo
ggccacgttgaaagcggcccatgtgacagtgcatagcagacagtggacgggctgggcaagaacaccaccgagagcaagtgcag

SEQ ID NO: 275481 - DNA, 212 bp, Homo sapiens
  chr20:57009363-57009575
  hypo
tgtagcagacatttacggtaggcttgcagtagtgaaagatccatggactaggaatcagaagactgggtcctcggccttattcccagctctgtcatgcgtgattttgtggctcttaggttggtgacctgcaaaatggagatgttggtcatccttgcttacttcaccaggggcgtccatcctaagacataagagaatgccggtaaattgcttta

SEQ ID NO: 275482 - DNA, 33 bp, Homo sapiens
  chr20:57036551-57036584
  hypo
gggtggtgcacatcggagcgggcaatgaggcca

SEQ ID NO: 275483 - DNA, 185 bp, Homo sapiens
  chr20:57037020-57037205
  hypo
ctcatcaaactggaatgcatcgtgccttacagtactaaaaagccctagaaagccgggactgtctctgcggctaccccatccccaccgcacagggcttggctcacagcaagcacatatttgttgcatgaataaatgagaaatgaatggaagcataggtggccttcgtcttgggacctgagagaact

SEQ ID NO: 275484 - DNA, 162 bp, Homo sapiens; identical to SEQ ID NO: 220099
  chr20:57041475-57041637
  hypo

SEQ ID NO: 275485 - DNA, 183 bp, Homo sapiens
  chr20:57070698-57070881
  hypo
agcctcagtgccctcgtctgtcgcggggtcagagacatgtttgggggaaaggggtgaggtgggttgagagcctcaccgggggtcgcacacacatgaaggtgtgacccatgccatcaccacctcctgtagcaacacagaaccagaaacctgtgcctgccacactgcgcccggcacctggctggg

SEQ ID NO: 275486 - DNA, 212 bp, Homo sapiens
  chr20:57154976-57155188
  hypo
tgagaattcagaggcgccaagccccctgcccgtccccatggagccttctgagggctgcaacgtggatattttccaggcaggaattaatcacggcttcgttggcgctccaagccagaccctacataataccttctataaagagccttattacaccggaaggttgtatattatattcttcactgcacaccagctacgtgcgtaggctgctccct

SEQ ID NO: 275487 - DNA, 88 bp, Homo sapiens
  chr20:57213159-57213247
  hypo
gtggagcccgcggccgttccctgcgcacagtagtccctgcctcgtgcccaccgtaaagactgcctttatcactcgggaggttcattca

SEQ ID NO: 275488 - DNA, 160 bp, Homo sapiens
  chr20:57240788-57240948
  hypo
gacactggccctgcagcatccgtgccacgcttgagcaccgttgggcttaatcacggctcctggacgtgctgggattagtgaatggggcctagtccttccagcgtggtcattgcctaagatgcgttccctgagtggacacgtgccccagagcacacagaaa

SEQ ID NO: 275489 - DNA, 38 bp, Homo sapiens; identical to SEQ ID NO: 220101
  chr20:57241750-57241788
  hypo

SEQ ID NO: 275490 - DNA, 234 bp, Homo sapiens; identical to SEQ ID NO: 220102
  chr20:57244309-57244543
  hypo

SEQ ID NO: 275491 - DNA, 321 bp, Homo sapiens
  chr20:57268840-57269161
  hypo
tgtcccctctacctgaactacgccaccgtggctgccctgccctgcagggtgagccggcacaacagcccctcggccgcccacttcatcacgcggctggtgcggacctgcctgccgcccggagcgcatcgctgcattgtggtgagtgcttcgagaggaggcagccacggtgctcctagtcgggcagcggtgagctcgggcctggggagctcacagccctgctcagactgcagcgcacgcccagagggctgtggacgttatcatccctgctctgtagacagggaaacaggtccagagagacgcggggatttgccccagatcagt

SEQ ID NO: 275492 - DNA, 308 bp, Homo sapiens
  chr20:57375851-57376159
  hypo
gtcaggttccatggcggaagccatgctggatttgtggcgcggtcacaccatcgcccagagaatatgcgtgacttcctgacacagggaggaacacgcacgtggttgccaaagcgctatcaagcacagcaagacctccccaggccagggcccccacgccggctcaggacgggactggccctggtcactcattccacagggaagccagccaagtggtaagcagagagcaagcctattacaaagctacactcacacagcggaaaggctgtccccgggcaggaccttgagcacccacgcgcctgggatgccac

SEQ ID NO: 275493 - DNA, 264 bp, Homo sapiens
  chr20:57386554-57386818
  hypo
gccgccagccggtgcgtgggagaagcgatgacccagcacttccccagcatgagtgaccaaatagccgctctagcctttcccaagaagccatcctctgtccataatggagaaattatgtgaggcgtaatttatagtaaaaatcaaatgaacattaattctggtgagtcatccatgcagaaagggcatcggctatggatgtgggctgccgccgagtacagctgaatgtttaatcaaactgagccaagactgcgccacaggttgtgg

SEQ ID NO: 275494 - DNA, 156 bp, Homo sapiens
  chr20:57392358-57392514
  hypo
ggtcggggaaggagcgggggctttcccgaggaggcgtcagtgagggtggagagagcctccggaaggggagcgggcaccggcgaggatggcaccgcatcctgcaggtgctcgtggctgagggtgggaggtaggtaaaactcccggcagtggggaccc

SEQ ID NO: 275495 - DNA, 137 bp, Homo sapiens
  chr20:57457370-57457507
  hypo
caaagtgctggcgtgagccaccgcgcccggcctcatttttttgtttttattatcagggagcaacggctccattctcccctaaggctgacatttttgttgaaggctgagcacgcatgtcttccgtgcttgtggcaaaa

SEQ ID NO: 275496 - DNA, 37 bp, Homo sapiens
  chr20:57547947-57547984
  hypo
agctcacctgttctcggctcaccgttccctccaggcg

SEQ ID NO: 275497 - DNA, 202 bp, Homo sapiens
  chr20:57554935-57555137
  hypo
gtaaaggctgaaaaagttgccgaaaggattagaagcatcacgcaatataccaatgtaacaaacctgcacacgcaccgaatctaaaattaaaacaaaacaaaaacacaacaaccaaacaaaaacctttccgtgatcatcaggaggctgtcatattctcaccccctacttcacgctgggaatcgagctgcgggctttacaacag

SEQ ID NO: 275498 - DNA, 437 bp, Homo sapiens
  chr20:57571497-57571934
  hypo
aggatggcggcagccgcgcatgtcagagaagggtctggccccaaaagccactcgcgcggtggctgagacagctggagcaaggaaccctctgtcaaggccccagtttttagctaaacgtaaacagaaccattcaagcgagaggagtaccaggacgtttttttctaggaatgaccttaagaaaatgaaaacatcttacccatggttcaccccatgaattccggacaatccagtactcagtcccatcactgatgccccacccagccacagaaacgacatggtttatatatgtggtgtcctggtattcggcatagatgcctccggtgtagttagccagtctttctgttgccattattccacagctgagagcaagcagttaaagaattaccacttttaaattgagagaatttaccgtcattagaaataatctgatatggctg

SEQ ID NO: 275499 - DNA, 230 bp, Homo sapiens; identical to SEQ ID NO: 220111
  chr20:57577637-57577867
  hypo

SEQ ID NO: 275500 - DNA, 269 bp, Homo sapiens; identical to SEQ ID NO: 220112
  chr20:57578208-57578477
  hypo

SEQ ID NO: 275501 - DNA, 202 bp, Homo sapiens; identical to SEQ ID NO: 220113
  chr20:57578998-57579200
  hypo

SEQ ID NO: 275502 - DNA, 146 bp, Homo sapiens
  chr20:57615377-57615523
  hypo
tggaagacattcaaagaccacgccaaagtagaatcaggaggacctggctatggctcactgaccggtccaacttcttcacctttgaaacgaggtgaggacattattaactccactggcgcagcatcgaggtcttgatttacttatga

SEQ ID NO: 275503 - DNA, 239 bp, Homo sapiens
  chr20:57699766-57700005
  hypo
tctgaacctcagatctctctcgtgtaaggggctggccccttcgagaggctcagtgtggaataaaatggctcttatcgcagtgggcttggcagcccgccactcctcatctttgctggtggaacctctagttggtttcggtgtccaccctcctccacgctgggagtgtgttcaggatgaggatcccatccccgtgcacggggtcaagtctgattggaggcgatcatttctggctgtcacat

SEQ ID NO: 275504 - DNA, 380 bp, Homo sapiens
  chr20:57767483-57767863
  hypo
gcgctccacctggacgcccccagacaagtctcggcccctcttcttccactccgtccccactcagctctccaccaccgtggaatgtgtccccgtcaccaggagcaactcgctgcccttcgtcgagggctccaggacgtggctggagcccagggagccccgggacccctggtccaggacgcagaagcctctgagccccaggcccggcccagcccgcctgggctgccgctcgggactaagctcgactgacgttcccagtgggcatccccgggccctggtcagacaggccgcggtggaggacctgccaggcacccccattggcgatgccctggtgcccgcagaggacacagacgcaaagagaactgctgcgcgggaggccatgg

SEQ ID NO: 275505 - DNA, 87 bp, Homo sapiens
  chr20:58045741-58045828
  hypo
cgtgtgtcctgtgccggttcccgccttgcctccttaccgacgcgcctcccttctggcctccaatccccacggcggcactgtggccgc

SEQ ID NO: 275506 - DNA, 122 bp, Homo sapiens
  chr20:58166170-58166292
  hypo
gtagaatattctagcgcatggtgcagcgccagggatgaggcagcctccccagcaatttgcaccagccccagcctgcccttgacagggctctggccattctcgtccctcgcacggacacatct

SEQ ID NO: 275507 - DNA, 110 bp, Homo sapiens; identical to SEQ ID NO: 220120
  chr20:58397113-58397223
  hypo

SEQ ID NO: 275508 - DNA, 78 bp, Homo sapiens
  chr20:58407607-58407685
  hypo
gacagaaatctggaagagtccggagagtgtttgcaaatgcaaatctagtcctggcacgcccacaccccatctcaccca

SEQ ID NO: 275509 - DNA, 400 bp, Homo sapiens
  chr20:58507041-58507441
  hypo
actactactatgtaacagaacgacttcggaaaccgagaacagaataataatgtttcaagagaagcgtggatttacctgacaagtaagcaggctctgggctccagtctactgaactgggggactggttagcgagcaacacagagaactagtaagatgatgattgtgtatctgcaggcagataaaagcgttacggataaaaacaacaacaaagaaaacaatttggcagatgggggaggcaaagattttcccccaaaggaaaaactgctgaatgaatgcaagcagcagtagataattcaaagtcccctctgccctggtaactaacatagctaaggtgtccaaaaagacattaaaggtgaatgaaggggagggaaggcgtcctcctcctcccatcattactaaa

SEQ ID NO: 275510 - DNA, 580 bp, Homo sapiens
  chr20:58507741-58508321
  hypo
acaaaaaaaaaccacgctgccgtattcgcagatgctcggccagcctggagcccggtccagaaaaggccgcacgtggagccacgtgtcgcgcattgagccgccgcgggacgcatcaggcccagctgcgcggaggggctggcggcctcaaccgcaaggagaggccgcaggtggggacggcgggagggagagaagggactgaaggcgccgagcaggaggaaggttttgcgcgcactcccttcttccctaagtggaaccggcagtggcaacaacgaggccgaaggcgaagtccctgctcccaccgccggcacggtgacccttttcccagggtcacccccgaaccaacaaagcacacacacacccgagatgcgccccaggccgcagcgccaaccccccttcagatgtcccggagacaggcgagcagcggtccccagggctcccgtcgccaccgcttctcccgcacccctcagcctcctcgggccggcgacgcgcgcagccccaggcctgctccccgctcgccaagcgcaccgccccgcgcctcagccaccttgaccgagtcgcccacgcgcgggggcggctccga

SEQ ID NO: 275511 - DNA, 201 bp, Homo sapiens
  chr20:58514021-58514222
  hypo
agcagggaaatgacaggaggcgcagcttaggtgtggaggctccaggtggccggtccccgcgcggctcagatgaagtggatccagctctcttcgcactccccgcgaggcatgtgcagcgcgtggttgcgacatgtgaggctgtagtctcggtggtcgttgttgtcccagtactcggcacccgccacttggtagcgcaccgcg

SEQ ID NO: 275512 - DNA, 142 bp, Homo sapiens
  chr20:59225186-59225328
  hypo
cgtgtatatgtgcgagtatgtgtgcaagtgtgtgcacgagtgtgtacgtctgcaaatgtgtttgtgtttctacgtgtgtgtagtgtgtatacgagtgtcttgtatgagtgtgagtgtatacgtgtgaatgtatgtgtatgtg

SEQ ID NO: 275513 - DNA, 36 bp, Homo sapiens
  chr20:59330841-59330877
  hypo
tgagctaccgcgcccggccctttccagccccctctt

SEQ ID NO: 275514 - DNA, 461 bp, Homo sapiens
  chr20:59598779-59599240
  hypo
agcccccacccacacggccactcgcaggagcccccaccctcacaaccacttgcagggagccccccgcccacacggccactcgcaggagccccccacccacgcggccactcgcaggagcccccacccacgcagccactcgcaggagcccgcctcccacacggccactggcaggagcctccgcccacgcggccactcgcagggagccccccacccacgcggccactcgcaggagcccccacccacgcggccactcgcaggagccccccacccacgcggccactcgcaggagcacgcggccactcgcaggagcccgcctcccacacggccactggcaggagcccccgcccacgcggccactcgcagggagccccccacccacgtggccactcgcaggagcccccgcccacgcggccactcgcagggagccccccacccacacggccactcgcagggagcccccc

SEQ ID NO: 275515 - DNA, 103 bp, Homo sapiens
  chr20:59832949-59833052
  hypo
gaaccgagggctcccgggtcgtatctcccctctatcctgcaacgaagcgggaacaggtgagtggaaacgctgttcactggggatggggcggagcctggcatcc

SEQ ID NO: 275516 - DNA, 82 bp, Homo sapiens
  chr20:59871230-59871312
  hypo
agtatgagtgtgtgcgtgtgtgtgtgtgagagagagaccttagagttgtcaaaataatgagtgtgtgtatgtgtgtgtgcat

SEQ ID NO: 275517 - DNA, 467 bp, Homo sapiens
  chr20:59872750-59873217
  hypo
ggattctggaggccttgcagcgcactttcctgccctctcgcgtgtatgatagagacattagcgcgtgtcagcccctttaccggggcttcccattgtcttagcgtgctcctttcatctaatgagcaggcgcccttggctgaacttttcaggaatccgtggggaaccagagtgaatatattatggcgctgtggagcgaatgacaatcgggcagtgctcgcctgtggccgtggaggtatctgcgccaccgcaaaatgcctcacccttcttttgggttttggggtttcaggtcagctctgggggcccgttatcccgtgtcaaggaggcccacgcaggcacccgaggaaggctttggctatcacgaggtggcctttgtgcaggcgggttcagcaactttggcattcattggggcagcctgttactggtgcttggagtaagtgaagagtgcgattgggcgccagagctgacct

SEQ ID NO: 275518 - DNA, 519 bp, Homo sapiens
  chr20:59965387-59965906
  hypo
gcaccatgtctaggaaaccccgattgggttcgtacagtcataggttgcccatagtgccgtgtctgggaaaccccgattgagatcgtgcggtcatagggtgcccatagcaccatgtctaggaaaccccgattgggttcgtacagtcatagggtgcccatagtgccgtgtctgggaaaccccaattgagatcgtacggtcatagggtgcccatagcgccatgtctaggaaaccccgattgggttcgtgcggtcatagggtgcccatagtgccgtgtctgggaaaccccaattgagatcgtacggtcatagggtgcccatagtgccgtgtctgggaaaccccgattgagatcgtgcggtcatagggtgcccatagcaccgtgtctgggagaccccgattgagatcgtgcagtcatagggtgcccatagtgccgtgtctgggaaaccctaaatgagatcgtgcagtcatagggtgcccatagtgcggtgtctgggagaccccgattgagatcatgaggtcata

SEQ ID NO: 275519 - DNA, 252 bp, Homo sapiens; identical to SEQ ID NO: 220126
  chr20:60094624-60094876
  hypo

SEQ ID NO: 275520 - DNA, 195 bp, Homo sapiens
  chr20:60098286-60098481
  hypo
ggaggcctcatctcaggccacggcctactgatccaggcgactccgtctttgggtggagctgcggcactgccagcgggcccacgctggtctctgctcgccggtctctgctctcttgtcaggtgaccatgcgtttgccacgtgtgatgattgcgtggcatggcgtgctcctcgcacgcacagacacacccttccagc

SEQ ID NO: 275521 - DNA, 365 bp, Homo sapiens
  chr20:60119294-60119659
  hypo
gtgtatgtatatggcggggtacggctgacatcgagcgggtggaggctgggtacggctaaacaccccacagcccaggacagcctcgcagcagaagcatccagctccatgtatcactcgtgtccaggccgagaaacccgacgtagaaatccagcttgcccaggagagaggggtgggactcctggtgttcacttcgtagctgttctgtggtgggagcgcagtgggagccgcagggcatcggggtcttcgaaggaaagcccgtggattatgcatccaggaattaaagcagtccatgcaatggcagccgccaagcagagacggtgacgggatccctgcgttgacggtggcatgaccgtgtgtgatgggat

SEQ ID NO: 275522 - DNA, 42 bp, Homo sapiens
  chr20:60120726-60120768
  hypo
ttggcaactggtgccgctcatgcttggcgccagcgggcagga

SEQ ID NO: 275523 - DNA, 149 bp, Homo sapiens
  chr20:60173821-60173970
  hypo
cgagggactggctgcggggcaccccacatggcggggtcctccatggaagtgtggtcggagtacccgaggccccttccctactgcaggcactgcccgccaagcttccctggatggctcctccagggctgacactgcgcagcctgggcgtc

SEQ ID NO: 275524 - DNA, 44 bp, Homo sapiens
  chr20:60176907-60176951
  hypo
cagcatccagaaagcagtgtcgcgttcagttggaaacagctctg

SEQ ID NO: 275525 - DNA, 42 bp, Homo sapiens
  chr20:60194626-60194668
  hypo
gctttgtttccaggacagagcgatgtctgctcaagtctggtt

SEQ ID NO: 275526 - DNA, 329 bp, Homo sapiens
  chr20:60198708-60199037
  hypo
ttctgacgtcaccacgcagccctggggaccagccatccccaggagaaggctggttttagtgcatcactgagcgcaaagtatttttgcaatcagaaaataaaaggtacccagaatctgagcaggaaagacacggttcctagagcgaggaacaccccagaatctgagcaggaaggacacggttcctagagcgaggaacaccccagaatctgagcaggaaggacacggttcctagagcgaggaacaccccagaatctgaggaggaaagacacggttcctagagcgaggaacaccccagaatctgagcaggaaagacacggttcctagagcga

SEQ ID NO: 275527 - DNA, 70 bp, Homo sapiens
  chr20:60210049-60210119
  hypo
gttgccattctatgtagaggcggcactttgctttcgtgcccgtctgcccgtggacactgggttggttgca

SEQ ID NO: 275528 - DNA, 445 bp, Homo sapiens
  chr20:60226061-60226506
  hypo
gtgcttgtgtgagttagcctcgtgcttggccgtgcactggtgtgcttgtgtgagtgagttagcgccgtgcttggccgtgcactggtgtgctcgtgtcagtgagttagcaccgtgcttggccgtgcactggtgtgctcgtgtgagtgagttagcctcgtgcttggtcacgcactggtgtgcttgtgtgagttagcgtcatgcttggccgtgcactggtgtgcttgtgtgagtgagttagcatcgtgcttggccatggcagtgagttctgattgcagggtctcaacgctcagggaaggacgagtgccccttctgtgccattttccaaaactctagggatattgagtcttgctcaggtcacccaaaggcacatgtcccagccccgagtcaagcgtacaggggcctcccgggagcacccttgtgcctgtcgcggcgttcctctccttct

SEQ ID NO: 275529 - DNA, 175 bp, Homo sapiens
  chr20:60236697-60236872
  hypo
gaccatggatccttcgtgtttgtcacctttgcctttgtgtttgtcacctttgtggcaagttgttgcaaagacgtcacagccaccgcacacatttccactttgggtctggactgaccatctttgagtgtccgcccatcattcaccaaacactgacgcggctcgtatgacaggccag

SEQ ID NO: 275530 - DNA, 741 bp, Homo sapiens
  chr20:60238324-60239065
  hypo
gacaaatgagtccacgcaggaaaggagtggcacccgcaggaggcctgtgctgcggagctcctgggagggtgacgctggggcaggggctgctgcggacaagcgttgggaggcctctctgaggaggcagtgtttgcgctgaaacctagaaaaagagctgcgtaaaagacaataattctgaaggctctgggtcgggggcatttcaggcgagggtcctagaaatgccaatgctggggatgccgccgagtgggtcagaggggccggaggaaggtgaacagggcagggggcagtggggctggattttatcccaagtgagtcgggagctgctgggacggcaggaccgggtgtgtgtgtccaagagaccatcttggctgcccaggggaagcggggactcgaggagagcagggagtgctgtcttcccggcgggagctggcggtactgaggaaggacgtgcagaaccaggcagggctgacagacgcggggtcgggggaagatcaggagctcccggtgtccaggctgcacaatgtgggcaccactgaacacggggtaaaccaatcaccagtcactcccacgctgggtcttccagctccctcgaggccgccctggccctccacactcccaccgctggcgccagcatctgtgcccgcggcagtttagagtgacactgtcctctgtccagcaccggtccacgttgaggtgtctgtgtgccaccgggacccttccgtagacatgcaccatgaagac

SEQ ID NO: 275531 - DNA, 120 bp, Homo sapiens
  chr20:60261583-60261703
  hypo
catttgtgtatgtgtgcattcgcgtgtatgtgcatgtgcattcgcgtgtgtgcattcatgtgtgtgcatgagcacgtgtgtgcatgtgtgtatctgagtgcacattctcgtgtgcattcg

SEQ ID NO: 275532 - DNA, 380 bp, Homo sapiens
  chr20:60273115-60273495
  hypo
tctcacactgccacactgcccgagacagcagccattagccgcacgttgctggacagcacagacctggcacgtgtcgtccaccctcggaggggtccccttgcacgggctccactccggacggtccctgagactctcccgccctcacgcctgctctctaagccaagcacaaagccaagtgcagcccccactgaccattccagcccatgccggcgtctgccccaggccccagatccgtcctgctggtgcgattgagggcacagagtcgagccttcaagtaggtcttctaatatggctccattcatgcagaaacctcccagtggggctgtgccaggcacttggaaagtgggagccgcagccctgccgtccgggtgcttcccatt

SEQ ID NO: 275533 - DNA, 581 bp, Homo sapiens
  chr20:60275649-60276230
  hypo
aaagaatgtcaccccgtacggcctcactgtggggccacacatcaccccatacagcctcactgtggggccacacgtcaccccatacggcctccctgtggggccacacatcaccctatacggcctcactgtggggccatgtctgtcttcatgggtgtcttcttcatgtcttcttcatgtctgtcttcatggcccaggcctggggcagagccggggttgccggctcagcgggtgagtgccacatgagtcttgccttcaaagctggagtgcctgatcttgacagcggaccgacatcttcaagggaacggcggctccccccttttttgcagaacactttcaaaggtgtattcgtgttccagggccgccataacagagcgccacagaggggcggtgtaaacagcagaggtgtatgctctcgctgctctggaggatggaagcttaaagccgaggcatcggcaggggtggtttgacgaaagccgtcagagagctcggagggaagactctgttccaggcctctctcctcggcttgcaggtgccatcttcttcccgcatctcttcacatcgccttccctctgggagtgtgt

SEQ ID NO: 275534 - DNA, 333 bp, Homo sapiens
  chr20:60281572-60281905
  hypo
tacgacgaagactccggggaggaagaacggatggaaaggccagcccaaatggaagttggagtttgctgagctgaggacagggcctgtgggatctgctggaagagaggcgaaccaagaccaaagggatcggtttctcccgagctgcacacagtggcaccgactccctgatccccgatgtgtagaaaccaccttggctgaattctcccgagcccgctgcaggccagtgggaacagtggttgggaatctcaccggaactggctcgggcaggacgttcatggtgaggttccaaccggaatgagtcatgtgaccgtcagcatccgacctccacattag

SEQ ID NO: 275535 - DNA, 323 bp, Homo sapiens
  chr20:60304094-60304417
  hypo
tctccagccgtcctcgcccatgtgggaatgacaagcaaggctttgcccattagccctgttgctctgcgagcgctgactgcagcgtgttttgacaagaggccctggcatctcacaagcccaggagtcctcggtgcatggcgcattggtggctggatttgccactattattctctgctcactcctgtgttggcgtgagtgggaggacttcattagcgacatcgcccacatcaagagccactgtgcttcgttccagtgggcaccagtaggactggctaatgaggcgctcacagctcagtttctacggccactgtggaaaagaactt

SEQ ID NO: 275536 - DNA, 267 bp, Homo sapiens
  chr20:60313850-60314117
  hypo
tcctcctctcaccaccttcacggcaatcccgctcctcctctcaccaccttgacgaaggcgtgaaacgtccctgaggctcagcttcctatctgcgagatgggccagttctactcgccagcgctgccttcccgtgcctggcagtgcacccgccgcgtggaggctgcaggggctgggacaggacgtgtgatctgcattggggtcgcagaggcggcttttcagggcattgtaggtgtttgctggtacatcgagggaaaagttttctgggaa

SEQ ID NO: 275537 - DNA, 219 bp, Homo sapiens; identical to SEQ ID NO: 220132
  chr20:60316298-60316517
  hypo

SEQ ID NO: 275538 - DNA, 183 bp, Homo sapiens
  chr20:60329680-60329863
  hypo
acaccacacacacacgccccacacaccacacgcacacacgccccgcacacactatgcacaccacacacacagtgcatgccacacacaccgcacacacactgcacgccccgcacacactatgcacaccacacacacagtgcatgccacacacaccacacacacactgcacgccacacacaccac

SEQ ID NO: 275539 - DNA, 68 bp, Homo sapiens; identical to SEQ ID NO: 220133
  chr20:60334003-60334071
  hypo

SEQ ID NO: 275540 - DNA, 424 bp, Homo sapiens
  chr20:60352646-60353070
  hypo
tgtgcacacacatccacatgcgcacacacgtgcatacaaaaacacacgtctacacacgcacacacgtgcatacaaagacacacacccatacgcgcacacacgtgcatacaaaaacacacacccacatgcgtgcacacgtgcatacaaaaacacacacccacatgcgcacacacgtgcatacaaaaacacacatccacatgcgcacacacgtgcatacaaaaacacacatccacatgcgcacgcacttgcatacaaaaacacatccacatgcgcacgcacgtgcatactatacacacatgcacacacgtgcatgcaatacacacatccacatgtgcatacacgtgcatactatacacacatgcacacacgtgcatactatacacacatccacatgcacacacacgtgcacactatacacacatgc

SEQ ID NO: 275541 - DNA, 190 bp, Homo sapiens; identical to SEQ ID NO: 220136
  chr20:60361300-60361490
  hypo

SEQ ID NO: 275542 - DNA, 351 bp, Homo sapiens
  chr20:60373189-60373540
  hypo
gccctctcaccctgcgcctctcctgagccagcagccataacccccgccccgcccggccctgccccgggctctgtggcagcacctcctgccaggagcaccctcagctccctgcgggagcacgcagcaacagaggggagggggtgtggtcccgcctcgcacgcatccccgctgtgggcggcccctcgctgcgcctcagcctctccctggccccacgggcctccacactcctcacatacagaatgggctgtgggtcctcagcccgtccggaccctccgctcctttcctgctacctccgtgcgcagcaggccttgtggggtgtggtccagagcgtggccccggggtgcatcgcgc

SEQ ID NO: 275543 - DNA, 159 bp, Homo sapiens
  chr20:60445701-60445860
  hypo
aacagtgagtgcttcgggaagctggagtggcttctccctttgactttctgaaccagatgagccaaatgcggtcaccaccgacccccatgactttcccagctctgccctttcgtagagatgggtggtttcaaatagtgcctgatgcgccaacattggctt

SEQ ID NO: 275544 - DNA, 328 bp, Homo sapiens
  chr20:60448755-60449083
  hypo
cccatctgagctgctgtctccgttccaggcacctacgtgatgaccgtcacggccaacgatgctgacgacagcaccacggccaacgggatggtgcggtaccggatcgtgacccagaccccacagagcccgtcccagaatatgttcaccatcaacagcgagactggagatatcgtcacagtggcggctggcctggaccgagaggtgaggcggggtggggtctgcgtgcaggcgggtgagctcctggtccccgcaggacacccacaggaccctcggggagcctctccagtggcgccgtcggggagtgatcgacagtctccccagtggcact

SEQ ID NO: 275545 - DNA, 224 bp, Homo sapiens
  chr20:60470124-60470348
  hypo
agtgacgcatggcccgtgcagggcaggaatgcactggcgtgcggcacagcctcctctctctctgcggctctgcctgacgggcacttggcagatagcgtgtaagaaaggccctgggcagcggaggctgctgtgtggagtggctcgattcctgatgtgcgcagtaggagagaggccggggctcagtcagggaggggaccggcggcggaggtcggttgccacctggg

SEQ ID NO: 275546 - DNA, 273 bp, Homo sapiens
  chr20:60477306-60477579
  hypo
cagaaaaggtcaagccggggcctctgaaaccaggacccccggggcctccattccaggagaagcagcctcactctgcccttcaccagccacggagacccggggtctatgggcagtgccctaaatgccagccatgccctggggcacgcggtcaccaccccgcagaaccgctcccgtgctcgttgcaggagtgcaagggcagatccacagaggagcgtgcggggccccaccttcccagggatttgcaggcaaatgagcggccgttgacacagggac

SEQ ID NO: 275547 - DNA, 213 bp, Homo sapiens
  chr20:60482670-60482883
  hypo
atctgactcctgggcggctcaaaacgtgtgatgaagggaagacagagtgagtcccgaagctccctcctctagggccaggtcagcgtctccaggcctccccgggtacccagctgcaggttccgggctctggccacctggctcaggaacagagacagctgggagattccgtcccacactagacatcgggagtggtgggggcggtagctgtccact

SEQ ID NO: 275548 - DNA, 285 bp, Homo sapiens
  chr20:60485026-60485311
  hypo
gctgacgcacctgccgggcaggtctgcacgcctgcttcagtggggccccggcagccgtgctatgaggcgtgcactcccgtgcacccctgagcagcctgtcttctctgattcctgatctgggcgtggctgacacggtgtgttctgtttgtgaacactcgttgagctgggctgacacggtgtgctctgtttgtgaacactccttgagctgggctgacatggtgtgttctgtttgtgaacactccttgagctgggccgacacgttgtgttctgtttgtgaacactcgt

SEQ ID NO: 275549 - DNA, 347 bp, Homo sapiens
  chr20:60485341-60485688
  hypo
gtgaacactcgagctgggctgacacggtgtgttctgtttgtgaacactcgttgagctgcacatatgctacgtgcacttctctgtgcatatttacacttaacacgggtttgtgacattctttccttccattttgcagtttgcaggggaggtccccgaaaaccgcgtggagaccgtggtcgcaaacctcacggtgatggaccgagatcagccccactctccaaactggaatgccgtttaccgcatcatcagtggggatccatccgggcacttcagcgtccgcacagaccccgtaaccaacgagggcatggtcaccgtggtgaaggtgcgtactcttctcacaccctgcc

SEQ ID NO: 275550 - DNA, 214 bp, Homo sapiens
  chr20:60494908-60495122
  hypo
aagcatggtgtcgcggtgattgcatggaagcttgtgattgtgtggaagcatggtatcgtgattatgtggaagcgtggtgtcacggtgattgcgtggaagcgtgttgtgattgtgtggaagcgtggtatcgcggtgattgcatggaagtgtggtgtcacagtgattgcgtggaagcgtgtcgtgattgtgtggaagcatggtatcgtgattgtgt

SEQ ID NO: 275551 - DNA, 116 bp, Homo sapiens
  chr20:60495152-60495268
  hypo
agcatgttgtgattggaagcgtgtcacggtgattgcgtggaagcgtggttttgtgattgcatggaagcatggcgtcacagtgactgcgtggaagcgtggtgtcatggtgactgcgt

SEQ ID NO: 275552 - DNA, 408 bp, Homo sapiens
  chr20:60495298-60495706
  hypo
agcgtggtgtcacagtgattgcatggaagcgtgtcatgattgtgtggaagcatggtatcgtgattgtgtggaagcgtggtgtgattgtgtggaagcgtggtgtcatagtgattgcatggaagcgtgtcgtgattggaagcgtggtgtcgcggtgattgtgtggaagtgtggtgtgattgcgtggaagcgtgtcttggtgattgcatggaaatgtgtgattgcatggaagcgcagtgtcacggtgattgtgtggaagcgtgtcatggtgattatgtggaagtgtggtgtcgtgatgattgcatggaagcaccgtgtcatggtgattgtgtggaaatgtggtgtgattgcgtggaagcgtggtgtcacagtgattgcatggaagtgtggtgtcacagtgattgcatggaa

SEQ ID NO: 275553 - DNA, 557 bp, Homo sapiens
  chr20:60495766-60496323
  hypo
tgtcacggtgattgcatggaagcgtggtgtggtgattgcatggaagcatggtgtcacagtaattgcatggaagcgtggtatcatggtgattgcgtggaagcgtggtgtcgtgattgcatggaaacgtggtgtgattgcatggaagcatggtgtcacagtaattgcatggaagtgtggtgtcatggtgattgcatggaagcgtggtgtcgtggtgattgcatggaagcatggtgtcacagtaattgcatggaagcatgtcatggtgattgcgtggaagtgtggtgtcgtgattgcatggaagcgttgtgtcacagtaattgcatggaagcgtgtcatggtgattgcgtggaagcgtggtgtcgtgattgcatggaagcattgtgtcacagtaattgcatggaagcgtggtgtcacggtgattgtgtggaagcgtggtgtcatgattgcatggaagcgtggtgtcacagtgattgcatggaagcgtggtgtcgtgattgcatggaagcactgtgtcacagtaattgcatggaagcatggtgtcacggtgattgcgtgga

SEQ ID NO: 275554 - DNA, 469 bp, Homo sapiens
  chr20:60500127-60500596
  hypo
gggagtgcagagggcggtggcaaggtcccggggcaggcggcacagcagacgacctcaggagcctggacgggagggcgaggatgggctgggcagagacggcaggaagaaggtttgagagcacgtggggctttctgagggacatgggccagcatctcaagaagcagccaccccttcctggacctgcagtaaccctgcgaactggccgagccccccacgggtcgcacgctctcagaggcatggaggcagggcgggtgggagcagggattctggaaccgaagatcagtccagtaccaccgcttaccagtgggaaaagacgtgaccgctctgtgcctcagtttcctcctctgccaagtcgggggagtcttagtacccctgagaatcaaacgagtcggagtcaccggaacactgaggaagggcctggctcagagcagcatgggctcctgtttgctgcggccgtgatgactgcccg

SEQ ID NO: 275555 - DNA, 69 bp, Homo sapiens
  chr20:60502077-60502146
  hypo
tccgatcacgtgccgtgccatcagctacatctcaaagcagttttcaaaggtagcgccgcgctgcgtcac

SEQ ID NO: 275556 - DNA, 527 bp, Homo sapiens
  chr20:60502540-60503067
  hypo
tcatctggagcggccgcgcctgcttttctcacagacacttccaaaagcagcagttcttccacgcgatcatgcgtctgggctcagggcttccagcaccctggggctctgctgggcagggccagcaaaactcagggaggcaaggaaaggttttgccctaagaagtcccagatgggggcaagatgtggtgggcggatcccagccctcaggggccagtgcagagcccagcacccgcagaacccctccctggctccccagtgggagtgagtccccggtgcgtggctgtgacctccgtggctgtgagtttccacgtgaatgccacaccccgctgtgtgcgtgtgtgcaggtgtgggtgtggccgtgtgctctgccgtgtctgttgaggtgccgtgcgcagtggctgtgtgcgtgtgtgcagctgcgggtgtgggtgtggccgtgtgctttgccgtgtctgttgaggtgccgtacgcagtggtgtggctgcccatggcgtgtggcagggtgtcggtcaggagccatggctggac

SEQ ID NO: 275557 - DNA, 171 bp, Homo sapiens; identical to SEQ ID NO: 220143
  chr20:60503295-60503466
  hypo

SEQ ID NO: 275558 - DNA, 554 bp, Homo sapiens
  chr20:60507697-60508251
  hypo
ctcctgcagatacacgtatgcatgcttacacagacgcatgaagcacctacatccacgactcctgcggatacacgtatgcatgcttacacagacatgcatgaagcacctacatccacgaatgcacacgcacgtgggccgcacatgtgcacagatgtgtccttgcacatccaggcctgcatgtgcagagacatgcgcgtgtgcagtacaggtgtgcatgcacacatgggcacagtcatgcttgtgtgccacctgcatgtacatgcccacatagacacatggcaaacacagaggcacacatgcgcacacccgcagcacaccctgctcacgggcagccctcccccacagccatggtcctgctgtttgtcatgtggatgaagcggcgagagaaggagcgccacacgaagcagctgctcattgaccccgaggacgacgtccgcgacaacatcctcaagtatgacgaggaaggcggtggcgaggaggaccaggtgagactgcggcccgcccccgcctccccacgcgaggccggctctcacgtgtactagtgtctcagcagg

SEQ ID NO: 275559 - DNA, 371 bp, Homo sapiens
  chr20:60511744-60512115
  hypo
gggctgagacaacgcgtcctgcaccctaactctgtgtctgtgacccccagggactccgcgctgctgacaacgaccccacggcacccccctatgactccctgctggtcttcgactacgaggggagcggctccaccgcaggctccgtcagctccctgaactcatccagttccggggaccaagactacgattacctcaacgactgggggcccagattcaagaagctggcggacatgtatggaggtggtgaagaggattgactgacctcgcatcttcggaccgaagtgagagccgtgctcggacgccggaggagcaggactgagcagaggcggccggtcttcccgactccctgcggctgtgtccttagtgctgtt

SEQ ID NO: 275560 - DNA, 874 bp, Homo sapiens
  chr20:60544918-60545792
  hypo
ccatcggaacactcggccccctcatcggggcactcggccccccgtcggagcactcgcccccccgtcggggcactcggccccccgtcggaacactcggccccccgtcggggcactcggcccaccatcggggccattacatgccacgagtcctttggtgtcagatccctagtgcggggccaggtgacccacctgggtggggcccaagcctttcccggttgcttaactgaggtgcccttacactggctcaaatgcacagatattacctgtcagcttagtgtttcacattggcacgcgcctgtgtgacacccatgatgatcaaaacagaacattttcatcaccccagagggccctggcgccccttcccgacagtctcctcaccggagccccacaccctgcttctacccacccatgaacttccatcaggcggaatcagaatgcataggcttctgtgtccggcctcttccagtcagcgtagctcctctgagattcagctacctggtggagcatatcagtagttcgttcctttttattcctggggggcgtttcactgactaaatatgcatctgtttgactctccattcacctgctgaagggcatttgggctgcttccatcttgagcatcaatacggccattgtgaacattcttgtatgacttttccgcggacaaaggaactcattctcaagtagatgcttaggactggaactgctggtcacaggatagatgtgcattcggcttcgtcgctgtgtcacacactgaagagatgcccattcagcttcatcactgcatcatcacacaccgggtagacatgcattcaacactgggtagacgggcattcagcttcatcactgcatcacacaccgggcagacgtgcgt

SEQ ID NO: 275561 - DNA, 418 bp, Homo sapiens
  chr20:60549275-60549693
  hypo
cgtaaacctgcatatcgctgtgggtccgtcacagtaggtggagtgaacgtcacaatgggagaccaactccaattgcatcagagaccgttcccaaaggctctccaaggtgctcgaaggcagggagcggtacacattggcgctgagcctctgagggcccagcaggagctgtgacctgtcaggaccaaccaataccacaaactgccctggagacgccctctctcgccacaggaggtctgcgtcaaggctggggccctctgggcacctcagccgggctcgccacgtgcgtttctgtgtacatctcccccagcactgggcctcccgccgcccctcctagctgtgcccagctcatctccacctgtgacagcagaaggtgttaagcgcagccgccagcccccagactccacgcagagagtagctc

SEQ ID NO: 275562 - DNA, 203 bp, Homo sapiens
  chr20:60551197-60551400
  hypo
aaaaagtccccaggcgtcctcctgtgtcacttaaggaatgctttgtagagcagcagtgaatggcttgtctcacgttcattttctaaacaaaatatgaggtccctgaggttgacccgcgtgattctttgtcgcgtgaactgtctgggggttccgacacccgagctgcctgggaccactgagccggggcccgacccctggtgatg

SEQ ID NO: 275563 - DNA, 179 bp, Homo sapiens
  chr20:60551924-60552103
  hypo
cctggctgcacagacgccgcctccgtcagcccctacaggtgaccaggtgtctcccgagctgcctcagatgtgttcctgcttggagaagcatagctgctgcgtgccagctcctgtggagagctctggcggtttcagctgatgacacctgcatgacaccgcccagcagggcacgcgccaca

SEQ ID NO: 275564 - DNA, 158 bp, Homo sapiens
  chr20:60552343-60552501
  hypo
cccaacagctgtcatttcccccagctggcatgaaaactaagttctgctccgatggtgaaagctgctcacatatatttaagtacaaagattacgatggcatctttacagcacattctcaaccaaagttaagatgctggaaggagcggattctgctgtgt

SEQ ID NO: 275565 - DNA, 372 bp, Homo sapiens; identical to SEQ ID NO: 220151
  chr20:60563049-60563421
  hypo

SEQ ID NO: 275566 - DNA, 150 bp, Homo sapiens; identical to SEQ ID NO: 220152
  chr20:60563782-60563932
  hypo

SEQ ID NO: 275567 - DNA, 71 bp, Homo sapiens
  chr20:60580209-60580280
  hypo
caggccaggccctgcggcgcagggaacctgccatcaaatgcccgggccaggccctgcggtgcagggagcct

SEQ ID NO: 275568 - DNA, 70 bp, Homo sapiens; identical to SEQ ID NO: 220153
  chr20:60581687-60581757
  hypo

SEQ ID NO: 275569 - DNA, 813 bp, Homo sapiens
  chr20:60615350-60616163
  hypo
accagctactggcacgcacacgacacaccacttgggcaccacgcagaagtatcccgccaagggaaagggccagatgtgaggctcccactacataatctcatttatacaaaattctagaagaggcaaaatcacagtgacagcagcagctcagtggctgccggggaggaagctggagcaggggctcacccccaggggcacgaggctacagaatgattccgatcctgtactcgacggtggtggtgacgtgactatcgttaaaactcacagacctacaggctgagaaaggtgcgctctgccacgcgccaactacgcctccataaacggagatttaaaaagtagtatgtgctaacactgcatgcccactagaataggcaaaacagaaaagcctggccacgccaagagccagcaagatctcacggcagcagcactgagcccgcggatgaaactaaattcgcagagccgctcaggaacacagcctggcagtttctgacaagaccaaactcacaccttccgtacgactcagcgattccactcctaacatttacccaaaagaaaaggacgtctacacgtatgttcgcacaaaggcttgaacacaaatgttcaaaaagaagctttattcgtaatagccaaaaactggaaacatgccagactcctcagctggcaaatgtatagcgtacatccaaacagaaaccattccccataaaaataacaaactgtggacacgtgttgcacacgatgcccctccaagtactctgagtaggaagccggacaccagggagcacacaactggggtttcagcgacctgagcgctcc

SEQ ID NO: 275570 - DNA, 388 bp, Homo sapiens
  chr20:60620117-60620505
  hypo
aaggaaaagaaaactcacaacgccgacatgaaaacacaggtgagtaggtaaataacctcaggtagggagagacagtctagccacactgcaggaagagaactcgcaaagccatgccgctcaaacggaatcccatcgggatgctccccgctcaggactgtcacagggacaaccgtcccgcacctcctggcccatgcaccctccccaccggccacacaaggtctggaatgttcttccctgcccttcctgggaaagccctgcctgccgtgcctgcccgctcctctctacccttgactcgcttcaggtgcttggtggagacgatggcggtgaaactttcaacagcgcgcctgtttgggtttaagcttcagagaacaggcgcagaatccctgca

SEQ ID NO: 275571 - DNA, 64 bp, Homo sapiens
  chr20:60635093-60635157
  hypo
ctgttctgctgagcccggtctgtgctgctctgaccagacgccgcctcccggcctccctgtgctg

SEQ ID NO: 275572 - DNA, 415 bp, Homo sapiens
  chr20:60662673-60663088
  hypo
cctgtacactcacctgcacacgcactcacacatgctcctatacgctcacctgcacacgcacacgctcctgtacacccacctgcacacgcactcacacgcactcctgtacactcacctgcacgcttacccacacatgctctgtacactcacctgcatgcactcacacgcgctcctatacactcacctgcacacgcactcacacaagctcttgtacactcacctgcacacgcactcacacaagctcttgtacactcactgcagactcacccacacacgctcctgtacactcacctgcatgcactcacatgtactcctgtacactcacctgcacactcacctgcacacgcacgcacacgtgctcctgtacactcacctgcatgcacacacatgcgctcctgtacgctcacctgcactc

SEQ ID NO: 275573 - DNA, 203 bp, Homo sapiens
  chr20:60687903-60688106
  hypo
tttgtggacaggaccgcactccacctggtcagtgaccaggactctccctggttcaaggggcacagccagcctggccggcccagctgttcatgctctccctgcaataacctgggagaatgagagggtgcagagaccgtggccagccctgtgccacaacccaagctgattcgggttcttaaaatgtgtggcgagggcgaggataa

SEQ ID NO: 275574 - DNA, 414 bp, Homo sapiens
  chr20:60691753-60692167
  hypo
taaggcacgagttccggttccacccagcacagaagggccagactctgagattccgcggtgcgtggggaaggccatttgtaaacactctctggcccaaatgcagcaaggctcccagggcaaatggggtttccatgttccagtgcttgggaaagactaacacgtattcgcgtccgtccgcgactgcctgtctaagcgagatgagccaccagaaatgtctcaggcgccatcctccccatccagctcctggtacctgctggaaaagcctggggcagccctgcactggcgcaccttcttctcacccggcccatgccctgccccttccgccgcacacacccccgcgcagccagttatgggcttcactgccagggtcgacctcggtgggcccgtgtggctgcctgccggcttctgatgcac

SEQ ID NO: 275575 - DNA, 436 bp, Homo sapiens; identical to SEQ ID NO: 220155
  chr20:60725126-60725562
  hypo

SEQ ID NO: 275576 - DNA, 224 bp, Homo sapiens
  chr20:60735522-60735746
  hypo
gaaccgtgcacatgcgctgctgtgggtgagaacggaacttaaaagagaacatgcccagcacagtaaattctcccagtgttagttcaaatattttattttgtttgattttttaaaatgcatttttccaagattaaattgtcacagtgaagacgaggtcgtgctgctgcagcctctgtcctgctgacggggttccgggacagacatgtcgccgggaatgacgtatc

SEQ ID NO: 275577 - DNA, 113 bp, Homo sapiens
  chr20:60740452-60740565
  hypo
ctgtcgccgtctccgtttcgcacaggccatggcgattacgcctaccagcagtcatcctacacggagcagagctacgaccggtccttcgaggagtccacgcagcactactatga

SEQ ID NO: 275578 - DNA, 193 bp, Homo sapiens
  chr20:60756174-60756367
  hypo
ttctcccctctcctaggagacggatgtcacgcacaaatggggagagaagtgtttattttgtaggcactaagggtttctaaaacccttaacactggtaagggctcaaaaataaacgtatgtgttcatattcgatcaccgaaatgagagttcttaattgctaattgacaaacgcgttagcaatttcagttaggga

SEQ ID NO: 275579 - DNA, 1395 bp, Homo sapiens
  chr20:60772853-60774248
  hypo
ataggccatggttgtcgtaacacaaagggactgagattcttgttcttgctttagttgaccagcaagtcaagtccctgtcgtcggtcctgtcgcggtaccagggtttcagtggagaagatggagggagtaaaaactgcttcgggcgcagtggcgccgtcctctacatccgggtgagccgagactgccggacctggccctgtccccgttgttctggatcatccagctcctgggggccaccgtgtgacccacggggcccctgtggcttgatgcccacagctaggaaacagcacaatggaaacggaggctggcagacagcgggaaagcagccccacccctcaaagcaaacccagacgggcatttgtaccagggtctcacaccatgtgcatgtctagtgaaaaagtcatgaaacgattctcttttaaaaagagggagcccacggcacggacgcttcctccgtctctgaccccatgagccgacctctgactgagggaggccactggcacccagcgggcctgcgtctccttcgcgagctgaattcactcgtctcttagatgttttttctggtgcttcagttcacactaacgttttagaaacactatttgaaaaagccctttgtgcagtcagaagggtgtgtacgcagccccgtgaaagccctggagcactgggaccttttccttgtgctccggagctgttggcagaggtgagtggggcgggcagctgcccggggcacagtccgctcttgtcttctttccttagcgcttgcttcaggaatgggttaaggcctcctttcctcactgctggtagagctcagctgatgagtgcctgctgttccccaggtccccgtgggcacgctggtgaaggagggaggcagagttgtggccgacctgtcttgcgtgggagatgagtacattgccgcgctgggcggggcaggagggaaaggcaaccgcttcttcctggccaacaacaaccgtgcccctgtgacctgtacccctggacagccaggacagcagcgagttctccacctggagctcaagacggtggcccacgccggaatggtaggtgtccccactgccaacagcatctgcacacactcagctctagaaaatccacttttctcaatggggatttgccagtggcctggaagagaacagctttgcgactcacctttttcccatcagtacactgctgacttggtcgtgagcatgagcccttgtgactcccccagccctgaaatcctccctccaatcccagttagttacagactctgcgctaacaaaggtgctgccgcgggccgtgccaccgtcttccctctttcccccaggtgggattccccaacgccgggaagtcctcactgctccgggccatttcaaacgccagacccgccgtggcttccta

SEQ ID NO: 275580 - DNA, 739 bp, Homo sapiens
  chr20:60781094-60781833
  hypo
agtgccctgcccagacaccccgtgaaatgccctctagtcaaaaagccaaagacagccacacgcgcccaggctctgcacagttgggcccaccaccctctcgtgcacgcactttccacacttcacgttagccgccgtcgcccccccgccctaagctcctggagaacagagacctcgtttgtctgtatgcagtgcccgggtcggcgctggccccgggatggaggcctgaagggcagacatgctgaggcaaccggagcgtctcatcagtgaacacacgtgccggggacctgtcctggtgccgctaaagaggctgcagagccgcggggtgcggcagtgcttggcgggggcggggtgcagctctgcgtgcatggcgtccacctggggaccgcaggtgtcaagccggggagagccagtgccaggaggtcacacacgatggttccctctacagagtgttccagaaacgatgaggagaatggattggcggtcctcgggctgaggagggcgggagggtggaggtagccgtggacacaaaagggccatgccagggtcctcagaccatcaccctgtgtgttggcggtggggccacgagtctgcacgtgcgaaagaatcctgttggcttagtgtttcaggctgggaagatgaccggctctgaaggtggagggtggtgatgggagagccactgaaccgcacacttcagatagctcaagtggtgaactttatgtttatcaccacgataaaaaat

SEQ ID NO: 275581 - DNA, 240 bp, Homo sapiens; identical to SEQ ID NO: 220159
  chr20:60791330-60791570
  hypo

SEQ ID NO: 275582 - DNA, 90 bp, Homo sapiens
  chr20:60805901-60805991
  hypo
ggaacccgaggtcccgggccagaccaagggcatgagcagggggcagcgccgggccttgatggaggatgatggaggcgcagctcctagacc

SEQ ID NO: 275583 - DNA, 212 bp, Homo sapiens
  chr20:60816041-60816253
  hypo
acactgccttagagtacacacgtaggacatttttcttccacgcctcgagtgcgttgagagggtcagactctgctgtgttccacatgttaatgagaggtgctgtttgaatgtgaaaaaaatgccacttgactttcatcccagtgtctctcctctgtgccgtccaggagatgccagcagatgggtcttggaatttttttttttttgagatggag

SEQ ID NO: 275584 - DNA, 332 bp, Homo sapiens
  chr20:60816433-60816765
  hypo
tcattaaagcttgctcgacttttaaagttttagtacattcagccaattacaaaagtgacattttgtataagggaattgttgacacattttaggttcttatgctgtcttcaagcagggaagctgccatctcctcaaggtgatttctttaatgtccccatgcaagccatgtcttgtctggccgtgcaggcacagctggcgccgtgccttcctgagtcacagcatctttgcgaaggtggtgcgccagaccagggctcttgggtcctgggtgggttcccactggctcctgccttcagtgtctttgcctgtaagacggattactatgtggaatctgt

SEQ ID NO: 275585 - DNA, 85 bp, Homo sapiens; identical to SEQ ID NO: 220163
  chr20:60842013-60842098
  hypo

SEQ ID NO: 275586 - DNA, 458 bp, Homo sapiens; identical to SEQ ID NO: 220164
  chr20:60842462-60842920
  hypo

SEQ ID NO: 275587 - DNA, 38 bp, Homo sapiens
  chr20:60843220-60843258
  hypo
gggattacaagcgtgagccaccgcgcccggccaaatga

SEQ ID NO: 275588 - DNA, 34 bp, Homo sapiens; identical to SEQ ID NO: 220165
  chr20:60845091-60845125
  hypo

SEQ ID NO: 275589 - DNA, 1271 bp, Homo sapiens
  chr20:60855790-60857061
  hypo
tgccgtgtgtgtttcgtgaggtggcctttcttttgacgacttcacaggaaagccatttgtctttgttcagtcttctttgattgcttattaacttgtcttgacatttaagtagaaagctttgtagatgctacaaaggaaagaagaagtacatttcaaacgcatgctaaatacacagcctccgtcgcaggggcttcaaagcagcgtgctgctctcccgcgggtgccggttgctgtgacccagccccgcctggtcgttgcgtcttgggtcacgtcgtgtcttggcttttctggactctcactgcttgttttctggtgtcttcacagacataatgaagcctacacctggaccaaccccacctgctgcgtccacaacgtcatcatcgggaagctgtggatagagcagtatgggacagtggagattttaaaccacaggtgacagcaccccaccgttgggtgagagcgcgaggctccgggtggggatgggcgagccggggagcgtgagcatccgtgctcctggtgggttttagctcagcctcacgagctgctgccgtgtccccgccagcccaggcatagcagctgcctagacttgactctgaccggtgttggccatgaatgctcctcgttcaagacctcgtttttcgtcacggttgttactttaaggctttgagctatgctgaagagctgtgtcattgccaggtgcagcgcagtggccgtccacggccgttggccactgtctaggcttgaatgccctattcctggaagctcatgactggtgggctttgccttttcaccactttagtgaggtataatcgatgcatcataagactcgcccattctgaatggacacttaagtgatttttagtaaattgaccgaatcatggagccgtccccacagcccatttcaaacacttccatcgccccaaaggcccaccacacccatttgcagtcaccccccgcctgccccaggggcctccaccgcgcttctcctgttacagagttaccctttccggctgtttgctgtcttgcagcagaaacctgtgtttgtttttctcacagaactggacataagtgtgtgcttcactttaaaccgtgtggattatttggaaaagaacttcacaaggtggaaggacacattcaagacaaaaagtaggtccttgccaagtgttcatggggcaccactacagcctgtgtgtccacgttagaagggctcaggtgctcctgggcctgcgtgtgcctacgtgcatgagacgcgggtacaccagtgccatctgt

SEQ ID NO: 275590 - DNA, 97 bp, Homo sapiens
  chr20:60866831-60866928
  hypo
ggcagagtggcagacgaggtgagtactgtggtagccacgcaggctggggcagcggggaggccccacacacacctggggacggcggggaggccccaca

SEQ ID NO: 275591 - DNA, 209 bp, Homo sapiens; identical to SEQ ID NO: 220166
  chr20:60868206-60868415
  hypo

SEQ ID NO: 275592 - DNA, 440 bp, Homo sapiens
  chr20:60868773-60869213
  hypo
ccagaacagggctgcgttttccttttgggctgagcatcttctgacccccctcccttgtatccggcaggtggttctacccaggcaataacccctacactgggacccccgactggttgtatgcaggggattactttgagcggaatttctccgactgcccagatatctactgagggcctggaggggcctggggcccgggaccggaggctgacgaggctggacttcctcgagtggccactgtgagcctcgtcacagcagaaaccaacttttctaacgactgagttcgcggagatagcatcatccctgatcaaggatgtaattctaattaactgttgattgccaaacatttcactctgctgtgccgtctcttcataaagcttcacttgggatcatcgtcttcattaaggtttcaacagggaaattcttcacggcgcccttttatg

SEQ ID NO: 275593 - DNA, 151 bp, Homo sapiens
  chr20:60875561-60875712
  hypo
caggtgccataccccacacacgcatagagcccgtgggctggcagcgggcacccacagtggcctctgcaaagcctgcctggctgcggctcgtttcctcactgcagcatgctcataggaatgtgggagtttcgcttgaagtgtgggtaaagag

SEQ ID NO: 275594 - DNA, 451 bp, Homo sapiens
  chr20:60880675-60881126
  hypo
gggactcccagtgtccctggcgccctgcagcttccatagccattcggggtgtgcgtgggtgctctgctcccagctctgtgagctcgcaggtcgatgcttctgacactgatctgtgcacatgtgtgtgcacacgcgtgtgctcgattgtgagcgcctgccgtggccctgggccgcggtgtgctgagcgggccagttcgctgccttccactggttgaaggaaggagacgggtgtgtaaagaaccgcaccccagagggcaggagggtgagagggcttggtctggcagcagctaagtgccttcggagctctaggctccccatttgtgaaatgggcggagggggacagggcacacccgggattgcggcggatggggacagggcgcagagcatcgtgctcaggaggcgccactgccgtcccctcacctgctgggccgggtcctgtctcctcagcatt

SEQ ID NO: 275595 - DNA, 148 bp, Homo sapiens; identical to SEQ ID NO: 220168
  chr20:60891780-60891928
  hypo

SEQ ID NO: 275596 - DNA, 537 bp, Homo sapiens
  chr20:60891958-60892495
  hypo
ctgcagggcctggccagcagcatcctcggcagcctgcacggcctgcaggatgcggctgtaggcgttggaggcctcgatggccctctgggtgaggcggtcctggttgacgtccaggatgatgctgcagcggaagggagggtcgaaggagtgggtaagcgcagacgccctcggcctggctctccagcctcctgcgctcacaaccagccgtgcccgtgcctgcccgccaagtcccgcctccaggtctttgcccgtgcctgtcgcctgctgggtgtactgctcctgtcactctgggccccagcttgccgtggagctgaggaaggcctggcttctttgaggacaacggcctcagcccctaggagccttcccagaccagctggccctcccaaggccctgtctgcatccccagggtgggcccagggcccctcctctcctggccacccacctggacagattgagtgccagctggcccagctgctgtgcgtgggcctcggcggcctccactagacgcagcttgctgcccgccggggagaaggtctg

SEQ ID NO: 275597 - DNA, 517 bp, Homo sapiens
  chr20:60905729-60906246
  hypo
acctgccctgggttgggacccggagtcctgccctgacacccccgtccctctagagactatggccctcacctggggctcacgcagcagggtgggctctgcatcagggtccacagcggtggggggccgaggtcggggtccagctggggacatggctggagtgagatcctgcgcgtgggtcagcgggaggccgggcggcagcgggatcacctggcagtccctgaggatgatgggctggggcggctttgggaagcgcgagggcagacaggcggcactggtgagagcacagtgggtgagtcagagccggccctgccgccgggccctcggccgcgcccctcccagccccattacctgccattacctgttggggccaaaggcgccgtggctgctgatgcagctgacccggggctccacgaactccgggctgaactcctcaatgggcaccagagtgaccccgtgctgcaggcagagggacgagatgctgcaacgcccgtggtgcggggaggatagggggtgcagg

SEQ ID NO: 275598 - DNA, 272 bp, Homo sapiens; identical to SEQ ID NO: 220173
  chr20:60912907-60913179
  hypo

SEQ ID NO: 275599 - DNA, 234 bp, Homo sapiens; identical to SEQ ID NO: 220174
  chr20:60913381-60913615
  hypo

SEQ ID NO: 275600 - DNA, 236 bp, Homo sapiens
  chr20:60921815-60922051
  hypo
gtcgtagtaacagtcggtggcatggccgtagcagttacaggctagagagaggggagcgcagctgttggcacgccctccacaggcccgggcaccggggccctctcatgggccagggtgtgggcaggacacacgtgtgtgggaggaggcactcacactggcactcgttggcactgttggcagtcgcaggcttccacggctgctgattgaagccggggcagcagcggtcgcaggtgccc

SEQ ID NO: 275601 - DNA, 86 bp, Homo sapiens; identical to SEQ ID NO: 220175
  chr20:60925165-60925251
  hypo

SEQ ID NO: 275602 - DNA, 683 bp, Homo sapiens
  chr20:60925491-60926174
  hypo
ggggcccagggctcccgcctctgctcggcactggccgtgagaatgggagtgaacctttgtcctgtctgagctccacccgcctccccacctcccctgtaaactggagcgtggacagagcagtaaggccccacagaaggcaagggcgggtcccaaatccaagcgcatgaaagttgggctgctcggttgcaggcactagatgagccctgccagctccctgctgggggtccaggagcctcgtcacacactcagcctcagctgcaccactctgagtggcttctgtccagccccatgcctgcactgccaccctagggtgttacaccctccgggcaccacgctgagtactggtttgcgtgtttcccagctgcctcccccggaacaggtgctcctgaggccgggctggggtcccaccctgtgttcccattcccaggaaaacggcccagcgtgtgttaggcgctcaacatacagctgctggctgaaagaaccaacgaagggagggaggaaaggacggacgtgccctggggttgcttctccgcagaatgagcccggccctaccttactgaggactctgggtgaggcccaggaatgtgccggtgccagcaccagggctgctgcccatcctgtgaggggctcccgggaggtggatgctctgcagtgccctcggctgcccccgaaagcaggcacac

SEQ ID NO: 275603 - DNA, 562 bp, Homo sapiens
  chr20:60936962-60937524
  hypo
gggactggagagcaggcacccgaccccacctaaccctcagtggccgccacctcggcacaggtatcccaggaatgtccacttgcgccagcctcctctgcattcctgcagcccctcccgcacctgccaggaattccttaaacagcagggcgcctgacgcagggggcaccaccgcactgctcacagcacctccgccctcccagccccaagctgtctactcagcacccgcaaccaaactctgtggcctttggaaacacccccatgagcacccgctttccctgtgtcatggggacgctgaaagcacaaacaaaaggtgaccactgccgtgcctttgtccctgtggggactccccccaccaagtccttcgtgtccagcctcccaggccccaggtctcgctcacggtggagacctcgccttctggtcctgtggcccaaggtaggcccgacgggcacagacacagagatgggggctgcagcacgcaaagaagggtccctacctggcccaggtccagggtgacgttgacctcgttgtactccaggccgcgggacagcggtggactctgcca

SEQ ID NO: 275604 - DNA, 284 bp, Homo sapiens
  chr20:60952096-60952380
  hypo
gatgccagttgtcccgtcctaggctgcgagctccctgggcacagggctgtctgttccacgcaccaaggagcgcctgtacccagcacggggcttggaaatggcgggtggacatgacgggtgttctgtgctctacggttcccggcttctgatttgcaattgttcggtagaaaccgtacttccagtgcccacacaaccaatctgtttttctccttcttatagcattggacaaattacgtgaggcatttgatgcattattataaaggaggcttcgtgggggatgactt

SEQ ID NO: 275605 - DNA, 699 bp, Homo sapiens
  chr20:60953031-60953730
  hypo
tggcacgcagtggccggcccgggggtgcaaccccatcccctctctggggtccctttgcagggcagccttaggatccattcactgtggccccagggcccagggcgacctgtgaccctgcggagccacctgcaggagtcccagcagatgagggcctctggctgcccctcaggggcttgttgggtcccacaagaacttccagggcctcggagctccagccgggccacagagctgggaaccttgagtggctgggaaccctgaggagctgggagagccaggctgagcaagacaagcctgggcgactcacctggggcaggaatgtggattccatcactccgcagaggctttcaagcaaaacacagcctcgtctctgggcctgtttctgccgtgcgggcacgtccagcccgacgctctcagaagcagctgggatgggctcggggaggtgggggtggagcaggagtcccagccgccttcctctggggcccatcccaggctcccggctgggcgccagcagggctccagaaatgagggggcctcacaccgttgcctctggacgtgccgtgcccgaaatcccgccattcccactgggcatgccgggccctcgaatcctccatgactccagggaagcgactccgtcccgcttggcctcagtcactgctctgtcaatgggatgataactgcccttcccgcaggctgccatgg

SEQ ID NO: 275606 - DNA, 201 bp, Homo sapiens
  chr20:60963092-60963293
  hypo
ggctggccgcctgccgcttcttgagggtggaagaggggtgctctgagaagacactcaggcagcagactctgcctctcactaggaggtgcccccccgaccccgctccaccatagtcaggctgcaggctgccccgggagaggtggctccccttctgcgcctgtctccattcgctcagcgggggagagacgtgggctggtggca

SEQ ID NO: 275607 - DNA, 365 bp, Homo sapiens
  chr20:60976548-60976913
  hypo
ccatgagatggacccctgctcgccccgggccccacagagaggtgtcggtgtgtccggcagacatggagaggatcacgcatgtgcagatgtaccaccttacgcctagctggaagcagcacacacgccggtcagcaggaggcgggacatgcgcaatcaggggacggcatgcacagcatgctgcaggtgcacacagacgccacacgggttgagaggctcgtcatgtggtgacacaggtcccctcagtgtgggggaggggctgaggaggggcaccagggagctgggggattggcctgtgtctccgcaggggagtggctccgtggggtgtgcccaggcaaatgcactgagctgcacgcaccttccatgtg

SEQ ID NO: 275608 - DNA, 328 bp, Homo sapiens
  chr20:60982952-60983280
  hypo
cagaacctgtgagcccgtggcaccgggatggtcagggcctgcctctggagcccgggagcctgtctgcagtctggaggggaacccgctgtatctttgtggagggactcaggaccttgcacccacctctgtgtcacctgcctgctctgtccagctttctttcatgggtttacgtatctttaaagaggggacaatgatttcagcctcagggtactgtcaggatgaaactggctcagtgagggggtcgggctgtggccggaggccaggcacatgcagtggtcagtccgcgaatgcgctgcagtacctcgcacctgcccgcatgcgcccagcc

SEQ ID NO: 275609 - DNA, 482 bp, Homo sapiens
  chr20:60983920-60984402
  hypo
cgtgctggctgcagcgccgggtcctggggatcggctgtgcagtaggggggcccctagccagttcttctttgctggcgctaagctagactttgagggacaaggaggaatgctgaggaaggaacggggtctcttcctgggtctggtgaacccccttgctaggctcccgctgccagtcttctcccctccccagggtgtcgatgggtggccaaaagccaacctggcctgcgggcagtgtgtagggaacacacggcttttgtttcgtgtgattctggagaaattaaagcaacctttaacacacctggacttccctcttgggagttcagtccctctggcctctcaggacaacaggcagacatgtcacaggctgcaggtgggaggcagtgccccctgagtcaggcccgcaccccagtctggcccaggcctcacccagcccagtcgttggcccgtgtcctgccatccctgtgatgcgtggttttaaatgc

SEQ ID NO: 275610 - DNA, 277 bp, Homo sapiens
  chr20:60988929-60989206
  hypo
tgctgagtgcctggggactgcgagtcaggggtccggactgggtgggtggctcggggctggcagtgtgggcagcggcagggctgagtgacccatgctggccggccggcttgggagtgtcctggccccgggcccggccccactccgagaggtccaggggcttgtctagggcacagtcctgcgtggctgcagcctctgtcctctgggcgcggcccgggcctgcaggctgtgtgtgccgccctccagacaggcctgctgcggccagagctgccctggtccc

SEQ ID NO: 275611 - DNA, 455 bp, Homo sapiens
  chr20:60992543-60992998
  hypo
gtctgtcccgtccacgcagcccccccagtcatctgcacgctcctctgtgacgtctgtcccgtccacgcaacgcccccccagtcatctgcacgctcctctgtgacgtctgttccgtccacgcaccaccccccccagtcatctgcacgctcctctgtgacgtctgtcccgtccacgcaccccccccagtcatctgcacgctcctctgtgatgtctgtcctgtccacgcaacgcccccccagtcatctgcacgctcctctgtgacgtctgtcctgtccacacaccacccccccggtcatctgcacgctcctctgtgacgtctgtcctgtccacgcaacgcccccccagtcatctgcacgctcctctgtcacgtctgtcctgtccacgcaacgcccccccagtcatctgcacgctcctctgtgacgtctgtcctgtccacgcaacgcccccccagtcat

SEQ ID NO: 275612 - DNA, 349 bp, Homo sapiens
  chr20:60996144-60996493
  hypo
gaggttgggataccggtcaagtggctgggcctctgcaagccagtgtttgtggcacacaaaccgctgcagttcagacttcttcaccgggtggcttgtgcttcacgcggtcgggtgggggagtgtgtgtgtttgccgtgtgtgtgcacgcccgagccagtgtgcatgtgtgtgccgtgtgtgtgcatgatagccagtgtgcgtgtgtgtgtgccatgtgtgtgcacgcccgagccagtgtgtgtcccatgtgtgtgcacacctgagccagtgtgcatgtgtgtgtgccatgtgtgtgcacacccaagtcagtgtgcgtgagtgtgcgtgtgtgtgccgtgtatgcgtgatt

SEQ ID NO: 275613 - DNA, 201 bp, Homo sapiens; identical to SEQ ID NO: 220183
  chr20:60997210-60997411
  hypo

SEQ ID NO: 275614 - DNA, 621 bp, Homo sapiens
  chr20:61000251-61000872
  hypo
ccccgattcacctgcgcctccctcatgacctgcgcctccctcatgtgggaccccaggtgtccagcagtgctgacggcaggaccctctgtgcttggacaaggtcaagtctcattgccacaaaggccttgtgcaggaggacgcagccctccccacgctcagggcagaggtccggcttctgacggtgatgacactcatccttggacggctgctcactacggactccaatgggctcacggcatctctgtggctacacccaggggagatgccacctgcctcccacacacaggccagggaatcacaggcccagctgtggccctggcaggactggacattgtccggccgagtgccaaaacccacagtgatgcctgttcttaccctgtcctctgggaggccgggccccctgagctcctctgctgtctgagcaggaggcatccggggcatcactgggctccccgcctctccgagggcactcaaccagagaagccgcctgggcaccagtgctccaaggacgtctgccaggccggctgctctccaccccagccaccgacccccagcaggctctttggggcaggagtgcggagctggacactggtaccctccgtctctgaggcctgggctgtc

SEQ ID NO: 275615 - DNA, 133 bp, Homo sapiens
  chr20:61009827-61009960
  hypo
accacatgtggggccgagtcccccagacccagggaccagctccttccaccctggaatctgcgtgcagcaggcgctgatgagcgtctgtggacgagggatggattgacctgggtgaatgcgcctgtgggcgagg

SEQ ID NO: 275616 - DNA, 37 bp, Homo sapiens
  chr20:61010380-61010417
  hypo
gtgtttcgtgtcaccgtatccacgccacgtgcagtct

SEQ ID NO: 275617 - DNA, 379 bp, Homo sapiens
  chr20:61013033-61013412
  hypo
cttcccatagccaccgactgcccggggctcagcgggcaggcagggagatgcctcaggactcacgggtgaggggtgttgggcgggggccatatgggcttgtgagcattgctagctgccgggccctggccagctgcccgcctcagagctacagctggcgccggggagctggcagctgagtgccatccttccaaagacgtggtgctccagggcgcatggcccgtgaccaccaccggggtgtggagacacctgaatggagtcctcactgccggcccggcctgcgctgcctgctctcggcctccctgtgtgtcgcgtgatgttgtgtgccagggttgggcggtggctgtgtgaggcctgtgaggacacacgcaaatgggagagg

SEQ ID NO: 275618 - DNA, 222 bp, Homo sapiens
  chr20:61022050-61022272
  hypo
acccataccttggagccatgcgcagcctcccgcccacccatgaagatgtagccctggcctcaacccagcccgggtcaccgcacatttgtccatgtggtcgttcattcgtatagcaactacgaataatcctctatagcctggcgcgccctcgcctgtgggcttggaaatggggaatcggggtcccgtggagccatctcctccggctcagtggccccaagtcag

SEQ ID NO: 275619 - DNA, 105 bp, Homo sapiens
  chr20:61275877-61275982
  hypo
taagcccagagaggccggctctcctcggggctctgatgggccccttggcttgaccaagccccattgcagttttggctccaggtcggtctgacttccaaatggcaa

SEQ ID NO: 275620 - DNA, 201 bp, Homo sapiens; identical to SEQ ID NO: 220185
  chr20:61285585-61285786
  hypo

SEQ ID NO: 275621 - DNA, 324 bp, Homo sapiens
  chr20:61287386-61287710
  hypo
gtaggccttgcccccgtcacagccctgacgccacaccgctgaagcggcagcttctccttccaacagttctaaaaagggcaggaattgagtccctgtgagcaagctgggcacagccccccacctttccgcagcggagctgtggctgggagacacagtgcctgggtgtgggcctggccagacgccaccctggatttgggaggctcttgagacaaggcaggcagagctttgagccacccccgtgatgggtgtgctggaatgttccctcctggatgtgctgtacccgtggagagacgtgagcttgctaaccagacattcttctcacag

SEQ ID NO: 275622 - DNA, 898 bp, Homo sapiens
  chr20:61287740-61288638
  hypo
cactcccgctgaggccactcccactgcgtggctgaagcctcgaggtcaccaggcggaggcgcggagatgcccctgcatcagctgggggacaagccgctcaccttccccagccccaactcagccatggaaaacgggcttgaccacaccccacccagcaggagggcatccccgggcacacccctgagccccggctccctccgctccgctgcccatagccccctggacaccagcaagcagcccctctgccagctctgggccgagaagcatggcgcccgggggacccatgaggtgcggtacgtctcggccgggcagagcgtggcgtgcggctggtgggccttcgcaccgccgtgcctgcaggtcctcaacacgcccaagggcatcctgttcttcctgtgtgcggccgcattcctgcaggggatgactgtgaatggcttcatcaacacagtcatcacctccctggagcgccgctatgacctgcacagctaccagagcgggctcatcgccagctcctacgacattgccgcctgcctctgcctcaccttcgtcagctacttcgggggctcagggcacaagccgcgctggctgggctggggcgtgctgcttatgggcacggggtcgctggtgttcgcgctgccccacttcacggctggccgctatgaggtggagttggacgcgggtgtcaggacgtgccctgccaaccccggcgcggtgtgtgcggacagcacctcgggcctgtcccgctaccagctggtcttcatgctgggccagttcctgcatggcgtgggtgccacacccctctacacgctgggcgtcacctacctggatgagaacgtcaagtccagctgctcgcccgtctacattggtgagtggggctggcggggtaagtgctggcaggggt

SEQ ID NO: 275623 - DNA, 206 bp, Homo sapiens
  chr20:61289971-61290177
  hypo
ccctccgcagcccctgggtggtgcacagcggccctgacgcctctgcctctctcgcagccatcttctacacagcggccatcctgggcccagctgccggctacctgattggaggtgccctgctgaatatctacacggaaatgggccgacggtgagtggccgcgcacccagctgcctgcgctggagaggcccacgtgtctctggaaggg

SEQ ID NO: 275624 - DNA, 254 bp, Homo sapiens
  chr20:61291018-61291272
  hypo
ccgcagcatttctgcgctggagcaagcaggtgccgcctggctgcagccttgcagggtgttggcgctccctgtgtcctctgtctgtctctgcggctctgctcccggcctttgctggccttttgccctcccgccgctgcctcactgtgaagacacatccccgaaagcccagagcttgtcctcactgtgaagacgcgtccctggatgcccagagcttggatgggcttctaccactccacggccgcctcagcccatgg

SEQ ID NO: 275625 - DNA, 101 bp, Homo sapiens
  chr20:61291764-61291865
  hypo
acggagctgaccaccgagagcccactgtgggtcggcgcctggtgggtcggcttcctgggctctggggccgctgctttcttcaccgccgttcccatccttgg

SEQ ID NO: 275626 - DNA, 306 bp, Homo sapiens
  chr20:61297760-61298066
  hypo
ggcaccttcctgggcggcttctttgtgaacaagctcaggctccggggctccgcggtcatcaagttctgcctgttctgcaccgttgtcagcctgctgggcatcctcgtcttctcactgcactgccccagtgtgcccatggcgggcgtcacagccagctacggcgggaggtgagggccagatggcacctgggtacgcgtcggggccccaagcacccgcggtccctgggcatggaggaggagtggtgcagcacttgggagaggtggttttgaaaagggctacgtcacaggacagcggcaagggcaacac

SEQ ID NO: 275627 - DNA, 313 bp, Homo sapiens
  chr20:61298975-61299288
  hypo
caagtttgtagacccgaaatgcaggctgcatggggacgagccccatggctgaccctgtgcctgctgggcgccagcatggctctggcctggaccctaccactcgcttgtcccccctctgcagcctcctgcccgaaggccacctgaacctaacggctccctgcaacgctgcctgcagctgccagccagaacactacagccctgtgtgcggctcggacggcctcatgtacttctcactgtgccacgcagggtgccctgcagccacggagacgaatgtggacggccagaaggtgagtggagccgctgcctaccgccc

SEQ ID NO: 275628 - DNA, 129 bp, Homo sapiens
  chr20:61312774-61312903
  hypo
cttgtgtacacactcgtgtgtgtgtattaagccgtgtgtacacactcgtgtgtgtgttaagctgtgtgtacacactcatgtgtgcgcgtgtttattaagccgtgtgtacacactcgtgtgtgtattaaa

SEQ ID NO: 275629 - DNA, 288 bp, Homo sapiens
  chr20:61314589-61314877
  hypo
cttgatcatttattccaagtcgtgttgggcttggacctcgggctctcgggagcggccgtgacggagctcagacccagcacttctcctgcagagccagccgctcgctgctggccatgcctggaggtggcgaggacgggcttttccatcactctcggtgggggcacctgctccaggggcagctccatgggcgcttggcgggacggaagctgcgggaatagttgatgttgaggttgacggcgacagtgaggactgcaagaatacagtcacgtaccctggaacaatgttcag

SEQ ID NO: 275630 - DNA, 471 bp, Homo sapiens
  chr20:61318673-61319144
  hypo
tggccaccctggggcgtctacactgaaggccaagggcatgtggaggaagagccatctgagccgaggcccggggaggagccagcaggccaaggaggcggaagaaaccacgcagtggcgtccagggcagggcaggtgcgtcatccgggcgggatgcagagacacgtccttccaccaaccatctgaggagcacttggcacccacacaatgagcccggcaagggccacgccaggaggcagcgcacggggcagagcctctgagccagagagggggaggtcccttgggaggcccctgccatcccccgctctgggtgggcctctccagccagactctgcgccccaagggcagggctgggcctaagccacacctcggggtgcacgggctgtggggggccgctcctggacacggaaggacgacaccggcttccctgtacctctgctggggccgcgggtcccatgtcgtcagcgtggccac

SEQ ID NO: 275631 - DNA, 102 bp, Homo sapiens
  chr20:61323378-61323480
  hypo
tccatccccagctctgcccacggccaccaggaacccacttggcaaccggtgagtggggccgcccttcccagcaagcccagcgaaagggctctgggttccaca

SEQ ID NO: 275632 - DNA, 118 bp, Homo sapiens
  chr20:61327484-61327602
  hypo
gcgctggcttccagcgcctcttacatggatggtgcaggtgaggctgtagagtgcgcctgtgtagtggggctgtgcagtggggctgaggagtgcacccgtgcagtgtgcctgtggagtg

SEQ ID NO: 275633 - DNA, 318 bp, Homo sapiens
  chr20:61330791-61331109
  hypo
ttgttcaggagctccgcccagcctctggtgttgtgtgtcagcaccccgagtggaccgggacaggctcccaagtggactgagacaggctcccgagtggaccgggacaggctcccgagtggactggagacaggctcccaagtggaccgggaaaggctcccgagtggaccgggacaggctcccgagtggaccgggacaggctccctctctcttgctgctgggatgtctccccgggagcttgcgtctctcgccaccctcacctcccagccagagggaagccaggaagccagggagatgcggcctgaccggcaagggtgccct

SEQ ID NO: 275634 - DNA, 203 bp, Homo sapiens
  chr20:61333200-61333403
  hypo
gtgcagggcagggacgtcagggtgcagggcactacagtgcaggatgccagggtgcagggagccgggatgcagggcgccagtccttgcccctgttcacagtccagcaagctggggagggacgtggagcttcgtgggcaaggtttctccctaactgtgcctcccgctgctccacatggagagccgctctccgggcccggtctcct

SEQ ID NO: 275635 - DNA, 147 bp, Homo sapiens
  chr20:61349792-61349939
  hypo
cttctgtgcttgttcgcacctatgagcttcgataaatgcagccatgtatccccacttcagaagacacaccggcccccgccctccagccctgtggcccacccgccccgatgcccgcccctccacccactggtccgctctcctccccca

SEQ ID NO: 275636 - DNA, 233 bp, Homo sapiens
  chr20:61364297-61364530
  hypo
aacggcgctgacgtcgcctaaagggggttcccagctggcagcctccaggtgctggaatgtttctcggtgagaagccgccacgggagtctgtggacttgtcacatcacccgcaggcgtggccctgaggccacgtatccaagcagcagtgccgtgcatattcatgtcggcattggacttgcaaattctgagtgaagtaaatgtcatcggcagtgtgtagacgttctttcggaaga

SEQ ID NO: 275637 - DNA, 154 bp, Homo sapiens
  chr20:61370412-61370566
  hypo
tgttgtaaaggaaagccctgcgtggctgtgagggagacgcgtgtggaacctcatgtcgtgtggcgccgttggggacccgttgggctcttgagactgaaccgggacaggctgagaggctctccaggacacttccgggcagcaggccccctctggc

SEQ ID NO: 275638 - DNA, 426 bp, Homo sapiens
  chr20:61385884-61386310
  hypo
agccgggatagggccggacctcctgaacttgtgttgactgagcacctcacactgagcaggcctgacaccccaatcagcacggcaggcatcccagctgagggtgcatgagtcccgctgctggctctgacagcctcgcccttcctctcctgcaggtcaacaccttcatgtccttcatattccccatggtggtcatctcggtcctgaacaccatcatcgccaacaagctgaccgtcatggtacgccaggcggccgagcagggccaagtgtgcacggtcgggggcgagcacagcacattcagcatggccatcgagcctggcagggtccaggccctgcggcacggcgtgcgcgtcctacgtacgtaacctctgggccctccaggggcgggaggcaggccagggctagcaaaggcagcgagcgctgaaccac

SEQ ID NO: 275639 - DNA, 191 bp, Homo sapiens
  chr20:61393666-61393857
  hypo
tggaggatccaccccggaacagacagaatggtgtctctcaggatggtgctctgagagagggcagagtggatgccccactgccctagaccctcggtagacgtggggtctctggggcggggtctgtggctgtgactgaagtcggcttttcccgttgatgtcttgatgctcctatctgtgcacttaccgtaggt

SEQ ID NO: 275640 - DNA, 127 bp, Homo sapiens
  chr20:61393887-61394014
  hypo
cccacgacacctgatctcgtatcactagcttgcggccaggtcatgatgtggccccggaagctggccctgcgtgccatgagtgcgtcggtcatggagtccggagcccctgagccggcccctggtgacg

SEQ ID NO: 275641 - DNA, 54 bp, Homo sapiens
  chr20:61398117-61398171
  hypo
attgaccaccatcccgactggcttccacttggtttctcccggcttttcgcacac

SEQ ID NO: 275642 - DNA, 36 bp, Homo sapiens
  chr20:61398433-61398469
  hypo
tgaaaaaggctgggcgcggtggctcacgcctgtaat

SEQ ID NO: 275643 - DNA, 124 bp, Homo sapiens
  chr20:61401677-61401801
  hypo
cgggatccagacaccggcactccagcctgaggactgggacccaaatgccggcactccagcctgaggaccgggacccagacccagacgctggcactccagcctggacgcccgctcaccggcatgc

SEQ ID NO: 275644 - DNA, 145 bp, Homo sapiens
  chr20:61405559-61405704
  hypo
gtgatgatagcagccgacagatgggcgagcatagagctcagacattgccagcagcgtcagatccttatatatccagagcacggctcacacgccaccgccctgctggctctgtcagccgcatggtcctccgcgacacctggggctc

SEQ ID NO: 275645 - DNA, 83 bp, Homo sapiens
  chr20:61411097-61411180
  hypo
gttagaaagctcttcgttgtggattctttgaatgtgggtaaatctttttttttttttttcttttttttgtgatggagtcttgc

SEQ ID NO: 275646 - DNA, 165 bp, Homo sapiens
  chr20:61412187-61412352
  hypo
gagcccaggtgccaccgagggaatgcaacgtgccacaccccaagacatgacacttgtgagaacagtgtggcccagcccccactccgggcacagcctcggacaccctgcccgcctccgcccatggaggtgcggcctgcaaagcgtacctgccgccgccttcccatc

SEQ ID NO: 275647 - DNA, 287 bp, Homo sapiens
  chr20:61424744-61425031
  hypo
caggcagacagccccggctgggatgagccaagcgtgtgtctccatgtggacccggcccaatgtggggctcagcaccctcgggtctcctggtccgggctcctgtctcacgcttttatgccatcttttctcaataggcacaggggacccccaagggaggaggcgctccagactgaaggaggagagtacctggcagggacgggtggagaggcgcagggaccccaaggtgtccagggaacagtaaggagatgagtaacggtgagggtcccgtctcccgagcgtatctgtgc

SEQ ID NO: 275648 - DNA, 118 bp, Homo sapiens
  chr20:61442868-61442986
  hypo
tgctgggcttctacgggatccggctggaggaccgaggcacgggcacggtgggccgagcacagaactaccagaagcgcttccagaacctgaactggtgaggcccggctgctcccgccca

SEQ ID NO: 275649 - DNA, 421 bp, Homo sapiens; identical to SEQ ID NO: 220191
  chr20:61458920-61459341
  hypo

SEQ ID NO: 275650 - DNA, 407 bp, Homo sapiens
  chr20:61459926-61460333
  hypo
acctgtgcggtcaccgaggcagcactggttgccacacggccaccttggtcatgaaaccagataactgccagggtgtgggggcagacacagttttaggttgatggggaaggaggctgcccccagggcaggactgtagagggagggaggggggccactgcccgacgggccttactcatcccttgtccccagggcatgccgggcaaggacggccagaatggcgtgccaggactcgatggccagaaggttggcatggggctcagggtgtgacgggagggagggggctggaggggagttcggcctcccgaggcctcagcctccccttccgcaccccaatctctgtcctcacagggagaggctggtcgcaacggtgctccgggagagaagggccccaacgggctgccggtgag

SEQ ID NO: 275651 - DNA, 205 bp, Homo sapiens
  chr20:61460570-61460775
  hypo
ccatccctggatgccgtgcggtcatcacccccatgggctctgagtaggggctcctgcatccaaggccagggaggctgtcaaagccgcacctcaggtccacaaggctgggagaagttggccctgcctttgggtgcactcactctggcccctgcaccctgcctgcgtgcacgcccctgggtgctgctgccggcgtgcaatgtaactg

SEQ ID NO: 275652 - DNA, 38 bp, Homo sapiens; identical to SEQ ID NO: 220192
  chr20:61470101-61470139
  hypo

SEQ ID NO: 275653 - DNA, 43 bp, Homo sapiens
  chr20:61471674-61471717
  hypo
cctggggctggccgcgcctggccttccccggacactcccgacc

SEQ ID NO: 275654 - DNA, 443 bp, Homo sapiens
  chr20:61471928-61472371
  hypo
caggacggtgctcccggcgagcctgggcctcccggagatcctgggcttccaggtgccattggggcccaggggacaccggggatctgcgacacctcagcctgccaaggagccgtgttaggaggggtcggggagaaatcaggctctcgaagctcataaaattcaacgtgaggaagcaagtgacaaggacgcccgaagcacagtggacggtcatgaaggagcgggggtgtggcaggcgggtgacgtccaggagagggagcgcccctggctgcccctcggccgccgactggacgcgcgggccttgccagcgagcaccctcatcgggctgtcgcctgacagcatacctcaaaaggccctagctaataaacctgtaagcccagcatttgagagaaggtagggtgtgtatatataaaaggttgtgtacaactccacgaggtgaaaaatat

SEQ ID NO: 275655 - DNA, 180 bp, Homo sapiens
  chr20:61473183-61473363
  hypo
caaagtccctactggagtcccgtcagcttgagtcacgcccttttcgagtcagactagccgagcagagctccagggttgcagaaggcgtgcacaggtcacgaaggaatggctgttcaccccccgaggattcctgttcagtccgatcacttgatctccatcgaggggctgctctgtaaactc

SEQ ID NO: 275656 - DNA, 98 bp, Homo sapiens
  chr20:61473725-61473823
  hypo
taaaatatacatgacatgaacgtttcaaccgctaatgggccctagctaataaacctgtaaacccagcgtgtgagagaaggtagagtgtatatattaaa

SEQ ID NO: 275657 - DNA, 97 bp, Homo sapiens
  chr20:61480530-61480627
  hypo
gaagtatttaagtataaagaagcatggtgtctgcagcttactatcaaatggatcccaaagatacctggagagaaactgggaccggcagggagaatgg

SEQ ID NO: 275658 - DNA, 57 bp, Homo sapiens
  chr20:61482263-61482320
  hypo
gcagcaccttccacccgcaaggccctgctcccactgtcttcacgtttactcgtcccc

SEQ ID NO: 275659 - DNA, 587 bp, Homo sapiens; identical to SEQ ID NO: 220194
  chr20:61488410-61488997
  hypo

SEQ ID NO: 275660 - DNA, 629 bp, Homo sapiens
  chr20:61505942-61506571
  hypo
ccattgggatctgccggtgaactccgcaggtcgtctttgaaggcacatgtggctcttctgccactgcctggggagctgagacccctttgcccaaagaccctcaagtgccttccctagggagctgccctgtaaggtgccgccgtcctgcccgggactcaccaccacctctgtgttccttctagacctagatccagactggagttccagcaggccccaaaagagaaagtgtgaggtgtggcctacaaatatgtttccctacgaaaacctgcggaaaatgtgtggaaatcgatgttgagagtgcgggatctgggtgggaggaatataagcttgcgtaagtggacagggactcagatacgagattctggatttgatgcgttggagggaacggctgggagtgacccaccccccacccccattttcttcatcagtcaccgaaactttcgccccacaggtagctgaccctaaattcagtgaaatccagaactttcctggcacactggagaggacggcagaacgctgggatggatttatcgtgcaagaccagcttgatgtccttagggcttggaggtcaccccttcacgaggattgtgaggagtgaattcatcggggagccccgcaccctcacctgc

SEQ ID NO: 275661 - DNA, 93 bp, Homo sapiens; identical to SEQ ID NO: 220197
  chr20:61518345-61518438
  hypo

SEQ ID NO: 275662 - DNA, 157 bp, Homo sapiens
  chr20:61527425-61527582
  hypo
ccagtgcaacaatacgtgggcggcagaaggatcacagaggagaaagaaacgtcttagctttcctggaaaggacacgaacatctcaaaatattggttgatccctttagcacccagcgaacagaacaggaatactccaatgcaccgacaccaggcacac

SEQ ID NO: 275663 - DNA, 313 bp, Homo sapiens
  chr20:61527972-61528285
  hypo
cgtcctggggctggcgaggccattggaacagaaggtaccactggcttccttacggctcccaccaaagcagcggagccagggaacttcttggaggcagccgttgccgctgcaggtgccggtccggcctgcctggcagctgaagcaccactcgatggggtagcggagagccatggcctcttggggatggtgcccttgaaacctgagggtggctttttaatggctggtgtggctgctgccacattagcaaaagaagacttctttggcacgaggtttctaggtgcaggctgcttgcccaccgcggagcctggagggg

SEQ ID NO: 275664 - DNA, 130 bp, Homo sapiens
  chr20:61528807-61528937
  hypo
tacacatctcacttcgttgtccttccagactggagtccattggaggcgatgccattaataaaaatatggaaagctggcatacacctgaaccacaggaagagcagccacacctttacgtgaagagtgagaa

SEQ ID NO: 275665 - DNA, 206 bp, Homo sapiens
  chr20:61529148-61529354
  hypo
gagcaggggacagacggcgtgccaggggacagatggccaggggacagggctcgttgaggtgcaccgcatgccggggcagggatccagctagtggagcagagtgaaacgcctggggaatagggggcccccatgagggccccaggatggcagaggccatctcagctctacaggcaagtgcctgggagctacctcgggtgatcaagtca

SEQ ID NO: 275666 - DNA, 92 bp, Homo sapiens
  chr20:61538594-61538686
  hypo
cattgtcgctgcggcgtgtttgaggatacagtcattactgcagtacaccgagtcgggctgcgccacgtgacagcacccggggccaatacatt

SEQ ID NO: 275667 - DNA, 92 bp, Homo sapiens
  chr20:61540950-61541042
  hypo
atgggtgcagcacccgtcctgggaggaatttctatctagagcgagactgaaaccagtgaggccgactgctgaatgctcgtctcagcggacaa

SEQ ID NO: 275668 - DNA, 63 bp, Homo sapiens
  chr20:61567398-61567461
  hypo
aatgttaaggaatgtcgccttaaggcgctagcactcaagctttctgctcgtgcatccccttgc

SEQ ID NO: 275669 - DNA, 135 bp, Homo sapiens; identical to SEQ ID NO: 220200
  chr20:61576504-61576639
  hypo

SEQ ID NO: 275670 - DNA, 172 bp, Homo sapiens
  chr20:61591489-61591661
  hypo
ccggtgaacacgtgcgtgtgcaggcgcatgtgtgtgtgttggtgcgaggactctagagcacagctggaggccggtggtgagagtgtgcacatgtgcatgtgcgtgttcgcggggtgggagggctagcttggaagcaggggtgtttccctcagccgtgcgggtggcacgaccc

SEQ ID NO: 275671 - DNA, 175 bp, Homo sapiens
  chr20:61618989-61619164
  hypo
gacacgggtgaacacggagctcgggggacacgaccatccagcgtcatgaaagccaggcgtgcgagccaactacttgtacctgcaggacaggaacagtgaggatagagcgatgggcacagacctcaccccgaggacagaggtcattgtcaccaaagacccccgagagaggacggcg

SEQ ID NO: 275672 - DNA, 48 bp, Homo sapiens
  chr20:61665857-61665905
  hypo
tagctcaatactcattcagacgcagagtgcgtgtgccctgccaggaca

SEQ ID NO: 275673 - DNA, 112 bp, Homo sapiens
  chr20:61665935-61666047
  hypo
atcaataagccacagaagagaaatccggaaacaagggacgcgcagcgtgattccgtgccacggcgtcaggagcggcatgtagcatcttttggtttgagagtaaaattccgca

SEQ ID NO: 275674 - DNA, 210 bp, Homo sapiens
  chr20:61666077-61666287
  hypo
agcgcacagaggctggagacgctaaagcatccaggcaggactccgccaggtgggcaggcagaggcctgtgcacaggcagacggtgtgcccgtgagcaggacatgcttgtagggtcacaggtcacccacccgcaggacacgcatgcaaggtcacgggtcagccaccagcaggacacgcatgcagggtcacgggtcagccacccacaggaca

SEQ ID NO: 275675 - DNA, 905 bp, Homo sapiens
  chr20:61674870-61675775
  hypo
cctgagcagctctgcgatgcgcatcatggtcggggctgttttggggccgtttccaacaccagcagcgtcgtggctccacagcagcaaggcttcctgaaggaagaagggggcttcgcagtatagttcgagtcgggctctgtttctttccatcccaaacacatagagacgaccaaggccctgatcccaaaagaagaacccaggctgccggcgatcctggggacaacgatgttaactcagggacaggcgcagtctctggaccaggccaggtcgtggtgcacacactcgatctctgcagcgtttcccacatgggcactgcggaccgggaatgtcaggggaacgcgggcaccgtggaccgggaatgccaggggatcgtgggcaccgccgaccgggaatgtcaggggaacacgggcactgccgaccgggaatgtcaggggaacgggggcactgcagaccgggaatgtcaggggaacgtgggcactgcggaccgggaatgtcaggggaacgtgggcacggctgaccgggaatgtcaggggaacgcgggcacggccgaccgggaatgtcaggggaacgtgggcactgtggaccgggaatgtcaggggaacgcgggcacggctgaccgggaatgccaggggaacgcgggcactgcggaccgggaatgccaggggaacacgggcactgccgaccgggaatgtcaggggaacgtgggcacggccgaccgggaatgccaggggaacacgggcactgtggaccgggaatgtcaggggatcatgggcactgtggactgggaatgccaggggaacacgggcacggcggaccgggaatgtcaggggaacgcaggcacggctgaccgggaatgtcaggggatcgcgggcactgccgaccgggaatgtcgggaacgcaggcac

SEQ ID NO: 275676 - DNA, 125 bp, Homo sapiens
  chr20:61681328-61681453
  hypo
ccctcctggcctggcggcccttctggagcctgggagcagaggtgaggctggcatgggcacgaaatgtggaaatgctccacgcccccagggcttgcaggggaagcgaccgacgtaggtgtgtggcc

SEQ ID NO: 275677 - DNA, 511 bp, Homo sapiens
  chr20:61692615-61693126
  hypo
gtccgtgtcctgtccgtgtctgtgtccatgtcctattcatgtccgtgtcctgtccgtgtcctgcctgtgtccgtgtctgtgtcctgtccgtgtcctgtctgtgtccgtgtcctgtccatatctgtgtccgtgtcctgtccatatctgtgtccgtgtccgagtccgtgtctgtgtctgtgtccatgtccatgtcctgtgtccgcgtctgtgtctgtgtccatgtccatgtcctgtctgtgtccatgtctatgtcctgtccgtgtcctgtcagtgtcctgtctatgtcttgtccataacctgtctgtgtccgtgtcctgtccatgtctgtgtcctgtctgtgtcctgtctgtgtccgtgtcctgtccatgtccatgtcctgtccgtgtctatgtcttgtctgtgtccatgtcctgtccatgtctgtgtccgagtcctgtccatgtccatgtccatgtcctgtccgtgtctgtgtccatgtccgtgtcctgtccgtgtctgtgtctgtgtcttg

SEQ ID NO: 275678 - DNA, 253 bp, Homo sapiens; identical to SEQ ID NO: 220205
  chr20:61693186-61693439
  hypo

SEQ ID NO: 275679 - DNA, 264 bp, Homo sapiens
  chr20:61695623-61695887
  hypo
tgtggacctcggcacggcccccactgacctgcatgggccgaggtcctgcaagagaacgggctccatttgcgtctgagggccaggatgcctgcactggggatcacgctgtgcttcggatggagcctccaatctcggggatgccattttaccctggaggccatcgggcttcatgccccacgggcattgtatcggcttccgtgtggccccgagagcagggcaatccgagggcaaggccaagggagtggtgagcgtggcctgcagggc

SEQ ID NO: 275680 - DNA, 153 bp, Homo sapiens
  chr20:61715256-61715409
  hypo
ccggaccagggccccggggcttcctgacagcaggaacaacaggaatcattcaaaccctggagcccagagggcaggacgggagcggccttttgtcccccgcgggcaggccagggaggtggacaggccgggagcctgaagcctgagcagctggag

SEQ ID NO: 275681 - DNA, 147 bp, Homo sapiens
  chr20:61725271-61725418
  hypo
aataaaaaaatgtaaacatcgcaagctgcacccaggtgtgaatctggagggcgcctccttggaaaacttggctggtgaccgcaccctcagttcaagctcaccggccgcccttccctgtgcacacacgtgagctctccagtatgtttg

SEQ ID NO: 275682 - DNA, 165 bp, Homo sapiens; identical to SEQ ID NO: 220207
  chr20:61748971-61749136
  hypo

SEQ ID NO: 275683 - DNA, 66 bp, Homo sapiens; identical to SEQ ID NO: 220208
  chr20:61749166-61749232
  hypo

SEQ ID NO: 275684 - DNA, 383 bp, Homo sapiens
  chr20:61749623-61750006
  hypo
cacacaggaaagcacatgcccgctgtgtcctgctgcattgctgggcagtgtccactgcacgtcgctcgctgcattgctgggcagtgtccgcggcatgtcgctctctgcattgctgggcagtgtctactgcacgccgcttgctgcattgctgggcagtgtctactgcacgccgctcgctgcattgctggggagtgtccgctgcatgtcgctcgctgcattgctgggcagtgtccgctgcacgccgctcgttgcattgctgggcagtgtctactgcacggtggacgctcctgcactcatggatgctcaggctgcttcccgttggacgcgattgtgagtgacgctgctgtgagcctccaggtaccggccttggagccagcaaatgc

SEQ ID NO: 275685 - DNA, 96 bp, Homo sapiens
  chr20:61756482-61756578
  hypo
ccctggagccatctcgccgggcctctgagagcgaagtgtttggggagacagcaggaggcacgtcccaccccggagctgtctcgcctccttcaggac

SEQ ID NO: 275686 - DNA, 86 bp, Homo sapiens
  chr20:61759828-61759914
  hypo
tgtcgcgttcccggcgtggccacgccgccacgtattgatctgcccgctgcagacacctggcctattttccaggactctgcaggcag

SEQ ID NO: 275687 - DNA, 262 bp, Homo sapiens
  chr20:61765376-61765638
  hypo
aggtaacaaagctgtcggcatccccagagcccagcgggcaaagatagccaagaatctaccaccaactggcagccaagattgcctgtgggtcatgcagcaggttcacgtccctgttttaacttttaagaaaccaccttagtaaaggttgtactgataaaccgagcaaagactgggcccgtgcccctgccccagcggactacagcctgaaggaggggccctggaaacccaggagctcctgtgccagctccgggcacttgaccat

SEQ ID NO: 275688 - DNA, 143 bp, Homo sapiens
  chr20:61771324-61771467
  hypo
aggaaaggagaccagagcagcgctcgtacctctgaagtcctctcccgcaatgcgacgtattagcccaaagtagaccgtggctatggccggggcggggcagctctgtttgtgagcacggaatcgaggctgggagctgcacactc

SEQ ID NO: 275689 - DNA, 235 bp, Homo sapiens
  chr20:61772545-61772780
  hypo
cacacagggggtgccgaggagcttgcacacccaggaggctccctggaagaggaaggtttcaagcagctgccctcaggcaccccacgcgtgttgacagccaagcgtgacttcttgtcaagggcatcgttaaaggagaacatgaggcctgctcgggggctgagaggagagaggtgccagggcaggcgccccccgcacataccctgccactgccatgggatcccggcactgcagcctc

SEQ ID NO: 275690 - DNA, 525 bp, Homo sapiens
  chr20:61817151-61817676
  hypo
tatgaccatgcatgtctatgcgtccccatgttagggcatatgatcacacgtgtctatgcctgctcatgttagggcatatgatcacgtgtgtcggtgtgtgcctatggtaggcacatgatcaagcgtgtcggcatgtgcccatggtagggcatatgatcatgtgtctgtgtatccccatggaaggacacatgctcatacatgtcggtgcatccccatgttagggcacatgatcacgtgtgtcggtgcgtgcccacggtagggcatatgatcacgcatatctgtacgtgcccatgttagggcatatgatcacacgtgtctatgcctgctcatgttagggcatataatcacatgtgtcggtgtgtgcccatggaaggacacatgatcatacatgtcggtgcatccccatgttagggcacatgatcacgtgtgtcagtgcacgcccatgttagggcatatgatcacacgtgtctgtgtgcccatgacaggcatgtgtgttgtatgcacgtgtttgttgtatgttctctg

SEQ ID NO: 275691 - DNA, 154 bp, Homo sapiens
  chr20:61819884-61820038
  hypo
ccacctccaactccacggactctactgcccagggcttccccagccacaaaggagagcttgtgcctgggacagcgaccacccccaggacagaaacaccccctcccgggactcctctaggacccactgtcccatgtgggaccgttccacaggtgct

SEQ ID NO: 275692 - DNA, 85 bp, Homo sapiens
  chr20:61823114-61823199
  hypo
cagggaggagcctggtggctcgaggagcctctgaaccgggcttttttttgctgtttcttttttttttgagacggagtttcactct

SEQ ID NO: 275693 - DNA, 131 bp, Homo sapiens
  chr20:61827956-61828087
  hypo
actcaacccccgcacgggacgacacactggagctgaccaagcacacgtgttttaaactgttttcaaagtcaaacgttagaacatgtaagaaactggttcgccctcattgtttgtttcgactctgccgttcc

SEQ ID NO: 275694 - DNA, 267 bp, Homo sapiens
  chr20:61838281-61838548
  hypo
tcacagtcctggtcacagtgcgtgggagacaactggaaacgcacagttcgggctgcctggaaaacacatgcagcctcctttcagggcctttgatctccctttgtctcccgcacagccaggcacaggttcagcgctcactcgctgccaagtgctggaggcgagctgtgctgctccctcaacattccttagtgccacggctccatgggcactgagttatgagtgtgaaagtttacttctcagggatacagctgcattaaccccgggcac

SEQ ID NO: 275695 - DNA, 383 bp, Homo sapiens
  chr20:61870767-61871150
  hypo
cagggatgtggaggcgcagctgcggcggctgcaggaggagaggacgtgcaaggtgtgcctggaccgcgccgtgtccatcgtctttgtgccgtgcggccacctggtctgtgctgagtgtgcccccggcctgcagctgtgccccatctgcagagcccccgtccgcagccgcgtgcgcaccttcctgtcctaggccaggtgagcgccccagcaccacgcgcagccagccctcctgcggagggggccctgagccggctgtgcccggccctcctgaacccatgcaggcccttcccgggtggcagcgtcagcttgtttttacccggctcccaggtcccgctgatagcgcccatcaatcttactacctcccttgacgcttaggttggggc

SEQ ID NO: 275696 - DNA, 165 bp, Homo sapiens
  chr20:61880358-61880523
  hypo
gctcctgagtctggcggcccccagatgcacagcatggagaaaggggtcccccaagcccaccctgggacacgtctcagagctttcccacgtgggtgccccgggaatgaggcggtgggacagccagctcaagggagccccagcgcaggtcggcgtacggacacagca

SEQ ID NO: 275697 - DNA, 55 bp, Homo sapiens; identical to SEQ ID NO: 220216
  chr20:61895763-61895818
  hypo

SEQ ID NO: 275698 - DNA, 37 bp, Homo sapiens; identical to SEQ ID NO: 220217
  chr20:61909562-61909599
  hypo

SEQ ID NO: 275699 - DNA, 58 bp, Homo sapiens; identical to SEQ ID NO: 220218
  chr20:61913595-61913653
  hypo

SEQ ID NO: 275700 - DNA, 251 bp, Homo sapiens
  chr20:61942752-61943003
  hypo
gcctccgccccgggcgctgaccctggccgcagtgacgcccagaaccgtccacctcacctggcagccctcggccggggccacccactacctggtgcgatgttctcctgcttcccccaagggtgaagaggaggagcgagaggtgagctgggccggggggtggcgggggaggcagaggagtggggcagagcgagtgggggctggcctgggacgtcatgtctctgcaggtgcaggtcgggcggcccgaggtgctg

SEQ ID NO: 275701 - DNA, 195 bp, Homo sapiens
  chr20:61947782-61947977
  hypo
cccctccctcccaccgcactgcagcccctgggtccctcttgagtccccgctcctgccccttcctccctcccctgccatctctgagggtccctcggtgccccttcccccaccatcttccccagggtttgacctgatggtggccttcagcctggtggaaaaggcttatgcgtccatccggggcgtggccatggagcc

SEQ ID NO: 275702 - DNA, 73 bp, Homo sapiens
  chr20:61951425-61951498
  hypo
ctatgtggactgccggaaggtggctgagcggccccttggggagatgggcagcccacccgctgcgggcttcgtc

SEQ ID NO: 275703 - DNA, 96 bp, Homo sapiens; identical to SEQ ID NO: 220219
  chr20:61967699-61967795
  hypo

SEQ ID NO: 275704 - DNA, 95 bp, Homo sapiens; identical to SEQ ID NO: 220220
  chr20:61967915-61968010
  hypo

SEQ ID NO: 275705 - DNA, 77 bp, Homo sapiens
  chr20:61973525-61973602
  hypo
ttcttttcaaggctgcgtggaaccctgatgaggacagaccatatgctgaacccgataacaagcgtgaaggatttgaa

SEQ ID NO: 275706 - DNA, 568 bp, Homo sapiens
  chr20:61973895-61974463
  hypo
gcagctcattgagccgaccacgcacccttccttcccacggcagagcgggagctcctgggtcagcctccctgccaaagtctgttcacagcagccccgagctggcgacgggtaaataagatggtggagccacgcggcggagcccgcagcacagtggccgcgcagcgagcaatgacccgggatcgggagccgacagaagggcacgcctggcgcggccacgcacagaacccagggccaggcaacgcggggcagaggtgttgggtgacctcgggcgggtcgtggccggccgggctgggcaggggattcctgggtgccggctctatgcgaatattcttcagtctgtgaaagaaaatgccttgtcatgccgctgaggattcatacgcacgctgtgtaccttaccccgcgaggcaggcaaatgccaagaaatgccagctcggattagcgcagcgggagcgcctgtctgcagacagggagtgtaaacggcacagtcacgtggaagacacgttggcattatctcctaaaacccagtgcaaacccctgacaatcccactaccaggtgttccgtcctaag

SEQ ID NO: 275707 - DNA, 203 bp, Homo sapiens
  chr20:61974493-61974696
  hypo
cagttttgtgggttgcatccagcctttcctacagactgaaatagaagacacttgaatagaaaatgcaaagcacggcacacgtggtgacggtgcgttttattcattgaagtctgtgcacacactgggagcacattccagggcttggcagacattgcctgcagaagccgggcggccgcacctgggctcggcgggccacacggtcg

SEQ ID NO: 275708 - DNA, 244 bp, Homo sapiens
  chr20:61979331-61979575
  hypo
tgggggcggggacgcggccgccctctcgccctttcctatgtgcctttagttccctgggttctgtgtgccgcgttccatccaccctgaagatgaaacgcagccgcagaccaaagccttccctttgtccccgaggtggctgctgtgaagtcagctctgctccccacaagcccagaaccaggtcaggcagcggcagcaatcggcccgagaaggctgctggaggggcccagggcgcgcgaccgccgag

SEQ ID NO: 275709 - DNA, 1831 bp, Homo sapiens
  chr20:61980673-61982504
  hypo
tcccagagcgcccccgttctgtgctggaaggacgctgcctgtggcccctcaccgtgccgtccgccgaggcccactgtgtcccaaagccagagacggcaccgggatccaccctgtgccagccactcggggccccctgccccgctcagcctgggacctgcggccacatagcaggcttgggaagaggctgctgcagcaggggccacgccctgcaccccaaagcgaagcagcctgaggcctgggcccggctcctggattacacaccaggaagaaagggcgtccgccggttccgtctgggtcagaggcgcccaacacagccatgggcgggacttaccgagaagtctgtgtcttcggccttcaggtggtctgcaatgtactggacgccctccaccgcccgggtcagggccggcgacaggggcaggtgcgggggcggcgctttggtgctgcgggtcttgaccgtggcgctcggggacaccgaagagggctccttcttgcatgtgcatttgcacggagagggctggtctgggggtgggagctcagccgagtgggtgttgcgagaggccagggcgccggcagcctggccatctgcctcgggggcggcatcgtctcggggaacacagtactggatgctccgagaccggcaccggacgccgccttccaccgcttcgccagggctggacatgtgctggacgctgagggacctggctttggccagccctggtgcctgggtgccgtggggcgggcggcagggtccaggcgaggggtgggggctggctttctcagcttccaggggctgctgaggagggagctggtcggagggtgacttgcaggaaggcccaggctcagccggcacatccagggggacacagaaggacggtgagggcgggtgcaggctctgggtgccgctcgtggcagggggctccccttctggctcgggccagaagcgcggggcactggccatcttatgcatggactcgatgagccgccggcaattgtccttgaccacggacggccgcttcatgaggagcaggcgtggcacgatgtccaggaagaccctgcgtacccaggtgggcatggtgtgcgtgcgtggcgagcggtggtgcacgttgagcacgaagaccgtgatgacgatggacagggtgacgaagatcatggtgaacagcaggtactcgccgatgagtgggatgaccagtgaggtggacgggatgatctcggtgatgagcagcaggaagacggtgagcgacagcagcacggagatgcacagcgtgatcttctcgccacactcggagggcaggtagaagaccagcacggtgaggcaggagatgagcaggcaggggatgatgaggttgatggtgtagaagagcggcagccgccggatgacgaaggcataggtgatgtccgggtagatctcggcacagcactcgtacttcctggtgttgtaggtgcccacggcatccacgatgacccactcgccactctcccagaagtccagctggtccacgcggctgtgcatgttcaccaggtcgatcttggccttgtcgtaggtccaggagccgaatttcatggtgcagttctgctggtcgaaggggaagaaggtgacgtcgatgctgcaggagctcttgtaaatggccgggggagtccactgcacccgcccgtcatggaacaggtgggccttggtcaggtgggtgaccgcgaagtccccgtcagcactgggcaggaagagagcgaagggtgtgagacccccacatccatgcccacgtccacacccacgcccactgccacacccatgcccacgtccacacccacacccacatccacgcccacatccacgtcc

SEQ ID NO: 275710 - DNA, 229 bp, Homo sapiens
  chr20:61982605-61982834
  hypo
ccacgtccacacacagaggcattctcacgtcacaggagcacaaaagggctggcggccttgcccgggtacactgttcgtcttctcacctactcgtgcacctcagtttatcatccctgagctgggcgtagcacgtggttcagagaacgggaagggacctacgagtgcctgacacacataatcactgctgctggtgattacccttatccatgagtggcgcatggatggggct

SEQ ID NO: 275711 - DNA, 112 bp, Homo sapiens
  chr20:61986539-61986651
  hypo
cgctggctgccgggcgcagggccctcggcacagatctgcaggaaggacaagttagaggacagcagcctccggaggccaccatctgccacggccaatccgtggcaacgctgcc

SEQ ID NO: 275712 - DNA, 295 bp, Homo sapiens
  chr20:61990838-61991133
  hypo
cccctgtgctccttgcagggcgacctcagtcacagtgcacgatggccacgccctcacctaccacgtcaatgagctgagcgatggacaggccgaagcggacgaggaccacgtccgagatgttggccacgggtcgggaccacttgttgtaaccggagaagagtttcttcaggagccgctcctcggcgtgggcccgggtctccacatggctgctggctgcggggagaggcaggccagtggctcaggtgcaggcgggacaggagccgggagctgtccaggagctctccaggctgcccca

SEQ ID NO: 275713 - DNA, 55 bp, Homo sapiens; identical to SEQ ID NO: 220224
  chr20:61991163-61991218
  hypo

SEQ ID NO: 275714 - DNA, 143 bp, Homo sapiens
  chr20:62005349-62005492
  hypo
acctacatgagccccgactttctcatccgtagagtgggacgaacaacgcccagtgctcagtgtgatattagaagagcccaagacagtggagggctcagcacagatgccgccatccgtccgcagaatcgcgctgagagcagctc

SEQ ID NO: 275715 - DNA, 35 bp, Homo sapiens; identical to SEQ ID NO: 220225
  chr20:62018865-62018900
  hypo

SEQ ID NO: 275716 - DNA, 84 bp, Homo sapiens; identical to SEQ ID NO: 220226
  chr20:62019257-62019341
  hypo

SEQ ID NO: 275717 - DNA, 84 bp, Homo sapiens
  chr20:62019401-62019485
  hypo
acacacgcgcacacacacgcccccacacacacatatgcacatgcacgtgcatgcccacacacgcaaacacgctaatcacacaca

SEQ ID NO: 275718 - DNA, 93 bp, Homo sapiens
  chr20:62028718-62028811
  hypo
tctcggccagaccccgcgttcaggtgttgggggcctgtgccccgacgtggggttgctgggtcgtctggtaattttatgcggaatgtttggagg

SEQ ID NO: 275719 - DNA, 555 bp, Homo sapiens
  chr20:62031205-62031760
  hypo
cacaggtgccccagcggcaggcccaggccccagcatctttctgggtggctgcaggcctcagaggggagggagagctcggcgccccaagagagagcccagggaccacagcagccccacagcggcccctcctctggccagagccctaggacccagccgcccctgctcctcactcactgtggcccccagccccactgtttcacaacaccccagctcgttcgtgccctgaggagagggaccatccgtccccacacccggtccacagcaccgcacccgactcagccccagcatcgaccagaagtccccggccctcagaccggccgcccagagacagtgggagtgaggaggccacacaccgtccaggttgaatcactgcgttttactgagtgcacaggtccacctggcgtccgaactcgtccccgtggcagcagggatccccagaaccttccacggccatcgcggccgcaggaccccacacccgaagtcccccgcaaacccgcactggcgcattcttacggctctggcatcaacctgtccgtgtgagtaagttaatatctc

SEQ ID NO: 275720 - DNA, 351 bp, Homo sapiens
  chr20:62032042-62032393
  hypo
aatggcgtggggcgcgggcatggcgggcacacgtgggccgtgtggatcccgggcagagggatggcgtccagcgggaccaccagctctgggcgcctcagtgcgagacccctccgtgagacccctcctgccctgcgcgtgtctctggagcccgtcccttgggcccctcgcccgccccacctgttcgcagggtccagggcgtccgtacctggcacagccagggggcatggggcgacctcagggagttcctgtccacatgcattaaggcaacgactttgtaaaacccaggcggagttggcgtgtggcgatggcgatgtgcacgtgcctgcctggtagccccggggaccggcccct

SEQ ID NO: 275721 - DNA, 697 bp, Homo sapiens
  chr20:62037978-62038675
  hypo
cactggcccagcgccgcctcacttcctgggcccggcccagcccacgtcaccaaagggaccctcgccggtggccgagcgtggcgggggcccgcacggggtacagaggtcggagtcggtgtctgactctccctccgcaatgtagggcctgactttggcacaaggcgccacggccgcgtagcagctgttgagagcatccaggttctccttggactgggagatgctgaagccgctgaaggaacgctccagctcctcgtggtccacggacgggatggagatggacgtgtcgctgtcccgcaggttcccctcggggggcctgcagcccggggtgtcctcctgccgcaggaactccatgctggcgcggttgcccccgccgtaggcggacagcgaccgctcgtgggcaggcggcggcgggatgcgcaccagggagccgtggtcccccacgggggaggtgccgtggccctggcgcgggtggctctgtggctgccaggaggtggagggcggacactggacagggggcgcggccgggggcgccgagaagttcttctggcccgtggagctgctggagcgcacgatcttgacaatgcagccgtgcctgtcgacatgctcccggctgtcttccgggctgtggtacggcggcgccggctccggctctttggccccaaagtaggcctcggtctctgtcggggggatgcccatc

SEQ ID NO: 275722 - DNA, 43 bp, Homo sapiens
  chr20:62045905-62045948
  hypo
gccgcagacacgcacggcccaagagcagcgggtgctggggctg

SEQ ID NO: 275723 - DNA, 401 bp, Homo sapiens
  chr20:62046181-62046582
  hypo
ggtggccacagtagcgtggccaccacatccatccccggagaggatggaccaggagaggatgcggccacacccaccttctgagttctgccgtgacgcggcacccttgatgcggaaagcctggcgtgcccggctgcggtccccgaagctccagctcttgggcaccttgctggggctgtcctcgaggctctggtcggcgctgggtgaccgcctcacagtctgggcctgcggggaccccttccccttggcagccacgcctcgggggctggagaagacacgatctttcaaactgaccttctggctgctcccacgggaaccgacagacagacagaaaaacagggagagaagtcactctgcaaagaacacaggccgtgtctgctcatggccgacgccgcccatgcgcc

SEQ ID NO: 275724 - DNA, 123 bp, Homo sapiens
  chr20:62048274-62048397
  hypo
tgtccccactcaggcgtctctgagagaaagaaagaagcccctgggtgttgtgcccgctcggggaagcagagacggagtggccgagatcccccgagtcccgaggcgtcgcgtgcttggggacgt

SEQ ID NO: 275725 - DNA, 942 bp, Homo sapiens
  chr20:62050045-62050987
  hypo
gcagcccacacgcccgtctccctctctggagctgccaacagtctccccgcaagcaccaacgcccccagaagcacacaagcagcaaagtcacagggagagggtggcatggagtcgcgggccccccatggagcagggtccgaagcatgcacggatgcagataggcagcatgcagccccaccagccctccaaggccagcaccaccggcggcatgcacatgccaaggagagccccacaggagcacgacacagccacctccaccttgctgggctgtgctggccaggagggaggggcccccagcgcaggcctgcacacacccaacagcagacaggggacgcggggacaggggaggtgcgggtcacggtgcaggccaggagcccacggtgcaaagggggcggctcctcccccgtcctatttccacctgccctaaaccaggcctgttgttgggagagggagccgcgggcctctggctttctggggcttctgatgcatcaggaccctgaggagcccggcacacacagacggagctgcctcccgcggtcgaggcagccaggaaggctcagtcatcctcaggtacgcagcagaggtgctagagtgacagccccaggggaaacgctccctgaagagcagtcggggaccccaggaggcacggacgccttgctgggttcagagcccctggctggcccctctggctgtgcgcaggacatcgcctggcgtggggagcaagaagaagcaccttcccccagctccgccctgcacgcagctgtcggctagaatagagggagctgagcccgcaccgccagggcggtgggtcagaattggggttggggcgccagcctccccctggctcctccagaacctctagtaagcagggaggggcagaggagccgtgcagcagccgtcagtccgtgcggcgtgttccgcggtacctagagcgtccggggc

SEQ ID NO: 275726 - DNA, 158 bp, Homo sapiens
  chr20:62051921-62052079
  hypo
gaagaaagcacccagcctcccgtcttcctgcgcacacgtgtgtttagacaccgatgtccctgcacgcacccgcaggcagctctccgagcggcgtcacagacacggctagctccagtcacggcagcactcagccgcccgggtaggctgagggctctgga

SEQ ID NO: 275727 - DNA, 611 bp, Homo sapiens
  chr20:62052955-62053566
  hypo
cactgaccgagacccgacaggacagacatgcaccaaaaacacgcggacacgtgtgcttgagaagaggagggggagcccgaacaggcacgggggagcccgcacaggcatgagggggcagccggtgttgggggctcctcctccagcacgggggcaggaggcagtgagatggggtgtcggacaagacagcacaagtcagaaccgccgtggccaaagagaccccccgggacccccctggggcagcacggcccgagccccgcagcctgcctggctccccacccgaccccaacgtagacgcttcctctgactccagcacagccccagtggtccctacgggaaccgagcccccgccagccgggtcgcctgccaccacgtgcctgtgttctgagccaggatgggggtgggggtctcagcagtgagtgagggtccctgtgtccacaccatccacctgccaagaccagctgacaccagcggggtcctgccatgcggggtgcgggctccacctccaaagggcaggcggaggcacaggtcccaccagactcacagagcccaggtcaggcagcagaggggcgccaggagccgagctccccatcaagcttcgcagagcaggcccc

SEQ ID NO: 275728 - DNA, 276 bp, Homo sapiens; identical to SEQ ID NO: 220228
  chr20:62056056-62056332
  hypo

SEQ ID NO: 275729 - DNA, 60 bp, Homo sapiens
  chr20:62058719-62058779
  hypo
tctgatgtcacacccgcgcttgtaggcgtttgccacagccgcacgcggctcccggtatta

SEQ ID NO: 275730 - DNA, 32 bp, Homo sapiens; identical to SEQ ID NO: 220229
  chr20:62083855-62083887
  hypo

SEQ ID NO: 275731 - DNA, 457 bp, Homo sapiens
  chr20:62090186-62090643
  hypo
caccttccgcacagcgggaagagcaaggcgagggctccgggagggggcctgtgtgggtctggggggctgagatgaggagggcacggcccacccagggcacctggccacatgtgacgcaggcttcgtcccaagaggaatgacgaaatgtccagagacactcaccgcgtgtccacagcagcctcacggcagacgcaacccaacatccagttggtgggtgggtagataaactgaggtccgtccgtgcggccacaggaaggacgaggcagcggcccccagacacggagaggatgaaggagtaccctaaacacgaaggaacctgagggcaggctcggcaaggaaagccaggcacaaaacggcaccacgatgacaactccacttacacgaaacatccgaagcaaacaggccaggcccggcggccacgcctgtactcccagagcttggcgaggccgaggcagga

SEQ ID NO: 275732 - DNA, 161 bp, Homo sapiens
  chr20:62094131-62094292
  hypo
agagaagtcgtgagcgcccgacggagcctagagggggacatgcagggagagggggccacacgcacaaggcaggacacggagtgactccacacatgtgaaaagaagtgagtgaacacacacagacacacacatgctgtaccgtggcacgcatgcagagaacg

SEQ ID NO: 275733 - DNA, 88 bp, Homo sapiens
  chr20:62097173-62097261
  hypo
ccagccctgcaaagggcatccgcgttccgggcaccgccgtttccgctcgacgctccgtgctaaaggcggcctcatggctgggcgcgtg

SEQ ID NO: 275734 - DNA, 385 bp, Homo sapiens
  chr20:62098053-62098438
  hypo
gtctaggagcccgacgctggccagtctcaggatgacgcccccggccagagccccagccctgccctccccgagcctcacgccccacgggtcacgcagggtcttcacaggtcacggccacacaggagcacgtctcacacgggcggaagcacagaggggagcggggctgcgtccacagaccgcgcacacacgagcagtttcccgtctcagagctgcctggcatgcacactggaaaatagttaagacagccccccgtgaggtaacacgcttgggctctgtctgtgatgacaagatgtcggacacaaggccaaggtctcccccgggggacatcgcaggcatcaccccaccatccttgccccccatcctcccaaaacgggcacattgctcc

SEQ ID NO: 275735 - DNA, 251 bp, Homo sapiens; identical to SEQ ID NO: 220230
  chr20:62110513-62110764
  hypo

SEQ ID NO: 275736 - DNA, 221 bp, Homo sapiens
  chr20:62117853-62118074
  hypo
ggtgtcggcagccacggcaaggggtgaagcagggaaccgactctcctggggcctccagaggagcagagccccatcgacaccttgatttcggcagggaggctggttttggcctgaccccaggaggcctcgccatttgccgtcattggtcgcagcatccctaagagactaaggcgctatgaggccctgcggtcagcctgcctgctctgcggaaccctccgagt

SEQ ID NO: 275737 - DNA, 316 bp, Homo sapiens
  chr20:62126119-62126435
  hypo
cagctcccgtggcccgccccgccctagccgccactcacgttgggggagggctccagcatgttgtcaccgtgccagccggagatgggcacaaagggcacggtggccgggttgtagccgatcttcttgatgtaggcgctgacttccttgacgatctcgtcgtagcgcttctcgctgtaggccggctctgtggagtccattttgttcacgcccacgatgagctgcttcacacccagcgtgtaggccagcagggcatgctcccgcgtctgcccattcttggagatgcccgcctcgaactcgcccacgcccgccgccacga

SEQ ID NO: 275738 - DNA, 170 bp, Homo sapiens
  chr20:62137321-62137491
  hypo
gccgggagtgtgggcgcctccaagcaccctctcggtcttgtgctgtcctcaccccactgcctgaagagagcagcgcacgaattttgtctggtctcagagtcgtttctggagggagacgtacctggcagcagctactcccccgcaactggaagcagcggttgactccacat

SEQ ID NO: 275739 - DNA, 151 bp, Homo sapiens
  chr20:62149573-62149724
  hypo
gatcacatcctagcagcaaccgggcctgaaccggcctgctatagcttgcgcacaatgcatcttccgtccgcttagcttttctgcccccatttcctacagccggggaggctcgggtgcagtgtctctcctcgctcctgcttcctgacccaga

SEQ ID NO: 275740 - DNA, 513 bp, Homo sapiens
  chr20:62153098-62153611
  hypo
tgttggagtccgcagagcactcggaacctccccaggcctccagcagcatgaccgcctgtggcctggctcgggacgccccgaggaagcagcccggcggtcagtccagcacagccagcgctgggcccccgtcctgacctgagcggttaccaccagccccaggcctgcggaggcgctagtccaccagagcccctccccgcccctctccccactccgcatccctcgcccccctccccacctcccaccccccaccctgtaaactaggcggctgcagcaagcagaccttcgcatcaacacagcagacaccaaaaaccagtgagagccccgctctctaccgcccggccccagcactcgctagctttcctgacacctggaactgtgcacctggcaccaagcggaaaataaactccaagcagccagtagccccgatggtgtgtgcctgagctgtgtggcccgaggttccatttgagtgtgagaaatggctgaatccctcccgacctcactgccttgtggggg

SEQ ID NO: 275741 - DNA, 117 bp, Homo sapiens
  chr20:62165579-62165696
  hypo
gctgaggaaggacaccgcctcgttcaggtgcagccggcccccggcacgccgccagatcttgtagtgccgcacagcctgcgtgtcccgcactgggagggagagcgtgagctgtgtggc

SEQ ID NO: 275742 - DNA, 49 bp, Homo sapiens
  chr20:62172263-62172312
  hypo
gagcacgtagacctccgccgggcaggcagccgggcgcggcagccggtac

SEQ ID NO: 275743 - DNA, 282 bp, Homo sapiens
  chr20:62172924-62173206
  hypo
caggcaaagcccaggagtggcggcagacgcagggcccggccctcgggggctgcaggagacagcgcggggtcttttagggcacggggccaacggccggtgaggccagcgtccacccacgtcaccttcccccatgcctcagcctcctcatctctaagacgtggcgaggatggcatggccggctaaggccacgggaagccccaagtgagacagggcgagggtcctgtactcaccacagtgacccggcagccggcccaggcccccgacaaagaccagggcagagaa

SEQ ID NO: 275744 - DNA, 576 bp, Homo sapiens
  chr20:62174493-62175069
  hypo
agagcagaatgtgctggaaccgctgggatgctccgatgctcccaggcctgggcagggccctggagctgcgcctctgacagccccaggggttttgtgacggggtggggaggagcacctagaacagggccatgcctcgggcccagcatggggcagcttggcaggcacaggcccacctggggcatgcagggctgcagcagggggttctggatcagcttccagttggccttgtagtaggtgagcagctcctccaggccgggaaagagccgtcccttctgcaggtagaggctgccatcagctgccatggagacccggtagtggcagaccttggcctgggcccggactaggaagggttcagagatggagacccctgccttggctgccagctgccccgaccctcccaccccagaggatgctggccacaacccactaaggggtctggctcagacctagctggggaccctgagatggtcagagctgtgtggaggagggagtgtgggcagccacaggctggggcggggcagcgagagcggcccaggttggagcttttctgctgacggtgtgcacagagtaggcact

SEQ ID NO: 275745 - DNA, 75 bp, Homo sapiens
  chr20:62175657-62175732
  hypo
gcagctgctgtgcctgggtccgactgaccccgctaaagtaccagctgcaaacagcaggtgcggcagtcaccttgc

SEQ ID NO: 275746 - DNA, 68 bp, Homo sapiens
  chr20:62178216-62178284
  hypo
acaggacctgaccacgcctgccggagcctcctctccctctcggcagcccacagcggacactgctgttt

SEQ ID NO: 275747 - DNA, 143 bp, Homo sapiens
  chr20:62179512-62179655
  hypo
tttcatgcagtaaaacgagatgctgattgcagggagctcggccgcaggccaggcacccagatgccccatgctgcccgatgaccggcttctgagtcagtcaatgcccaggccatacccaaaggccactgcggggaagtggaggc

SEQ ID NO: 275748 - DNA, 77 bp, Homo sapiens; identical to SEQ ID NO: 220234
  chr20:62190624-62190701
  hypo

SEQ ID NO: 275749 - DNA, 561 bp, Homo sapiens
  chr20:62197205-62197766
  hypo
gccgcctgctcctcggccaggtcccctactggctctggggcagcctcccagttccccgctgccccagcctgtgtgcctcggggaggccagcgccgtctctgcgccacaccctgctcgacctgctccatggacaggccctcggggcagacactgtgccgctccacgcactcacggatgaagctctcccagagcttgccgcaggccccgaaggagcagagggccacggcgtcccccactaccaccagctgggactgggcgcgggtcaggacggtgttgagcacgcgggcgtcggtgaagaactcaggggccagtgccccagggctgagcaggctctggcaggtgtgcacagtgctgagcaccacgacccggaactgccgccctgcagggggcacgcagtcaggtcaggctgggtgcgcaagacggtgggaccagccccacccctgccgatgccaggctgaggagtgggccgagccacccggggtatcctggggcagctggcagcacctggccccgctggtcacccacctggcaggatctcaaaactgccgacagacacctggc

SEQ ID NO: 275750 - DNA, 371 bp, Homo sapiens
  chr20:62204126-62204497
  hypo
accagggcctcctcgcgactgcgggcaaaggtgcaccggtttcggtggcgccggcagccgagcccagggctgtagtagtggcagacttggtagcacaggggccttgggaaggtgggccggcagcccaccacgcgccagaccttgctcttggtggcctgcttaaagcgggccagcaggatctcgcgggagcagtcatgctccaccctacggaggacgtaggtgctttcattgagccgctgggtgcagcgggagcagcccagacacaggtccaccagggcacacagccgggccagggacggccctctggtggccgcggggctgttgggcagcagggtggaccctggaggcgccacctcgaacaccagcttggc

SEQ ID NO: 275751 - DNA, 184 bp, Homo sapiens
  chr20:62209403-62209587
  hypo
gtacacacagcacacggccaacacgctcacacgggctgagtgtgacaccacgggacagagttccacgtacacacagcacacggccaacaacacgctcacacgggctgagtgtgagaccacgggacagagttccacgtacacacagcacacggccaacaacacgctcacacgggctgagtgtgag

SEQ ID NO: 275752 - DNA, 38 bp, Homo sapiens; identical to SEQ ID NO: 220235
  chr20:62214176-62214214
  hypo

SEQ ID NO: 275753 - DNA, 278 bp, Homo sapiens
  chr20:62218275-62218553
  hypo
ggcagcagggaggggaacagcgttggtgacgagaaggctctgggactgaacctgggagaggggaggaaggggcccccctgggcgtgagtctgttgagctcctgactggcgggcgcaggcccctgtgccactgagaggtctccttacctgtgagcggcggtgcctccgacgccagcctcgggtcaaggtggggcccaggctgttcttactattgtcctccagcgatttgcaggacaccttcaaaaccctcacgagttaccgaatcggctgattcaaaac

SEQ ID NO: 275754 - DNA, 1613 bp, Homo sapiens
  chr20:62220463-62222076
  hypo
ccacatgggaatcctcgacctccatagtgactggttctgtttatgcctctgccccaggactgaagccctagggacacacctcatggatctcagacccctgggaggggccggctcagggacaggctgcccaggacctccgcacccggtcaagtgcactcacaggggctcaggggccacccaaagagctaactcgggaagcctaggcactcaccattattttggttgaaaatgctataaatctgactcttcctagaagcctactaagcaattcacttaaaaacaccctcagtacatgtgcaacaatgcctggaccacgcctcgtctgtgcggcccctgggccacctgagcaccggctgggggcgggggaggcaggcacccatcaggatctgcaccccaagctccgggtgcatgttcccaactggaggagaacggggcgccagccacactaaacctacagaaaactgtgggaagaaaccaaatccataggatccagaggtttcacacttgggcttagctcccaagtcatgagttagtaacgtccccagggacctggctgggtgcagacatgggggcctcgtgacctgctgcaccgcgtccagcacctgcagggtcgcgctcggcacctggctctgcttcctctgtctctgctgcacccaggctccccctagcccccgcccacctggctcctgatcaaggcccaatgtgtaaacagtattaataagcaacagatggaaaaatatatttcccaagaaaaaagggggaggaaacgtgggacctgaagaccgattttccaggttgctctcgctgttctgtccccttctctcttctcgtgatttgttttggcgattcctctctttggttctgcagaccacgtgacccacctgcccgagccagccctgcggcctctgcccgctccctgctgccgcggctgagagacagccagccctgtccgtcccaggggcctcgccctcctgtcggctacttccgctcgtggtcctctgccatggcagccacctcaatggtggccgtgtgctcctcaggcccgggggcagcccctgcgggcactgtcacaattgtgctggagccaggcgaggcctgggccacgttctgcagggtggggcccaggccaggcaacgtgagcagctgtagcgggctgaccaccttgaacaccgtgctaccgtcctgcacggcggccgtgctcaggaccgtgaggctggacgcgtccgggtggatctccactgtgctggggtaggtggagccggaagaggccaagactgtgtatcccccgagcagcggggaggccggggagctggcggggggcgcctgaagggaacccttgcccaggacggtggacggcagggtggacaccactttaccaaggggcacgctggtcagctgggggacgggcacgcccgggccaagcgccagctgggcagactgggtgagcacctgcgaggccatggcggccggtcctgatgtggcacgtgcaagccggggccgcttcacaggcggtggcagggagaccggcgtcagcgtcatgagcacgttgctgaggtgctgggacttgtgcttcagctccttggctcggcgacgatgctcatcacactgctgct

SEQ ID NO: 275755 - DNA, 76 bp, Homo sapiens; identical to SEQ ID NO: 220240
  chr20:62231698-62231774
  hypo

SEQ ID NO: 275756 - DNA, 255 bp, Homo sapiens; identical to SEQ ID NO: 220241
  chr20:62242305-62242560
  hypo

SEQ ID NO: 275757 - DNA, 506 bp, Homo sapiens
  chr20:62248630-62249136
  hypo
ccgtgaccttctaagaagtgaaagagaaagatctttctctctccctccctctccatcatgaggacacagcaagaagtcggccatctgcaaggtagaaagcgagtcctcccaacagctgaacctggcagaccctgatcttggacttcagccttcagagctgtaagaaaataactctctgctgttcaggccacgcggtctacggcagcccgagcagactaagacacacgccatctggggagtcagaccagatcaggaagaaaggcctagagctcaggatactgaaggtcccaacccggtgctggaccagaccaccccggcagccgcggccacggagtcacggctcgggtgaggtgacctggacaccatcccggcagccgcggccacggagtcacggctcgggtgaggtgacctggacaccatcccggcagccgcggccacggtgtcacggctcggatgagatgactcggacaccaccccggcagccgcggccacggtgtcagggctca

SEQ ID NO: 275758 - DNA, 421 bp, Homo sapiens
  chr20:62250723-62251144
  hypo
gtgcacactcacgtcgggagtcgccatggctcagcggaaggggacgcccaggccagcagcgtcagtcctccagggtcccaagtcctggaggaagcaaggcagggcacagggatggagtcatctccacatccacacaacatagcactcacaaaggcatctctaatcagctccaaagacccacccttgagtcccagactgctacctcctgacaaaaacgagcggcaacagaagggctactccaggctctggttccgagggcggtgtaagcgcactccacccgtttttcccactggataagccgaaacccttgggtagaaagcacagagccactccctccacgtggggctcagagcaggaggacaggaggggcctggaattccaagcaacttccctggacgcaggctcccggcttgccagttct

SEQ ID NO: 275759 - DNA, 376 bp, Homo sapiens
  chr20:62252079-62252455
  hypo
gaacctaaccaggtcgatttcttgctatgaaaaaaaaaagtctacattctctgtgaaacttaaaacaagacctagagtccatagcacagtagtcaaagcatccagaacacgatcaaacttcctggcaaagggtagtctggttgattctcaaaggaacaaatacacaagagaagctggctcttgaacgcagaatccagagactttcaggtgctatcggaccagctccaagaggaaagcaaacattgtcaaccaagtggaaagaaaatcttggtatagaaacaggagttataaccaaacagaaatgtgaaaattaaaaacgacaaccaaaagaaaatacacaaagctgggatagtctcagctactcggaaggcggggc

SEQ ID NO: 275760 - DNA, 120 bp, Homo sapiens
  chr20:62252635-62252755
  hypo
tttctgtttgggatgatgaaaagctctggaaatggacggcggtgatggctgcacaatcactgtggctgttctgaatggtgctgaaccacacatttaaaaacagttaaaatgggctgggcg

SEQ ID NO: 275761 - DNA, 43 bp, Homo sapiens
  chr20:62274578-62274621
  hypo
tccttccaggtggccgcctcggaacccttcctcctctccatcc

SEQ ID NO: 275762 - DNA, 224 bp, Homo sapiens
  chr20:62275047-62275271
  hypo
ctgtccccgtgggccgcctccgttgaaactcctggggggtgggggatggaggactccttgccttcctccgctcctcggctgcctccagccgcttttgcagctcctccagggaggtgtccttcttcttgggtggggaggagagcatagggctctctggggacaggtcagaaggggacttgaggatgacctcgaagctctggcctgaggcccgcttgtccagctgc

SEQ ID NO: 275763 - DNA, 513 bp, Homo sapiens
  chr20:62281489-62282002
  hypo
gctgggattacaggcgtgagcccccgcgcccggcccctccctctctttgactcccttctttctcaccgccccctccccaccatccttccccttcactgacttcagggagttaaaaacaattctcgcagtgagctgggcttgttttgtctccctgcttctctttgtactaaacattagataccgaggaaatgcggattggcctttggatgattcatgagcaggagtcagaaaaaggcaccaggttggcctcaagcagcagggtatagtagtgcccgctcccagggtcacacctcacgcccacccctcccgccgtccaggtggatggtgcccactcccagggtcacacctcacgcccacccctcccgccgtccaggtggatggtgcccactcccagggtcacacctcacgcccacccctcccgtcgcccaggtggatggtgcccactcccagggtcacacctcacgcccgcccctcccacccacccgggtggatggtgcccgctcccagggtcac

SEQ ID NO: 275764 - DNA, 148 bp, Homo sapiens
  chr20:62309944-62310092
  hypo
cacacacactcccacgaacagcacacacactcccacgaacagcacacacactcccacggaacagcacacacacccacggaacggcacacacacccacggaacagcacacacactcccacggaacagcacacacacccacggaacggca

SEQ ID NO: 275765 - DNA, 117 bp, Homo sapiens
  chr20:62310122-62310239
  hypo
cggaacagcacactctcccacggaacagcacacacactcccacggaacagcacacacacccacggaacggcacacactcccacggaacagcagactctcccacggaacagcacacac

SEQ ID NO: 275766 - DNA, 162 bp, Homo sapiens
  chr20:62313528-62313690
  hypo
gcttctgaggttcctacactcgaactgaatcctggaatgcggcttccaaggcttccagctatggagaagactccacactctggaaccgaatcctggaacgcggcctcccaggcccccagctatggagaagactccacactctggaaccgaatcctggaacgc

SEQ ID NO: 275767 - DNA, 303 bp, Homo sapiens
  chr20:62314816-62315119
  hypo
tctctccttctgtgcgtacccaggcacgtgcacatgcatgcagagtacgcacacacgcacgcacgcctgcacaaatccacgcatgttgccaagtctctgtgttccagccgtggtgtctgccccccggtgttctctagttcggcttctccgcatttctgtgaatgattccggcttcttggtgttcccagcagaactccctcaagtctgcggcggggctctgacggcggtggcttggctgacatggccacattgctgagcctgttgggggctttgcgttcctgttctggccgtttttggctcgtt

SEQ ID NO: 275768 - DNA, 211 bp, Homo sapiens; identical to SEQ ID NO: 220244
  chr20:62317398-62317609
  hypo

SEQ ID NO: 275769 - DNA, 746 bp, Homo sapiens
  chr20:62320892-62321638
  hypo
tggtgtgattgtcacgggcctcccgtaccccccacgcatggacccccgggttgtcctcaagatgcagttcctggatgagatgaagggccagggtggggctgggggccaggtgagttacagcagggtggggctggggtaaggcggtctggtgactgagcccccgccccgtggccaagggagcccccgtgaccgagccgcctcgccccacagttcctctctgggcaggagtggtaccggcagcaggcgtccagggctgtgaaccaggccatcgggcgagtgatccggcaccgccaggactacggagctgtcttcctctgtgaccacaggtgcgtgcagtccggtggcaggcgcggcgccaggggacacgcccacaccccactgggcccctggactctccttccccacatgaggccccgtctcctccagagcctctccggctactcggggtcagcgtggggcccctgcagcagatgagggtcttcacttcggtgaactgaacccttgaagcggctgtgggcagggcagcagggctatggccaccccccaggttcgcctttgccgacgcaagagcccaactgccctcctgggtgcgtccccacgtcagggtgtatgacaactttggccatgtcatccgagacgtggcccagttcttccgtgttgccgagcgaactgtgagttcctgcccagggaggggatgagggtgttgtccccagaggagccagaaatgggtccacccacccccatgg

SEQ ID NO: 275770 - DNA, 637 bp, Homo sapiens
  chr20:62321668-62322305
  hypo
ctacagcacccagtgtgcgtggagaagatgctgtcagcgaggccaagtcgcctggccccttcttctccaccaggaaagctaagagtctggacctgcatgtccccagcctgaagcagaggtcctcaggtgcggacgggcagcgctgggtgggcggtgtgggggtggcggagcgggcggcgtggggcgggcagcaccaggcgcccagggcggaggcgactcacctggctttgtgcgcttcccctcccacctccaaaggctgcctctccctcctagggcagggcccccacgggctgcaaccctcccctacaggcagagaacgccccaggcaaggatgccccccgaggctgagactccccccaatagcagggaggacacccacaggcaggaccccaagtgctgggactctcccccaagaggggctttgccacaggcagggaccccagctggggccccccgtgggcttcactgcgcactcgggtgcccctgcagggtcaccagctgccggggaccccgagagtagcctgtgtgtggagtatgagcaggagccagttcctgcccggcagaggcccagggggctgctggccgccctggagcacagcgaacagcgggcggggagccctggcgaggagcaggtaca

SEQ ID NO: 275771 - DNA, 733 bp, Homo sapiens
  chr20:62326137-62326870
  hypo
gcagggaagcagggccagcacgccgtgagcgcctacctggctgatgcccgcagggccctggggtccgcgggctgtagccaactcttggcagcgctgacagcctataagcaagacgacgacctcgacaaggtgctggctgtgttggccgccctgaccactgcaaagccagaggacttccccctgctgcacagcaagtggccctggcgtggggaacagccggtggggtggggggcaggggacaaaatgggggctgtgccgggtctgattgaagctccccgcagggttcagcatgtttgtgcgtccacaccacaagcagcgcttctcacagacgtgcacagacctgaccggccggccctacccgggcatggagccaccgggaccccaggaggagaggcttgccgtgcctcctgtgcttacccacagggctccccaaccaggtagggcacctgcctggctgctcctggcagcgccccaaccgcacgcagccctgggagtgagcagcaaagccccaggcccccctcagactcaagtctctgtctccaggcccctcacggtccgagaagaccgggaagacccagagcaagatctcgtccttccttagacagaggccagcagggactgtgggggcgggcggtgaggatgcaggtcccagccagtcctcaggacctccccacgggcctgcagcatctgagtggggtgagcctcatgggagagacatcgctgggcagcaggc

SEQ ID NO: 275772 - DNA, 386 bp, Homo sapiens
  chr20:62329296-62329682
  hypo
acatcaagtcaggtccggtccatctgcaggtcccaactcgccccttccgatggcccaggagccccaagcccttgcctgggcccccttgcctcttgcagccaaggtccgagtggccgctcctgccccctaggcctttgctccagctctctgaccgaaggctcctgccccttctccagtccccatcgttgcactgccctctccagcacggctcactgcacagggatttctctctcctgcaaaccccccgagtggggcccagaaagcagggtacctggcagcccccgccagtgtgtgtgggtgaaatgatcggaccgctgcctccccaccccactgcaggagctgaggagtgtgagcgtgccgtcatcgactttgtggctttccaggac

SEQ ID NO: 275773 - DNA, 131 bp, Homo sapiens
  chr20:62331799-62331930
  hypo
tgatgtccctctgccgcggcggccggtgcacattccgcacgacacacttcaccatccactcgatgccctcgcgcacccctttgctgtgaagacagcgggtgtgaggcggggggtctcggtccccaaagccc

SEQ ID NO: 275774 - DNA, 76 bp, Homo sapiens
  chr20:62333477-62333553
  hypo
ccgcactcaccaaacgcctgcttggactcagccagcctctcctcgtcggtggagtcaatgacgtagatgacgccgt

SEQ ID NO: 275775 - DNA, 358 bp, Homo sapiens
  chr20:62383197-62383555
  hypo
gaagccccgccccccggtgggtctcccggtggagctcggctcctgcaggtccgctccggaacctgctgactctcctgcgattcctaaactggcagcgatgctccagagcctcttccgccccgacagcagccccacctctgcccggagcccggggcgcctccactgcctctcctcacacagctgcccgccgcgagctccccctgcaccctgcgcctcggggtgggcgttccaggactccccgaacccttggggccgccccgctctgggctgcctgtgccccacccgcctcactggttgatctcacccacttgagatgccctcgccaggccttttttggcaaatctgcctccctgttccc

SEQ ID NO: 275776 - DNA, 259 bp, Homo sapiens
  chr20:62384603-62384862
  hypo
ggtgtccgatcagacgcctccctggaggcagagaagaaacaaacactgtggagtaatacggacccaaaagtgtgcaggcgaaatgggagatgtgggtgcaactcaaagtcctgggctcttcttgctggacgccggagaagcagccagacccatttaatcaagttcttttcccccaaccctgagacccaacgtcactcagtggcaggaactccacaccaccatctccatggtgcgtgccctggggccaggctcaaaaacc

SEQ ID NO: 275777 - DNA, 143 bp, Homo sapiens
  chr20:62388763-62388906
  hypo
tcgcgcctggccacgattcacttttttcctccatgtcaatgtccagtcactcagcaccatatcttgaaaagaccatctgtcccacattgagttgcagagtgggctttctggtgcctcacgggccctggcggcgtgtctaccct

SEQ ID NO: 275778 - DNA, 120 bp, Homo sapiens
  chr20:62392097-62392217
  hypo
ccgcgccaggccgagttatatcagttttattatcttttcaacacactggctttgggcattgttcactttcggttttggggtttgcccaggctggaatgcagcagtgcaatcatagctcac

SEQ ID NO: 275779 - DNA, 294 bp, Homo sapiens
  chr20:62398514-62398808
  hypo
cacaccgccaaggacgccgtggcaggctttgtctttcgatctccctagaaagttgctgggtcggagccacgtggctccacttcccacggatggggacatgttttcccgcccctgaaagccccccgtccccacacattggcaatcccgtaggatctcggtcatctgaaccccgtcgggcagaagctggaggtccacccgccccagctgcccaccggctgggcatggagatgccttcacctggcagcagccggcagaggactcgagaaatgaccacagaaaggcacacaccggctc

SEQ ID NO: 275780 - DNA, 81 bp, Homo sapiens
  chr20:62398838-62398919
  hypo
ccgacgcggctgttcggtcacccagttcccctcctgctcccacacacttgagagctctctcgcctgggcagctgcacccag

SEQ ID NO: 275781 - DNA, 55 bp, Homo sapiens; identical to SEQ ID NO: 220248
  chr20:62398949-62399004
  hypo

SEQ ID NO: 275782 - DNA, 107 bp, Homo sapiens; identical to SEQ ID NO: 220249
  chr20:62401273-62401380
  hypo

SEQ ID NO: 275783 - DNA, 910 bp, Homo sapiens
  chr20:62406867-62407777
  hypo
ccaggctgtgacgccgcatcctcacctcccgcaacagggaggtcagcaggcggccgagcagcagggacagaccctcagcctcatctcatcttggcccgggacctgcaaccctcagccttcaaaaccacaccaaagccaagcggcccccagggcctgcacttacgggacagcgagtgggcccctctgggcaggtactcgaacagcagggagccgtcatcccccagcacgtcggccttcagcgacagcaggctgttcttactcatgagcgccgcgcgcaggttggccaccgcggtggcctgatgcagggcgtcgtccttctctggggtgaggggagggcccagatagctggcttctcctcccaggagaccctcctccacctgtgcatagagctcggccctctctcctcggctgtcggagctgctggcttcggtgacggacaggtccgcatctggggacagagggacacacgtcagaagacacgggtcgttcccagactctccaagtgggacaggcgacacatttagaaggacagcgaccagcttctgcctgagctacagagcagcatcaagtccagcccaccctgggagccgggcacctgccccagcaatgcagcagcctcggcccagcccggcctttcctgcccacccaggtcccatggctgcggtggagtctcagccaaggctttggaggacggctcaactcagaacaacggggttgccctccctggacgaggcgctgcagacctggtacctgctctgctccagggccgagggcctgagagtcagaggctcctggggcggcagtatttccatctcgcaaagacgaggagaggctcaaaatggatcaatgacgttagagctaaatctataaaattcttagaagaaaatccgcatgatctcagatttggcaa

SEQ ID NO: 275784 - DNA, 95 bp, Homo sapiens
  chr20:62412805-62412900
  hypo
gatatatgaatggcatcatccgccatcaaagaaatgcaaatcaaagaccatagagaagccaggtgtggcgtctcacgtctgtcatgccagcactg

SEQ ID NO: 275785 - DNA, 394 bp, Homo sapiens
  chr20:62413440-62413834
  hypo
aaaaaaaaaaaaagaaaagaggcgtggcgattttcaccaaaatccccggctactgtatgcaaacccccagtggtgagccaatgactcctgcagagacgcccaggctgcaacccccgagccgtggttttgccaccttgtggcagaacgactccgcagacctgattcggttcaggatctcacgatgagtcctggatgagccacgtgggccctaaacggacccaccagggccccgtcagcagagaaggaggcaggagggtgacagaagcgaggatgggaaggggcaggaatgatgtcgggccacgagccaaggatgctatggcttccagaagccagaagaggcacatggactcccctggagctccaggggatgcagccctgccggctgcttcagact

SEQ ID NO: 275786 - DNA, 375 bp, Homo sapiens
  chr20:62422171-62422546
  hypo
agctcagcacagacagaggccgtgagaggacgccgggcggggcgcaggagggccatggggcacagagtgcggccagtgggaggacgacccacgcgagagcccatccacaggtgtgcagcgggaggcctgtgtctccgcctgaagcagggcagcaaacaccggagggcaccagtgcgtccagggtgggacgtctgccacgtgtttccgtgctcgaggctaatggggttctgaacagaatcccacatacggcaactggcatatcccaggaacgatgagaacacccagccgtggctgagcaactcttacccaaactgagaactcggttaaatgacctacactgtggccatccctcacgcttgaagaaacattcttaag

SEQ ID NO: 275787 - DNA, 425 bp, Homo sapiens
  chr20:62426999-62427424
  hypo
cccacccatcgtgccgtcctgtgctggcaccaggtcggccaatcctccctgggatccggggagcaaggtcatgcacctgtgtccccagcagaatgaccaccggcaaacaggctccgccaaacgtggcttctatcctcctcctccctgggtcagctggagtgaaggaagagtggcctctgccgaatgcgcataggaacggcccagcctctagggccatcttggaagtggcggtgcccatcccaaatcctctctccaacagactcccggaaggtgacgggtgtccatcattgagcgcctttgaagactgtaaacaggcgcgctgctgttgaggacgcacacttcccactcactccaatcctctcatttgaggacgaatgtgccctggccacagcctggatagatgcctgtgtcgcaggacgcagacc

SEQ ID NO: 275788 - DNA, 96 bp, Homo sapiens
  chr20:62432147-62432243
  hypo
aagcccgccatgcctgagcctccccctccccgcagtgggctcctgcagagcttccctgacgagtgcccctccctgctctaccgcgctgggtcccat

SEQ ID NO: 275789 - DNA, 207 bp, Homo sapiens
  chr20:62440399-62440606
  hypo
agacctgggagctggcggctcggtgctccggtgctgcagaggcactcaaggggctctccacgttcgccttccacgttccccttcgcagggaccgcagcgcctggggcacttcgccatgggcttggccgaagtgggcactaaaggtgcagactcggtggagccaaggggggcaaggtcagcagccctgggggcgcagccctgggggcc

SEQ ID NO: 275790 - DNA, 97 bp, Homo sapiens
  chr20:62480661-62480758
  hypo
acctctgccagggacgccgtctccttcctccgccacctctcccgttgtgttttttgaggttcgactcaaaatctttacatgtttttaaaaattgagt

SEQ ID NO: 275791 - DNA, 262 bp, Homo sapiens
  chr20:62481425-62481687
  hypo
cctgtttttgggattcaccccgtagcggcggccttgtcttcccaccgtagggatgagccactgttcgcttatccactcgccagctgatggatacttggttttctcagctttgcgaacgctgctgctacaaaggtttgaggcgagtcttcctgcggacgtgtttcatctcttctgggtaaatacctgggcgcgggatgctgagtcacgctacgtctcctttcctgaatctctttttttttttttctttgagacggagtctctc

SEQ ID NO: 275792 - DNA, 214 bp, Homo sapiens
  chr20:62488232-62488446
  hypo
aaaagaaaagaagaaaagaaaagcccctagaggccagggtccttgaacaaaagtgcgcgatgccctgtgtctgcagcggggagaggtctggagcccgtgtgtccgacagcagaagtggacacagtggtgccagggcaggaaccctgggggcatttgcaggcctgtgctgcgagactgcagtggcgctcaggacacacctcggagaagagcaagc

SEQ ID NO: 275793 - DNA, 217 bp, Homo sapiens
  chr20:62493115-62493332
  hypo
cctccacgtggggcgcgcagccaggcgcagtgcctcttgcagcagctccgcgagctgcccggccagctcgctagctacgcgctggcccactcgctgggccgctggctcgtgtaccccggctccgtgtccctgatgacgcgcgcgctgctgccgctgctgcagcagggccaagagcgcctcgtggagcgctaccacggccggcgcgccaagctggtgg

SEQ ID NO: 275794 - DNA, 117 bp, Homo sapiens
  chr20:62494226-62494343
  hypo
agcacctcaagaacgtggaggcgactcacttcagccctctggagcctgaggagtttcagttgccctggcggctgtaacctatatgccccagtgggggatcacgcacttgaactcctg

SEQ ID NO: 275795 - DNA, 455 bp, Homo sapiens
  chr20:62513508-62513963
  hypo
cactctgtgacgctcgttccccacagacgtggttgagcttgcattttctcccctcagcacagtctcatttgggaagaggaaagggaaacttgcacgcatgggccggtcagggcactgagaggcctttctgctctggcactgcctgccaggcgtgcacctcagggggcccgtccgctctagcaggcaaatggggcgtgttctctgtagtcagaggggctgtgagaagacaggaaagcgagcttagtgggtatcaggcaagggggtgaaattgggttgtgagatgagaaagcagcgtcattgcagggctggggggccgagactcggcagggtcgccgagagctcagtgagcgagcaatgcacaggcggctcctcgccgcaggggcctctgggggccgaggggctctgggcctgcaccccctctgtagacacctggcgagtgtccaccccttggccca

SEQ ID NO: 275796 - DNA, 312 bp, Homo sapiens
  chr20:62518965-62519277
  hypo
atgcctgctcgctgcggctccagagccgggtgtctctggtgggggttggggcagctcccgccggttacaccttgcccttcccatattcctggattaattgaggactccattcccttggcaacctctgatgactaagggccggtaaaaaccccctctaggctgacgaggaagagctggtagggggtcaggctcttcacctgcagcctccagaggagatccttgtgtcaaactgggccgtgtcctttccaagtcctgaccctggctgcctgcagtgggtggggtggggttcgaggggctcgcacacagatcctg

SEQ ID NO: 275797 - DNA, 251 bp, Homo sapiens
  chr20:62520344-62520595
  hypo
ttgttgggcatggccgacctcacttttgacctggggagtctccggaatgacctggctgtctcacagttttgccatgagatcttgggatgttgttagggaccctttggaggctggccctaaccctgaggcccttccgagttaggagagcagcacaaccctctcctcttgacaccgacactcttccctctctctttaaaggaactctgcgaccttcaagtcgtttgaggaccgagttgggaccataaaggtaa

SEQ ID NO: 275798 - DNA, 42 bp, Homo sapiens; identical to SEQ ID NO: 220254
  chr20:62544237-62544279
  hypo

SEQ ID NO: 275799 - DNA, 43 bp, Homo sapiens
  chr20:62550220-62550263
  hypo
acaggcgtgagccaccacgcccggctgatatgttccatatatt

SEQ ID NO: 275800 - DNA, 535 bp, Homo sapiens
  chr20:62550638-62551173
  hypo
ctctgagaacagagcgaggcatgtgatcgatgcatcgtaactgttgagcaaatgaatgctgagctgtgatggcaccgacgtgtccggggagaggacgcacccggctgtgtggacatgtgcccagggcccaggacagcgccacggaagaggacacacccggctgtgtggacatgtgcccagggcccgggacagcgccacggaagaggacgcacccggctgtgtgcacatgtgcccagggcccgggacagcgccacggaagaggacgcacccggctgtgtgcacatgtgcccagggcccgggacagcgccacggaagaggacgcacccggctgtgtgcacatgtgcccagggcccgggacagcgccacggaagaggacgcacccggctgtgtggacatgtgcccagggcccgggacagcgccacggaagaggacgcacaggacagcgccacggaagaggacgcacccggctgtgtgcacatgtgcccagggcccgggacagcgccacggaagaggacgcacccggctgtgtgcacat

SEQ ID NO: 275801 - DNA, 590 bp, Homo sapiens
  chr20:62551402-62551992
  hypo
cagggcccgggacagcgccacggaagaggacgcacccggctgtgtggacatgtgcccagggcccgggacagcgccacggaagaggacgcacaggacagcgccacggaagaggacgcacccggctgtgtggcaggggaggttcccaagagcaggctcagggctctggggtctgagtgagggctctccagccagcagggagcagggcagggtgttgaagagacggcaggtgcgtcaggggctgacgtgggacccggcactctgtgctctgtgtctgcccgggaacaggtagtcctgcgtcggaccgggaagtgtggtgggtgtggtgggggaaggggctggcgtcagcagggctctcgtccgccaacgtctggtggggatgcccgccatgcgggggcctcaggctacagccagggctgtgaaggagccgaggtcatagagtggctgccctggcgtagggagggaggacacgggtccccgccatttcagaagctcagcgtccctgcacgtgtgcggtcttgtctgcctaggcatgtgtgcgggccctggggctgctgccagcagaacggactgggatacgctggatttgtaaa

SEQ ID NO: 275802 - DNA, 94 bp, Homo sapiens
  chr20:62556213-62556307
  hypo
ctgcttggccacactggcgtgccccaactcacctgtgttatagcttgtactgtgttcggccattcccgagctcatgtaccgcactcaagatcaa

SEQ ID NO: 275803 - DNA, 1175 bp, Homo sapiens; identical to SEQ ID NO: 220258
  chr20:62562217-62563392
  hypo

SEQ ID NO: 275804 - DNA, 244 bp, Homo sapiens
  chr20:62571650-62571894
  hypo
gtcgtggtcctaccgagtgtattgggcaggtaaatcccacctctgcctgaacctgccccgcctacccagggctcactcaccaggagcacgcgcactgccatcatggccgccgcgcccgtggacacggtgcagtccatgaggatcacgtggtcatcgctgatgtccttgggcagcctcaggtagtggagctgcgggcagcaggggtcaggctgcaggtggggctccctgcgtccccttgctgtga

SEQ ID NO: 275805 - DNA, 45 bp, Homo sapiens; identical to SEQ ID NO: 220260
  chr20:62572479-62572524
  hypo

SEQ ID NO: 275806 - DNA, 125 bp, Homo sapiens
  chr20:62576162-62576287
  hypo
tgaggccgcctggtccgtgggcctggccagagccacttccccagggcaccctggcaggtggggaggagtggggaggtgggggtgtctgcacctggtccgtgggcctggcccgagccacttcccca

SEQ ID NO: 275807 - DNA, 325 bp, Homo sapiens; identical to SEQ ID NO: 220261
  chr20:62578679-62579004
  hypo

SEQ ID NO: 275808 - DNA, 139 bp, Homo sapiens; identical to SEQ ID NO: 220262
  chr20:62581868-62582007
  hypo

SEQ ID NO: 275809 - DNA, 386 bp, Homo sapiens; identical to SEQ ID NO: 220263
  chr20:62583701-62584087
  hypo

SEQ ID NO: 275810 - DNA, 207 bp, Homo sapiens
  chr20:62598913-62599120
  hypo
agcaccgcctaccaccggcggctgcacaggcccacagtgagcaccgctgtcccaacacgagggcaccgggggcaggggctgcggccagctgaggacaagaacccaggaccctgggctatgtccaaggcaacccctaccctggtaaggtccttgggaactctaggggcctagctgggtacctggagacaggacgcccagggcaatggt

SEQ ID NO: 275811 - DNA, 125 bp, Homo sapiens; identical to SEQ ID NO: 220266
  chr20:62608161-62608286
  hypo

SEQ ID NO: 275812 - DNA, 170 bp, Homo sapiens; identical to SEQ ID NO: 220267
  chr20:62630918-62631088
  hypo

SEQ ID NO: 275813 - DNA, 120 bp, Homo sapiens
  chr20:62631471-62631591
  hypo
accacgcctgaatccaccactggtttgacggcaggctaagcttcattataaagagctcagttggtcagctcttcacccgcctaatggtggccagtcacggtggctcacgcctgtaatccc

SEQ ID NO: 275814 - DNA, 120 bp, Homo sapiens; identical to SEQ ID NO: 220268
  chr20:62631831-62631951
  hypo

SEQ ID NO: 275815 - DNA, 41 bp, Homo sapiens
  chr20:62635239-62635280
  hypo
cgcgcccggccagagacagcgtcttataatgaggtggccag

SEQ ID NO: 275816 - DNA, 104 bp, Homo sapiens; identical to SEQ ID NO: 220269
  chr20:62639423-62639527
  hypo

SEQ ID NO: 275817 - DNA, 86 bp, Homo sapiens
  chr20:62651736-62651822
  hypo
ccagcctgggtgacaaagcgagactctgtctttaaaaaaaaatcctttcagcatctgcagggcgcagaggacggtgacttgcccct

SEQ ID NO: 275818 - DNA, 372 bp, Homo sapiens
  chr20:62662105-62662477
  hypo
aatcacagtttatctaacaccgggcaattaagaataccacaaggcttaaaaaacaatcaggttatcagagtgtgaaattattccgtttggcaactgagacgaacccgaacagctgcccggagtggaggctcctcgtgttgtctcttgactacggtgcctctggctccagggggaggtgaccctgaggagagggtggcagcaacgcagagtcccgggcctgccagcatgctcagcagccagcgcccgccatcccttctccagcagcgggtgggggtgccatgcacacccttacctggcctctcatagcatggacctcttcgggcccggtttttcaggtgtgcatgtgtctggcaggcacggcggtgtgaatcc

SEQ ID NO: 275819 - DNA, 34 bp, Homo sapiens
  chr20:62705149-62705183
  hypo
aagggaacccagagtcggccgtaggaggcggcgg

SEQ ID NO: 275820 - DNA, 251 bp, Homo sapiens
  chr20:62722777-62723028
  hypo
cacctctgaggcttcgtgctctcagcagtggccgggtatggtgggggtgactgagctccaggagcacacagcaggtgctgggccagtgccgtgtcctggacccaagcatcttacccgcttgtttacgacgaagctttgatctgtcgagagctggccgggtgggggcatttcggtgtgccgggagcccagctggggggtccgggccagtctgtccaaggctgtgtctccgtgtgagtcgtggtccccgtgtc

SEQ ID NO: 275821 - DNA, 922 bp, Homo sapiens
  chr20:62737169-62738091
  hypo
gtgcccaggcccttcagcaccgcaatatgctgcggaagttcttccggaagttgtcatctagaaaggcgtagaggaaggggttcaggcacgagttggcgtagctgaggctggtgatgacgtaggacatactgatgaccagtggggtctggggcaggtccgtggtcagggccacgacagaggccaggtggaagggcgtccagcagaggaggcacacggccagcacgacgaggaccaggacggtcaccttccgcctggccttgcctagagccttggctccagagcggagccgcacggcccgcagcctgcgcaggaggtctgtgtagagcacacagatggtgcacacgggcagcacgaagcccaggaccaacgtgtagacacggctggccttgaaccagacctgctcgggccacgggaagctcagcccacagcttgggacctgcagctcgttgctgtagacgccagcgaaagagaagaagggcagaaccaggaccgtgacgcccagccagacacacaggctggcgaccttcgccccccggtaggtgcgccagggcatgtggcgggacctcacggtggccagcaccaccaggtatcggtccacgctcatcacggctaggaagtagatgctggagaagatgttgtagtggtcgacggccagcaccagcttgcagagcagctccccgaagggccagtactgcagcaggtgctccgcgatgttgacgggcagtaccagcgtgaagagcccgtcggcgacggccaggttcaggatgaacacgttggtcaccgtcttcatcttgggcgcccttaggattacaaggatgacggccgtgttgccagtcagccccacagcacagatcccggagtacacggcgggcaggagcacatagaggaacggcagtggctcggagaaggtggcattgtggcc

SEQ ID NO: 275822 - DNA, 91 bp, Homo sapiens
  chr20:62766352-62766443
  hypo
ccctcagttttgtgcgtcacacacacgctccctcagttttgtgcgccacaaacacgcgcactccctcagttatgtgcgtcacaaacacaga

SEQ ID NO: 275823 - DNA, 120 bp, Homo sapiens
  chr20:62766923-62767043
  hypo
acaaacacacacgctccttcagttttgtgcttcacaaacacacacgctccctcagttttgtgcatcacacacacattccctcagttttgtgcgccacaaacacgcgcgctccctcagttt

SEQ ID NO: 275824 - DNA, 78 bp, Homo sapiens
  chr20:62784588-62784666
  hypo
gctcacaccttgctcggtttagtcgctgtctgagccttagttcctggtcataactgggctgtgcggggcttggggcct

SEQ ID NO: 275825 - DNA, 51 bp, Homo sapiens
  chr20:62796671-62796722
  hypo
aagtaaatatcggccgctcctctcagccccttttttcgctacgtgtccgtg

SEQ ID NO: 275826 - DNA, 71 bp, Homo sapiens
  chr20:62797053-62797124
  hypo
ggtgcggggggttccgtggctgcaggtgggtttggtcctgggcatggactctgtcacgatgatgataatgg

SEQ ID NO: 275827 - DNA, 388 bp, Homo sapiens
  chr20:62818172-62818560
  hypo
ggcatccacgtttccgtggagagtttcctgtagcacgtggctccggcatccacgtttccgtggagacttttcctgtagcccgtggccccggcatccatgtttccgtggagagttttcctgtagcacgtggctccggcatccacgtttccgtggagagttttcctgtagcctgtggccccggcatccacgtttccgtggagagatttcctgtagcccgtggccccggcatccacgtttccgtggagacttttcctgtagcccgtggccccggcatccatgtttccgtggagagttttcctgtggcacgtggccccggcatccacgtttccgtggagagttttcctgtagcccatggccccggcatccacgtttccgtggagacttttcc

SEQ ID NO: 275828 - DNA, 212 bp, Homo sapiens
  chr20:62839567-62839779
  hypo
actctgttattgtggaggtccgctcggatgatgacaaggacgaggacacccactcccggaagtcaacagtcactgacgagtcggagatgcaggacatgatgacccggggaaacctgggcctcctggagcaggccatcgccctgaaggctgaacaggtgcgcacagtctgcgagccgggctgcccgcctgccgagcagagccagctgggcctg

SEQ ID NO: 275829 - DNA, 182 bp, Homo sapiens
  chr20:62851114-62851296
  hypo
acaaacaccgcaaacgagaaaatgctttccccagcagcagcagctgcagcagcagccccggtgtgaagtctcccgacgcctcccagcgccacagcagcaccagcgcccccagcagctccatgacctctccccagtccagccaggcctcccgccaggacgagtgggaccggcccctggactac

SEQ ID NO: 275830 - DNA, 263 bp, Homo sapiens
  chr20:62859283-62859546
  hypo
gcacccaccaaggacgacaaggaggaccccgagctgatgaagtacgttgggccatgctggctctttcattgcattgcggaattgagattttcgtgtgttttataatgtaaaaaaactcctactagattcccttttcattaatacaacgggtcacctaactgaccaacgccaactttcgtttctttcatttttatggaagctctcatacgctacacgttgatacctgtgaagataggagccctggatgtcgcgtggagggcatg

SEQ ID NO: 275831 - DNA, 395 bp, Homo sapiens
  chr20:62863328-62863723
  hypo
cttcacactcagcccggaagggccagttcttccctgaggctccaggacctcagcggccctccctgcctcactcagaagccctttaacggctctgagttgggctccccttgtgtctggcttgagagagtctccaggcttctcctcccaacccttcgcccctgtactcaccccggcctctctgtacccaggtgcccagttccaggctgtgtggggctcggtcacatcagcgggaaatacgcctctcacaggagcgcatccggctgcccactggccgcccgcaggcagaaggaagggtccctcaatggctcgtcattctcctggaagtccctgaagaatgaaggaccgacctgccccaccccgggctgtgacggctctggccacgccaatgggagttt

SEQ ID NO: 275832 - DNA, 247 bp, Homo sapiens
  chr20:62868740-62868987
  hypo
caggtaggtggtgccgccccccgctcctgggctctttgcccacccaacccaaacattcgtcttggggacagtgaggcatccgtcggcactcatcaaggttgctgtcagggctgagctgacggacagcgcagtggctggcacacaggcacacttaggacgtgctggccgctcacaatgcggagtccgtgaagtcacactgtgagtgccagtgggccgccggagctggttgtcccgccagggctgtggt

SEQ ID NO: 275833 - DNA, 252 bp, Homo sapiens
  chr20:62871681-62871933
  hypo
tgcgaacagaatttcgatgcctatgtgagcaccctcaccgacatgtactccaaccaggacccggagaacaaggacctcctggagagcatcaagcaggctgtgaggggcatccaggtctaggccgtgtggtacccagaagtgtcccagcccaccacaccgtttacctccctcgccctgccccgcaccgtggggatgcccaactcacagtgacttcccgtttggggcccggtgtggccgcgggcgggtttatcc

SEQ ID NO: 275834 - DNA, 131 bp, Homo sapiens
  chr20:62873338-62873469
  hypo
ttatttaagtgtagcgcagatgtgtgtgcttgggcgtgtttctcgtgtcgcgtttgcgtgtcggctcttgcggtggagtcctgttgctgtgagggagtgctggccgcaggcagcctcgagtcaccgccagg

SEQ ID NO: 275835 - DNA, 334 bp, Homo sapiens
  chr20:62899595-62899929
  hypo
acaccattgaaagccgaggacgcacataaaagggagctcattttgccatgtgggagacttagcctatttgccgcctccactgggaggggcttacagaaagagccatcagccagagggctcctacagagtcatggggcttctgctccccagggcgccaagcgcctgctgcctcatgggtagacaaggttagagaacacattccagctaatctgctggggtgtggataggagactttccgtggaaccttacacagccgagcctttgtgtttcactatttcaggatgcaaactgagcaaggaactgataccagggccagcacgacagcaaaacctcc

SEQ ID NO: 275836 - DNA, 38 bp, Homo sapiens
  chr20:62912885-62912923
  hypo
aaattgtgaataacaccgttataaacatgtgtatacaa

SEQ ID NO: 275837 - DNA, 37 bp, Homo sapiens
  chr20:62914531-62914568
  hypo
ctgtattttctgggcgctccatggatggggttaacgg

SEQ ID NO: 275838 - DNA, 412 bp, Homo sapiens
  chr21:15443742-15444154
  hypo
tttgccagctaccaggaaaacgtccttgtgaacccggattcccattgctaccgacttcgtgtaaactcccgtcccgaggacacgagagagactcaggcctcaggcgaggattccctggattgcacccagggtgcgtgtctcgcccacaggagcaccccaaagcggcaagaagacaccgggtgatgggaacaggaagcctggctttgaagaggacgttgaggcagtccgtggaaaaacttcccagggatgacagtgccttcccgacagaccctgcggcagaatgggagggggagcgtggagtccctgtcttgcacccagggtgcttgtctcgccctcagggggcaccccatagcggcaagaattcccccagagaaaggtaacaggatgccccgcttgaaagacatgcaccctg

SEQ ID NO: 275839 - DNA, 360 bp, Homo sapiens
  chr21:15445158-15445518
  hypo
ggccagggactccacgacaaccccgggcccggcgcaggggctgctggaaaggcactgtggtccgtgggacgaccgcggcccactgctttctttcccgtgctgcctcaacatcccctttcaggcctggcatcctcttcccttcccccggaggccttcttggcgctttggggtgctccccgtgggcgccacacgcaccctgggtgcaagccagcgactccacaaccccattgggcagggcgagaggctgccgggaaggcactgtcgttcgaaggacctgcctcgctaccttttaccccgggctgcctcaacatccccttttaagcctaacgtcttgtccccttcccccgaggaccttcatgc

SEQ ID NO: 275840 - DNA, 144 bp, Homo sapiens; identical to SEQ ID NO: 220283
  chr21:15448689-15448833
  hypo

SEQ ID NO: 275841 - DNA, 300 bp, Homo sapiens
  chr21:15449805-15450105
  hypo
gcgtctgtagtcacagctcctcgaaaggctgagataagaccatctcttggactcggaaggtcaaggctgtggtgagccagggtcaggccaatgcactgcagcccgggtgacagagcgagacttcgtctgaaaaaacttgaacgaataaagattgcgagtcctgcaagaaaaagatataaaggaaatgaagaaggaggtcgcgttctgaaaggaaaaatattttaaaaagaaacaatgggcggatgcggtggctcttggctgtaatcccagcaatgtgggaggtcaagtattcaagaccag

SEQ ID NO: 275842 - DNA, 329 bp, Homo sapiens
  chr21:15455717-15456046
  hypo
cttaatacatctgttctcactgtgtcctgaccacatgcccttaaagaactcgagtcgagagagtcagcaagagactttcagcattgtctcccgaaagcagtgaggtggatggcggtggagtgtcccaaaagcagtgaggtggatggcggtggagtgtcccgaaagcagagaggtggatggcggtggattgtcccgcgctcctgtggttttaggtggccacgcatggaggatagatttcaaatatttccggagaggctcgagccacagtcattcagagcatccgagctcgggatggggtttctgacagcgccttaagggcaaggaagggc

SEQ ID NO: 275843 - DNA, 103 bp, Homo sapiens
  chr21:16130852-16130955
  hypo
gcaggacagttttttactggccctaactgctaatcgccagcagtgctccacagatcctaaaacatcccttttagcctgtttcctaatgcgtctgtaggggagc

SEQ ID NO: 275844 - DNA, 38 bp, Homo sapiens
  chr21:16383777-16383815
  hypo
gggattgcaagcgtgagccaccacgcccagagtactgg

SEQ ID NO: 275845 - DNA, 153 bp, Homo sapiens; identical to SEQ ID NO: 220290
  chr21:16408140-16408293
  hypo

SEQ ID NO: 275846 - DNA, 160 bp, Homo sapiens
  chr21:16580450-16580610
  hypo
gatcttcacattccctggaacgtgcagactctgtcatcccgctccgttttccacgttctgctctttgactccaggtgttcgtcccccatgccccaatgcacgttgtgcacatctcctgcccttatgacccggaggaaacgttatcttctctgagttccaa

SEQ ID NO: 275847 - DNA, 202 bp, Homo sapiens
  chr21:16747503-16747705
  hypo
gcaggctgccaggctcgcaaagcacctccacatctacaggaactctccaaggcaactgtccccatgtggaggctccgcattgcaggctgccaggctcgtaaagcacctccacatctacaggggcttccacagcggggaagagtgtggggagacacacaccactctacatgcctcaactcagaagggacgccctccatttctg

SEQ ID NO: 275848 - DNA, 35 bp, Homo sapiens
  chr21:18887830-18887865
  hypo
agaaatgcattggtatgggccgggcgcggtggctc

SEQ ID NO: 275849 - DNA, 34 bp, Homo sapiens
  chr21:18888105-18888139
  hypo
agagctagactccgtctctgaaacaaataaacaa

SEQ ID NO: 275850 - DNA, 36 bp, Homo sapiens
  chr21:18913418-18913454
  hypo
taggattgatgaacccgtattgacataacattacca

SEQ ID NO: 275851 - DNA, 60 bp, Homo sapiens
  chr21:19190791-19190851
  hypo
ccaacattgcacttttcctgtggaaagacacaaagctagtaaaacttaaagccaggccat

SEQ ID NO: 275852 - DNA, 93 bp, Homo sapiens
  chr21:19274379-19274472
  hypo
atgtttttccaagtgcggcatttctaggatacagcatctggacagggaaaatgtttctgagcagtggagtagttaatttttttttgttttttt

SEQ ID NO: 275853 - DNA, 152 bp, Homo sapiens
  chr21:19274772-19274924
  hypo
gtgagccaccgcgcccagcctggagtgtttaattttatgtgtcaacttgtctgggctgtagtactcagttacgtaaccaaacaccaatccaggtgtcactgtgaaggtatttcgtagatgcaattaacatctacggtcggttgattttaagt

SEQ ID NO: 275854 - DNA, 214 bp, Homo sapiens
  chr21:20618217-20618431
  hypo
gtctttgactactacgcagctagcggtgtatgccttttaggggctgcgttctttgactgtatagttactgcctggatatatggtgttgataatatttatgacagtattgagaacgtgatcggctatcgggccgggccctggatgaagtacagctgggctgtgatcactccatttctctgtgttggatgttttgtcttctcgatcgtcaagtaca

SEQ ID NO: 275855 - DNA, 120 bp, Homo sapiens
  chr21:20865924-20866044
  hypo
ggagaggcgtgggcgggaaccggcgcttgccggccagcgcgagttccaggtgaacgtgggctcggcaggcccggcactcggagcggccggccggggcagtgaggggcttagcacctgggc

SEQ ID NO: 275856 - DNA, 66 bp, Homo sapiens
  chr21:21132337-21132403
  hypo
ccatctctgggaccccggggacccggtgcgcacgctgagcagcaccaaggacggggcgcacggccg

SEQ ID NO: 275857 - DNA, 37 bp, Homo sapiens
  chr21:22495685-22495722
  hypo
gcctgggagacagagcgaagagactccctctcaaaaa

SEQ ID NO: 275858 - DNA, 32 bp, Homo sapiens
  chr21:27456835-27456867
  hypo
tgagcaccgcgcccggccgaagacaccatttt

SEQ ID NO: 275859 - DNA, 97 bp, Homo sapiens
  chr21:30037461-30037558
  hypo
ccaggagtggcggcatgcacctatgggtctcagctactcaggatgtcttgagtctgggaggttgaggctgtggtgagacgtcgcgatctcatcactg

SEQ ID NO: 275860 - DNA, 83 bp, Homo sapiens; identical to SEQ ID NO: 220295
  chr21:30294961-30295044
  hypo

SEQ ID NO: 275861 - DNA, 213 bp, Homo sapiens
  chr21:30352359-30352572
  hypo
atctgagtcacccacgtgcacattcccagctgaggttgaacaaggcgacgttcccttatttcagctctcatactgtaaacaagtgtccttttcacagtactttttcaaatttttgtgcttttgattggtgatttcatgttttaaatggcctccaagcagcagcactgaagtgctgtctattgtatctaggcacaagaacgctatgatatgcct

SEQ ID NO: 275862 - DNA, 35 bp, Homo sapiens
  chr21:30353854-30353889
  hypo
gtgagaaagtataccgctctcggtagcatgtacaa

SEQ ID NO: 275863 - DNA, 190 bp, Homo sapiens; identical to SEQ ID NO: 220296
  chr21:30357057-30357247
  hypo

SEQ ID NO: 275864 - DNA, 42 bp, Homo sapiens; identical to SEQ ID NO: 220297
  chr21:30406901-30406943
  hypo

SEQ ID NO: 275865 - DNA, 99 bp, Homo sapiens; identical to SEQ ID NO: 220298
  chr21:30407636-30407735
  hypo

SEQ ID NO: 275866 - DNA, 42 bp, Homo sapiens
  chr21:30488430-30488472
  hypo
tgtgcaacagtaaacagtggcgacgggtagttcatgagtttt

SEQ ID NO: 275867 - DNA, 146 bp, Homo sapiens
  chr21:30722368-30722514
  hypo
aaaaacaccacaagccacaacgatcctctagattcaatatgctcacagcctgctttaaaacctcttacccagaccaacgtcactcctgtaaaaacccacttggcctaatacaaacctccacatacaatcgaaggtaaaatgtcacg

SEQ ID NO: 275868 - DNA, 97 bp, Homo sapiens; identical to SEQ ID NO: 220300
  chr21:30722544-30722641
  hypo

SEQ ID NO: 275869 - DNA, 112 bp, Homo sapiens
  chr21:31023452-31023564
  hypo
caaaaggccagtctcgggcctgggtggggcctgcagtctctccatggaccacttctcaatgatggatgacacgtgagggttgtcaatgttaagcagccgaaacccggtcatg

SEQ ID NO: 275870 - DNA, 85 bp, Homo sapiens
  chr21:32558510-32558595
  hypo
atgtagcggggaagcgctctctaaagaaggggagggaggctggatctcaaatccctaggttctcaactttcgcagattcttctat

SEQ ID NO: 275871 - DNA, 150 bp, Homo sapiens; identical to SEQ ID NO: 220304
  chr21:33057409-33057559
  hypo

SEQ ID NO: 275872 - DNA, 32 bp, Homo sapiens; identical to SEQ ID NO: 220306
  chr21:33058553-33058585
  hypo

SEQ ID NO: 275873 - DNA, 111 bp, Homo sapiens
  chr21:33058885-33058996
  hypo
aaatacccaacaaacgttagctatttttttttttaagataaattttaacaacccccccagccacggaccattaccagtctatggcctgttaggaaacgggccacacagcag

SEQ ID NO: 275874 - DNA, 101 bp, Homo sapiens; identical to SEQ ID NO: 220307
  chr21:33175427-33175528
  hypo

SEQ ID NO: 275875 - DNA, 139 bp, Homo sapiens
  chr21:33340684-33340823
  hypo
cctatcccaacaggtaatttcgtgcacccagaggaactcctcgggagagacggggcctgtcctactagccctgagcagttccggacagaaagctgtccgtgattgaaggaaaagccgcgctctctcttggctatctccc

SEQ ID NO: 275876 - DNA, 429 bp, Homo sapiens
  chr21:33370941-33371370
  hypo
gattgtgaagaaaccggagccccatcagccagggcccggaagcactggcatcccccacaaggaagaccccctgatgctggacatggtgcgctccttcgagtctgtggatcgcgacgaccacgtagaagtgctgtctccctctcatcactacaggattctgaactccccggtcagcttggctcgcagaaattccagcgagaggacgctgtccccgggtctgccatccggaagcatgtcgcctctccatactcctttgcatccaactctggtctcttttgctcacgaagataagaacagccccccaaaagaggagggcctgtgttgcccacctccggttcccagcaatggccccatgcagcctctggggagccccaattgtgtgaaaagccgaggccggttccctatgatgggcatcggacagatgttaag

SEQ ID NO: 275877 - DNA, 202 bp, Homo sapiens
  chr21:33416034-33416236
  hypo
catgagtgtgtgagcatagacgtgtgtgagcatacacatgtcagtgtgtgtatgcgtgtgtacacgtgtgtgaatgtacacagctgtgagtgtaaacgtgtgtgagcatacacatgtgagtatgtgtacatacgagtgtgagcgtgtgaacgcacacgtgtgtgtacgtgtgtacatatgcgtgtgagtgtgtgtacaatga

SEQ ID NO: 275878 - DNA, 120 bp, Homo sapiens
  chr21:33627820-33627940
  hypo
gggcgtgagccaccgcgcttggcattcttgggtactttttgaagtttcaaagttatttcagcaggaagacccatctagttaaagaataaatgtgtgcttggccaggcgcggtggctcacg

SEQ ID NO: 275879 - DNA, 160 bp, Homo sapiens
  chr21:33628733-33628893
  hypo
tggctgtcacactccggtagctaaggccacctttgttcaatggctctctaccgggaggcataaaaagtacggtgacacgtgtgctggttttcccgggacaattgacatctgtcatcccgacttaattattagacattccctgtttcgcgaatgtgccctg

SEQ ID NO: 275880 - DNA, 33 bp, Homo sapiens; identical to SEQ ID NO: 220308
  chr21:33641298-33641331
  hypo

SEQ ID NO: 275881 - DNA, 124 bp, Homo sapiens
  chr21:33694583-33694707
  hypo
agagtttttaaggtttgaggcgccatgtagaagtgagccaacagcacggagacattccgaagtgcaggcctgcgtggccaccgactgcacaatcgtgttggccgtgcagcatacaggatccatg

SEQ ID NO: 275882 - DNA, 33 bp, Homo sapiens
  chr21:33698086-33698119
  hypo
tcagccctccaccgcgggcgcctgtctataagc

SEQ ID NO: 275883 - DNA, 616 bp, Homo sapiens; identical to SEQ ID NO: 220309
  chr21:33707628-33708244
  hypo

SEQ ID NO: 275884 - DNA, 165 bp, Homo sapiens
  chr21:33708274-33708439
  hypo
gctgtgttagaggtcgttctgcagaaatgggtagctggaacaatgctgcactgtgataaaacccgcctccgacttgctctcccctcttcctcacataagaagggctattctactccagaaaggacataactgacatagcaccagctccgacgtcaaaagagcgag

SEQ ID NO: 275885 - DNA, 171 bp, Homo sapiens; identical to SEQ ID NO: 220310
  chr21:33711061-33711232
  hypo

SEQ ID NO: 275886 - DNA, 53 bp, Homo sapiens
  chr21:33720325-33720378
  hypo
cagttataccacaatcgcctgagacactccacctgccccggaaggactggact

SEQ ID NO: 275887 - DNA, 262 bp, Homo sapiens
  chr21:33721619-33721881
  hypo
ttggccaactccagcgaggccacggactccatgtccaggaagaggtcggcttcggcccgggcggcctcgcatctctgctggttctgggcatccagctgctcacagtggacaaccaggcgcctgaggagatccaggaagagctgcaggaggggcgggcccacacttctgcccagctgtgaggacaagagcacgagcctcagcagggaagagacgggttcacagctaccaggcagtgacttccagggcccgtgttttcagagca

SEQ ID NO: 275888 - DNA, 42 bp, Homo sapiens
  chr21:33754389-33754431
  hypo
gtgtggccctgcagccgggcttcaggacgggaagccctttcc

SEQ ID NO: 275889 - DNA, 102 bp, Homo sapiens
  chr21:33759538-33759640
  hypo
actgggagccacctgtgtgccgctgcccacagaattctcctgccagaacctgttctataaaactgcctttcagagaatcacttgaacctgcctctcggagaa

SEQ ID NO: 275890 - DNA, 583 bp, Homo sapiens
  chr21:33760391-33760974
  hypo
acatctgccggggacgcatgagcacgccattacaccaaaaacataccagaaaagaacaaaattggagccagactcctgggcacaaatccccgctcagtcacttactagctgcatggtactcagtaaggcactgaactctgagctctgggtacctcacctgtataacggaacaagaacagaacctacctgacagggtttgtatgaagcgtaaaaaggctaatttacacataaagcatccagcatcacacttaggtcaaggtaaaccctcaaaacataagcagccccccgggtgtcctcagcagcagcagtgaaaatccagtcacattcggcctctgccagcctcacaggtgttttcagatccccttttatgctgcaacattttccgcagcaaccaccgccattcctttaacagtcactgagcaagtgcatctgctatgccaggcgctgctctgagcttcggggccagactccattgctgccgtctgcagcgtggtctggtggtgattatgagcaggccatgggtgttctgaccaaggtgactgtgagttacaggagctcagtcggcacaggcaccctggagtta

SEQ ID NO: 275891 - DNA, 317 bp, Homo sapiens; identical to SEQ ID NO: 220312
  chr21:33781921-33782238
  hypo

SEQ ID NO: 275892 - DNA, 158 bp, Homo sapiens
  chr21:33791606-33791764
  hypo
gaacaattgctccctcgttacccacccctattgcctgacttgcgtactgctctccccagctccacagctgctaataaaatttagaagcaggatttgaacccagtacctattgggttttaaatatccatactgatggccgggcactgtggctcacgcct

SEQ ID NO: 275893 - DNA, 163 bp, Homo sapiens; identical to SEQ ID NO: 220313
  chr21:33812566-33812729
  hypo

SEQ ID NO: 275894 - DNA, 80 bp, Homo sapiens
  chr21:33824927-33825007
  hypo
ttgccctagtgtactcggaaaatcagatttcgcatggacttggagaaggagtgcaaggttttattgagtggaggaggtgg

SEQ ID NO: 275895 - DNA, 240 bp, Homo sapiens; identical to SEQ ID NO: 220314
  chr21:33844219-33844459
  hypo

SEQ ID NO: 275896 - DNA, 208 bp, Homo sapiens; identical to SEQ ID NO: 220315
  chr21:33845782-33845990
  hypo

SEQ ID NO: 275897 - DNA, 65 bp, Homo sapiens; identical to SEQ ID NO: 220316
  chr21:33849056-33849121
  hypo

SEQ ID NO: 275898 - DNA, 36 bp, Homo sapiens
  chr21:33857747-33857783
  hypo
caggcgtgagccaccgtgcctggccactcccttttt

SEQ ID NO: 275899 - DNA, 85 bp, Homo sapiens
  chr21:33870148-33870233
  hypo
attctcattttttaaaccatcagatctcgtgagtccctttcactatcaagacaacagcccgggaaagacccgcccctaagattca

SEQ ID NO: 275900 - DNA, 89 bp, Homo sapiens; identical to SEQ ID NO: 220317
  chr21:33875251-33875340
  hypo

SEQ ID NO: 275901 - DNA, 148 bp, Homo sapiens; identical to SEQ ID NO: 220318
  chr21:33876126-33876274
  hypo

SEQ ID NO: 275902 - DNA, 120 bp, Homo sapiens
  chr21:33879876-33879996
  hypo
tgtgcatgtgtatatgtgtgtgcatgtgtgtttctatgtgtacatgtgtgtacatgcgtatctgtgtgtgcatgggtttgcaggtgtgcctgtgtgtgcatgcatgtgtatctgtgtgca

SEQ ID NO: 275903 - DNA, 117 bp, Homo sapiens
  chr21:33905871-33905988
  hypo
tgtgtctgtgtgctcgtgcatgcgtgtgtacatgtctgtgtgtctgcatgctcacatgtgtgtgtgcgtgtgtatgtgtgtgtacacatacatgcatgtgtgcgtgcgtatgctatt

SEQ ID NO: 275904 - DNA, 219 bp, Homo sapiens; identical to SEQ ID NO: 220319
  chr21:33924144-33924363
  hypo

SEQ ID NO: 275905 - DNA, 417 bp, Homo sapiens
  chr21:33954140-33954557
  hypo
ccatttcatagggtcgtcatagagagtaagaccgtaaagctccgtacctagcccatgtaaagtccacagtaagggtttgctgctgttgtcctgagacatcatgagatgtcttagaattctggacttgagacacacggcctgggggcggcaatgcttctgtctgctggagtgccaggtgagaggcctgatgtatccagttcttattaatcattacttacgggaaatggagttgatggaaagatagcaacccctcccaccacccggagcgtgagtgataccgcgtcattcagcaataaagcccacatctttatggggacgctatttttacataacgcaaacggtacaaaaacataaatgcgcttttggtaccagagtgtgcgattcttgccccgcgtgtggggacgctgcagatttctt

SEQ ID NO: 275906 - DNA, 109 bp, Homo sapiens
  chr21:33976772-33976881
  hypo
tattataaagcagacggtgagcagcactgagcatggagtacaatgaagtgcaaagaattctcaaaggagaaagagcccaatgctggcagcacagatggcagtgaggatc

SEQ ID NO: 275907 - DNA, 98 bp, Homo sapiens
  chr21:33983236-33983334
  hypo
caggaagtatcatcccgtcaagttcaaaaactatgctgtctaatgcggcagctactcgctccacttggcgatttaaatttatttaaattaaaatgacc

SEQ ID NO: 275908 - DNA, 120 bp, Homo sapiens; identical to SEQ ID NO: 220320
  chr21:34033543-34033663
  hypo

SEQ ID NO: 275909 - DNA, 165 bp, Homo sapiens
  chr21:34350778-34350943
  hypo
gctgttccccggcccgggcttgtgttttacaacaggggaggggcgggcgtgaatggtctgatgattggaacaatccccccgattcaggcctacaaacgcatcttctgttccacaccgaggggacagaaaggagaaaagtgacaaagaacgcggggcggggggaat

SEQ ID NO: 275910 - DNA, 149 bp, Homo sapiens
  chr21:34493986-34494135
  hypo
agcagccacactctcggcccacaccccgatctgcattttcaacacggcagactggggtaggatctatggccatggaacaaaggcaggttcgcttgtaaatgctgaggcaggaacaggcagttatttaaacaagacggcattaaatctac

SEQ ID NO: 275911 - DNA, 176 bp, Homo sapiens
  chr21:34498741-34498917
  hypo
atttaacttgttcaccgccaactcaagaaaatgcacctttccctcaaaaccagcgttccctcccttgacccataaaaccagaaaaaatgcagatatgctgagttttcaaacatctcatgtttgctgcagtcctcgttcgagggagaacagcaggagaaatccgagcaaatggcaag

SEQ ID NO: 275912 - DNA, 156 bp, Homo sapiens
  chr21:34508477-34508633
  hypo
tgcaggcgaggggccgtgccgattcattatgacaaaatgacatatcaaaaaggttttgctggcctgcgaaagatgcccaacagcagatatgcattatcttataagttaagaatgctgtcttttagagggttagctgttttgtttgtttgtttgttt

SEQ ID NO: 275913 - DNA, 75 bp, Homo sapiens
  chr21:34630963-34631038
  hypo
aggagttccatatgcggggttcagcaagtgccaagtgcccgaggcaggatatgcctggcacggcacggcaggagt

SEQ ID NO: 275914 - DNA, 92 bp, Homo sapiens; identical to SEQ ID NO: 220321
  chr21:34710940-34711032
  hypo

SEQ ID NO: 275915 - DNA, 32 bp, Homo sapiens; identical to SEQ ID NO: 220322
  chr21:34711332-34711364
  hypo

SEQ ID NO: 275916 - DNA, 40 bp, Homo sapiens; identical to SEQ ID NO: 220323
  chr21:34745739-34745779
  hypo

SEQ ID NO: 275917 - DNA, 254 bp, Homo sapiens
  chr21:34757192-34757446
  hypo
gtttccttgatgttcgcggcgcttactgttactttcacacttagctaagtaacctttgatactgtgtggttataacataataaccacaggtcctttgtcttctctgtcaagagtgaagaattcgaaggactttaaccactggtaaaagtgtcttctcacataaaccgcatagcagcaagcattacgtgaaccagctggttattctcactaaatgggttagatacaagttacaagccgatcgcgaagctgcctag

SEQ ID NO: 275918 - DNA, 36 bp, Homo sapiens
  chr21:34921350-34921386
  hypo
taacttttaatttaacgtgaggtgttatactgtggg

SEQ ID NO: 275919 - DNA, 512 bp, Homo sapiens
  chr21:34927031-34927543
  hypo
ctgaacacaaatcacgcaagcgtaccagtgaatctcgttctagggcaagaaagagatcatctaagtccaagtctcatcgctctcagacacgttcacggtcacgttcaagacgcaggaggagaagcagcagatcaagatcaaagtctagaggaagaagatctgtatcaaaagagaagcgcaaaagatctccaaagcacagatccaagtctagggaaagaaaaagaaaaagatcaagctccagggataaccgaaagacagttagagctcgaagtcgaaccccaagtcgtcggagtcggagtcatactccaagtcgtcgacgaaggtctagatctgtgggtagaagaaggagctttagcatttccccaagccgccgcagccgcacccccagccgccgcagccgcacccccagccgccgcagccgcacccccagccgccgcagccgcacccccagccgccggagccgcacccctagccgtcggagccgcaccccaagccgccggagaagatcaagg

SEQ ID NO: 275920 - DNA, 36 bp, Homo sapiens
  chr21:35045297-35045333
  hypo
aggcaccacgcctggcggaaacgatttaataagtgt

SEQ ID NO: 275921 - DNA, 308 bp, Homo sapiens
  chr21:35204298-35204606
  hypo
cccctgtcctgttctggagacgtgggagactcccatcgcctgtcctccttgcctgccaggggaaggcttcctgcggggcccctctccccggtgcagcctcacgtcttaccgctgagcaatggcgtctccactccagcctctttgaaacaccagcaccccctgctctcctgccttgctgcctttgttcatgacatttctcaccagcggccaaccagctccaacctctccactttcgcaagagctgggagatcccacttctggaagctctctgtgaccatcccaaccagaagcaccgtgtccctcccctg

SEQ ID NO: 275922 - DNA, 290 bp, Homo sapiens
  chr21:35258633-35258923
  hypo
ccacatcaccaagacgatccaggacactctgaaccccaagtggaattccaactgccagttcttcatccgagacctggagcaggaagtcctctgcatcactgtgttcgagagggaccagttctcaccagatggtgagtggaacgcggccctgtggttattcctccttccctggcactcgtttgcgtgggttaatgttttcttacctggggacttggtgccaggattccttcggtttccctcctgagagatgaggctggctggcacaagacgaggctctgtctcccctggag

SEQ ID NO: 275923 - DNA, 78 bp, Homo sapiens
  chr21:35286345-35286423
  hypo
tgctgggactacaggcgtgagccaccgcgcccagcccggtaccttgattttaatatcgtctcctgtaataacttcctg

SEQ ID NO: 275924 - DNA, 154 bp, Homo sapiens
  chr21:35453130-35453284
  hypo
tttgctatgatacagcgtgttgacctcgtgctagtagtttgcttacaagtcagtgcacttcgctcacgctgggtgagttgtatgttaccagaagttgtgttgatttccaagactgttttatgacaggtaatcttgtttccgtaaaataatttaa

SEQ ID NO: 275925 - DNA, 100 bp, Homo sapiens
  chr21:35954876-35954976
  hypo
tggtattggagacgcgaggaggagctgaatctggagagggcagagcgggccacgtcctcacatgcccaggcaagcatctggagcccgcgctaaatgtgct

SEQ ID NO: 275926 - DNA, 44 bp, Homo sapiens
  chr21:36072874-36072918
  hypo
tatcattataacccttcttcacgtgcttccgcattcccatggtg

SEQ ID NO: 275927 - DNA, 77 bp, Homo sapiens
  chr21:36073649-36073726
  hypo
gactgcacaatttggcataaaaatctcactaattgaggctcgttaaaaggcaccctgcactccgtaattgtctgctc

SEQ ID NO: 275928 - DNA, 74 bp, Homo sapiens
  chr21:36074666-36074740
  hypo
gcgcaggctgggggcgtggcgagcagccagggctcccgcgtgtctctttcacaagcacccgccattccatatgc

SEQ ID NO: 275929 - DNA, 106 bp, Homo sapiens
  chr21:36164992-36165098
  hypo
aggatgataccgcctaggaggatgggaagccacccaggatgctactgctggggaggacggggaccacccgggatgctactcccaagaggacgaggattacccagga

SEQ ID NO: 275930 - DNA, 77 bp, Homo sapiens
  chr21:36221023-36221100
  hypo
gcccagccccctggttcacttttgaaacactgggctatgcctggcgagtagtgtccgagaggcgcgtgggacgtggc

SEQ ID NO: 275931 - DNA, 53 bp, Homo sapiens
  chr21:36236602-36236655
  hypo
ctctcaagtgtttctcccagcgagctgcagccggaatagtgagaaatcacagg

SEQ ID NO: 275932 - DNA, 42 bp, Homo sapiens
  chr21:36242109-36242151
  hypo
tgccagcctgtgtaacccagcgacaggacaaagggattattc

SEQ ID NO: 275933 - DNA, 122 bp, Homo sapiens
  chr21:36394526-36394648
  hypo
aaagagggtggaagcgtctgcaccaggtgtgtgcaggcaagggcatgttgagagataggctgggtggtaaagagaggttccttctcggtcttactcttgatggagtccgctggttttctagc

SEQ ID NO: 275934 - DNA, 182 bp, Homo sapiens; identical to SEQ ID NO: 220336
  chr21:36437235-36437417
  hypo

SEQ ID NO: 275935 - DNA, 143 bp, Homo sapiens
  chr21:36696253-36696396
  hypo
gggtggatcttcttcgagtttacttcaatgacaagatccacgtcctccatgaaccccgtgttttcttcaaataaagtcctgcaggcccacgtggctgcctgggctgctggcagcagcctcttagctcccgctgcactgggttt

SEQ ID NO: 275936 - DNA, 134 bp, Homo sapiens; identical to SEQ ID NO: 220337
  chr21:37259305-37259439
  hypo

SEQ ID NO: 275937 - DNA, 344 bp, Homo sapiens
  chr21:37405005-37405349
  hypo
tctattgtgggggccgctgatgtgtgtgggggtcgctgttctattgtgggggccgctgatgtgtgtgggggtcgctgtcctattgtgggggccgctgatgtgtgtgggggttgctgtcctgttgtgagggccgctgatgtgtgggggtcgctgtcctgttgtggggcgctaatatgtgggggtcgctgtcctgttgtggggcgctgatgtgaggagtcgctgtcctgttgtggggcgctgatgtgtgtgggggtcgctgatctattgtgggggctgatgtgtgtgggggttgctgtcctattgtaggggccgctgatgtgtgggggtcacgtcctgttgtgggg

SEQ ID NO: 275938 - DNA, 183 bp, Homo sapiens
  chr21:37411502-37411685
  hypo
gttacctagcaaagaaagcacgataatccgcatgctagactcaaagaaacactcagcaaagttgaagcactcaccctgagtgacagagctagtgaggcagaaagaactgaaacgccccagccagagccccacacgtgctttctccacacccactcagtaagcggtaactcaaatgcaagaaaa

SEQ ID NO: 275939 - DNA, 32 bp, Homo sapiens
  chr21:37413159-37413191
  hypo
ctaaagagtaaacagctggccgggcgcagtgc

SEQ ID NO: 275940 - DNA, 177 bp, Homo sapiens
  chr21:37417895-37418072
  hypo
tgattcagcaggtccaggtacggagcgagtgcacaggtgtccggctctgcagaaaggcattcccgctgcctgggcctcaggtacacggctctggtgttgacggtgcaccaagcccacagcagggcactgtagctgaagatgctgtcaacagcctccgcaaacagaggctgcagagaa

SEQ ID NO: 275941 - DNA, 138 bp, Homo sapiens
  chr21:37431011-37431149
  hypo
tctcagaaaaaagaaagaaagaaagaaaagctacgtatgaacaaacaagcaatcacaaaaggatttcttttttcattactggtactaaaagaaaaaccatacctcctcttgattcagaacttccgcagagttttcgtc

SEQ ID NO: 275942 - DNA, 42 bp, Homo sapiens
  chr21:37514437-37514479
  hypo
tgcaatccatgggccaggtgcggtgactcacgcctgtaatcc

SEQ ID NO: 275943 - DNA, 62 bp, Homo sapiens
  chr21:37527866-37527928
  hypo
ttctaaaggacgctcgggagttaaaaggagcgaggccactgcagaaatgacagccttcatcc

SEQ ID NO: 275944 - DNA, 47 bp, Homo sapiens
  chr21:37571105-37571152
  hypo
gccctcacccatcacgggctcagaggtgtgaccgagaagctggccac

SEQ ID NO: 275945 - DNA, 177 bp, Homo sapiens
  chr21:37571538-37571715
  hypo
tttctgtacaggtgcgattgcttctctgctgtgttcctttttattacccaagtaaccggtatttcagctcacaagatgagaaaatgacaaacaggcaaaataagcgtagggctgtgtgtgcaacagtttatcataaagccatcaccaggagacgtcactgggcgccttctggagtct

SEQ ID NO: 275946 - DNA, 275 bp, Homo sapiens; identical to SEQ ID NO: 220340
  chr21:37582267-37582542
  hypo

SEQ ID NO: 275947 - DNA, 57 bp, Homo sapiens
  chr21:37612232-37612289
  hypo
tcaagcaggagaactcggccggtgagcagcctgcacaggacccgagggtgagggagg

SEQ ID NO: 275948 - DNA, 340 bp, Homo sapiens
  chr21:37617447-37617787
  hypo
gccagttcaccacagtggaccgtgaagccatttgggccgaagtggagaaggagcccgagaagtacccgctgcgaggcgagctgagcgaggaagagctgccctactacgtggagcttccagacaggacggcccacggcgccccggacagcagcgagcacaccgagtctgcagatacaagctcctgccacacggacagcgagaacacgtcctccttctcctccccttcccacgacctgcaggagctgagcaacgaagagaactgctgtgcacccatccccatggggggcagggcgtaccccaagcgctcggccctgctggcggccttccagtcagaaagctt

SEQ ID NO: 275949 - DNA, 177 bp, Homo sapiens
  chr21:37618034-37618211
  hypo
accaaccctaaggaattcatcgaggctgtgtccaggactagcatggataccagctccaccgcgcacctcaacctcatctccaacctcctcgctcgccaccaggaggccctcattggccagagtttctacggaaagctccagacccaggtccccaacgtgtgcccccactctctgctc

SEQ ID NO: 275950 - DNA, 153 bp, Homo sapiens
  chr21:37650248-37650401
  hypo
tttcttagggccttgttcttttaggtactggcttccctcctggacatggtttatcgaagtgatgagaaggagaaagctgtgccgttaatctcccgtctgctttactatgtttttccatacttacgcaaccacaggtaacgtcatcttcgccat

SEQ ID NO: 275951 - DNA, 89 bp, Homo sapiens
  chr21:37718544-37718633
  hypo
gaactcaagtgatccacccacgtcggcttctcagcgtgctcagattacaggcctgaggcaatgcgctcggcctagtatattaattttgt

SEQ ID NO: 275952 - DNA, 45 bp, Homo sapiens
  chr21:37727417-37727462
  hypo
attgtcttccacagcgttaacaatcttttccgtagatttgctgtg

SEQ ID NO: 275953 - DNA, 46 bp, Homo sapiens
  chr21:37747436-37747482
  hypo
gcagcctcaaactccgatctcttcgagttaacgtaggacaactgct

SEQ ID NO: 275954 - DNA, 413 bp, Homo sapiens
  chr21:37750031-37750444
  hypo
aggtccagttggtgacgctgcctgtgatctcagacgcttgattcttgctgtcacatgagacgtcttaaacttgggtcatacatcattgaggaatcatttaagttctcacctctggctgcgtagtagaattacttggggagttttttaaactcccaaagtcaggctgcacctcacgttaattaagtcagcgtccttggggttagacccagataacagtatttttcaaggcctcccgggttaattccagtgcaccatcagagccaagcactgttgagttgtgtcttctgttgagtatttataaatgttgaacttgagtggttcacgaaacaaacgggatcagcatatccactttctcactggggcaagcagggggagggaggggaagcagagcggtgccccggtagagatgtaaa

SEQ ID NO: 275955 - DNA, 100 bp, Homo sapiens
  chr21:37758516-37758616
  hypo
ggatccacagactggcgtctgccggcgtggacaccaatgtcagggtaaactggggcagagatagacatccgggaacactgcttgaagcaatagttttcat

SEQ ID NO: 275956 - DNA, 206 bp, Homo sapiens
  chr21:37775029-37775235
  hypo
ataaaaataaattttgtgtgcgacaggcaagaagctaccggatgtttcacgacgacagcatgaagtctttcttccgtagactgagtttcactcccgacggatctttgcttctcacgccaggtgtgtttcgtagctttggacttaaaggaatgatggccgagtggggatgtctgctcccgttttacgctgcagcttatcagctcagt

SEQ ID NO: 275957 - DNA, 136 bp, Homo sapiens
  chr21:37780709-37780845
  hypo
tgggcagctgaatctagtcacggtgcttcaatcgaggaattgcctggaggctcaacggtgccctatggcaaaggctcactatgttctcctcgcccaagatcagaaccaggtccccggggattgcccacaggtaggt

SEQ ID NO: 275958 - DNA, 149 bp, Homo sapiens
  chr21:37781583-37781732
  hypo
ccaccgcgccctgccaaaatgtttaccttttatttttgcttttgcttagtcacagtgccttttcctaacactgcaattaatccattaggcccatcgctcatcttccatgtcctggaaaagccactcttgctgttcgctgctgtccggtc

SEQ ID NO: 275959 - DNA, 35 bp, Homo sapiens
  chr21:37795935-37795970
  hypo
tttttttttttgagacggagtcttgctctgttgcc

SEQ ID NO: 275960 - DNA, 431 bp, Homo sapiens
  chr21:37833298-37833729
  hypo
ccgctgtgcgtggccgaggtcactgagggggcccgattgtctttgtaggcagctggtggctggtaggcaggtgcggtgtttgcagtggtcgtggtggccctgggcggggcctggtagggcctgtagggtgcctcgtcctggcaggacaggcaaagcagggtgccaccaatgagcgagagggacgaggagatgaagcccaggtacagggcctggccaatctcaaacttcatgccgctgggcagcagcgggttgtagaagttctgcaccacgtcgttggtggtccaggagacggccaccatgcacaggaggccggccaggatgaagagggtgccgccgaggatggcaaaggtggtcttggcgggtgtgcccttggcgcagcgcgtgcacttcatcccgatgacggcgcaggcgcaggctatgcccgagagcag

SEQ ID NO: 275961 - DNA, 206 bp, Homo sapiens; identical to SEQ ID NO: 220343
  chr21:37847275-37847481
  hypo

SEQ ID NO: 275962 - DNA, 79 bp, Homo sapiens
  chr21:37855513-37855592
  hypo
catcagctccttgcacggccaggtggtgttgtttctgactcggggtctgcatctctctctgcgccgctgggttcaggag

SEQ ID NO: 275963 - DNA, 64 bp, Homo sapiens
  chr21:38103483-38103547
  hypo
gtagctggtcagggaggaggcgctgaggacagagccgggggacgtgtcccttttgttggtgcaa

SEQ ID NO: 275964 - DNA, 94 bp, Homo sapiens
  chr21:38163560-38163654
  hypo
acccccacccctgccggagccgagtacacaccaacccacacatccagggctctgggcagcggtgactgttcagtgagaccgctttcagcatttg

SEQ ID NO: 275965 - DNA, 158 bp, Homo sapiens
  chr21:38175731-38175889
  hypo
ctggattccagaaacgctcgcacagggcgaccttgtgtgcagaagtttattgccaaggttccagtttatgcccacgaggcgcacagcgaggcttctggaggcagcagcttgcttttggcattcccttacagagctcagagccccgacaggttttggct

SEQ ID NO: 275966 - DNA, 202 bp, Homo sapiens
  chr21:38176469-38176671
  hypo
caaatgatcttccacggggtccattagttcctcttggctggtccctgggttcaatgcaacgctcccagcaggtacggtaactgccactcatctgaaactcccaagttacactctgcctcactgacaagggcatggggcgctgcctcctattctgttttgtgggttctttgatcaccagaaggaatttcgagccactgtgcta

SEQ ID NO: 275967 - DNA, 87 bp, Homo sapiens
  chr21:38179973-38180060
  hypo
tggcactttatgttcatcaccgcgtttcatcctcaccacgaccctgttctgtggatccggctggacgcatccagaggtgggagtccc

SEQ ID NO: 275968 - DNA, 73 bp, Homo sapiens
  chr21:38248311-38248384
  hypo
agcctcagccttgcacggaggcagcacccgtgccagggcatggagctgcctgccccaccgcagcagccactgt

SEQ ID NO: 275969 - DNA, 200 bp, Homo sapiens
  chr21:38282807-38283007
  hypo
tgcactccagcatgggggacagggcaagactctgtatggaaaaaaaaaaaaatggcgctcctgaaataggactatttttttttcctgacttcatctaaggcagggattgatcatctgacaacccttggggtgggcgtttattcagcgtgccagtaccaagcaaagcaaggctccatgcaggtttgcgaaatgcctgtctg

SEQ ID NO: 275970 - DNA, 244 bp, Homo sapiens
  chr21:38299536-38299780
  hypo
cttcctcttggtatcgtgcacagtgacactgatggagccacacatgactgggttttatagtgggaatcacacgctaccatggtgtctgggtgtcgatgaaggtctccgagcacatccttcccaaatgccaagggctgaccgtcgctgaggcgagtgttttttctctttgggtcttgctactattctttccagttatatcacagtaacggagaagcacataaatcttctgcgctattcgtcataa

SEQ ID NO: 275971 - DNA, 40 bp, Homo sapiens
  chr21:38355344-38355384
  hypo
aaaaacaaaaacaaaaaaactctggcgtaagcatggtgtg

SEQ ID NO: 275972 - DNA, 191 bp, Homo sapiens
  chr21:38362969-38363160
  hypo
gtgcccagaatgcccgcatttctaccctgcccactagaaactgagggattgccacagctcccgtgaggttcagcaattccctgggacgacacagaactcagggagacactttactgttagaagattattgtaaagaacacaactcggtaacagccgagtgcaagagatgcgcagcacggggggtgaagggc

SEQ ID NO: 275973 - DNA, 151 bp, Homo sapiens
  chr21:38383159-38383310
  hypo
gcacatatgttaaacgcagtgcttgcgttgtgcacatttctgttctcgtgtttcattataaaatgtgaatatttagacatttccctcagcagacaaaggatccttttggaaaacaatcaggatatttatggcattttttttttttgaggcg

SEQ ID NO: 275974 - DNA, 120 bp, Homo sapiens; identical to SEQ ID NO: 220344
  chr21:38419197-38419317
  hypo

SEQ ID NO: 275975 - DNA, 73 bp, Homo sapiens; identical to SEQ ID NO: 220345
  chr21:38566696-38566769
  hypo

SEQ ID NO: 275976 - DNA, 182 bp, Homo sapiens
  chr21:38567963-38568145
  hypo
tgttcctcacaggttcatcccgagttactccctgagtcttcaggcgacgatggccaagggcttgtgacttctgcaagcgacgtgactggaaaccacgcagcacttcacagggatcctagtgtgttctctgctggtgattccccaggggaggctccttctgcgctgttgccagggccaccccc

SEQ ID NO: 275977 - DNA, 115 bp, Homo sapiens
  chr21:38574613-38574728
  hypo
cgaggctgtgtgtccgtcatcccagcccccggttggagcctgctctttgaactccgctgccttccttagcagcttctgtcctcttctgtgagtcagtcagcgagtgcttgggatc

SEQ ID NO: 275978 - DNA, 270 bp, Homo sapiens
  chr21:38603098-38603368
  hypo
agcctgccatcgggcgggggcctgcgaagggcagtaggcaggtatcacaggtgagctcaccagatgggggaagctgccacagactggcaccacagcttcctgcaaaggggatctcccacccggaaaagcagactcggggcaaggtaggacaagtgtcccacgtcattcacagccacaatgcagacagcgagcctctggactcaggagacaagctgcctacaaacaccccggccacgtgccacacccagggcagagcgcctctgatgagca

SEQ ID NO: 275979 - DNA, 180 bp, Homo sapiens
  chr21:38603576-38603756
  hypo
atgaaaggccactgcgtccgtcatggaagcagcagctatcccgaagaagaaacggtgtctagaaatgaatcacattactgctgaggtcagcgcttccgaagacaggctacagaggtgggagacgggagtctgagtggcccactggggtcgcgtgccctcagagcccggagaagggagacg

SEQ ID NO: 275980 - DNA, 269 bp, Homo sapiens
  chr21:38605419-38605688
  hypo
gcctgatgtgccgacgtggagtccctctggcccgcggcctcagctgggggactctgggcccaggacaatgatgcacacgtgatgcgcatgccaccgactgtctctgacccagaagtcttgtgtcttctgccagcacccgtgaaacagtaagaggctaaatggtgagcttgtaaatagggtaaactctcagaccccatgggagattcctatcattaagcaccagagtccccgagtgaagcttacagcggagtgaacgataaattcacagg

SEQ ID NO: 275981 - DNA, 142 bp, Homo sapiens
  chr21:38605997-38606139
  hypo
cccactggcaaacaggtgcacggtcccacctgtagcagggagcaggctggcgagacagaaagggcagtgcgctcaggagcagacgccaggccagatcccgttgttgtctgccttactgtgcgagcccagacagataacacaa

SEQ ID NO: 275982 - DNA, 32 bp, Homo sapiens
  chr21:38638501-38638533
  hypo
agccaccgcgcgggccagatttttccctttgt

SEQ ID NO: 275983 - DNA, 120 bp, Homo sapiens; identical to SEQ ID NO: 220348
  chr21:38673107-38673227
  hypo

SEQ ID NO: 275984 - DNA, 477 bp, Homo sapiens
  chr21:38823585-38824062
  hypo
tcgaccgtagtagacggtttaatgtcctaggcctttgcattcattcactcatctctcttcctctccgtccctccatccctccctccctccatccctcccccacccattgcaacttccagtcctgcaagctccattcctgtaaacgcccacacaagtgatcttttatatcatatttttattgtaccttttccatgcctatagcacaaataatgagggttacagttgccctcattattcagcacggctgaacaggtttgcagcctaagagcagtaggctctaccgtctagcgtgggcgtgcagtaggctccaccgtctagcgtgggcgtgcagtaggctccaccgtctagcgtgggcgtgcagtaggctccaccgtctagcgtgggcgtgcagtaggctccactgtctagcgtgggcgtgcagtgtatactcagtgatgttctcacaaccatgaaatcgcctgacagtgaatttcttag

SEQ ID NO: 275985 - DNA, 154 bp, Homo sapiens
  chr21:38832660-38832814
  hypo
atggggaggcagtagcgaacaaaaggggtgggggagtcttgcggcgttcacatctcagaaatgttactgcgctatgagggagactttggcctctaatccactgttagccactagcctccagtcaaagttagagaaccaccggtcttcattcttt

SEQ ID NO: 275986 - DNA, 362 bp, Homo sapiens
  chr21:38918382-38918744
  hypo
gtggatatgatgagcggttatgcgggctctgcttcttgccacctacttgcaggttgaaggatgtgcctattccacatcgctgatggggcatccgagctttccttggaggtgggcagctctttcggggttggtacccatcaggtgctgtggccagaactcagattcggagtctaaattcatactcacactctatacacctggattgagatcacagtattattattttcacaatcgaactgagcaaagatacggcagccactgaagactcactgtgaggtgcgtctaagggagaaaccatgggctgttgccgaagatctgggagaaaaagtgtggaaaaggcaaaaccgcgcctgggagctcct

SEQ ID NO: 275987 - DNA, 127 bp, Homo sapiens
  chr21:38935381-38935508
  hypo
gagaccatttttcacgcctggccggctctgtgcttaagtggccccatcgcagccagagtagcctcattacagctgaagtccctggtaggtctcctccttcctctgagcccagcgcagtgccaaggcc

SEQ ID NO: 275988 - DNA, 214 bp, Homo sapiens
  chr21:39021859-39022073
  hypo
gtctgcggcaccaccgcgatgtagccagaccccgcatcacctttgctaggctgtgccttgctgacatttctgcaggtgctgcttccagatgaaccagcctgggttctgatctagccacattgataatgaatgttccttttgataccgaagcacaaaactgggagaagctgagcttcttcacttatttcctatctgtttgttctatgtctctaaa

SEQ ID NO: 275989 - DNA, 142 bp, Homo sapiens; identical to SEQ ID NO: 220352
  chr21:39726165-39726307
  hypo

SEQ ID NO: 275990 - DNA, 61 bp, Homo sapiens
  chr21:39800302-39800363
  hypo
cgggaaaaagttcccgcaaacagcttggtatgtcacctgcaccaagcgctgcccagcatag

SEQ ID NO: 275991 - DNA, 69 bp, Homo sapiens
  chr21:40047614-40047683
  hypo
aaaaatgtacacaccgcgtctctcaactgcttggaaaaatagatgctaggatggcgcttttggacggtg

SEQ ID NO: 275992 - DNA, 164 bp, Homo sapiens
  chr21:40049306-40049470
  hypo
agtcacagaaagttcgcgagctttggccgaaatgtctcatcagtgggagcctgaggttatctgcagcctccttccctcacagggcaactctaagaaccaaggagaggcaggcaccaaagggctctgaaaagtgcaaggatcggcctggcgcggtggcgcacgcc

SEQ ID NO: 275993 - DNA, 181 bp, Homo sapiens
  chr21:40056140-40056321
  hypo
ttcttatccgaagaccgtagtcatcgttcctgtcaccttggctctagaataaagcccacaccctcatccctgacttctgtagactaatttaaaaagattaagtaacgttccttgttgtcgctatcaggatgtgaacttggggtgcagccaccccagaagggctgtgcggaatggtattgct

SEQ ID NO: 275994 - DNA, 34 bp, Homo sapiens
  chr21:40082800-40082834
  hypo
tgctgggattacaggcatgcgacaccgtgcctgg

SEQ ID NO: 275995 - DNA, 86 bp, Homo sapiens; identical to SEQ ID NO: 220357
  chr21:40117700-40117786
  hypo

SEQ ID NO: 275996 - DNA, 181 bp, Homo sapiens
  chr21:40146604-40146785
  hypo
tggcaggccactccccgccccaggccccagccagagcatcccaggctccatcccaggccccatcctaggctctgtggtacaggcagggggaggatggctagtacccttcaccccgagggcatggccgcctttctgacatcacctgggagggggcaccccggctggccgaggtttaaggtag

SEQ ID NO: 275997 - DNA, 196 bp, Homo sapiens
  chr21:40168980-40169176
  hypo
tccctgacaccccccggcttatgcccgcttctctcccctcactgcctccgtcctcacacggccatcttctcatctccttgtatctcttctctgtgtgtctcttataaggacacttgtcatttgactcaggacccagcaggataacccaggataatctcatcttgagatccatcacttactacaactgcaaagtcct

SEQ ID NO: 275998 - DNA, 329 bp, Homo sapiens
  chr21:40189392-40189721
  hypo
ttaagtggctcacacgatcttccataggtcagcactgttagtgctagtccaggcaattcttagagcaaggagcagaacgaagtgagctgattaccgcagtcaccagtaatgttggtttagtgtagcaaacaagaggcggcaggcacagagtgcgtgaaaagcaatttgtaaactggctctgaacttgggagcttaaagagctgtcatggaatctgggtcctttcttctggttgctgatactggggagggcacagggtctggccaggccagcgagggaggggtcctcggaacagcaggcttgggtggtgttggtccggcccagtgttttc

SEQ ID NO: 275999 - DNA, 243 bp, Homo sapiens
  chr21:40190268-40190511
  hypo
acctgtcatttgctcgtaggggttagttactggggtaacactgactttaagagctctgccgtccgattgttctgttccaggttttggcacagagcaggcgccctatggaatgcagacacagaattaccccaaaggcggcctcctggacagcatgtgtccggcctccacacccagcgtactcagctctgagcaggagtttcagatgttccccaagtctcggctcagctccgtcagcgtcaccta

SEQ ID NO: 276000 - DNA, 183 bp, Homo sapiens; identical to SEQ ID NO: 220359
  chr21:40191659-40191842
  hypo

SEQ ID NO: 276001 - DNA, 43 bp, Homo sapiens; identical to SEQ ID NO: 220360
  chr21:40208390-40208433
  hypo

SEQ ID NO: 276002 - DNA, 36 bp, Homo sapiens
  chr21:40212524-40212560
  hypo
ctaaagtgctaagattccagacgtgagccaccgggc

SEQ ID NO: 276003 - DNA, 44 bp, Homo sapiens; identical to SEQ ID NO: 220361
  chr21:40278582-40278626
  hypo

SEQ ID NO: 276004 - DNA, 784 bp, Homo sapiens
  chr21:40316174-40316958
  hypo
ctctgtgactccagcgcactcggggtcccaattccacaccctctgcaaaggccctcgcagcctgcccgtgtctccgcctcctccccaaggtctcccctcccgcctgctcctccaacagatgggcccctggctttgcactactcctcttttcccttcctcaggactttatttttattttattttatttatttttattccggtaccacctctcagtgagacccactgtcaccccatcagcgccctctccaccctcccctgctttacttctccttatcatccagcatgcatctattcaccaatatattatttatcgcctggcttttctactaggcaaatgattctcaactggcggtgacatcgctcctcacttctcccgggggacagtgggcagtgcccggggtcacttttgattgtcacaattggaggaggcccctgacatctggtgagtggaggccagggatgctgcttaacatccttcaatgcacaggaaggcccagccacaaagcacgatccagcccaaaacgccggcagtgcctcggcagaaatgtcacctcctacaccatcaactctgtgagagcggggatttgtttgtcacgactgcgtcctggtgcccagaccaaagcctgcacatcacggtgctccgtggatgggtttgaaggagcggacctggaccagagcgtgctgtaggccacagtcagtgccggcccacccagaactggccactcagcggttacccatctctatcgctttctttcccagagtcggaaacttggaaccactttca

SEQ ID NO: 276005 - DNA, 74 bp, Homo sapiens
  chr21:40328293-40328367
  hypo
ggaacatccaccatcgtgcaccggagtccccacagcttccagtctcaataagccatggccgcaaataagcacca

SEQ ID NO: 276006 - DNA, 132 bp, Homo sapiens
  chr21:40331566-40331698
  hypo
ccagctgtggcactttattacggcagcacgggaaatgcatacagcctccaaaagagaacgaagcccttctgagagcttgattccagacatgcaagaccctgagcccaccgcgcctgggtttctgcctacaga

SEQ ID NO: 276007 - DNA, 33 bp, Homo sapiens
  chr21:40333255-40333288
  hypo
cacacatggcggggcgtggtggctcacgcctgt

SEQ ID NO: 276008 - DNA, 152 bp, Homo sapiens
  chr21:40333528-40333680
  hypo
caagactccatctcaaaaaaaaaaaaacaaaaaaaacatgtactatcctacagctctggaggctgaaagctcaaaaatcagcctcactgggctaaaattatggtgttggcagcgctggttccttccggaggctttaacggtgaattgttcct

SEQ ID NO: 276009 - DNA, 284 bp, Homo sapiens
  chr21:40340040-40340324
  hypo
agaatttgccaacacgttgagtaaacttaatcatttcttccaaccagattgcatccccgagtctctccttttgggaaatttcagaacctacactgccgcccagctctctgccttcctacaactcagcccacccatgaccgcacctcattcacggcccaggtgtcagggacagggcaagggtaaggggggttcatccccctgataataagaaacccaatgctcttcctaccttcttggtagaaatcgcctctctgggacttcatgacagccgcctttcctatggc

SEQ ID NO: 276010 - DNA, 196 bp, Homo sapiens
  chr21:40348653-40348849
  hypo
agcaggagaattgccgtggcaaccccaacctgaaaacaacgtaggcatgccaatggtgcagtgggggttcaagggcgtgattgggaaagtgttatggaagtgtctcagctagactttgatgaacgcatgggattcgtgcaggtagagatggctggaagtgctctccgggtaaaggaaccagcgcaaagaagagctc

SEQ ID NO: 276011 - DNA, 144 bp, Homo sapiens
  chr21:40354427-40354571
  hypo
ccatccgttcatgacgcgccctatccgtgctatgcaaatggtagccgctcacgacaatggcaatggaggaattggattttaaattttatttaactttattttagtgtattgtattttcgagacagagtcttgctctgtccccca

SEQ ID NO: 276012 - DNA, 427 bp, Homo sapiens
  chr21:40365999-40366426
  hypo
ctgagggtcaaggccgaaaccagctcaagatttccttcccccaccagtgccgtccctgtccccatgcagggcaatggtccacccattcccaagaaaaggcctccaactcccttcgtccagttccctgcccctgggcctgtcctcattctcgctctgctgaagttgacacaggcctcgctcctgtgcaggggtgggacgcggtgggggagctacatttagacaaggaaagggcccccaggcttctgagtgcgcgtacacacagacaggcctctgggacatattctggatggctctgggcagatggctgtgtttcctcttttttccagaaaaaaattccagacgacgcaatgatcacaaatgccaatatcctagtaattgataggactggatcacactatgtgaaaagaaaaggcgccccacaggcttt

SEQ ID NO: 276013 - DNA, 40 bp, Homo sapiens
  chr21:40425340-40425380
  hypo
aagaccactcagactcggtcttggccggctttcccagccc

SEQ ID NO: 276014 - DNA, 145 bp, Homo sapiens
  chr21:40431056-40431201
  hypo
ctttcatacacgcagtctcctcccacatccaccagctgaatggaggagatgggaaggccctggaaaatggaaccaccgtaaggcaggagcctgggtccctgagtgatgctgtggagtagactttctcccccgcaagtttctgcca

SEQ ID NO: 276015 - DNA, 54 bp, Homo sapiens
  chr21:40433691-40433745
  hypo
ggcgtcagtgtgacccgctctgagactccccagacctggcgtctcatttgacct

SEQ ID NO: 276016 - DNA, 201 bp, Homo sapiens; identical to SEQ ID NO: 220364
  chr21:40434519-40434720
  hypo

SEQ ID NO: 276017 - DNA, 42 bp, Homo sapiens
  chr21:40453322-40453364
  hypo
aggagggccaagtgcggtggctcacgtctataatcccagcac

SEQ ID NO: 276018 - DNA, 46 bp, Homo sapiens
  chr21:40463109-40463155
  hypo
tctctacatcagcttcgtccctgcaaaacagcggtaacacatctgg

SEQ ID NO: 276019 - DNA, 229 bp, Homo sapiens
  chr21:40465400-40465629
  hypo
ctgctgtctgatgctcgccccacagtggaaggagatgctaaattccgttacgcattagaggtcagtgaaaaggaagatgcagtttgttcccgtccaggcacaaggactcttgaatttgtccatagttaagaacggctcatccaggagcagagcgagaggccgggctgcgcgtcctcatctcctctcccagccttcgcatcctcctggctgcctcgcgtttcctccacgg

SEQ ID NO: 276020 - DNA, 136 bp, Homo sapiens
  chr21:40479891-40480027
  hypo
gggtggtgaagaaacgaagaggatgaaggtggggccgcccacggggacccagccccaggggcgagtgctgttgatggtgtggttttccttcagaatcctggcaccaaggtgctgcggaggccgaagcaagtacagc

SEQ ID NO: 276021 - DNA, 148 bp, Homo sapiens; identical to SEQ ID NO: 220365
  chr21:40480501-40480649
  hypo

SEQ ID NO: 276022 - DNA, 62 bp, Homo sapiens; identical to SEQ ID NO: 220366
  chr21:40488784-40488846
  hypo

SEQ ID NO: 276023 - DNA, 83 bp, Homo sapiens
  chr21:40490344-40490427
  hypo
caaccacctcccaccaagccccgcctccgacagtggggattgcaattcaactcgagatttacaggagacgacatccaaactat

SEQ ID NO: 276024 - DNA, 348 bp, Homo sapiens; identical to SEQ ID NO: 220367
  chr21:40506196-40506544
  hypo

SEQ ID NO: 276025 - DNA, 161 bp, Homo sapiens
  chr21:40510522-40510683
  hypo
tttcactgttccccacgagtaagtaagtgaacggcaaatgtgcaagggagttaaagtgtaaattcctcccggcccatataattgacttgctgaatttttgcagtaacaaaagactgctgttcaaaacatttccagtgacattttaagactacctataaaga

SEQ ID NO: 276026 - DNA, 41 bp, Homo sapiens
  chr21:40510983-40511024
  hypo
aaaagaaaagaaaagttcgcgttggtcatttttgtgctgtt

SEQ ID NO: 276027 - DNA, 112 bp, Homo sapiens
  chr21:40525158-40525270
  hypo
ctctgtggctggagacgtccaagccaggtagtgtagattctcactattcatcatagtgaccgtgtagaagtcaccacggacactgaattaggaaacactgaacctctgctcc

SEQ ID NO: 276028 - DNA, 59 bp, Homo sapiens
  chr21:40525300-40525359
  hypo
cacatatctcacacacatagagtcaagattaaatcctaagacaacgcacccaagtagat

SEQ ID NO: 276029 - DNA, 65 bp, Homo sapiens
  chr21:40580603-40580668
  hypo
cggttctcatgcctcgtgcctataggtgggattacaggcaagcgccaacacgggctaattttttt

SEQ ID NO: 276030 - DNA, 216 bp, Homo sapiens
  chr21:40693346-40693562
  hypo
ggcaacgagagcgaaactccatctcaagaaaaaaaaaaaaacaaactaaagacggacttgtccttcctctctcaaaatcctccagaggctcccatcagacccagaggaaaaggccaagtccacacgatctggcctctctctggtttgtcttacctctcacctgactgctccccttctcatagtgctccagcctcactgtggcgtgacctggcccac

SEQ ID NO: 276031 - DNA, 34 bp, Homo sapiens; identical to SEQ ID NO: 220368
  chr21:40697450-40697484
  hypo

SEQ ID NO: 276032 - DNA, 36 bp, Homo sapiens
  chr21:40705587-40705623
  hypo
gattacaggcgtgagccacagcgcctggtcgacgac

SEQ ID NO: 276033 - DNA, 523 bp, Homo sapiens
  chr21:40762267-40762790
  hypo
agctgcggcagtcccgggacagccagtgagagaaagggacatttacctagggctgtctgccacccgggggttggggtatggagtgtatgtgggagtttaaggactttgtcatggtggggctagtttgtaggtgtttctcagcaggatgaatctcccagtgttctccagcaacagcctttgctctttatcagtcctgggaacgttcacggccgcagtttgcattcagtcctgcagggacgcacacaactggctgggtcacagagtggtcagggcatagacagaaagtagcgggggactggggaaccctcctgtgacccgtgttggaaggtgctgatccccgttgtccgccctgccagatgtccagggtgctgcagaaggacgcggagcaggagtcacagatgagagcggagatccaggacatgaagcaggagctctccacagtcaacatgatggacgagtttgccagatatgccaggctggaaagaaagatcaacaagatgacggataagctcaaaacccatgg

SEQ ID NO: 276034 - DNA, 245 bp, Homo sapiens
  chr21:40764919-40765164
  hypo
cattagtggctgtgcgtgctcatctgttgtctgtggggactgggttcctaggcttgaggtgctcagtctggagagttttcctggttttattttcgcatttccctgtcctcccttctgtgtggtcggttgtgtgattggcaggctgctttgctcaccagaggtgtctttacaggctgccctgatgatctcactcatttggaagtattattctgtccctgtggctgtcgtgccgagtaaatggataa

SEQ ID NO: 276035 - DNA, 193 bp, Homo sapiens
  chr21:40820653-40820846
  hypo
atgaggggttagttacgtatttttgcattattaactgctattaagtaagcagaaaccagcttcgaaaaagcatagccaacacaacttcagctggaaaatttccaactgaccccgatagactgcctgatgccagccaatggaaacattccctccctcagtatgcgcccccacccccaaacgccttgcagaccta

SEQ ID NO: 276036 - DNA, 236 bp, Homo sapiens
  chr21:40891427-40891663
  hypo
tcaattcagtacttcggcaatggctgaaccgaagctgagatatacctgtgtcccactccaaagccacgaacagccttcccaacaagccctttcctctcggtcctggaccacagtacggttcctctacggtgcctggctggccgtgggcagtgtgcgccttggccccagagcgcctcctccgcctggctttggtcctcgcattctgtcttcagactcgatgccgttcgggccctggt

SEQ ID NO: 276037 - DNA, 89 bp, Homo sapiens; identical to SEQ ID NO: 220370
  chr21:40904967-40905056
  hypo

SEQ ID NO: 276038 - DNA, 86 bp, Homo sapiens
  chr21:40952126-40952212
  hypo
tcttgtctgggcagcgggaaaggtgaactcattgggtggttacagttttctcatgaatggtttagtgccatcgcccttggttgtga

SEQ ID NO: 276039 - DNA, 36 bp, Homo sapiens
  chr21:41281950-41281986
  hypo
tctcaggcgatctgcccgcctcggcctcccaagcct

SEQ ID NO: 276040 - DNA, 35 bp, Homo sapiens
  chr21:41711102-41711137
  hypo
agcggtagactcccccgtcccggacctgggagctg

SEQ ID NO: 276041 - DNA, 504 bp, Homo sapiens
  chr21:42447732-42448236
  hypo
ctcccaccctccaccggtactgggtggctgccccgtgtgatgggaagcagcggtggccaggccagcccaggggctgcgggctgccccagggtggcaggacccaacgggctgggacacgcccccgtttgcgaagcgtgcagatggtgggaatgaatgaactgtaacacgaacattgttattttatccagaatcagacacctcgaagaagctgcgacccttctggggcccagacctcaggactccctgagccagagccgtgacccactgtatcacccccttggagctccacagtggctgtcgtctctgagtttttaggcaccaccatgctccccttatctagatgctggctcccaaggcggacgccgcttgtggtatgcctggtccagccacagcctcacacggagccagcgctgtgccagcacctggagctgtcggccccgccacagcagcgcgtgcctgacccacccttggcaggtgtgagatctgggccgcaggcacaagccg

SEQ ID NO: 276042 - DNA, 272 bp, Homo sapiens; identical to SEQ ID NO: 220375
  chr21:42572214-42572486
  hypo

SEQ ID NO: 276043 - DNA, 172 bp, Homo sapiens
  chr21:42582372-42582544
  hypo
ggcaagggttgagccgcgtactctacacttagagaacggattctgttctcatggcacagcgtcttctttttctccagcagctaaaacactcaccggcccggagatcagccagattcaaatgactgcagctcatccgcccacagacgcagactgaccccgttccacagccatg

SEQ ID NO: 276044 - DNA, 39 bp, Homo sapiens; identical to SEQ ID NO: 220376
  chr21:42585677-42585716
  hypo

SEQ ID NO: 276045 - DNA, 57 bp, Homo sapiens
  chr21:42591778-42591835
  hypo
caccaacaaacaatcgatcggttctgcgacagacaccagctgcgtatcctctaattt

SEQ ID NO: 276046 - DNA, 94 bp, Homo sapiens; identical to SEQ ID NO: 220377
  chr21:42593386-42593480
  hypo

SEQ ID NO: 276047 - DNA, 213 bp, Homo sapiens; identical to SEQ ID NO: 220378
  chr21:42593780-42593993
  hypo

SEQ ID NO: 276048 - DNA, 43 bp, Homo sapiens; identical to SEQ ID NO: 220379
  chr21:42596858-42596901
  hypo

SEQ ID NO: 276049 - DNA, 180 bp, Homo sapiens; identical to SEQ ID NO: 220380
  chr21:42608632-42608812
  hypo

SEQ ID NO: 276050 - DNA, 85 bp, Homo sapiens; identical to SEQ ID NO: 220381
  chr21:42609014-42609099
  hypo

SEQ ID NO: 276051 - DNA, 85 bp, Homo sapiens
  chr21:42609399-42609484
  hypo
aataaaatgaatacaatatgcttttcttttctttctccaggtctagcacataccgctccaagggctttgacgtcacagtgaagta

SEQ ID NO: 276052 - DNA, 276 bp, Homo sapiens
  chr21:42613646-42613922
  hypo
aacaccaggaatgtctgtggcgcgtggcgtctacactgggtgacccatgtctacactgtgagtcctaagcgggtgcccctctctgtcgccctcccgcagccatcaagttctctggagaccttcttcgactccctggtgacacaagcaaacatccccaacgttttctccatgcagatgtgtggagccggcttgcccgttgctggatctgggaccaacggaggtagtcttgtgggtatcttttagtcttaaaggggcgaaaaatcacagatggatggg

SEQ ID NO: 276053 - DNA, 311 bp, Homo sapiens
  chr21:42617797-42618108
  hypo
taacagacagatggtgatggcggctagagccacgtggggcggggagcgccactgtcactcacgcacctttccctttctctcccggttcaagtataacgcagacaaggccatcgtggacagtggcaccacgctgctgcgcctgccccagaaggtgtttgatgcggtggtggaagctgtggcccgcgcatctctggtgagtcctcgggacactcacgggtccccgagttgctgagttacagtcacctgctgaggagcagcactgcgtgttctgagcatctctgaactattgcgccatgtatttccaattttca

SEQ ID NO: 276054 - DNA, 252 bp, Homo sapiens
  chr21:42629054-42629306
  hypo
tttgtttgctctctcctctccgacaaacagctttacattcagcccatgatgggggccggcctgaattatgaatgttaccgattcggcatttccccatccacaaatgcgctggtgatcggtgccacggtgatggagggcttctacgtcatcttcgacagagcccagaagagggtgggcttcgcagcgagcccctgtgcaggtgagcgattctggcatcgaacagggatccccgacaagagtcctttatgtaaa

SEQ ID NO: 276055 - DNA, 168 bp, Homo sapiens
  chr21:42649173-42649341
  hypo
ctctgccaaagagacgtggaggccacgtcggcttgtcatggtgtcctggaagactctccagcagccagaagaaccttctgtgctgttttcactagagaagatttgagttgcagcctcttggaaagaacatgacggcacggaacgggaggagggggctcttgtatcagg

SEQ ID NO: 276056 - DNA, 307 bp, Homo sapiens
  chr21:42676099-42676406
  hypo
tcatagactggattcgcgactgcgctgttcccgtgatccactgcgcctgcgcgggcgcctggctgggctcggcgggcatggctggggcaccctggcgccatctttttccaccgtgcgaaggcaggagcccgagactgggtgagaggacgcggggctggcgtggggaggggaaggatggacggggcaggacgctgccgcctgcatctgggaccctgagcagcccgagggagtcgcccccgaagggccccaggttgcctgcaccggcggtttcccacgtgcccaggcacctcccgttgcggctgcgcgt

SEQ ID NO: 276057 - DNA, 42 bp, Homo sapiens
  chr21:42700241-42700283
  hypo
aaatgctatattcaacgtgttttcaggcgaatacctaggtaa

SEQ ID NO: 276058 - DNA, 183 bp, Homo sapiens
  chr21:42710365-42710548
  hypo
ctacaggttactcagcggaggtggcagaagcaagtacgccaaaatctgctttgaggataacctgtaagtaccagcgtttagaaggaaaataaagcgatcctactgattcttgccccttccctgaggctgaccaagcagcagttctgcccacaggagagaaccatatgtcgttggtctcaggca

SEQ ID NO: 276059 - DNA, 180 bp, Homo sapiens; identical to SEQ ID NO: 220387
  chr21:42780052-42780232
  hypo

SEQ ID NO: 276060 - DNA, 152 bp, Homo sapiens
  chr21:42838262-42838414
  hypo
agctccggaaggagcgggcagcggatgtggaggccggcacaacaggcatctcttcagcagagtctgggcctcccccggctgctctcctgccacgcagcccttccctccctgcacagccatgcggacccacctgcagccgccaaacacacctg

SEQ ID NO: 276061 - DNA, 56 bp, Homo sapiens
  chr21:42860318-42860374
  hypo
accacaccgattctcgtcctccccgccggggcagtgtgacacgccatcacaccagt

SEQ ID NO: 276062 - DNA, 120 bp, Homo sapiens; identical to SEQ ID NO: 220388
  chr21:42896357-42896477
  hypo

SEQ ID NO: 276063 - DNA, 242 bp, Homo sapiens
  chr21:42953485-42953727
  hypo
ctccctacaccctacgcacacggcggctgttccccacgacacagcggggggcaaatgaccaccaggagccagggagtcccagggaaaggacgcagatggctcgtgtcctggaatttcatgggagccatttgaaatcatcagcaaatgacgcccgagtctataagggacctcagcgcaggggctggatgagacagggtgggcagccacaaaacagggtggtgaaggcccgaggccaggagggc

SEQ ID NO: 276064 - DNA, 164 bp, Homo sapiens; identical to SEQ ID NO: 220391
  chr21:43021070-43021234
  hypo

SEQ ID NO: 276065 - DNA, 140 bp, Homo sapiens; identical to SEQ ID NO: 220392
  chr21:43026399-43026539
  hypo

SEQ ID NO: 276066 - DNA, 466 bp, Homo sapiens
  chr21:43033366-43033832
  hypo
tctcctacagcgtgcgtgaacgggaggccaggatggccacaggccccaggaaacgcagatctcatgggaagaggttgcagtttcagcttctggctgtggatgctccgggcaatttcatgcatttccatgagttcagagaatggaagctcccctggcccctccctaccactctttgtaaatcagctcgctccttctgttcattcatccgctcattcatccattccgcacacgtgccttattgaatccctgctatgaccaggcacagggttagatactccatggagaccagaccagtcttagcctctgcactgatgaactcaacccagaagacacacgaaaagataagccacggtgtgacgggcggacgacagagcctgcgccgagacacgggcacttcagcttgatatgtggagagtgtcggctgcaaacctccctggtctctgccgccagacgcatgccaagatgg

SEQ ID NO: 276067 - DNA, 338 bp, Homo sapiens
  chr21:43050298-43050636
  hypo
ttaactcttgtttacgtcaactaacctgtggtgaactggttgcattatatgtcattttgccgaaagtcacagtttccaagaacctatcaagcaagttaagtgaagacttactgtacatacctataagaaaaagcaacaacaaaatggggagacgccccgacacatgggggtacgcctatgtggaaggttgcagaatcgctgctctcaaagttccgtgtcaggccgcctaccctgatgctgtttccttgtccacgtgagtcagttctgcagaggcctggcctggcaagcgcagccgtgacttctcgctaatcttcctgagaagccgctccaccatccat

SEQ ID NO: 276068 - DNA, 94 bp, Homo sapiens
  chr21:43069862-43069956
  hypo
tggcagccccaggccgagtccgtcagcctaggttagactctggcggggcagaaggagagctttgcttcggtgtgctggggagcgagctcacttg

SEQ ID NO: 276069 - DNA, 56 bp, Homo sapiens
  chr21:43083100-43083156
  hypo
gcagctgctggggacggggcatggcagcccatctttgggtccggtagtcaggaagg

SEQ ID NO: 276070 - DNA, 243 bp, Homo sapiens; identical to SEQ ID NO: 220393
  chr21:43088944-43089187
  hypo

SEQ ID NO: 276071 - DNA, 62 bp, Homo sapiens; identical to SEQ ID NO: 220394
  chr21:43090566-43090628
  hypo

SEQ ID NO: 276072 - DNA, 193 bp, Homo sapiens
  chr21:43102605-43102798
  hypo
cagcgctccagggcacgggctctgggccccaactaccttggcccaagctccagcctcgccgagcagctgaggcaagtcctttcacctcgtggtgcctctgattccttatctgcaaaatgggtacaacctctgactcagaaggctgagaggttttgtaggtctctcaccctgcctggcacgggcacacccatga

SEQ ID NO: 276073 - DNA, 39 bp, Homo sapiens
  chr21:43108231-43108270
  hypo
ctcctgggcaagaacgtccaatgccgcaggacgtcaagg

SEQ ID NO: 276074 - DNA, 254 bp, Homo sapiens; identical to SEQ ID NO: 220395
  chr21:43109376-43109630
  hypo

SEQ ID NO: 276075 - DNA, 826 bp, Homo sapiens; identical to SEQ ID NO: 220396
  chr21:43160962-43161788
  hypo

SEQ ID NO: 276076 - DNA, 336 bp, Homo sapiens; identical to SEQ ID NO: 220397
  chr21:43161818-43162154
  hypo

SEQ ID NO: 276077 - DNA, 346 bp, Homo sapiens
  chr21:43162542-43162888
  hypo
ggcacctgccacccacggacgccccaggcctagcagcctgcagagatggtgactagagctggaaggggctgctccagctcttgccccacctcgaagtggcacctcctgacctggggaggttaagtcggaagttttctatgataatcctgaagggaccgagcttctcgtttcaggaggacgttagtccagcactcaggatgaaaagttgtatttaccacaaaaatcctaccgtagtgcctggaatgctgaaaccctgcaacgagactctcctccgccctcatgtgaaacgcgtggggacttggaagtcggcggtgggaaggtgttaagaaaacggaaccctcccagt

SEQ ID NO: 276078 - DNA, 644 bp, Homo sapiens; identical to SEQ ID NO: 220399
  chr21:43164044-43164688
  hypo

SEQ ID NO: 276079 - DNA, 366 bp, Homo sapiens; identical to SEQ ID NO: 220400
  chr21:43165725-43166091
  hypo

SEQ ID NO: 276080 - DNA, 326 bp, Homo sapiens
  chr21:43166637-43166963
  hypo
gtgcagggctcatttcggcccacctgttacacgccttgtttctcacccaggcctggtccctcaccctgtcctgtctgtcacctctgtctcctgtgacacccacagaatgtggcggggagaccccggggtgctcaccttggaaggtgggcctaactcgcggatccccctgccagcaccgctgcatgaggcgtatcaggtggctgcaggcgcgcggccgggctctgcacacgggcggcagctcggggcggtggcccttcaccaccttcaccatgatgtgcaggatgttcttctcatctgccaagggaaggatgcgagtcaggggctct

SEQ ID NO: 276081 - DNA, 192 bp, Homo sapiens; identical to SEQ ID NO: 220402
  chr21:43168156-43168348
  hypo

SEQ ID NO: 276082 - DNA, 162 bp, Homo sapiens
  chr21:43171157-43171319
  hypo
cagcaagaggcctttctgaaagctgcagctcagggcatgaagcattgaggttgagagcccctggcacccacaggggatggggggcggcatgtcacacacctgtatacatcgtgcttggtgtcgaagagccggctcttctccctgatgcgctctggagggagg

SEQ ID NO: 276083 - DNA, 161 bp, Homo sapiens
  chr21:43176654-43176815
  hypo
agctctctcgggcaccgtgcggccccccaccttgacgtggtagtgggcatccagcaggatgttcgcgggcttgaggtccaggtgcaggagtggcggggccatgcagtgcaggaagttcatgcccaccgccgtctcgtggatgattcggaaccggagatccc

SEQ ID NO: 276084 - DNA, 676 bp, Homo sapiens
  chr21:43239693-43240369
  hypo
acactcccagttctcgctcacatcccctcccagcgccctgcagcagctgagcggcctggctgagcctggcccgtggccctggcgcctgtacccacctttcccacactcggcccgtggccccggcccccgcccccgccacacccaccttccccacactcccagttctcgctcatgtccccttccagcaccctgcagcagggtggcctggctgagcctggcccatgtccccagcacccgtacccacctttcccacactcggcacacaggtactcgcggacattgtcgtgcacacgcatgtgctccttcagcatgtccttcctggcaaaggacttcccacactgctcgcaggcgtggctcttcacacctgagaacacaggcatctgccactcagagccgagcagctccgacctgcagtggctgcaaagaggatgcaccaaggagaggggcccagcctccccagcagctagaagcgcagtaacaggggtggggtcgcctcttcagcggcctccacagagccctcccggggatcctgtgactccagtagatccctgaggacctggaggggtgagggggctgggggcgctgggctgtgagtggcagggctgataaggacgggaaaagctggagaaacagaggaaggcatgggggaggcaaggtgcgacggctctgtgtgtag

SEQ ID NO: 276085 - DNA, 111 bp, Homo sapiens; identical to SEQ ID NO: 220405
  chr21:43245253-43245364
  hypo

SEQ ID NO: 276086 - DNA, 263 bp, Homo sapiens
  chr21:43245662-43245925
  hypo
cccgggacgcgcagcgtgtttgctggatgtttaggatccagcatctctgccaagcagccaggtgtctgaatcctgagctagtgccaggatggccccctcaccgtgcagccctcggatggatgtgctcccatggatgacatcaccctttcctctcttgggcagcgccgggcatccactgaacgtgcctgggagcacctgccatgggatcggccatgctctaacttacagaacgccagccatccactgcacggaggagaccggca

SEQ ID NO: 276087 - DNA, 543 bp, Homo sapiens
  chr21:43248405-43248948
  hypo
ggagcaggcggcaccgaactgctccccaaaggccctgctgactgctccatgccgccctgccccaccccgcaggagctgcctctccccgcccgcagcaggtgcgcaggcggcctcaccttccaggtgccggcgctggtggtccagcatgacgtccttgcggtagaacatcttgctgcagacctcacaggcaaacttcttgtcgccgtgcttcttcttgtgcttggagaggttgctgttggtggagaagaatctgaaacacatctcacattggaacgtcttgtcatctgtccagagagcaaacaaacacacaacgattttgaggtaaataacatctcacgcaggcacgcacgtgtggcctgaacgtcaataaagcgcgggtgacgggcatgagagtcacggggatgcgtggccaggaagaaaacagcacctgtgtgtcatacactgtctaccccaggaactcacgatgcagagacgggaaccccggtgcttgaaaagcagacacggagctcacctttcatcaccaagcaacgccagccgcctccc

SEQ ID NO: 276088 - DNA, 104 bp, Homo sapiens
  chr21:43251938-43252042
  hypo
acatcccaccccacctgcagcgtgacctcagcccagagccagcctcacctgggccataagaggagcaccgtgacagatgctacgctgagtcccagcctaacata

SEQ ID NO: 276089 - DNA, 118 bp, Homo sapiens
  chr21:43255597-43255715
  hypo
acaagtgccgcagcggtacctgtactcgccgtccacctggtcagagggacacgccgtgagtgagatggcccagcgcagagtccacagatgccgagcccccgacgtgctgcccgggcga

SEQ ID NO: 276090 - DNA, 153 bp, Homo sapiens
  chr21:43269265-43269418
  hypo
cagcctggcattccagtgggcgcggctgactgcagggccgcacgagagaacttcctgggatgaagtcgaggtctgtaactcagctgtggtggtgcttatacaactgtagacactcaaaagtctctaaactggcgggaacactggctcatgcct

SEQ ID NO: 276091 - DNA, 564 bp, Homo sapiens
  chr21:43271129-43271693
  hypo
gttcctgggttcgtcggctgccaatacggttctaggagcacaccaatggccccggaggccactcacatcactctgcctactcccactgggccagaggtacaacaatgcacaaaaggcctccttttctcccaccatgcagcagcgttctctctgggagtgtccaccccagagggcacgtcactgagcaggagtgggattacgcagttaccctagaactccagtccttcacgtatccagtctgaacagtgagaactgggcaagcggccagctttctggatgtttctagcctctcttcgaaggtcttgttatctatcgagatactcatttctgagacgcaggcagcgttgggctccagtgcatagcttcagctgggtgaggtgctcgacacacactcagactctggtgggccctgggtgcattgggcgggcagggctctagaagcgccactgtgcctcgagagggacccctggcagggtcagggaggaggggctcaggggaaggagccagataggtggcagagggtgagaggcagtgtgtgtgtggcgggggcgctgacgcggctgc

SEQ ID NO: 276092 - DNA, 242 bp, Homo sapiens
  chr21:43273197-43273439
  hypo
accctgaccgtgggcgtgtggcctccagcactgcgggaggcacatttctgacgtgaaggcactgggttgctggtgttttatgggggcagcgcagcgccgggacactcccacacagcccattgtggacctgggattagggacaaccaggggcattttacaaagcctcaatcatactgacaaacaggacagaccagaaccttccaataagttaagaatcttaagctaccgagctactaatattt

SEQ ID NO: 276093 - DNA, 239 bp, Homo sapiens; identical to SEQ ID NO: 220408
  chr21:43290514-43290753
  hypo

SEQ ID NO: 276094 - DNA, 39 bp, Homo sapiens
  chr21:43340738-43340777
  hypo
cagagaagcgggaacgcctcctgccgctagcatcaatta

SEQ ID NO: 276095 - DNA, 89 bp, Homo sapiens; identical to SEQ ID NO: 220409
  chr21:43347890-43347979
  hypo

SEQ ID NO: 276096 - DNA, 33 bp, Homo sapiens; identical to SEQ ID NO: 220410
  chr21:43348009-43348042
  hypo

SEQ ID NO: 276097 - DNA, 149 bp, Homo sapiens
  chr21:43364211-43364360
  hypo
ggagcctaaagatacgctgttgccttataccagcctgggtgcagactcatgctcccctgaggcggcagatgcagtgtttaccctcttcccttgctaccttctgaattcaaaccttgaaaagagtttgcagccgggtgccacggctcacg

SEQ ID NO: 276098 - DNA, 89 bp, Homo sapiens
  chr21:43376405-43376494
  hypo
cttgccagaataaccggggtgaggaatccgagggcccagtgttccccgtgccatgtgtgcacacaggccgcctgcggctgtgtgggcag

SEQ ID NO: 276099 - DNA, 60 bp, Homo sapiens; identical to SEQ ID NO: 220412
  chr21:43386123-43386183
  hypo

SEQ ID NO: 276100 - DNA, 278 bp, Homo sapiens
  chr21:43392888-43393166
  hypo
acaacaatgctcttcgaaatcaaacatgcgagaaagcaacgtttaattttgtttttcatttggcgtattcacatttccgtcttttgcttttggtccatgtttgctctcctttctgtgcttgtcacgggcatctggtcactcccggcctactgcattcctactctttctcatcccagttcaagcgtgttccccaggccagcctgccccttgcatctctgccaagacgttgtttctcacgcacctgggaaggtgtttcacatgcccgaacacgctgaggg

SEQ ID NO: 276101 - DNA, 87 bp, Homo sapiens
  chr21:43393501-43393588
  hypo
aggtgcggagctgaacgcttcccgcctgaggcttcatccgcccgcaagtgcatcaggactctgcttgcaaagcgacgatcatttcct

SEQ ID NO: 276102 - DNA, 65 bp, Homo sapiens; identical to SEQ ID NO: 220413
  chr21:43481098-43481163
  hypo

SEQ ID NO: 276103 - DNA, 100 bp, Homo sapiens
  chr21:43506200-43506300
  hypo
cagtgtggacagggcgctgcgtgtccccaaggctgccgcgtgtccccaaggccgccctccctgggggatggtctggcttcaggaccggctgctgacaggg

SEQ ID NO: 276104 - DNA, 209 bp, Homo sapiens
  chr21:43526203-43526412
  hypo
gtgacgcctcaggccgtgcatggccggggaggcggccctgcctctgcactcttttgactccatgactactggtgtcttcggacgccagagtcgggggagcaaccatggggcaccgcccctgcctggggaggcagcacgaggcctgagcccagcttacagggggacatccacccccgctgagagccccaccttcacggcgaggatctgta

SEQ ID NO: 276105 - DNA, 96 bp, Homo sapiens
  chr21:43544448-43544544
  hypo
cttcagagggagcccgtgccggctctgggttggggaagtggccttctgggaaggggctcgacctagaaaggaggccagcgtcgttccaagggtgag

SEQ ID NO: 276106 - DNA, 234 bp, Homo sapiens; identical to SEQ ID NO: 220414
  chr21:43546441-43546675
  hypo

SEQ ID NO: 276107 - DNA, 390 bp, Homo sapiens; identical to SEQ ID NO: 220415
  chr21:43547671-43548061
  hypo

SEQ ID NO: 276108 - DNA, 148 bp, Homo sapiens
  chr21:43570325-43570473
  hypo
actggttttgatgacggcattttctgcccctgtaccgcatggtaggccagggcctccctcccacctggctacgctgcgcctccaccttcactctcagtctctgtaaagacatgttttgagtgcttggggcagtcgctgagaatattaa

SEQ ID NO: 276109 - DNA, 233 bp, Homo sapiens
  chr21:43573759-43573992
  hypo
tttgggcagaggcaaggtttcgaacatgaatgtttgttgaacttttattatgtgctgggtggtgaaccatgcacttcacagagatgaggcccttgaatgtgctcttggcggcaggaagcgttttccttattcttcagccagagaaactgagcgcagagcgaagggagcttggccaaggtcgtccgtgagcggtgtcgggcctgacctagcacgccacacctgggcaggtcacc

SEQ ID NO: 276110 - DNA, 71 bp, Homo sapiens
  chr21:43638119-43638190
  hypo
ctcccacttaaactcataaccgtgtctcctttctctccttcgatttgagcggctgaatttggttacagtca

SEQ ID NO: 276111 - DNA, 44 bp, Homo sapiens
  chr21:43675552-43675596
  hypo
tgtgtgggtgtgtgtgcatgcgcgtgtgcctgtgtgcacatggt

SEQ ID NO: 276112 - DNA, 193 bp, Homo sapiens
  chr21:43699162-43699355
  hypo
tccttcccatcccccggcctccctgctttcatggggtgtcggaagcacaatccaatctctttgtctcggatagccctccatcgaggtcccaaagacccctccagatgctggcctgcaagctgaggggcggctgtgggggctccaaggagagacggtggaagtggtcactgatgctcggcgtggaggaggagcc

SEQ ID NO: 276113 - DNA, 114 bp, Homo sapiens
  chr21:43699804-43699918
  hypo
tagctggtgaaagtcgctctccccatgggctgggcgcacagtgagtgctgctcagcaggctccgtgctgaagtcacagcaagccaggcccttggcctgccggagctggaagacc

SEQ ID NO: 276114 - DNA, 455 bp, Homo sapiens
  chr21:43725805-43726260
  hypo
acccatcccctccactgctgggaaaaggctgggcaccgcccacactccatgcagctctctttccctggctcggaatcgctgcaggcgccacagaccagacgcgcactgttccccactcctgcttatcggccgcgcggcatccccttgtcgcagcactccagcatccatgcagccgcgcggcaccccgtcttcggagcactccagaatccatgcagagcgcagcaccccacatccagagcgctccagaatccatgaagcacgcggcaccccctcgtcagagtgctccagaatccatgaagtgcgcagcaccccttaatcggagcgctctagaacccgtgcagcgagcagcaccccacacccggagcgctccagaatccatgaagccagcagcaccccacacccggagtgctccagaatccacgcagcacgtggcatctcctcgtcatagcgttcta

SEQ ID NO: 276115 - DNA, 237 bp, Homo sapiens; identical to SEQ ID NO: 220416
  chr21:43736993-43737230
  hypo

SEQ ID NO: 276116 - DNA, 32 bp, Homo sapiens
  chr21:43767096-43767128
  hypo
ccgttcacctctgccggcgggaccctcccggg

SEQ ID NO: 276117 - DNA, 424 bp, Homo sapiens
  chr21:43767524-43767948
  hypo
cccacctctacggacggaggaggaatcatggtgtccgggaaccagacagagagtcccacagcgacgttaccttccacagacttcgggaagaagcaccagggcacttcaaagatgaagttggagaagcagcacttccgagaggcgcattcctcggggctgatgcccgggtagccacagtttcttcggtctgagacctccatgacgcactgatccgactctgccatgggacaggcacagcaccgagacccagtcaggcctgctgtgccctggaaagctccaccccttcctcctctgagagcagcgctgatttgcagcctccgtggatcatgaggtgctgcctggggcagcatcccccgggacggcctcccccggggactgtggaagtgtcggcccctgggaccgcctcccccggggactgtggaag

SEQ ID NO: 276118 - DNA, 197 bp, Homo sapiens
  chr21:43772764-43772961
  hypo
tcaggattcctgctgcgaccacctgacccatgcaaaagagaccacttctcagcctctctcactctcctggccctggcggaagcctgtgttgtcataggcatgcttccctggaatcctgctcaggcccccacgcagggacactgagtgcccacagagttgggaaaccattacacgagatgggacgtctgcaatagagt

SEQ ID NO: 276119 - DNA, 50 bp, Homo sapiens
  chr21:43785262-43785312
  hypo
gatcatggacctgagtgacccgcaaagacgctctgagccttgagccagag

SEQ ID NO: 276120 - DNA, 222 bp, Homo sapiens
  chr21:43786526-43786748
  hypo
ggcctcggccagggtgccgagggccagcatggacaccaggaccagggcgcagatcaccttgttctccatggtggccattgcctcctctctgctccaaaggcgaccccgagtcagggatgagaggccgcccgagccccggattttatagggcaggctctgtttgcttaaagagcgttagataacatttgcctaaggaggcccggggatcctctgagacaataa

SEQ ID NO: 276121 - DNA, 550 bp, Homo sapiens
  chr21:43791372-43791922
  hypo
cagccagagctcactccctccggccacacccttcgggtgccactcaaaacctccggccatggctcacaccgtccagccaccgctcataccatccagtcaccacttatgctctctggccaccgtgcactccctctgaccaccactcacactctccggccactgctcacacactactgccaccactgagaccctccatccaggtctcacaccctccagccaccactcacttcctccggacaccactcacacactgtggccaccactcagaccctccatccaggtctcacaccctccggccactgctaactccctctgtacagggctcactccctccggccaccactcacaccctctggccaccactcactccctccggccaccgctcactccctccggccactgctcactccctccggccaccgctcacacccactactttgcctggccttgctctacttttgagttctgtgtatgacacgagctgatgctgatctgctgagcaacctgttccgacagaagaatgccaagtccacaacgcacacaggagaga

SEQ ID NO: 276122 - DNA, 227 bp, Homo sapiens
  chr21:43815455-43815682
  hypo
aaatcatcaaggccaaaaagcgatcggaatgagaagggggcttcaacagcaggcggatcattttcccccatggtgactatttcaggacctctgacatccggctccgcctccacctctacctccttagccgaggaagaacagaaagcatttgttcccctatttatacttgtagcatcaggtgcatcttggtcatacggtaaatctttgaaattcgacagtccacacaa

SEQ ID NO: 276123 - DNA, 460 bp, Homo sapiens
  chr21:43825720-43826180
  hypo
gggttcctcatggacgcccgctgtttccagtctgcattcctgataaattacctttgctatattccattctgtttcatttggtccagttctgcccaattcaatgcaatgtacttacgtcccgggttaccgtgatgaataagactcagtcctgtgttcagggagttcttggtctagcaggggagagccgtgggtgcaaggggactgtgtaagccgtaacaagtgcctgcctgggtgctttggaaagggctgtttcccagcagagaggtgtgggaggcgagcctggggatcagggtcgctgatgctggggtgaggaaagcgtgtgtccgagccaggggcacgttccgcagggtgggtccatttgatctaggcagtggggggggggggggcaggccagggagagggattgcaggagcgggcggaggtcaggtcctcagccctgagaccccgtgccaagggctga

SEQ ID NO: 276124 - DNA, 94 bp, Homo sapiens
  chr21:43864679-43864773
  hypo
tggactcctgcacgcggccactgctcgggctgccgccccgggaatgtggggattttgcccaactcgtgagaaaggtacgcgcccactcttggct

SEQ ID NO: 276125 - DNA, 36 bp, Homo sapiens
  chr21:43867444-43867480
  hypo
ggaatatttccctccggctttcgcctttgtaactcc

SEQ ID NO: 276126 - DNA, 42 bp, Homo sapiens
  chr21:43968301-43968343
  hypo
gctcgggcctttcagcggctccaggtgcgttgatgtcgagtc

SEQ ID NO: 276127 - DNA, 93 bp, Homo sapiens
  chr21:43969268-43969361
  hypo
gactggggagaacttcgcacacaccttccgccctggaacaccttctgtcctctaagaagagcttttctcacccaggggcggccaggcctgagg

SEQ ID NO: 276128 - DNA, 213 bp, Homo sapiens
  chr21:43981535-43981748
  hypo
tagtactcacaaggcgggatgcggtagcctgtacgcctgtgtgctgacacaatggtcggaattgtttcatctgtgtgtttccaggtggcttgataatgtacaatgatttcagttccagggaagaagaaggagccattcgatactcagtccactgcacccggctatacgagaactcttttaatagctaagttttccaggcgatgtagtatgaaa

SEQ ID NO: 276129 - DNA, 214 bp, Homo sapiens
  chr21:43983784-43983998
  hypo
gttaactactaattgctcctcggtataaatcaagcttatgaagccagagtcccgtgcacgggtcctgttctgccatggtgtgtcgctgcgatgcgtgaaggagatcctcactgtttcacactccgttgtcatttcaatagatcaccttgatgccaaaaaggcgggggagctctccaccctgtttgacgtgggcggaatctttggtgagttcatt

SEQ ID NO: 276130 - DNA, 48 bp, Homo sapiens
  chr21:43986296-43986344
  hypo
ccttggtggggctggcggggctgcagcagcctgcgacctgccacctgc

SEQ ID NO: 276131 - DNA, 183 bp, Homo sapiens
  chr21:43988059-43988242
  hypo
cccaggaaggccctggctgtcgaggaatccagcagacacgtggatgtgtctgggaaggaaggccggcgcagctcagggcaggggcgcgcgttgcgcaccttcacgcctctcacgctggctgctctggggcctcagggaggagcaggactgtgcggaacaaacgttttttatttgaagagaatc

SEQ ID NO: 276132 - DNA, 663 bp, Homo sapiens
  chr21:43991049-43991712
  hypo
gtcctgactgtccgcggagctgccgcgcccaccttgatggctgctgcgttacaccagaggcaggaccaggacctgactcctccaggctccactgcccatcagtgcctgctgcctgctcagtgaatggtcaccatggaaacggcgctcaggcctacccacccccaccaccacgccttggtcattgttccttccatgagtgagtgctgcccagcaagacaaagtacaggctccagtgggaaggccaccatgtcagccaagtcccttcccgaaggaggtgcccgcatgcttattcagtgtcactgtccactccttggcagtgactcgggtggaggcgaaacatgactaatcgtaaatcacccctgccttctcccaagtgccacacggtttgttgacacggtgtgcgcctggggcgttcacagtgcttagaatcgcagaggttgccgtttctgtacatttcatgcagagcaattaaatagggcactgcatttttcttcaagttaatttttatttattaaagtaaaacataatgtaccttagaagctagacagtcctacaagcttattatgttgtacagcggcgttccgtccccctccccagccctctctttctagaggcagccaatttcagctgcctctctctgcttacctacgtatttccatgttt

SEQ ID NO: 276133 - DNA, 133 bp, Homo sapiens
  chr21:44003047-44003180
  hypo
ggctctgcctgtcacgcacgtctgcgcttgccgtcctgtggaagcgtggctctgcctgtcacgcacgtctgcgcttgccgtcctgtggaagcgtggctctgcctgtcacgcacgtgtgcgcttagtgcacatc

SEQ ID NO: 276134 - DNA, 171 bp, Homo sapiens
  chr21:44042062-44042233
  hypo
cacatacaaatcaccgcttgtttcccaggacatctcagtgccaacaactccctcgcagcacatgactcccccggcatcttccgaaggcttgtattttctccacgagccattacctcttgaaaaactttcacaaagaagacgtaagggcttaagtggcgtggaaagtgggtt

SEQ ID NO: 276135 - DNA, 160 bp, Homo sapiens
  chr21:44042441-44042601
  hypo
ggagaattcttgagcgcgtatacagacaaaaatctcaaactggtgtatgtacttactgagatttctgaaataggaaaaatctactcatacccctatgaggaataagccctcctcttgtccccattgctggcagggcacactgtctcgtgttctcttagga

SEQ ID NO: 276136 - DNA, 223 bp, Homo sapiens
  chr21:44046313-44046536
  hypo
gcaacgagtgtgcgcgtgctcttcccaggcgtgggctccgccgcacgtggtggaaggaactctgctccacattgaggagcctggtttggacaccaacaggctaagctcccacataccccaaaaacacctggcccagggatcagcccttccaattctacaacgaggtaagtcacggaccagcacagcctcgggggcaggtccaagacaacggctgtgccttccg

SEQ ID NO: 276137 - DNA, 134 bp, Homo sapiens
  chr21:44053075-44053209
  hypo
cccacttcacccaccggtgcccttctctccaagcgaggttctccaccccacaccgggaccactgggccaggtcattctttgctgtggggccgtcctgtgcactgtagggtacttagcaccgtcctccatctctg

SEQ ID NO: 276138 - DNA, 147 bp, Homo sapiens; identical to SEQ ID NO: 220421
  chr21:44057645-44057792
  hypo

SEQ ID NO: 276139 - DNA, 109 bp, Homo sapiens; identical to SEQ ID NO: 220422
  chr21:44065364-44065473
  hypo

SEQ ID NO: 276140 - DNA, 82 bp, Homo sapiens; identical to SEQ ID NO: 220423
  chr21:44065918-44066000
  hypo

SEQ ID NO: 276141 - DNA, 274 bp, Homo sapiens
  chr21:44069369-44069643
  hypo
gcagatgatgcccacgggcaatggttcagtagctgccactgaccatggctctgacccgccaggccaggacggctagagcacatgctgggagctgctggccgtggcaggacacgctgcctggacaccttcttttgcctttgggaaccccctttagactttcccggggtgctcggactttccttcccagtattccaatctcgtgggaaggtgatcactcttcaaggataggccagacccttctcttctcctcatgtgccttcgcttgtccctttct

SEQ ID NO: 276142 - DNA, 298 bp, Homo sapiens
  chr21:44077994-44078292
  hypo
gaacccaggtctgaacacatcggtggccgcttgagtttgcggggctgtttctactgtaaaccagagcagtgaatgcgcacagcccaaagggaggagccgcgctagaaagtgttcaagcgtccgcagaagtcggctcccagttcttaatagtttgccacccaccgtggctacgccacacctacgcttgcctccacccgacctatgcctgcccccttcacatgcgggagcccagggctccgtgccctgggcagctggtggggtctgcccaggccttctcgtgatgcttccacccagcctg

SEQ ID NO: 276143 - DNA, 205 bp, Homo sapiens; identical to SEQ ID NO: 220424
  chr21:44082373-44082578
  hypo

SEQ ID NO: 276144 - DNA, 308 bp, Homo sapiens
  chr21:44088802-44089110
  hypo
catgacaaatgagccctgtgcggaggcccgggatccgcgcagatgccggcgcgggggaaatgggccctgaaatcccaccgtcaggccaggcagctctgagcgtgacctggagggctgttcagacggtctgggtagccgtgtcctgcgcatgaacatcctccgtcgggagaggaattccccacggattatcagagctgctccctccaccccccgccacgtcccacgcgggccacatcaactccctctgcagcctctggccagcggctgagccctccgtgtctcccctcgttaatgcctccttcaccatc

SEQ ID NO: 276145 - DNA, 373 bp, Homo sapiens
  chr21:44099305-44099678
  hypo
gtggaagaaccttccggaatgcctgcccgcaggctgctgctggcatcgagtctgtgtcctattttccattcactgcatgcatcctccaagtatgatttccactcggaaccctgagctgcctcatccctcgctccgtctcccctccctcccgcccagctcacactgaaatcacgcctcgcgttcagcggctggagtcctggtggattgctgcttcggggctctcagaaatccctttacttgagtcttggttttacaggaagaccatgaagcaccccccaggagctggagctcctccttctggacccagtgtctcttctcagcctcacgacgaggagacctgctcatggagctgctgcgccggcctgagctctga

SEQ ID NO: 276146 - DNA, 94 bp, Homo sapiens
  chr21:44102122-44102216
  hypo
accagcgaagagcgcggctgtccaagcccccatccctagggctcacgcctcatgcccaaactcgcacccactttggcgccgctggagactaatg

SEQ ID NO: 276147 - DNA, 122 bp, Homo sapiens
  chr21:44110038-44110160
  hypo
gatgaggatacaggcgaagaagatggagacacacgcggatgaggatacaggtgaagaagatggagacacacgcggatgaggatacaggtgaagaaggtggagacagacgcggatgaggatac

SEQ ID NO: 276148 - DNA, 128 bp, Homo sapiens
  chr21:44110392-44110520
  hypo
gaggaagttagacgcggatgaggatatagatagatgcatagggtgtggatctaaccgggtacaggtgatgcggaaacggatctagacagcgatgtggaaatggatctagacagcgatgtggatgtgat

SEQ ID NO: 276149 - DNA, 572 bp, Homo sapiens
  chr21:44112761-44113333
  hypo
gctggcccgggacacgccactgatgctcttctgacccaggggcttttctctcccgcttccgtccctcttccctcgccggcaggtgacgttactggccttttcttttttggccctgcctcccccttggcttctcccctcttcctctcctccactcggtgcctggtgacatgcggccatcctcagagatgtgcttcggggcccgcacgccttgctcctcgcactcttcctgcaccggagccgcggtgcgaggcctcgggaatgctcaccgtttctctcccgccccccggccgcatgctgcagccattccctcaccacatgtccaggagggagccggcatcctttgctgactttcttgctgtgactatggtgctgcgtggaaaaggggccgtgggaaggctgggcaggtggctgctcagagccccacctgacacggtgacccacggggcctggaaattcactgccccgatttccacacaggtgcctgagctcctgcagagaatgcctgagagcgagacgcatgcccgtcaatttgtgctttcaggcgtcctaagcacacacgcctgctcttattt

SEQ ID NO: 276150 - DNA, 34 bp, Homo sapiens
  chr21:44129779-44129813
  hypo
tgtttgtttgtgtgtgtgtgcgtttgttttttga

SEQ ID NO: 276151 - DNA, 42 bp, Homo sapiens
  chr21:44156220-44156262
  hypo
tcagccttccccatctcctacgccccacctggaagccagtgc

SEQ ID NO: 276152 - DNA, 155 bp, Homo sapiens
  chr21:44159325-44159480
  hypo
atgggcagagccgacgtccaggctccacggtagggccgtcctgctgctgtctgcagacctctcaggcttgaggccccccgccccacaggactggcccgctcctccctctggattgaggtggagcagggctggcagtgggtcgaagaggggagctg

SEQ ID NO: 276153 - DNA, 150 bp, Homo sapiens
  chr21:44164005-44164155
  hypo
tggggagggctccccgtaccagttgggctggggctgtgggctttgtttgcctaaaagaaaggctggtgcagttcggtacagttcaggcttgggagagtgcagtctggaggcagccaccctgcttgcgacctgcttgtcagtggtgtgact

SEQ ID NO: 276154 - DNA, 136 bp, Homo sapiens
  chr21:44176666-44176802
  hypo
ccagggctgtggcccgtgagcgtggcctgcctctatcctccgagggcccagggctgtggcccgtgagcgtggcctgcctctatcctccgagggcccagggctgtggcccgtgagcatggcccgcctctatcaagtg

SEQ ID NO: 276155 - DNA, 473 bp, Homo sapiens
  chr21:44180220-44180693
  hypo
cctgccccgggtgccgtggtgtggcccgctggacgttctcagggtccctgtgtcacctcattggtacctgtggtaaacctggaacactgttgacctctggttgggatgagggtttggcagagaatgttcaaaccagcgcacagccttctgggtggctttgggaggagaggtgggcgggcccaggcacagggtgactcggaccccctgcctcccgcagttctgcgtccacgacaactacagaaacaaccccttccacaacttccggcactgcttctgcgtggcccagatgatgtacagcatggtctggctctgcagtctccaggtgggtcctgcccgctgcacacccagacctctactctcgggggtcagacggaggcccccttccagggagcggcagccccatcccaccaagagagccacaggcgtggggtccccagccgctccgcccctcctagggacgcacccctgcccac

SEQ ID NO: 276156 - DNA, 153 bp, Homo sapiens
  chr21:44188342-44188495
  hypo
cgtccaatggaagtcgcagagccttgggtggactgtttattagaggaatattttatgcaggtaagagtcttgcagagcaatcaagcctccagccactcttattagccccacttagtaagggtttgcgttaaacgagcacgcctgggtggtccc

SEQ ID NO: 276157 - DNA, 429 bp, Homo sapiens
  chr21:44190665-44191094
  hypo
ggaggcagcagagccggcacgagggtgtccaggagctgggactggcccagaggtttccgcacggagcacctgacacctgtttttctccgacgtttcccattgccttaagaacgagggactctgaataaatccgtgtgtctctcccagctcttccccatggttgaggagatcatgctgcagccactttgggaatcccgagatcgctacgaggagctgaagcggatagatgacgccatgaaagaggtaaaacacactgagaagagcctgccttccttgcggcaagcaggcacgctgccctccgcactcccgactccagaagcttggacgtgccaagcagggcaccactgaaggccccgtggacaggcacacgtgtaccttccatcagaaagcctggctcagtaaaattagggaatgcgatgagggaaacca

SEQ ID NO: 276158 - DNA, 145 bp, Homo sapiens
  chr21:44191718-44191863
  hypo
tgtgcccaccaccccgtcttttctgcctgggcgctcctgaagcccatgtggcccacaatgcccttttgagcactgagccattttccaggcgtagccttgggttggtctcatctccctcgactgacggccccgtgctccccatgcc

SEQ ID NO: 276159 - DNA, 337 bp, Homo sapiens
  chr21:44205101-44205438
  hypo
cccggccccatgcgcgccacatggctggcttgttctgtctgtcattcccctactccttgttctgtccggggttcctccagccccacacctcagcatgcctgtgatgccaccctcagacagccgcaggccccgccctgtggtggtccccaaaattccaagtccgactccaatggcccgagaccggccaggctggcagtttcatctggttagggatgcgtgggctcctccacattccaccttttgagatgtgctgtaaccttctacctggaccccagacagacagggtcagccgaagccccaggcactcctggactcaggcacccgtgactggcagcag

SEQ ID NO: 276160 - DNA, 445 bp, Homo sapiens
  chr21:44275677-44276122
  hypo
agtctggcattgagagcaaacgtttccaacggcgaagtgacttttccactcaagtcaggcgactgccggtgtctacaagcactcagtcgcccaggagtgaacagaagcagctacctggggggcctgggggtccaccagctcctgcagactggccaggtgacagcagtgcagctggcggccgctcctgtactcccagagcctcagggtgccgtcctgcacaaaccaaacacacaggttagcacatggttgtggggcttccgtcaggtagggtgacagagaggacagctgcgtgtggtcggggttccactccgtgacagccatgccacccaccctcaggaattaaaggctctctgctctgactgtgtaaatcgctcatgcaaatcatcaaggacaacggtggggaacggaaggtgaccgattccctgtttctcgagtgccaatatgc

SEQ ID NO: 276161 - DNA, 360 bp, Homo sapiens
  chr21:44283356-44283716
  hypo
acagaccgggcagacgttgattcagcctgtaccccacataccatgtcccccacgtactgcgtctaacagcatggacaggtgcctgagccttgacagggtagacattgactcagcgtatgccccacgtgccacgtcccccatgtaccgtgtcccacacctgccatgtcccccacctaccacgtcccccacctaccacatctaacagcatagacaggtgccccagctctagacggccacacccgtgtggctccagcaccgaaaaggagtagacgtctccagacttgtcggccaccaagaccttctcctccgaggctatgaaagtcagggctgtacacctccttgccacggtcctagaaggcc

SEQ ID NO: 276162 - DNA, 533 bp, Homo sapiens
  chr21:44338148-44338681
  hypo
gttcctaggattgtcgcatagtacacttaggcggaggtatgcggcataagggttagtggtgttcgtacagtaccaggccttttttgacaagacacaattgaggtagcttaagttagaaggagaccaggctccagggggtaaccttggccaccactcagctatggaggcattgactgttagggtttggtgacgggttttcacctacggcgcgatgggttttatcagtccacttgcgggatatgcacaccgtccctcatactgggttggtaagtgtccaggactgcgggcattcctgaggagtgaaagtgagtctggggttttgggatgcctgtaagtaagggggaatgtctatcccgtcccacagccactgttcactcataaagctcccccgcatacccaacaattggacacattcatggtaagcacaatggttctcctagatctacaaacagattttttcctggcttaggaagggatgcatctgcttatagtttttgtataaaggaatggaaatgccgcgggcgattttcagg

SEQ ID NO: 276163 - DNA, 44 bp, Homo sapiens
  chr21:44390976-44391020
  hypo
tctttagaaaccacttcggtgctcaacaccgggaagagggcccc

SEQ ID NO: 276164 - DNA, 120 bp, Homo sapiens
  chr21:44439927-44440047
  hypo
aggcgtgagctactgcacccagctctcaagaaggttggtgttcttttttccaatcttttgtgtttttctcatcttttagaagcttctctttttttgcaggtgctctgatttttttttttt

SEQ ID NO: 276165 - DNA, 246 bp, Homo sapiens; identical to SEQ ID NO: 220427
  chr21:44440492-44440738
  hypo

SEQ ID NO: 276166 - DNA, 293 bp, Homo sapiens
  chr21:44441270-44441563
  hypo
ccacacagggttcccgtgcatgggcctcgactacaatcatttccctgtccgatccttggctgttttctccacctgcagttgtaagtacttggatatgtgagaatttcctatgctttctaatgttatttttcaactttaaaagcttcagttacagttaaaccaagatctcagcatcttgcatcaagatgatggttcatctaagaacaagaggggcgtcctgccaaagcatgccacgaacgtgatgcggtcctggctcttccagcacatcggggtaaggacggctgggccagccc

SEQ ID NO: 276167 - DNA, 237 bp, Homo sapiens; identical to SEQ ID NO: 220428
  chr21:44444700-44444937
  hypo

SEQ ID NO: 276168 - DNA, 390 bp, Homo sapiens; identical to SEQ ID NO: 220429
  chr21:44448042-44448432
  hypo

SEQ ID NO: 276169 - DNA, 46 bp, Homo sapiens; identical to SEQ ID NO: 220430
  chr21:44448696-44448742
  hypo

SEQ ID NO: 276170 - DNA, 203 bp, Homo sapiens
  chr21:44448964-44449167
  hypo
cgagctcaccatgtcggaaggtacaggtggccggccaaggccagacatggtggaccatggggtggggattatgaacaagaggcctggatcaggcctgttagctgtgagcctcaggtaatgtggtgaacgagagtgcgtggttctctttctctgcaactaaaacatgaggaagctgcattctgcgtgcacgggagctctcagta

SEQ ID NO: 276171 - DNA, 145 bp, Homo sapiens
  chr21:44451416-44451561
  hypo
tggcgagggcacctcggcagcccccacgggttggctcctacgtttgcgtttgtggctggtctcctggtgtcagtgttctcttgtacgttgttgctttcgacttttcagagccctcctgctcacttgaccacgtgagatttggaat

SEQ ID NO: 276172 - DNA, 662 bp, Homo sapiens
  chr21:44479014-44479676
  hypo
gatggtcgggagcacggtcagcggggctgacaggcccagctcctgaacacggaggtgccaccacctgagggaagagggcaggtcggggggatcaggataaggacaaacgctctcgcacccccgccggcagcacctcagcaggaggccacagggaccgctctcctgcctgtcacactgggcagggccagcacaggccacggggaccgctctcctgcctgtcacactgggcagggccagcacaggccacgggggagtgctctcctgcctgtcacactgggcagggccagcacaggcagcgggtctccggccgagcggtcttaccagggcttcttctccgtgaggtcctcctccttcagaaagcccttctgcagcatccacctgtcgctcaggaacttggtcctgcgggatgggggagtcaccgagtccccgcagggccccaccgggcccccgcccctgctgagtggcacgcactgcctgcccagcccctctcctggacctcactggtgcagcagagacccccaagtgctggctggaagccccagggggaagcctgggggctggacttcccgcccccatggccaacaagcgtgtgtgagcatgcacacagccatcgctcaggcactcagataaacacgtcctctcatgctcgctctctgcccctc

SEQ ID NO: 276173 - DNA, 116 bp, Homo sapiens
  chr21:44480610-44480726
  hypo
tgcgcggccttcacggccaccgccaccgtgctgccagcactgccacctgcagagagggccacgagtcagacgcgccagggtgagcgtgcgtgggtgcacacgtatgcatgaattgt

SEQ ID NO: 276174 - DNA, 582 bp, Homo sapiens
  chr21:44482537-44483119
  hypo
gggagccgctcccacgtgaccaagagggtgaacagcctcatggtggaccccgtgtctaggcggtaggaccccagaggtctcaccccagcctctccccctgggatcggcacgtctgcagactttccagttccaacacgttttgcagacagcaaaactgcccgccagccccactgagcatccgtgtgacccacaccggcccttcggtctctgctctccctcaggccaaagtcagctttttggctcttaacagacttttccggggccttaattttcacacgttttccctgctccctgcctgtgccacctgggctacatcccttggtgaggtcaggccacgtgtgcggacatcgtcccccagtctactttgtctcgaccttcgagaccagcttctcaccatgcgtgcggggcttgcccttctgtttcagtggagaagctggttggggcccagggtcagccaggctccccagtgtgagggtgagttacaggctgcaccggcactgtggccgggctctggactcgacctaccgtcctgtccagcaccgtggggatgaagtcgtagccgatcccttccacctcgtaggt

SEQ ID NO: 276175 - DNA, 456 bp, Homo sapiens
  chr21:44483490-44483946
  hypo
gacagaccaccctgcggcggagcagcagagcctttggggacaaagggcattgctgggcagtgacgtctttttcaagggcaagcaacagggagagaacgcccttgtctcatcagcgggacctttctaggcacccgtcctcagacctgctcttaaccccgagtccaggaaccctctcccaactcccacaagccccagttgaggggcagactcaggaccagaggacttagagctcctggctgatcctcagaggcccccagttggaactccgaccccccactcagcgcaggaaggttctccaagacactggccggtgagcgagcacccagccccagctccttcgggtcacgagctgctggtcccttatgtgtcaagcacccttgtcttcccaaacacctcccaggcagcgcagaaataccgcgggagacagcgtgctgagcagaccgtgaggaatgacag

SEQ ID NO: 276176 - DNA, 80 bp, Homo sapiens
  chr21:44562056-44562136
  hypo
gtcagggcagggtgcgtctgtgcggcgtttgcatgtgtccaccgtcctgaccgggggcagggccacgtcccacacatctt

SEQ ID NO: 276177 - DNA, 78 bp, Homo sapiens
  chr21:44578931-44579009
  hypo
tgagagggaatttgcgcttatagaaagaaatgttcgatttgtaggagaggtacctgaagtgcgcgggggtgaaatgac

SEQ ID NO: 276178 - DNA, 73 bp, Homo sapiens
  chr21:44579210-44579283
  hypo
taaaagtaataccccgtgatgggcgcaccaggtgctggcccgcagggggagggcgggacgtcactggctctgt

SEQ ID NO: 276179 - DNA, 229 bp, Homo sapiens; identical to SEQ ID NO: 220435
  chr21:44601206-44601435
  hypo

SEQ ID NO: 276180 - DNA, 34 bp, Homo sapiens
  chr21:44617829-44617863
  hypo
ggcaatcaatagacaatacacggctcacgcctgt

SEQ ID NO: 276181 - DNA, 34 bp, Homo sapiens
  chr21:44618103-44618137
  hypo
agagtgaaactccgtctcaaaaaaaaaaagaaaa

SEQ ID NO: 276182 - DNA, 535 bp, Homo sapiens
  chr21:44630080-44630615
  hypo
gtggctcaggtctggcctcacgtgctcctgcccctgggccagcacccggctgtctgggctgcggttctgagtctgtcagtgggataaggatgtgcacctcgtccgggaagtgtctgcgcctcctgtggagcacgcactgacttagaacttctccgttgggattgcttttcgtcctgttatcaggccagtgactcagtcctgctccatcttccagaggaggagacagaagcgctacgaggttgagtcactcgtccaagttgacacagtggcctgtctgagtccagagcctgcgccgtggccccacgcagcctctctgcctcccggtgccgtgagtttgcctgggtaaagctggctgcatacgagcctctgtcgtcacgggctcctactttaaggtgccgtcctgtgcggctgccaaagggaacaacgttgtcagaacctcttcccccggggagtccggagctgcttggtgctggggggctagccagtgaccttgctccctgatcttggcacacacgaggcaaatctgagtcaccca

SEQ ID NO: 276183 - DNA, 233 bp, Homo sapiens
  chr21:44725369-44725602
  hypo
accgcagtggacttcgtggcattctctgcagcatcacgtggcctggggcagggagcccagctcgcctcctgccctgctcggccccgggcttgcagccacagcgcccctctgatctcggccttcggctgcgcgtggctctcccttgtgtgtctgtgtctctcttctcatggggacaccagtcacatcgggtcagggtttatcctattctagtggaagctcgtcttaatttaact

SEQ ID NO: 276184 - DNA, 111 bp, Homo sapiens
  chr21:44764101-44764212
  hypo
gcccccaccccacccgctggggaaggtgatggtcaggagggggctgatcgagggttgctcagtcaccccaagatgaggagcagtcgctggcacagccgcctcggccctcct

SEQ ID NO: 276185 - DNA, 82 bp, Homo sapiens
  chr21:44792954-44793036
  hypo
acggctagaaagagcggccccagagccgcaccgtgggatgagccaatggcacgtcccggtcgccggccgggtgtggtgctgc

SEQ ID NO: 276186 - DNA, 201 bp, Homo sapiens; identical to SEQ ID NO: 220437
  chr21:44799064-44799265
  hypo

SEQ ID NO: 276187 - DNA, 322 bp, Homo sapiens
  chr21:44806801-44807123
  hypo
tgccccgttggtgccgctaggactgcccagccctcctgctgctccgtggacctccggggtctgggatgggtgggtggggcccttcctggtgactggcgtttactgggcttctgtggggccaccaagcaccgacacagggtcagagtgaggagcgaaagccctgacgcctgccctcatggggagtcggtctcctctggacacggccttgttccagtgaccacagaggctggcgagtgccacgtggtccccactgcatcacacacctcccacgccctgcccggcgtcagggacaggaggctcagggaagcgaaggacactgccc

SEQ ID NO: 276188 - DNA, 826 bp, Homo sapiens
  chr21:44816265-44817091
  hypo
tcccagcagtgtgagggggacgcagaaccagtgtctcctcttaaaatccccgaaccctcccgctggctggccctgagcagcaaagaggacacctgcgcggccttcctctcccggcccctaactgagccacggctacatcccgctcctcccaccaaagctcttcggccagtcagccctcaggctccagcgcggctcggaggggcctgcccctggtatagcgcccatggtcactgtcggacactcttaaaacaacggccgtgtttctgttctgcgctgggccctgaagctcatgtcatcagccctgccggctgtggggctcccggattctctgaccttgacccatgctgcagccactccgcctgtttcctggggctggtttacaccccgagatgcagggaaggcccagctgcggagccccagggaggccaggagctgttcacaactccaggaagccacactgggcctcagttgacgaagaaggcgacaccttcgtgtgggccttgcctgctaatcggtgtcctcaacccaagggcacaggcgccgctcccaggccgcgcaggcagagtagagctggggtggatggcaggcttcagggacccagccccgatgagtcacttggaaggcatttgccccagagcttccctggccactgcgcctcctcccgccccaatccagccccatctgggtccgagcctctggagaggagctggcaggtcaggatgcggttcccgtgctcttgcctgtgtgtggggacccgaaagccaggctggtggccgaggatggcgagcacagccccagcccctcggcctagcgggagcttcacggg

SEQ ID NO: 276189 - DNA, 49 bp, Homo sapiens; identical to SEQ ID NO: 220438
  chr21:44830890-44830939
  hypo

SEQ ID NO: 276190 - DNA, 324 bp, Homo sapiens; identical to SEQ ID NO: 220439
  chr21:44830969-44831293
  hypo

SEQ ID NO: 276191 - DNA, 724 bp, Homo sapiens
  chr21:44836810-44837534
  hypo
caccggggacgcgccggtctgcaggagtgggggcggcagcagcgggagccccgacgtgaggagggtgctggggagcggggcagccccagggccatcacagggggcgatcacaaacggggcaggggccggctggggggcctgggagcagccgggtgcagcggccgggtggtgctgtaactggagcagcctgtgggaacagaggacaggtggtcactgcgccggctcgcagggttctcgggtttccgagtgcccgtgtggcagggcccgcccgaggagctgccagccgcggctgccgagggcaggtgcgtggctgatccctgaccgcgccccacctttcattctccacccggtttctcagcagctcagagatgcggccacaaggcgccctcgctccccgccaccctcacccacccagggactttaaaggacacgcccgcctgctgcacccccatggctcagcacctaggacctacgccccacacatctccctggctgggagcgggggtgtgcactgggctacagagaggagggaaccacttagcagatgaggttcctcgaggagataacctgccgtgtgcccacccggggtcccagggcgggggcaggccctacctctgctgctctagcacctcctccagcaggctccagccctcccggctgccggctgcgccgccgtgcaggcctgggctctgtgcaggggcgtggaaggggctcaggccgcccc

SEQ ID NO: 276192 - DNA, 417 bp, Homo sapiens
  chr21:44837564-44837981
  hypo
cctggcgagccagccccttgattttgttcagtcccagaaaccctttggtccgcgtggtcttcctcagctgctgccgaaaggccttcagccctgcagggagaatgaatcaggaggtcaacggccacccggctctcagcccagcatccacggcccttggcttaaggggtttccaagcctcaggttgggggtaaggaaaggacgggtgacacaagcacgtctggacaggagtctggcacctaagccccaggatggcgtggaggcagccggcagccaggggccctccctcctccaagtcgggaggtgctgcccagcacagagtcgtctcctgtgctttcagaaccagccatggaggccgcgtgctcagggacccatgtgtgtctatcccagcaggccgtgacgccccgagccaccagagca

SEQ ID NO: 276193 - DNA, 392 bp, Homo sapiens
  chr21:44839042-44839434
  hypo
cagcaggctgcttggggacacgggccggggccggaacactccgctgcagctggcatccaccgggaagaacaagggctgcgttggagagacacaagccagtgacttctcggactccaggtgacccgggcacaccgggggcaccagggctgggctgaggcgagccctctgcacacccgctgtgggcactcacccactgcagcgagctctggagctcacagtccatctcggcctggaggacggactgcaccaaggtctgcggctgcgggcacagcaaggcaggtcggaaagggtcggtggaaagaccttcctgaggcacctggggccggcagacgggaaagacgctgtcaggggagcgactccggaccaccagcgccatcaagagaagaaacaag

SEQ ID NO: 276194 - DNA, 48 bp, Homo sapiens
  chr21:44839755-44839803
  hypo
ccgagctccgaggccgcggctgcctggcaggcccggggcgggcgcact

SEQ ID NO: 276195 - DNA, 341 bp, Homo sapiens; identical to SEQ ID NO: 220441
  chr21:44840059-44840400
  hypo

SEQ ID NO: 276196 - DNA, 931 bp, Homo sapiens
  chr21:44840676-44841607
  hypo
gcggggacggcaggcgcaaggcacaagcctgtgcagcaagggcacccgtccaccctcgaaatagggcactgagaaggcatccatgggctgggtttctcccgcagcccacagtaacctgggcctgattcccagactcaacaaggactcagaagccagccacgaaggggctgcaggagacacaggcccctgcccaggcgagaccacacgactcaccttgagacatgaagaaggggatgcggaagcggccctccagcacccgctgtctcagcgtcggcaggttaggcccatcgaaggggagagaaccgcagaccaggacgtacagcaccacgcccaggctctgttgaggaccacagagccacatcagcgccagggcggtgcccccgggaacacggcgccctcggggaacgcggcctcgggaagggggtctgcgcgcacagggctcctacccagatgtccagctgggggccttcatactccttcccctcaaagacttccggggcggcatacggggggctcccacaccacgtggacagaggctctcctgacttgtagaaattcccaaatccaaaatctgagcggcaaagaaacagatggatgaggttaaacggcaaatggcaaggggctgcggtttcggcacaggggctgtggtttcggcacatgccgggaagctggggctgcttgcgggcacactcccaccccggggcctccgtgcctgccagcttgatgtccctgctcccaccccggaccctccgtgcctgccagcttgatgtccctgctcccaccccagaccctccgtgcctgccagcttgatgtccctgctcccaccccggaccctccgtgcctgccagcttgatgtccatgttgccatccagcaggaggttctcggtcttgaggtcccggtggacgatgtgatggtcgtgacagtactcca

SEQ ID NO: 276197 - DNA, 228 bp, Homo sapiens; identical to SEQ ID NO: 220443
  chr21:44856274-44856502
  hypo

SEQ ID NO: 276198 - DNA, 372 bp, Homo sapiens
  chr21:44865715-44866087
  hypo
agcccacatggccccggggcattcatctcactgggcaggggcagcctccgacctcatcccagctcagtaggtgctcgcggtgccctcctaaacgccagccatgagcttgagcgaacgccagtgtgtcgtgaggctgagcacagcctggcccctccactccggctcctggtggctgtctgctgtgtcccctatcggggaagaggtttctctttggcccaagcccacctgcccctgcctgagggagccctcagccactacgctcagcccgtcagaaacctgagagctcatgtccacgacagggccagccagtggggagaggacccggggctcccttggaggcagggcactgctcgttcccgcggccgctcggcc

SEQ ID NO: 276199 - DNA, 356 bp, Homo sapiens
  chr21:44866603-44866959
  hypo
cttccctgccacagccggcccagcgggagccaggtcagggcctggagacacagcgccccccaccggagccactgcccggcccagcagcacctgcggagaatcccaccagctcccacgcctcccgccgcgccaccgccccggctttctgcaaatccaccttatggaagccggataaggtgaagtccacatataactaaaagcgagttactgagggttactttctttgcagagtggttcccctaaaggattcctttaaacatgatccggtcagccagtgctcacttacgttcaccaagtcacgtcggtttgtggcggcaggagcccagcgtgccaggcacctgcgggaggggaagatg

SEQ ID NO: 276200 - DNA, 193 bp, Homo sapiens
  chr21:44871136-44871329
  hypo
ggcccacacgccgccgacagcttccgcgtgtggccatctgtctttcagaaaccctctggcagagggacccagcagatgacacgggggccgttcacactctgaaacctgcctggagtcaaaacactgctggcgagcctccaccgcaaacccaatccagatggtcttccctggtggccctcggggtggcgggcac

SEQ ID NO: 276201 - DNA, 694 bp, Homo sapiens
  chr21:44871641-44872335
  hypo
tgttgtgacctggggtcccccgtggtgggcccgccccttgagcctgggatccagcctcagcgaggctccagaagtgtcgtctccgccggccaggcgtcagcgcctccacccaggatcacacactcctatctctgcacttctgccctccatcctgctccacgccgcctctgcttgttattccagcacattccagggtgatgcctgctgaagccacgcagccagtgcctccaccctaccccccatctgacccaccggccccttccgcacgctggaagcctgcccggcctgaagtgtcctcacctgtcgccctatcctcccctccactccagcccaccggtgactcagccctcacagctctctcctccccgagggagccggtgacttggctctgatggtgccgggacccagccccggcatgttcagaatccttgtcctttaacctgcgtccacatgtagtcgcctccacctccctgcctgaacctccaggccctgcagagcaaacactgctgcctgcaggagacccctggggccttctccgtcccctcatcctcctaaggagcctcccctgccaccgtgccagaatgtgccggaggaacagaggcccgagcctcccgtggccccagcgaggcttcctctggggaagacagtgagcccaacgccctggctctcgaggggtggacggagtccagctggc

SEQ ID NO: 276202 - DNA, 48 bp, Homo sapiens
  chr21:44881157-44881205
  hypo
agagtgcttccgggtcgcagtgtcctcatgttgcggaggcctgagctc

SEQ ID NO: 276203 - DNA, 111 bp, Homo sapiens
  chr21:44888677-44888788
  hypo
ccccctgaagccacaaaccccgagctgagctaaaccactgctcgaggtgcggggtgcgcagcactccacagcccgttgcatttccacgtcgcaaatcctcagggagcattt

SEQ ID NO: 276204 - DNA, 80 bp, Homo sapiens
  chr21:44920331-44920411
  hypo
gtctgcagaggagccgtgtgcaggagcagagatggaagggccagcgcgcaggcagccttcggactcggctgcccagctgg

SEQ ID NO: 276205 - DNA, 467 bp, Homo sapiens
  chr21:45078407-45078874
  hypo
cacctcgggaggtcgcctagacaactgagcggagcaactgagataacccccgctacgtgtggagtgacctagtccattaacttgccccagcacgcccgctgagtccgcaaaatataggatggcctcgggttttagatgaacccaaagctaagatttcttccctctctggaattagcaagcagcccgccctgcccaactcccctggaagcgcgcgtgctcgccaggcctcgggacgcctgcgcgggcgcccttgcactggcaccagggctccggggtaggggcgcaccgatctgcccaagcctctgcaggcactggaggaaggcgagccctccacccgctcaacaggccccagtgccggcctttccttccagtctcaactccacccgggggcccgggggctccacagttaaaaactccacgccacggagatcgcaggtaagctgctggctcaacgaggtgtgctaaat

SEQ ID NO: 276206 - DNA, 456 bp, Homo sapiens
  chr21:45114160-45114616
  hypo
catctggagcctgcgctccggctcagcgacctttcctctcaaatgcggaagcgtgcacttacagttcagaccgttctcctgtaagttcattacaaacacgggcggaaggcactcaggctttcgttggagaaacagaaataaggccttcttttgagcagcgattgctggatcattgatctgtttgaggaagtgtctgacctgggcctgagagctggagaaggtgcagattcaaagtgagcggctcctgaggagagccgccaaggctgctcgccttctccgtggcttccgcagctaccgtctgcacggtgagagggcacgggcacacggttcgggctggcgtgcagctctcccagccagccacgctctgctcaggcctggaagtgaaagccgcctccttcccgttatgccccccatacaggagcctcggtttttcagcaaaacgcggccagtcccctt

SEQ ID NO: 276207 - DNA, 294 bp, Homo sapiens
  chr21:45140246-45140540
  hypo
gcggggcctgcggtgcgggctggcctgggaggaggacaggaagaggggagcagagcttcagtggaatttgagggctgacctaggcgtgcccccaggaggaccaagctgagcagagttgagcgtggaaaggcagggggttcgagtccgaagtaagtggaggtcctgttgggaaggatgcggtgcttcacaggtggtcttacttgagaccctgttccatccagctgcaggcagaccctgcctgggacagtcagggtgcaccggttctgtggctccggctcttaagcactgctctgg

SEQ ID NO: 276208 - DNA, 293 bp, Homo sapiens
  chr21:45140781-45141074
  hypo
gtttccttctttggctcactcgggatcccccagcaatgtcctttgttctcgaactcccagtgactcgaggggtgtcctctgattgctcacctcaggtggagcctcgaaaggatggcgctgctgttcctacctcgggtctccccagtgcacggcatccttacctgtgggctccacagggttccatgcaggcattttgctcccataccccgatgtccaagcccggctggacaaggagaagcaatgtgatgaccgaggggctgagatggctggagacccagcgagcctggaccagc

SEQ ID NO: 276209 - DNA, 424 bp, Homo sapiens
  chr21:45167196-45167620
  hypo
actcagccattcagcgcccaggcgatttcagtatctgccttctttgtcgttgtgtctagggtgtctgtttgcttgctgtatattcactgagcacagcgggcttctccactggcacagggcacgcctgggcctgtgccctccctgccccgctgggtcagtggttgaagtcaggatatctgtcactgggcatctaactgggtggggcgggctggtgtgctcagcgtctgtctgtccactttctcccatgcttgttctctggaaggttccctgtcctgcgcccagcctgcaggaccccagcttgcagctccctgccttcccttcatggtgctccctggtgtgggctctgctgaccctcggcagacacttgcgtttggatcacgaagagttggggccactgtccagttcagtgcggctacgggatctg

SEQ ID NO: 276210 - DNA, 565 bp, Homo sapiens
  chr21:45170075-45170640
  hypo
atgctgagaccctgcgctgtggcatgggccttaagtgggggccgtggctgctgtccatcaccacggttacgtataaacagcagccatgattgggccttacgtgactcctgtaatgtgagggtcccctttagaaccaaaccccacatgttgcaggggccccggcccagggtggccagtggacgaagagttagctgcctgtggggatggggatttccagagccgctgcggtttggggaatgtcaacacacaacccggagaggagaggctcacctgtccccacccgcctgtccccgcctgtcttccaggttactgagtggccggaagatccacagccaggaggaagccttgcgggtaaggaggccctctggggcctgtgcggggcacatgtgccgctcacggtggggacgggagacaggctgcctgagtggcaccactgtgtcatttctccccagcagtgactgaacagtctgtaccagtcggggcctccagagatcagcaggatatatgtgtgtgtgtacatgtgtggacatgtttgtgcatgtgtgtgtgtgtgtgcatgtgtgcg

SEQ ID NO: 276211 - DNA, 1446 bp, Homo sapiens
  chr21:45175374-45176820
  hypo
tctgctcagccctccgggctctccgtggtgggcagtccgcagcctgtcctccagggttcagcacgtgcattggcggagccggctccccggtggctcggagagcaggacggcccttgtgttccctggaaatcccctcctggcagcagtgggcacgtcgggtgttgtgagtgggccaggggcacagcaagtctgtcctccctgcaggtggcctgtgagaagaccgtgtctaccttgcaccacgttctgcagaggaccatccagtgtgcaaaaggtacggcggccgggctgcatgggctgcgtgggctcctggctcccgaagtgggtgggagagaagagctggcacgtgctggttttgaaggtgtgatcggtgtctcctgctgacctcacctctgggagtgggggcaacagcgggagcccctctgagatgggaactcagtgctctctgcctgccccgcagcccaggccggggaaggagtgaggcccagccccatgcagctggagctgcggatggtgcagagcaaaagggacatcgaggacccagagatcgtcgtccaggccacggtgctgtgagggccccgccgcttgcccgtgacacgcagcgcgttggtgtctccgtgtttgtccctgtgaaaacatgtaacgtctgccttagagccatgaccgaaacttgatatttttttctttcatgagtgtccggcatctgctggtcttcattgtgaaacgtgccagtcgtgctttgtgaaaaataacaaagtggtcacagaaatttgtgatctgaaaacccggctcccttccccacaaggctcctgggcctccgggaagacgggcccctgtttgccatctcgggggtgttccctgtgggagggtgagtgggtgaggccgagcctgctgcgtgtggagcctcgagtgggccctggctgccactaccgtacagaggccgtgtcgcgctgggctgggcctgggtggcctctgtctttgcatctctgagaaggagtcgggtggtaacggttggggtcaggaagaattctgccaagtatctttactgtcattctgaccatagcctctttgttcccgcattcgaacttttggttcttactttgctgctcgtttagtccctggggatttcagatcttaggctgttgtttcaccgtatgggagggttgatgtgagcttgcttggagacacacggtgcagcatcagggaccttcccaggccccagcaaattcaagtcggtctgcagacctctcagctacccgcgggacctcttgtaacccatcggcatcttccaggaatccgccgagtgacttgaggaagatgctaacgcagtaaggtctgtgctgggccaagagcagctttgaagctccagagaaccaccccgtcaggttccttgtggaagctcccctcatccgtggtgcagcaggctgagcactgcgcgtttgccacgtg

SEQ ID NO: 276212 - DNA, 48 bp, Homo sapiens
  chr21:45182669-45182717
  hypo
gaacaaggagaaggcggaaccaggggctgcagaaccagcccctcccca

SEQ ID NO: 276213 - DNA, 100 bp, Homo sapiens
  chr21:45184714-45184814
  hypo
ggagattccctcacaaggtgcggactcaggctggccctgaaacagccgtcacctccacgaggccggcccaggcccctgcgcactgccctgctcatgcccc

SEQ ID NO: 276214 - DNA, 76 bp, Homo sapiens
  chr21:45187154-45187230
  hypo
gacatgggaaccttgcgggcacacacatgcaaacacatgcgtacatgcgggcgcacacacacgcacacagggatgc

SEQ ID NO: 276215 - DNA, 545 bp, Homo sapiens
  chr21:45187450-45187995
  hypo
caggagcagcacagcgaccccgaggctggcctgactgtgtggcctctgagggtccagtcttcactttcccttgttggggggatggggcccccatgcacagtctgtgcctcagtgttctgagtgagggcaccctgtgctctgccccatgaccctccctgcctcggtgctacccttcctggaggcgggacacggcggctgatccctccctgagtgggagttgcgagtcctttgccttcttcccccgtctccggcttgtagccacaaaatgtgctgccctgggccctgcctcaggtttccctacggaaacggcacaggccacgctgcctcccctgctggcaccctagtctctgatggagaccgtggcctctccacccagaaagtgggccaggcctcaccatccctgagctctgtctgcctacgtctctggctgccactgaccccaccagcatcttggcctctcgacacaccccctccgccctgactctgtgtcatacccaggcctcacgacacactcctgggcaaggctgcgtcggcagcgccctggc

SEQ ID NO: 276216 - DNA, 421 bp, Homo sapiens
  chr21:45188555-45188976
  hypo
cagtgtccccaccacagctccgcaccgctccttgatctgggcctgcattagcatccccgggttatgtggctacccgtgctgcaaaggagcctgggaagtgtgtcttttccatctgtgcgaaattctatagtttttctcgcccttaagggaggtggggagaaggatctgggcagggaaggcccggcccatccctggccacctatgacactgtaagcctcttagagagcggccatgcctgcctcgctctgcaagcagacctgcagggtgcctggcacgaggacattcagatgtgggaaggagggaggagggagagacgacctggaaaggaatgagtgtgagctcagtcgatggtcagggactgtgcccaaccagggcctggctgtgccgtggggagctctccgagctctgagcatccaaatgt

SEQ ID NO: 276217 - DNA, 33 bp, Homo sapiens; identical to SEQ ID NO: 220447
  chr21:45194488-45194521
  hypo

SEQ ID NO: 276218 - DNA, 205 bp, Homo sapiens
  chr21:45195123-45195328
  hypo
ggcctcagcatcgcctggacctgttcttgcttggggcatcccgtcggtcaccaaccatgacagcgaggcgggcctggcctgtgctccaccggagggggcttcttgcacagatgacctgctcatttcagcccctccagaatcttctggcaggcgcagagcaacaggacgtccattttacagacgaggaaaccgagacacagggaag

SEQ ID NO: 276219 - DNA, 40 bp, Homo sapiens
  chr21:45208439-45208479
  hypo
gattacaggcgtgagccaccgcgcccggccaacgccacaa

SEQ ID NO: 276220 - DNA, 469 bp, Homo sapiens
  chr21:45223510-45223979
  hypo
gcgggccctgctccgagatcagcccaggggccgtggccagagaggggctcgccagagaaggaggacacctcggcccctgaccagtgcccgagcaaaggcggccaatgtccaggagccggagaagaagaagaaacgcagggagtgatgtggccgggccaaggacaggcagggagggaggccaggcctcgcttgcaccgcgggacgaggctgaccgggctgttctgtagactcaggaccgtggctccagaactcctgtgccaggcgggagggaagggcggcactggagagatgggcccatcattaggggccagcatcccaggaactggacctttccccagagcctccgcctgtggctgtgatgaccttgggccagaaggtcaaactccgaagactgaaactctgcctgcagcaggactggccgcccctgctgtggggggttcagaaaataaaatgccgcgcagcccttgcc

SEQ ID NO: 276221 - DNA, 598 bp, Homo sapiens; identical to SEQ ID NO: 220449
  chr21:45224195-45224793
  hypo

SEQ ID NO: 276222 - DNA, 219 bp, Homo sapiens
  chr21:45232930-45233149
  hypo
tcaggccccgcactcgggcaggcacagcagggcgcaccccatgacgcacccagaacccgcccccacagccccggagtcctggccgctgtccccagccctacgcccctctcagagcttgagccaggggcagcgcaatgggcagctccttccctctcctgtccctggaaaactgctctgggtgatttggcggagagtgagaggattcgaaaacgctggtac

SEQ ID NO: 276223 - DNA, 106 bp, Homo sapiens; identical to SEQ ID NO: 220450
  chr21:45233494-45233600
  hypo

SEQ ID NO: 276224 - DNA, 137 bp, Homo sapiens
  chr21:45245440-45245577
  hypo
tggctgcagaccatcggctatgtctaaatccataaaagtcctaaatgagctaacaaaccattcatgagatcttttccatcctcctactggacacgcgtatttccacgaagacccggaaggcccgttagaactcggaa

SEQ ID NO: 276225 - DNA, 83 bp, Homo sapiens
  chr21:45249924-45250007
  hypo
aaccccagtgtcagcggtgcctgtgaccctcaggcaacgtgaaacgcagctgcttccacatgccaggaaggctgttagaaaat

SEQ ID NO: 276226 - DNA, 282 bp, Homo sapiens
  chr21:45252134-45252416
  hypo
gctgtccaccctgccggacgtgggtaagtgtcctcacctctggcatgaccaggtgccaggcacactaggacctcaactgccccaccctggagctagccccttctccgaagagagtgtcccaccaacctgagtggcagggcgtgaaagcatggccctcctgcaggcacagaacgcagcctccctctgcctcaagctgtcctgtgtggccgtttccctctctctcatcgacccttccaggcccaggattttcggggggcctagagcgtacgcgctttccatttt

SEQ ID NO: 276227 - DNA, 175 bp, Homo sapiens
  chr21:45268737-45268912
  hypo
gaggcacggcacctcgccctgcattctagcgggatcagctgggctccgctaggcagttcttcctctggttttgtctgaagtcagctggaggccggtggcctcactctcgtgcccggtggctggctggcagtcacctggtcacagggtaggctgtgcctctcgtcacccagcaggt

SEQ ID NO: 276228 - DNA, 238 bp, Homo sapiens
  chr21:45271700-45271938
  hypo
gtgacaattgtccacgcctggggatctgtctactgaatccccaaggagaaagcttccttcgtggatggcaggaccgtttccacgcacacagccctggtcgggggagctggagtttgcctaggtccctccgtagtcacagtgataggtgcccaggcccctccgcagtcacagtgataggtgccaggtccctccgcagtcacagtgataggtgcccagttccctccgcagtcacagtgat

SEQ ID NO: 276229 - DNA, 42 bp, Homo sapiens
  chr21:45276200-45276242
  hypo
tggtccttggtgaagtcacacgtcttgactgctcagctctac

SEQ ID NO: 276230 - DNA, 100 bp, Homo sapiens
  chr21:45276619-45276719
  hypo
cagtgaaatattttataatcatgatctatgtctatgcctaaatcgccctgcctaagacactgaatagcctgagaaaactccctttcgtgctaactcactg

SEQ ID NO: 276231 - DNA, 42 bp, Homo sapiens; identical to SEQ ID NO: 220451
  chr21:45281601-45281643
  hypo

SEQ ID NO: 276232 - DNA, 196 bp, Homo sapiens
  chr21:45289938-45290134
  hypo
cccaactgtgactcattatgcggcacgggcgggcgggattttggattagttttaggaagcgaaccacagccgtcctccttggactccctgccgtggctggcagtgagctggtgcagggaggcgaagtgctggtgttctgggaattttcaaatgcactacagcgatcaggacacacgtgtttcagtgcacacaggtt

SEQ ID NO: 276233 - DNA, 50 bp, Homo sapiens; identical to SEQ ID NO: 220452
  chr21:45299401-45299451
  hypo

SEQ ID NO: 276234 - DNA, 186 bp, Homo sapiens
  chr21:45299787-45299973
  hypo
ttcccgtgagctcccgtgtccccgcatcctggcatgtgggcctctccctatgctcctggggtggaactgagaagacgtgggttctgcccgtctctgttactgtttattcttgaagaacagggcagcatgactccggggcggaggacgcagccctgcatcccttgcgtccccaggcatcttaggagc

SEQ ID NO: 276235 - DNA, 317 bp, Homo sapiens
  chr21:45318873-45319190
  hypo
ggcgtgagccactctgcccggcctgattacattttgtgttagatttgcacacacttgccgctctctttcctttacgttttgcatctcagacttcccatctgggatctctttttctccttgaagtgcacgtacatgagaaattcctctggttagagtgtgctggtggcgaacccgccccttgtgtttgtccggaagcactagttttccctgccccttgggggatatgcttgctggttgcagaactcttggttggcagtgccgttctttcagcactttgatgtcagcctctgcttggcgtcagcatctttttgtgtgaa

SEQ ID NO: 276236 - DNA, 731 bp, Homo sapiens; identical to SEQ ID NO: 220453
  chr21:45345793-45346524
  hypo

SEQ ID NO: 276237 - DNA, 337 bp, Homo sapiens
  chr21:45349806-45350143
  hypo
acctcataaatgcagcggacactgggctgcaggtgacagacgcgttctctggagcaccgacagcccaggcgtgccggagagagaggacttgagtgactgtcctcctggaacccagggtgccttgtcctggcacttctgtgtacatcatccagccccgttttcacgttcaggaagtcacgaatccacagtgtctttgaagaaagtggggaatagagttatcaaccgtcactccacggagagtctaaggcagagagaagttgggttccccttccacggttccctgcccccggggacacagttgtgggaggtctcagggcagagacgccgcacggtgggg

SEQ ID NO: 276238 - DNA, 1047 bp, Homo sapiens
  chr21:45352875-45353922
  hypo
gtagtggccacactgattgacgctctctctccctcacagcgtgccaggtgccttttctctgcgttctcgtcaacacctgttacattcgtctttttgataatagccaactgaacggcatgaaatgacacctccctgtggcttcgatttgcttctccctgatggttaataatgccgaacagctcttcgttaacctgctggctgtcggtgtggctccttctgaggcacagccgttcgggtcctttgctgtttgctttcttgctattgagtctgagcccctttaccctgtggatgctgggcctgcatcgggcatgtggtctgcagggttttctctcccttgcgggtcgtctctttaccctgtcgttccctttgtcatgcagaagctgtttagtttgccgtaatcccagtggtctatgtttgcttttgtcgtgtatcttttttaaagctctgccatctgttttctccatggggaaaggtttgggaatatcgatgatgtcatcatactcctggctgcttcttgacattttccatgcccagcattgttctcagtgcgccccgggggtctttggttctccatagcctgctggcgtccatgtgtttttattctttctttatggttgaggaaactgaggcacagcttggaagcggttggcactggggttaggctccagtagtctcggcatgtagcagcaaatgtgggaggggcagcacaggggaaaggtgaggggagagtcaggagagaaggacgccgcataccagatgcccagaggccccggcggcctccatccaagcacaggcccaagcaccagctgcaagagccagaggacggcactcccgcgcctgccacgagcctcacgtggagagtggacagtggcatggaaacgccagagggttagaactgagcagcaggacggggtctgtgggtgcacgagaggaggcccttggtctggaacagcctggggtccccatgtgctgtcactgtgtggactggccacacctggtgtgccgcttcctttctcagtcatggccagctgccgaatgccgtaccag

SEQ ID NO: 276239 - DNA, 78 bp, Homo sapiens; identical to SEQ ID NO: 220457
  chr21:45354855-45354933
  hypo

SEQ ID NO: 276240 - DNA, 113 bp, Homo sapiens
  chr21:45355818-45355931
  hypo
ccctgatggcggctcgagtcggaagccagagtgtagaacagtagcggagcccgcccagctgttcctaagcaaggcctaggccccactgcagggtcacacggaaggctcacatg

SEQ ID NO: 276241 - DNA, 99 bp, Homo sapiens
  chr21:45358107-45358206
  hypo
taagttagttaacatcgctcattgggatagaaggaacgtactgaggaacgtactgaggattagaagtcagaattcttgaatctgcaaatcttttttttt

SEQ ID NO: 276242 - DNA, 256 bp, Homo sapiens; identical to SEQ ID NO: 220458
  chr21:45360447-45360703
  hypo

SEQ ID NO: 276243 - DNA, 186 bp, Homo sapiens
  chr21:45364365-45364551
  hypo
gccgcgggagtcatcgcggggcagatcctggaggccagcaaggccgcccctcctcctaagtggcactgattgacaggggagaaagacagaggcttgttccccagaaaagcacagaaaaccagccttgttcctcagacaggagatgcatgtgccgggaggcaggcagggggacggctgtgctcggcc

SEQ ID NO: 276244 - DNA, 246 bp, Homo sapiens
  chr21:45364876-45365122
  hypo
tgacgccagcaagtcggaccctttctcagaagcccagagggagggcagagccgtagccacagtttggaggcatctgctgggctagtgcatgttttaacagcacctatgacaaggtgaggcagcatgggtggccctgcaggtggcggtttgcatatgtgcacatccagccagctccgttttccagtctggggactatggtgacaggaagtaaaaagcctgcgatttggcctacggggtcccagggtc

SEQ ID NO: 276245 - DNA, 189 bp, Homo sapiens
  chr21:45374890-45375079
  hypo
acacagaggctgggacgtgaatgtgcatcacggctctatctgtggcccccaaaggctgggtgccagctgcctgtcggcagggagcgtatcaccgtggcacgtccatgccgtgggggtcactcagcagccacggatgcgccctgggtgctgtcccggggccgtctcagaagcaccgcgctggaccggctg

SEQ ID NO: 276246 - DNA, 369 bp, Homo sapiens
  chr21:45379437-45379806
  hypo
agtgagcagtgccccggtgttcctgtgagggtgtgggcgtggccaccctgacgctgtccctgtccctgtctttgcaggacggctgtcctcagcgaggggccgtgcacccgctcctgagcagcgccatgggcctgctggccttcctgaagacccagttcgtgctgcacctgctggtcggctttgtcttcgtggtgagtggtctggtcatcaacttcgtccagctgtgcacgctggcgctctggccggtcagcaagcagctctaccgccgcctcaactgccgcctcgcctactcactctggagccgtgagtgtctgctgggccagtccctgccgcctggggctcccgtgggggtggcgcgcgaccatgcac

SEQ ID NO: 276247 - DNA, 32 bp, Homo sapiens
  chr21:45381609-45381641
  hypo
tatggaaaacggtgagcgcgtatacactttgt

SEQ ID NO: 276248 - DNA, 205 bp, Homo sapiens
  chr21:45393402-45393607
  hypo
ccaagctgcacggcgcctccgcctcgggtgccacacagccccccacggagagactcctcatccgccatcctccctgccgctgcctttattttgcccgatcatattttaataaatactcgctttgaacttgtaaggcttcggctgttcaggtcactcaccgcttcgctgtttgaggagcagcagtgtccccgcgcgcccctgcagc

SEQ ID NO: 276249 - DNA, 221 bp, Homo sapiens; identical to SEQ ID NO: 220461
  chr21:45396665-45396886
  hypo

SEQ ID NO: 276250 - DNA, 219 bp, Homo sapiens; identical to SEQ ID NO: 220462
  chr21:45399689-45399908
  hypo

SEQ ID NO: 276251 - DNA, 998 bp, Homo sapiens
  chr21:45400148-45401146
  hypo
tccatctcaaaaaaaaaaaaaaaacaaaaaaaaacgagagagttgatggtgcccttcactacttcccaagcatcctagagtcccacgggctgccccgcccacgggcagtggctgcggagtgtctgctctatcaggcatggtgatttcctgccagcctgtgcctttgacattcccaccagaggcagaaccttctgcaggtggccctggccaggctcctctctcctcccagctcctcattagcctcctttgccaggctaggaaaccgaggtatgcgaggttaaggaactttccttgggccgtgcagctgagagtgcgctttgcagggatttgcatccaggccgcgggactcacacaggccacacctgccacccccactgcctctggctcgtgggaggtgtgggatgtggcgggtggccggggcagtgctgggcaggcaggtgttggtattcacaacgttgctttcttgaccgattattttcctgggagacttcctcagtcaaagggttgatatgcttgcgagctctcgatgcacgctatcagattctccaaaaacgtacagccagcttcgcctgcacctgcagcttctgtgatttgtgctcttaattgacgtggcgctttttttaggttgagtcgtttttcattgccaacaatcttctcctgcattgaaataatagcttgtaaagaagcctcacgcttcctttttctctgttgactcttctaggacgcgctccaggagatatataatcagaagggcatgtttccaggggagcagtttaagcctgcccggaggccgtggaccctcctgaacttcctgtcctgggccaccattctcctgtctcccctcttcagttttgtcttgggcgtctttgccagcggatcacctctcctgatcctgactttcttggggtttgtgggagcaggtaatggacactgtcgctaacagctcacactctgacgggcctcacagtatcagccacagggtccgggacctggtgact

SEQ ID NO: 276252 - DNA, 71 bp, Homo sapiens
  chr21:45402471-45402542
  hypo
cccagcatctccacgcgcgcccgtgggaggtgggtccggccggagaggcctcccgcggacgccgtctctcc

SEQ ID NO: 276253 - DNA, 810 bp, Homo sapiens; identical to SEQ ID NO: 220465
  chr21:45403410-45404220
  hypo

SEQ ID NO: 276254 - DNA, 225 bp, Homo sapiens
  chr21:45411685-45411910
  hypo
atgtttggggcccacgaagaccttgagctgccttcaggaaggattgtcacgcggggcagggtgtgtaagcagatgagctgcgctgtgccagcctgtgctcctctgcccacgcagcaggccgtacattccgcacccgggatgcctgggacgcccacaggccttggccaggctcggcttgtggagtgcagagcaagggctggtggagctcctcgggcgcttggagcc

SEQ ID NO: 276255 - DNA, 135 bp, Homo sapiens; identical to SEQ ID NO: 220466
  chr21:45446230-45446365
  hypo

SEQ ID NO: 276256 - DNA, 281 bp, Homo sapiens
  chr21:45478824-45479105
  hypo
ttgacatatgcggtcgtcacattggttgttacttagcggagcgtagacattattcatagtgctgcgtgcctttctctgtcgtttaatggctacatactgtttcttctatacattgatttatgtttttgtttttttaaaaaacgtatcttgggcgaataggaggagcttgcctttgttttcgagatgctgcagcagttcgaggacgccctggtgcagtacgacgaactggacgccctcttctctcagtatgtggtcaacttcggggccgggggtgagtagtg

SEQ ID NO: 276257 - DNA, 256 bp, Homo sapiens
  chr21:45479408-45479664
  hypo
agaatcagagtggacgtccctttgccttccatccaggggttatctttggaatgctcgagtgctcattgctgtgaacttataaaatgcccttgggtgttcatctttcttttgcacttttaaataatatcttaagctcctttacaattaaagaattagcacagtgaaaccatacacagagagaaacattggttattgtcctcagtgtttttcgctgatacttattttgatgaaagtgataccacgttatatagctgtt

SEQ ID NO: 276258 - DNA, 64 bp, Homo sapiens
  chr21:45483497-45483561
  hypo
ggagaagcgggaatcgatccagaggcgagaagccaccctgttagatctgcgcagttacctgttc

SEQ ID NO: 276259 - DNA, 239 bp, Homo sapiens
  chr21:45494378-45494617
  hypo
tcacgttgtctctgcggccatgcctgggtggcggaggaagtctgctgtttggaggagaggtgttgctcatttagatcacgatgcatccactttagtggccctagaaggtgtctgggtgcagccaaagaagtcatagttccctaccacatgtcgatgtagtcagcagacagcaagcacttgctgtgctcctgtgaaattgactctgtaccctgagtcgggggacacgagggtggtgctga

SEQ ID NO: 276260 - DNA, 133 bp, Homo sapiens
  chr21:45499832-45499965
  hypo
catccacttccccccgcactcctaagtatgagcctctccacgctccttacctctccgctccagctacctgcagaccagcagcctcttagccagtgaccaccacctcactgaagaggagcgcaagcacttctgc

SEQ ID NO: 276261 - DNA, 368 bp, Homo sapiens
  chr21:45508565-45508933
  hypo
gctcagcaggagcgcgcagcactggtggcacctgtgctatgtgccgtgttatcccgctcttccctggcgctggtggcacctgtgctgtgtgccgtgttatcccactcttccctggcgctggcggcacctgtgctgtgtgccatgttatcccactcttccctgacactggcggcacctgtgctatgtgccgtgttatcctctcttccctggcgctggcggcacctgtgctgtgtgccgtgttatcccactcttctctggcgctggcggcacctgtgctgtgtgccgtgttatcctcttttccctggcactggcggcacctgtgctgtgtgccgtgttaccccgctcttccctggcgctggtggcacctg

SEQ ID NO: 276262 - DNA, 162 bp, Homo sapiens
  chr21:45511963-45512125
  hypo
caacagagaaccagagtgtacggaaatgatgtagtatgtgttgcgactgagcctttagatagaacagctgcactgctgatgagtaaaggctcctgtgcagctcctccggctgccctgaggctggatcgaggcttgctcctgagtaagcgggtggctggatgg

SEQ ID NO: 276263 - DNA, 325 bp, Homo sapiens; identical to SEQ ID NO: 220467
  chr21:45513669-45513994
  hypo

SEQ ID NO: 276264 - DNA, 110 bp, Homo sapiens
  chr21:45516516-45516626
  hypo
tggccgtcagtgctcgcgtgtctctctgaagaggctctgcggttctggtccctgtgcctgagctccaggtgccgccaggtgaggcccctgctgctcgccttgggctgtgc

SEQ ID NO: 276265 - DNA, 367 bp, Homo sapiens
  chr21:45518811-45519178
  hypo
atcattcatttttaatcagacgtctaccaaatacccaacactgaataactagcttccccagcgctcttgcaagtgaaaagggcgttctgtgaaaacagcggctatttcagctcgcagcaccgagcgctccccgtgtgctttccctgagccagctgtcattctgcagcagagacccagagaatgtcaagaacacaagcactcaagaatggaaataactcaaacgtccttcagctcgagagcggttaaactggcacatctgattcctcctcagcagtgaaacagaagggactgttgacacacgcagtgctgtggttggatctcaagggcattatactaagagaaaaacgccagtcctataaggaggtgt

SEQ ID NO: 276266 - DNA, 165 bp, Homo sapiens; identical to SEQ ID NO: 220469
  chr21:45546680-45546845
  hypo

SEQ ID NO: 276267 - DNA, 192 bp, Homo sapiens; identical to SEQ ID NO: 220471
  chr21:45558785-45558977
  hypo

SEQ ID NO: 276268 - DNA, 101 bp, Homo sapiens
  chr21:45583677-45583778
  hypo
gggccttccaggcgcgttcccgagcgtgcactgaaggtgttagcgcgtggcaccggagacaccaggctggatgaggctggacaagcgcctccgccagaagc

SEQ ID NO: 276269 - DNA, 76 bp, Homo sapiens
  chr21:45586573-45586649
  hypo
agttggcccacagcgggcccctacgaggctgggcggtgaggggacggctcggaccgcccgcgccccaggacccctg

SEQ ID NO: 276270 - DNA, 164 bp, Homo sapiens
  chr21:45605771-45605935
  hypo
ctgcttgcaatggtgcgtcaggcagtggcccctggtgccggctgcttccccagcagtgaccttggcttctcttctgcaagcccctgcctgccccgagatgccaagccccaggatccaccagaactgccctcgctgcctatggccccgagcgcccaccctcgggg

SEQ ID NO: 276271 - DNA, 139 bp, Homo sapiens
  chr21:45617227-45617366
  hypo
tggaggaggtcctggcctgccgcccagggatggccggtccaggcgcagggccgattgtccacttctggcccctgaggtaccgggagggctggtgagcagcatgtctcgctctgagaccggccaggctgctggggcaggc

SEQ ID NO: 276272 - DNA, 75 bp, Homo sapiens
  chr21:45621744-45621819
  hypo
gcgcggccggccaggcttggaacgcttgaggcacattctcagagacacgatttcggtcacagccttggtaatatg

SEQ ID NO: 276273 - DNA, 356 bp, Homo sapiens
  chr21:45626013-45626369
  hypo
ccgacactagcacccgtgtggaaggaacgagagggagatttggggtccgcagaggcaaaccacaggaggacggagtcggagactggagcaccgcggccttgatcgggggacaccagggctgccggctgtgccagaaggggctgaggctggaccggattctctccgagttcccagaaggagccagtcctgccgacgccttgatgctggactctggcctccagaaatgtgcgaggacaaacatctgcggtttctaggccccgcctgtggtcctctgttgcagcagcctggacagtctggactgcctggacagcatgcagatgggctctgcccgcggctgcccacgagttcccaccgcc

SEQ ID NO: 276274 - DNA, 265 bp, Homo sapiens; identical to SEQ ID NO: 220473
  chr21:45628849-45629114
  hypo

SEQ ID NO: 276275 - DNA, 283 bp, Homo sapiens
  chr21:45653663-45653946
  hypo
ccacgaggaacactcgggtggttcctaccttctggctgccatgaacattcacggacaggcatttgtttgagtccctgttctgaatcctctggcctatatcgctaggagagaactgctgggtcctgcagtgcttccacgctgagcttttcgaggaactgccacaacgttccccatggcagctgcgcccttctgcttttccgccacgatgcacaaagctaacaatgcctctggtctctgtgtgcagtgcccttcagagagccgtcctcaccggcaaacaagcagc

SEQ ID NO: 276276 - DNA, 216 bp, Homo sapiens
  chr21:45656873-45657089
  hypo
gccccgcagcatgccggccggtgacatcagggctcggttccggtagcggctgtccacgttttccaaggagctgttctgtgggatgtggtaggtcaccacggttttcgactcactggtttgccaatatacgtaaacatcatttaaatcaaaacggcttccttcagggcaagcgcagctgagctccacgtcgctgcctaccatcgctctgacttcctt

SEQ ID NO: 276277 - DNA, 100 bp, Homo sapiens
  chr21:45676496-45676596
  hypo
agtttcaccatattggccaggctggtcttgctcatcctggcagcttccagaacctcggagaagagagccccaaggccagagatgccggggagaggtgagc

SEQ ID NO: 276278 - DNA, 132 bp, Homo sapiens; identical to SEQ ID NO: 220475
  chr21:45678289-45678421
  hypo

SEQ ID NO: 276279 - DNA, 110 bp, Homo sapiens; identical to SEQ ID NO: 220476
  chr21:45709581-45709691
  hypo

SEQ ID NO: 276280 - DNA, 50 bp, Homo sapiens
  chr21:45713496-45713546
  hypo
atgggactggtcccgctgtcctgcagcctgcgtggcaccgtgaggctcct

SEQ ID NO: 276281 - DNA, 41 bp, Homo sapiens
  chr21:45730210-45730251
  hypo
ccagtgtggccggcgtggcgggacgcggagcctggagcccc

SEQ ID NO: 276282 - DNA, 83 bp, Homo sapiens; identical to SEQ ID NO: 220478
  chr21:45736416-45736499
  hypo

SEQ ID NO: 276283 - DNA, 218 bp, Homo sapiens
  chr21:45744630-45744848
  hypo
ggcaggtgggacgcgtagcccagtgctcctgctggccccggatcgccggtcagcctggaattccctccccacagtcctccggctcatccgtgtccgcccctcccgcaggtcaacgtggagcacatgacggagaagatgaagacagacattcagaggggcctggtgctgcggtgaggctgccgtgggtccctggccacagctgcgcgtccaactctcgg

SEQ ID NO: 276284 - DNA, 502 bp, Homo sapiens
  chr21:45750033-45750535
  hypo
gacgctggggtccccgtggaggctggagcggcgttcaggtcctgcggtcactcggcgtgctcctgcacctcttccccacgcagggcctgcagccggctgcccacagtctgctgcacggcctccagcccctctgcatccagctcccgcagcagcagcaggatggcagtcaggacgttctgagggcagaggggtgcggactaagcccacccggcacggcgaggctgcttccctccacaagggctggggcctggccagcggtgccccaccacggagcgactggtcccgggggtgtgggccgtccaagtgactgaccggcacactcggagaatctgagcagaggagccccgcctgtggacgcgtgtgtggcacctcttccacgtgactcctgttgccctcagcccagcagggcccgggcccacattccacagaccaggacagcaggagaggctgaggggccaggacggctccgtgcggggcacgtgttacacgtgtgtgcgcattc

SEQ ID NO: 276285 - DNA, 210 bp, Homo sapiens
  chr21:45751583-45751793
  hypo
atgagaacagacactccccccggataatccctgtccctcacttcccagagacgcagctcacgggaagccccattcactccccgtgggaggaccctgggggacagggatgggctgcggagtccccgctgccctccagcctcacgttgcctcctcctcgctgtccagcgggtcccggccagtctcagcagcggagctgagggagctcagtgt

SEQ ID NO: 276286 - DNA, 613 bp, Homo sapiens
  chr21:45753623-45754236
  hypo
ttccattctacagaacgtggacgcgtcagagaagagaaacagcaggcctggagcggggacctgcaggctttaccctgcagcgtggggtccgtcccctccacaagcgaacacgcggagccgctcccgcaggccctcaaaggcgcggagccagggccccctgcctggagggctgcactcgcgtccggcaggcgcctcagaagggcggtcaccaggcccccatgggcagcctgccgtcctgagcccccctccccatgccatcccttcactcggggtttcccaggtctcatgcagctcctagctatgaggccgccccattttaccaagagcaaaactccggctgtgggactctttccaggatggggtctgcctcaggcacaggcagcagcgtgatgtaccgaccgcgtccgcggcctcgaggcttcctgctccgctccagtgcagtcaggcgtgcaggcaccacgcacctgagctcggtcaacacccctggggtcctgtccctcccgagatgtgacagaaatggccccacacacgagcggcctgatgctcggaggccctgtggcccctgggtgactcagtgagcggcagggatagggctggatccacagccccgccc

SEQ ID NO: 276287 - DNA, 192 bp, Homo sapiens
  chr21:45754286-45754478
  hypo
taagcctttcggaggcaggcctgaaatcccagcctcactgtgtcgcctgactagtgaaacgagccccgcggcaggcacgcgcaccccccctcaacctctgggcgggcacgcgcaccccccccccccccccgctcaacctctgggcgggcacgcgcacccctgctcaacctctggactcgggctccatctcct

SEQ ID NO: 276288 - DNA, 241 bp, Homo sapiens
  chr21:45768305-45768546
  hypo
gggttttatggtcgcgtgtcctctcttttatgggaagaatatcgtgtaattgctactgcagcagcgtccgggcagacagacgtgcagtgtgcggttcttctctagaaaggcaggagccgctcccagggcgatgtgggcccggctgtttcatcagagatggtcagcttggtacctacttcaccttaaatgatgttcccacagaggccccgggatacttggaaacaagcgcccagcccctctc

SEQ ID NO: 276289 - DNA, 299 bp, Homo sapiens
  chr21:45768770-45769069
  hypo
caactcctgcagtgggtgctcgtcgagcacatctagttgcagggtggaccgggcgaggactgtaccgtccagcagggcgcagctgcgggtgtgtggggacactgtgtctagttgcagggtggaccgggcggaggactgtaccgtccagcagggcgcggctgcgggtgtgtggggacaccgtgctggccactctggagggcagcttccggccatgcttgtgcagagcacagtgtcctgaagaggtgacagtgtcctgagtgctgtcctacaccaggggctatgaccgccttcccaccact

SEQ ID NO: 276290 - DNA, 623 bp, Homo sapiens
  chr21:45790610-45791233
  hypo
atgaatgtgtccggcggggtcggactggaccagctgttgggctttgtttgctctttttacgaattgaaaaactgaagccaggagcggctgggtgacgtcccaggtcactccttactttcctccccacgctgagctcagacgacttcccgtgacaccactgttggtggcggaatgggactgtggctgcttccgctcagccacgctccctctctgtggacggcggagggtgtgtgtcccagcccggctgccgccctcccttaggtctgtctcccggggctgctgtaacccaggctcacaaacctggtggcttaaagcagcagaaacttagtctatcagatctggaatccgcgtcgattggccatcatccagccatcggtgttggcggggccacctccctctagggcctaggggaagagcattccttgctgcctccagcgtctgggtgctgatggcattccctggccagtggccacctccctccagtcgctgcctccgtgtcccatggccgcctccctccagtctctgcctccgtgtcccgtggccgcctccctccagtgtctgcctccgtgtcccgtggccgcctccctccagtgtctgcctccgtgtcccgtggccgcctccct

SEQ ID NO: 276291 - DNA, 592 bp, Homo sapiens
  chr21:45819156-45819748
  hypo
gggctctcatatctccgcccaggggtcttcaccgagtgctaccggaaggacgaagagagagcccagaaactgctcacccgcgtgtccgaggcctgggggaagaccacctgcctgcagctcgccctggaggccaaggacatgaagtttgtgtctcacgggggcatccaggtgacctcccaagagccccttccagaaacagacgcctgtggtgcctgcagggcggacacagcctcctgttcgtgcagttggcacgcacactcacacaggcttcagggccctcagcagctcggggacagcgcctgacccctcggccacctgctccaggctctggcctcccattttgcagatggggggaagctaacatgaagcaaaagcaggagctggtggccatggagatcgcaattcacctccccatggatgttcctacctgggagcggcaggcagaagcccaggtggctctgggaacggcgtctgccctctctccctggagggataagcgggacacggcgtgtcctccctggagcagcaggggctcccaggcatggctgccctcagcatcgccctggaacccccggcagggcctggctcccag

SEQ ID NO: 276292 - DNA, 267 bp, Homo sapiens
  chr21:45834112-45834379
  hypo
actctctgtggtcactgctgcgtctcttgagctggcgtgagtctgtctcttgagctggcgtgggtctgtccttgtggctgctggggacccgcggtgctgtggatccacaagggccctgctcacggtgctgctgcggaggcagcctcctcccgcagggcagggatgttggtgtcagcctcgttccttctgcgcaggcgcagcattattcatgggctcactgctctacccggggagcgtgctggggccgctgctgctcagggctgtccc

SEQ ID NO: 276293 - DNA, 361 bp, Homo sapiens
  chr21:45847672-45848033
  hypo
cctctgcctggagccggaggttgagtaaggaggtggtaggaggcgatggggcctgagagcagaggtcctggccaggtggctgcagctgcaggcggcccgctctggtgttgggggtatgtgggacgggcaagggcgggtgtttagggaggtgcatccggtggctatgggaagctgacgaggagagcagcaggtgcctggcatgggcaacaaggcgtgagcacctgctctcacgggtggctgccacacaggcaggtgtgtcaggacttggcaggacgtggtgtccatgcgggctttagtagtgcagaagagcactttctgtatgcaccatgcttctgttgtggacttgcgaatcatattttca

SEQ ID NO: 276294 - DNA, 142 bp, Homo sapiens
  chr21:45871121-45871263
  hypo
gcggaggggccaggcggggaacacacacggaatcctaaggaaaacctgaggctggaagagaggacagaggaacagggctgtgtggagcggccagggaagaatcagcacacaccgggcccggccagagcgctcgtcacctcaa

SEQ ID NO: 276295 - DNA, 153 bp, Homo sapiens
  chr21:45895239-45895392
  hypo
ttaactggtatgtgaccttccgctggaatgctcagctggcaagggaagagcacctcaagtgagcatgtgtacaatttcagggcacacattgtgcacgcagcccctcccacatgctggcaggccacggcgcgcgtgacagcccaccccaaggga

SEQ ID NO: 276296 - DNA, 38 bp, Homo sapiens
  chr21:45895655-45895693
  hypo
ccggatggatccaccgctgctgacgtactttggtgctg

SEQ ID NO: 276297 - DNA, 212 bp, Homo sapiens
  chr21:45919121-45919333
  hypo
cctctgtccgtgtccgtggtgaggggctgtgcccacccgctgcctagagaggagcaccggtgcttttgtaaagagcagtataaatacacttccgttcagataaaacacaataaataggtggcggcaatggcgggacggcaccacacctgctcaggcggccggacgcacactgcaggagtggctggcgagaggccagccgcagggacatgaac

SEQ ID NO: 276298 - DNA, 218 bp, Homo sapiens
  chr21:45922476-45922694
  hypo
ggatgtccacacgccgcatccctgacagaatccaaaggcagaagcaccagcactcgtgggttgtggctacacccggggcagggccccagctcagatcccacacgggtgcagccagcgccgggccatccactgggcccagccaatctcggaaatgacacctgacttgggactcgctgtgagccggtggcacctgcgagagaaggtgagcccccgggggg

SEQ ID NO: 276299 - DNA, 288 bp, Homo sapiens
  chr21:45929105-45929393
  hypo
ttgacaaaggcctgcgcggtcacgttcagctcgtagatgacggagttgatgacataggaatcattctggacttgcatctccacatcgtagctgtgactgtttgccacagcgaggaagatcctctccccgatctggaagacctcccagtctgcagcaccgaacgtctaggaccaaaggagagcaggtgcagaggtgtgggggagcgggcgcagaggtgtgggggagcgggcgcagaggtgtgggggagcgggcgcagaggtgtgggggagggggcgcagaggtgtgggg

SEQ ID NO: 276300 - DNA, 761 bp, Homo sapiens
  chr21:45939229-45939990
  hypo
agccactgtccccgcgtatcgagccctccttgggagtcccaatttccagcccatatcacgctcttggccccagcttgcagctgctttcgcatctcaacctcaccagcctcaagtccaactccaggtcaatgattactggtcagaggggccattcctgctgagccctgtggtcaggctaacccatgaccgaaggctcctgaaccctccttcaggtccgctgtccgcacaccagcacgtggccaccagcccaggacacccttgtagtttcccagagtcttagcagcatgcgtgttgtggtgagaggactgtgcagggaccagtaagacaaggaacttatgctcagctctgtcccgtgccacatcaaaccaagtgacaggccgcattgcttggcttgatcccagttctgccacgggcaaagccctccaccgttctgagcctctgtgtccttgtggataacagggaccagtggcagcaagcccctctcaaggtgctgtgagggtgatgtgggcggatgcgggcagagctcttggcacaggtgctctacagagtcgaggctcagccagtgtgagccgctaccaccacctacctcctgaggctgttaccaaggccaatggctggaaggaatcttgctcacccccaatcccagtgcactgagcctcactctgcccccgtggcaggaggctcatcccgcctcttcctggctcccaggcacgctcacctgttccatccacagcactagcgagctcaaggtgtgttccttc

SEQ ID NO: 276301 - DNA, 266 bp, Homo sapiens
  chr21:45940260-45940526
  hypo
tccctgacatctgctctcctcgtgccctgaacatccacgtaaagctgcccttccccactggaccatgagtgcccgaagggtggggcggtggtcacctggatgacgctgtgccccagcctgccagagggctgagcacgtgggagtcccggagcaattctctgcacgcattaaggcgtgtgattggtccctgtgagccgcggctcctggtccggcccctgcgggcttctcaaggtggtcacactcccggtttcctaagctgctcttac

SEQ ID NO: 276302 - DNA, 496 bp, Homo sapiens
  chr21:45941788-45942284
  hypo
aggagcccaggagtcggatgtagaggtgcgagtgcaccttggtggaggtgccgttgaaggtgttggccaccaccaggaacgagtagggccccacactgaagaactcccagtcgtaggcgccggaggtggcgatggtctggttggcctcgaagagccgggttgccgggttccacttgtagatgacactgtcgatgttgtggttgtcgcctggaaccaagggactgtgctgggggcagggaggcagattccacagccccatggcagccccgacggaggcagagcccagtccaagtccctccccgaggaccgaagacccacgaggacaaggccaaccgctggggacatcctttcttaccttgagcctcccgccctcagccccttgctgactgcacctctgggccatcacaggtgctattcccatatggaaatgcttggtggcccccaccgcccttgggacaggtgtacatctccatggcctccccgtgtcctggaggtg

SEQ ID NO: 276303 - DNA, 91 bp, Homo sapiens
  chr21:45951200-45951291
  hypo
gggcagggtttctccgaaggctccagaggaggacgcttcctcgactcatcagcttctggtggctgcacgtgctccccgtgacctgtggcca

SEQ ID NO: 276304 - DNA, 88 bp, Homo sapiens
  chr21:45951689-45951777
  hypo
gcaggcggtcttgacgagtgcgtggaggctgaactccggagatggagcaaggtgggtgcccgctgagggacagcgtggctagagctcc

SEQ ID NO: 276305 - DNA, 223 bp, Homo sapiens
  chr21:46035054-46035277
  hypo
tgctgaaaaatctccggcgcatgtacgtaagcggcactgtttgttaccatgaaaaattagaaacaacctaaatatccatccacgagggaatggaggcgaatggagccagcgccgcaccacggggaggccctgcacgagggccgtgcgctcacccgacccgcacacacgcaggagcgcgagtgcccaggctgcggaagagagtccaggccgcacaggtgccaag

SEQ ID NO: 276306 - DNA, 83 bp, Homo sapiens
  chr21:46036538-46036621
  hypo
ggctttgtttacctggaacccgagaccctgccctggtcagcacccaattcgagagctctgctcagcagtgagaatgagacacc

SEQ ID NO: 276307 - DNA, 176 bp, Homo sapiens
  chr21:46036651-46036827
  hypo
gctcagcgcaggcagcgcacggacagagtctgcggtgtgaccacaccaagcagccctaaggcagcacgtgcccgcacaagcctcagcctctgctccggtcacgcctgcccacttgggtgtattttttgtctgacttttgcttctggggccgaacaacccagcgaattcaacacagc

SEQ ID NO: 276308 - DNA, 222 bp, Homo sapiens
  chr21:46068601-46068823
  hypo
gacgcacccagggccgcagcctccagggcaccagagactttcagcctcccgatggctcccgaggggaaaggcagggacagccatggccgagcacagcttgtgacacccgggcccctgtgctctctgtggcagctgacatgcaggtctgctggtggccgtgtgtccatgcaactgtccaagcccacgcggtcaagctgccgtgccagacgcagaggagaaact

SEQ ID NO: 276309 - DNA, 196 bp, Homo sapiens
  chr21:46144852-46145048
  hypo
aaaaaaagaaaaaaaaaagtcttaaactaggactatgcttttggagcatgtcgcagggatctgaggcttggggtaagcgtcggagactggctcatttggagcttttggagcatgtcgcagggatctgaggcctggggtaagcctcggagactggctcatttggagcttttaaagcgtgtcgcggggacctgagtcc

SEQ ID NO: 276310 - DNA, 293 bp, Homo sapiens
  chr21:46155037-46155330
  hypo
ccagggctgcccggcggcaagtcacgagcagggcgtcactgtcccagcgcggcttcccagcctcctgcaggggccagggttggggtgcattctctgtcttctcagtgaggacgcgcaaatgttccaggatggaagataaatgttcaggaaaacgaggacccagaaattcttcatgggctgcatgagccctgaggcccgactggcaggccactgaggtcacctgaaaaactggtgacaacgggcgggctcagcggctacccggggacaatcacggcaggcggaagagcggcact

SEQ ID NO: 276311 - DNA, 326 bp, Homo sapiens
  chr21:46173265-46173591
  hypo
ttcgccgtcagtaccgctcagggccccagctacctgttctgcgtgtctgtggctgggctgtgtagtagaatcccgtgtcaaagcacccaccctcagaggctcctgggggaggcccggttctgtccagcagcatgggagagagatggtgctgatgaagaggacaacacggggctgtctgcagagcacctgccacgcgccaggctctgtgtccacaagcacggcggctgctcccacatgacggagctcgtgcggcagctccaggactgtctggtgccagagccccagctctccgccagccccaggccactgtgcgaggccctcagtga

SEQ ID NO: 276312 - DNA, 306 bp, Homo sapiens
  chr21:46183769-46184075
  hypo
acacccagcacacccggggcaccctgcacacccaggcacccagcacactcaggcaccctgcacacccaggacacccagcacacccggggcacctacacacccggggcacctacacacccggggcacctacacacctggggcaccctgcacatccgggcacccagcacacccaggcaccctgcacacccaggacacccagcacacctggggcacctacacacccggggcacctacacaaccggggcaccctgcacacccaggcacccagcacacccgggcatccagcacacccggggcatctacaca

SEQ ID NO: 276313 - DNA, 200 bp, Homo sapiens
  chr21:46184287-46184487
  hypo
ggcacctacacacccggggcatccagcacacccaggacaccctgcacacctggggcacctacacacccagggcacccagcatacccgggcatccagcacaactggcacaactggggcacccgggacacctggcgcactcggggcacccacacacccagcacatgccgccccaggcccatggaactcgtgctctgatctga

SEQ ID NO: 276314 - DNA, 38 bp, Homo sapiens
  chr21:46186208-46186246
  hypo
gccttgcagattcagcgatgcatcggggcacggcgagg

SEQ ID NO: 276315 - DNA, 190 bp, Homo sapiens
  chr21:46187770-46187960
  hypo
ccatacagtggggacggccgtcctgaggcccgctggccgggctggcccttggctggcgtctgggaactgggatttccgaggggctccctgaaccccgcctcactgggcctgtgctatttgtacaaggtggtttaggcagaacactcacatccctgctgagagtctggaattgtagcgcagcccaggcaga

SEQ ID NO: 276316 - DNA, 212 bp, Homo sapiens
  chr21:46193373-46193585
  hypo
acattctaaagacaggatgacgcaaggctggagaacacctgcagcctgggtgtccacggcagctcctgccaggaggctcgggccttacctgccagcatgctcaccaccgacagcaggatcttctccacactctgcacaggactccaccgctccgcgctgctctcgtagcccatggggtcatcgcctggcgcgtggaggatggaaatgcagac

SEQ ID NO: 276317 - DNA, 167 bp, Homo sapiens
  chr21:46199322-46199489
  hypo
agcatgaccagcacagggaacgccaccgagggaggcacgagcatgagctcttgctactggtacaacagccgcgctggagaggacagtgcccggatgagtaccccccccggcccacactggcacccagcgcccggcagcctggggacgcctcaagcctgggttactct

SEQ ID NO: 276318 - DNA, 110 bp, Homo sapiens
  chr21:46200862-46200972
  hypo
caagtgggtgccctgagcttcgccggcaagcggtgttccaggaactggtgcgctcgccacttcagctgcacgcaggtgttgggaaagccgactgcttttgctgctgttct

SEQ ID NO: 276319 - DNA, 299 bp, Homo sapiens
  chr21:46206038-46206337
  hypo
acagacaggcctcccgccactctgggcccctgcagcaggcgtgctgccccgctggcatgagtgcaggtgcgcctgcattaacacatgaaacaagcaggttacacatcagttcatgtatatgatctcctgcttctacagaaataaaaagagctgccccgatacaagtatacagccgcacagtccactaatgaggacagcccagactgtgggactcgccatccatctcataactgccttgggggccacattacacacaaacacagattccagaaaccttcagacaccgaaaaaacatgtgc

SEQ ID NO: 276320 - DNA, 100 bp, Homo sapiens
  chr21:46238872-46238972
  hypo
tccctcaggagtgcccgggtggtgccagccggggcgtggcggaggtctcatctgatggtgagcccggccgaaggcgggggaggccgcacttcaggctcag

SEQ ID NO: 276321 - DNA, 326 bp, Homo sapiens
  chr21:46256956-46257282
  hypo
ctccgtgcagtccccggcacccagggtgcagcccccagcacctccgtgtagcccccgacacccagggtgcagcccccggcacctccgtgtagcccccggcacccaggcagtccccggcacctccgtgtagctcccggcacccagggtgcagctcctggcccggcctctgctttgccggttgcttccagtcctagcagcaaagatcgcagagcctctgtcctcttggggtgcggggcagagcacgggcaccatctcctcagggctgggcccccgttcttgccctacgactctgcagagacaatcgtgtgactcgcagctcatgaatt

SEQ ID NO: 276322 - DNA, 307 bp, Homo sapiens
  chr21:46257709-46258016
  hypo
tgggaacctgcctgcggtgcaggcgtctgcccttcctagaggaggcgctgggtgagaccctccagggtgtttggggccaagctgtgcgcacctctgatgccagctgttctcggtttggaaagcgctcactgtgcatgtggcgctgggggctgagctgcacgttccaggccccccccccaggccccccgcacacatcgtggcccacagccatgagcctcgcagcaccaccataaaggggaatcataaatagggaccaggtcccagaaggtgcacacagcgcgcagggcaccagcgcccgggtacgccc

SEQ ID NO: 276323 - DNA, 197 bp, Homo sapiens; identical to SEQ ID NO: 220491
  chr21:46270477-46270674
  hypo

SEQ ID NO: 276324 - DNA, 276 bp, Homo sapiens
  chr21:46277397-46277673
  hypo
tcttgaaacaaacaaaaaacacccagccagcctcctgaagatggctttataagcaaactcccctgggcagtagattaccgcatgattcactgtttttaactacagttaatagctgtgccaccaccacaggtgacaccgtctcacctccaggggctgggagttgaacacttgctgcatgcctgggccctggcaaggaggccgacggccaggcctctggggctcccgcagcctcacccctctgctgccccggacgctgagatccgcatttcttagttt

SEQ ID NO: 276325 - DNA, 42 bp, Homo sapiens
  chr21:46278609-46278651
  hypo
catccacttctgcagcctagcgtggggatgtcatttcacaag

SEQ ID NO: 276326 - DNA, 403 bp, Homo sapiens
  chr21:46306497-46306900
  hypo
ctcacccacagcggcggacgcccagaggacaagctgcctggggaggccggggtgcagccacacacgggtgtccacggcctcccgcagcaggaggtcgcatagtgtgggacgcacgtgcccctctgcgtgggacccccaaggacggccacttacattgttccactgggacttgagcttctccttctcaaagcgcctgtactcccggaggtcgctcaggtggatcagagccttccagatgaccagcaggagaatgccgatcagcacgatgcctgccacggtgcccccgacgatggcggcgatgttggggcctgccacacactctagggaagaagcagcacacctgagcgtcagtccagccccatctcactgagccgtgtgcccacaggtccgaggtcaccccaca

SEQ ID NO: 276327 - DNA, 1470 bp, Homo sapiens
  chr21:46308527-46309997
  hypo
ttccgcaccaccctcgcctctgcggagaccccgcagccggagctctggagccggtccccgctgcaccccagcggcctcacctcggctctcatccacatagatgaggtagcggtccatcccgtcctgctgctccagcgtgtaggccacccagcagccctctgagtccctctccttgcaggtcctgcccttcacggggttgttcgacagctgcaggcccggacacgccgcgctgcagttcttcccaaaggggcccttttcgaacttcaggcactcggcgcaggagctgcggggagccaggtgtgagcatcggtgccagggtgtgcgggggctccggcaacgggggctcgggcttgggtgtgtgtccaccagggggggcaggtggggttggggcgccctcaggccaaggagggggcccaagtggggcagatgcgggtgcagcgggtgaactggaagcctgatcccagggcccgcggcaggtgcgcacaggagggaggagggacacaggggcacggcggccgcggagggcccctcagtccagacgcacccgcagagaaccccgcggtgcagaggtgctcactggggtccccgagtgagcccggctgctgggtaggtggccggggagtggggatccctgcccgccctgcctgctccgcctgcactcacatgtacttgccacagggtgaggggcagccggggcactcctggcacagaggcagctggtagcctgaatggcactcgcatacgttgcagcggcaccggccacgaccactacactcaacacgccgcgggttcaggcagccctcagtggtcctctcgcactggcacgctgagccctcaaagcccgggtggcagcggcacttcccgcagaagcagagccccctccctggaagacggggcagcacggctaagctcctgcttggcctgggaaccgagacccgcccgaaaccccactgcggttgctccctccggcccgcctgcctcctccagcctgggggatgttcctgagcaaaaggcatggggccactagccaggcccttctgcccccgccagccacgtggccgcctcctggccagtctggacctcccctgccctgctgtgaatgggacctcaatagggctatgaccgttcctcctgtgggccctccccacaaggacgccttgtcctcatggacacagaaactgaggcagggcggggtgcagggccatccaagttcctgctgacgcccggtggctgggcgagacttgcactgtctgtcctcaggatcccccctttctgttccactcgttgaatggtccagaacgcaccccccaacaccaagtctgtgccgcaggacggccgttgtccagcagggacccacgggctcacccgggccgccgcagacctggccgttgtagcgctcacagttgatggtgtcacactcgcagtactgcccgtatatcagcttgccggggacgtcgctggtgtggcaca

SEQ ID NO: 276328 - DNA, 383 bp, Homo sapiens
  chr21:46310423-46310806
  hypo
catggcctgtgctgcgataccggtgctctgtgagtggctggtgtctgctcctgcgtgccccacatggtggccagtggggactcggcactgcctcctgccacagccccgccctccctcctgcgttcgtgcactgacaggccaggttgtgggagaatgcagggacaaggggtttttacagatgtggaagctggcatcaagccgctggcaggcaggagccacacacaccctgaggcatcctcagagacggcactgccacgggctctcctgctccccagaggaggaagctgcaggaccgagtgtctgagtacctgtggcagggcaccccccgacacctgccaagtgttccgactgagtcacccctacagtcccgtgaagaggccgcc

SEQ ID NO: 276329 - DNA, 178 bp, Homo sapiens
  chr21:46311697-46311875
  hypo
tcaacagggacctgcgcccgcctcacctgcagatgccgcactccaagaagcccttgccatggcagaggctgcggtctctgctctggtcccggcaccggcactcacactggggaagaacctgcacggtcactatgtccgtgaagcccagcgcccggatgacaaacgactgctcctggat

SEQ ID NO: 276330 - DNA, 107 bp, Homo sapiens
  chr21:46315933-46316040
  hypo
agtgatcccgcctgcggtgtgagtgctcccgcctgcggtgtgagtgatcccgcctgcagtgtgagtgatcctgcctgcggtgtgactgctcccgcctgtggtgtgag

SEQ ID NO: 276331 - DNA, 586 bp, Homo sapiens
  chr21:46316855-46317441
  hypo
tggtgaggaggggaccgtcatggccacctacagatgggacacagggctgtgacatcctgaccagcaggtggtctctgtggatgtccggccccagccctgccctgcgctgacccactgtcccggcagcctgaccagctctgggtgcccactcggagggtcccccagacacctgcccccatcccgtgtctcccgcagggtcctgctcccactccagagcccggggaacctatggcaggaaccgctggtctcgctgtcggccccaacacaccacgaggttgagcttgtagctgggatacgggcctgacaatggatccctgtagttcagcaaatgttcactttacaaaagcagcggccctcccgggcactttccttccccaaaccccgagtatgtctcctcagcctaagcagcagggcaggggctgtgaggctgcccagctgggcagagccccaggcagggggaagagggggccctggtttcctgcgtgccattttgaagaagatggcggtgatggccctggaatggccagcaggtcggtcactgtccggatgaggataatcgggccctttagggcggctgctctgtgaa

SEQ ID NO: 276332 - DNA, 1058 bp, Homo sapiens
  chr21:46318786-46319844
  hypo
tatcgacacgcaggcgtcctgtccccgacgggaagcctcgggctcctcacctagggggatccaggacctgggccggctggttgctcacgtgcccagcatgcagaggtggcgctcagacctgcagtggcgctgggtctggcctgtggctgaaacatgcccccacccaatggatgctcgggacccaacagcactcacctcgtaggtcttcaccatcctactggtcaccgcgaagatgggctggatgttgttttcagccagcttgtgcgccagctggcccaccgatgggtagtcctggagagaggaggtcctgctcagttggccccgagtccaggacaaggcttccaggtacccgcccctgtctgccccgctcagcgtcagccctgcccgtgcttcgaaccctctctggggaaggctggagaggcagaggctgccacgcaggagtgcagggcagagagctgccacgccctctgggcaatgtgtgcatagactcgggctttcagagtccaggcatgagcagcatttgaggcgtctcaccgtgggactggggatgtccacgggggcagaatcccagccttccccacacggtggacctgctttcgcactgagggacactcagtttcggtagaggccatgagtgtcaggtgcggctctccctacccgagttccgggacccgagggccgtccctcccgtctgtggctcccggcggaggacctgagtcttgtatctctaaagtcctttgcggcccccagagcctacaacgtcaggctgcaagagcgtcgcactacggccagcgaggacaagccccttgtgaccagtggttgcctctcggcccacggctgatcccagccagaagtcctggcccctctgagccattgagatgcctccgcagagaggctcatcctaacccgtgcatcctgggctccttctcgcctctgtccctccctgcatgttcctcatggtccccgcagccgctcacccagctcaggcaatgggggcagggaggggccacactggaggaggcggactcaggggcagcagggaacgtacagtggaggcc

SEQ ID NO: 276333 - DNA, 654 bp, Homo sapiens
  chr21:46320219-46320873
  hypo
ggggtggggacttacgaattcgttgctcctcttgtacaagttgtcctccaggtgacagcggccgtcgttgggggtcaggatggcgcccagcttcccgtcgcccgcgaaatggaagccgtcatcagtggcaaacaccagcagccgcgtgacgttgcgccagccgatttcctcctgagaagaaggcgtggggggcagggttacctgcctcagtttcccagacccggccctctggagcagaggagacgatgcagagctggtggggtggcccggaggctggtgtgggtccccctttcccctgggtctcagggacccagctgtgttcccccagacgccacgcccaggaggagacaacggccctcaaacaccccgtgcacatgtgaggcgcagggagtggaggcacgtgtggaaaggcaaggagagagacacggctgcggtccctgcacttcagagctgggaacaaaccctcaggaaaccatccccaaggggaaaaaccctcgcagacgtgtgggccacacgcagaacgagtgcaacatggaggaaaacgagcctgaggggcccagcaggccttgagtccaccattgacagcccctggcaggcgcatgtgggggccgtgcgtgtcctaggctgtgacctcacactcgtgagcagtgtgtc

SEQ ID NO: 276334 - DNA, 216 bp, Homo sapiens
  chr21:46321383-46321599
  hypo
ccaagcaggggcagcggcctcaccgggcaggcggcgacctgcatcatggcgtccagcccaccctcgggtgcatccaggtttccggaaatcagctgcttcccgacctcggtctgaaactggttggagttgttggtcagcttcagcacgtgcctgaaggcaaacgggggctggcactctttctccttgttggggcatgggtttcgcagcttatcaggg

SEQ ID NO: 276335 - DNA, 659 bp, Homo sapiens
  chr21:46323289-46323948
  hypo
ggactcggtgatctcgttgagggcccggagcaggtcgccacctagcttcttgacattcctgaggtcatcaagcatggagtaggagaggtccatcagatagtacaggtcgatggggtagcccttggcccgccggaaggtcacgttgaacgctgctgcctggcctgccggtggggacagaacaaaaggagccacacctcacatctcacacagggtgtctgggggcgtgtggccccgagcgggctgtgcactggcaccctctcctccagcccccaaatcctcctgacctcccctctccccgcctggcaggagagctgaggaccagacacaggacatccaggcaggctggagtttcagaggaaggacatgactcccggacgcaggcatgtgcctcgcagtgacactgaaacccgcctggggtgcttagagttgacgccagcgacattggggacgcctttcattgagagtggcagcggctcacctgggctcacacctaacccggccccatgcctgcagtcccacgggcgccctcatcagcagccacatagacaggcatcacacgaacctggcacttcccagcaaggcccacgcgggccgtccccaggaggcccctttctccatcccagccctggacttccgctcgcccgcgtctcagtcacacg

SEQ ID NO: 276336 - DNA, 88 bp, Homo sapiens
  chr21:46324432-46324520
  hypo
ccaccacacatgcacgcatacacacacacctcacactcatacacaacaccagacacaaagcacacatactatatgtacttgttcatat

SEQ ID NO: 276337 - DNA, 242 bp, Homo sapiens
  chr21:46324928-46325170
  hypo
ctttgggggccgtgcggcgtctgcagcgacatggaggaggcagccaagaccatgtccccacgagcaatgtggccatgctgcagtcaaagggcacagacataggcctttggtggctgaccaaggggccccgtcccttcccttccagagtagaggctcagcgaagggccagcaggctgcgggggtagggccaggaccccgcgagaggacagtcccttcccagatcctgccgccctgctctggga

SEQ ID NO: 276338 - DNA, 37 bp, Homo sapiens
  chr21:46325576-46325613
  hypo
cttgtgcctgctcacggggcagcgaggggcaggcctg

SEQ ID NO: 276339 - DNA, 447 bp, Homo sapiens; identical to SEQ ID NO: 220496
  chr21:46326563-46327010
  hypo

SEQ ID NO: 276340 - DNA, 625 bp, Homo sapiens
  chr21:46328823-46329448
  hypo
ggatttgagcaactcggggaagaaaggacagccacagatcatgcactactgaacaaaataaaactgtgggtcacgctgatgagagagaggctgcagagaaggagagacccttccttaggttggcagccgtgagtggcaggcggggaccagcacggcaccaatctgcagccatcgcagtgatggcggcttcaggcggggacctccgcggatgctgagcctgcgggtgcgatttgatgagggcagaacctcaccagcccacagtggctgcgaggggatcatgcagcgggatggggaggccggggggatgccgtctcagcagagccgtccacgctgacctcatcaagactgggacggggccacagcagtgcctctcatgggcacttaggacaccgtcactgaggggctcctgccaaagcacacctgagtccaggcagaggaaactccagacaagacccccgagggtcatgctacaaagctgctctcctgacttcctcagaaacgcccaaggacaggaaagacaaagaaagctgaggacttgtccagattcaagaagcccaaggagacggctgagcgtagggcgagcctgggtgaggagattcagagcgttagacggctgagcgcagtg

SEQ ID NO: 276341 - DNA, 468 bp, Homo sapiens
  chr21:46330230-46330698
  hypo
actcgatgcattcccggcagctgctgaccttgaacttcgtgcactcctgagagaggactgagggacgaggccggctggtgagtgggtgctctgggccgccctgcccacacccaagggggagtagagcaggaaggtcagaggaggcccaaaaagacagggaggcagcctccaggaggagaccccgcattcgccaccacccccaggtgcaaagaggggccctcgggaaacagcacagctacagcctcctggcacgtgcggagacgaggcctgagtccccgacctacccccagtggcaaggtccttccccagcctcccgggaacttctgtctatgggaaagtgagggcaggccctgttctccctgattggaatgtcacgcgtggagtcccctccgtggaacacagaactcaccgcacccgagggagagcagccccaccagggcgagcagtggggggcgcaggcccagcatg

SEQ ID NO: 276342 - DNA, 170 bp, Homo sapiens; identical to SEQ ID NO: 220500
  chr21:46353949-46354119
  hypo

SEQ ID NO: 276343 - DNA, 140 bp, Homo sapiens
  chr21:46359115-46359255
  hypo
aacgccccccagtacgcccagcatagacagcacagggtgcaagcagtcagatgagcagggctcccgttcccagcacgggacccagcccgttacctcgctgctatgtttcccacgtaaacggagcaatacccaattctaaa

SEQ ID NO: 276344 - DNA, 96 bp, Homo sapiens; identical to SEQ ID NO: 220501
  chr21:46368232-46368328
  hypo

SEQ ID NO: 276345 - DNA, 511 bp, Homo sapiens
  chr21:46373000-46373511
  hypo
ctggtgtgttttccagaccccgcctggcaaggcccaggccgagcctgtgcagcaggctctcctcattcactcctcagacactactcctcatgggaggtggcagcgagtgccccccggctacagggctatcccttcctctgtgggcgcgtggccggcctgtcatgttcaggggccctgggcactgtggttttctgatgtgtgcttgtctgaggtgtaggcaggtcgtggaggctgtcttgcgaggttccctaggtggggcccccagactagctgaacccaccaagagctgcgagtggctgtacctcccagagcaggacgcctctaggtgagcagcacagccactccctcgggcaccatccccggcggtggggccctgcgtccgggcctcgggagcctgtcctgcaccatccccggcggtggggccctgcatccgggcctcgggagcctgtcctgcaccatccccggcggtggggccctgcatccgggcctcgggagcctgtcctgtgttgac

SEQ ID NO: 276346 - DNA, 36 bp, Homo sapiens
  chr21:46383298-46383334
  hypo
tttttttaaataaacgagagtttaattttgagaagt

SEQ ID NO: 276347 - DNA, 200 bp, Homo sapiens; identical to SEQ ID NO: 220503
  chr21:46392162-46392362
  hypo

SEQ ID NO: 276348 - DNA, 290 bp, Homo sapiens
  chr21:46397987-46398277
  hypo
gccaaggatgcctggcgagtgggtggccgaggcaagttggagcctgtgtccctgctgttcagtgtcctggcccttccctgacacgagcagacacggcatccacagagacagcccggacaccctccaaggccccggccgatgggacagacgggcgtacaggagccataggcagcagatcccacgctccctcggccggggccagcttggctgcccagccccagctccttagagaacgggcttctcgcttcagaggagctggtcacaaaccagtggtcgcgacaaaaccattc

SEQ ID NO: 276349 - DNA, 334 bp, Homo sapiens
  chr21:46411918-46412252
  hypo
ggagctttggggagcgtctccattgccagtcaagagccaggcgccacgcaccccagtccggagggaccgctcagcctcgggctaaaaaagggagagagcgcaagcagatggcgtccacagccgcgtctccaggccacagcgggcacctgcagggcagctgggaatgggaagggcagaggcggccagaagctcgtgccctcactgatgccggccctggcagttctttccaaaaatcttcccactcagctccctgagtcccacggatcaggcgcccttagcctgctgtgcagggggtgggggagactgaggcacagaaggccgggccccccaggca

SEQ ID NO: 276350 - DNA, 491 bp, Homo sapiens
  chr21:46424403-46424894
  hypo
gtccacccccactgcggtgcagtgccagggtgagccagccacccccggcgggagaaacaccatccccacagccggcgctcctgtgccccctcctcccagccccgggcaggcctcgcctctgtgcgtttcccatggatgaggtcatagagcgcgtggccttccgtgcctgcctcttccgggcagcagcatggtgggtgtttctgaggctcctccgtgtcgctccacccgtcagcacttcatgcctctcggggctgggccacatttcgttgcagggatgggccacgtttttaacctgtccatcagcggacggacgtttgggctgattttatcttttggctatgatgaataacgcggtgatcaacattgattcacaagttttgtgcggacccgttttcagttgtcctgagtatcagcccgggcctagacttcccgggttatatggtgatacagtttaaacgcatgtccttgccaagcctcgtgttgaactgtca

SEQ ID NO: 276351 - DNA, 430 bp, Homo sapiens
  chr21:46452328-46452758
  hypo
gctgggaaacgggccgggcaggcaggggcggggccgggcgggtgaggacatggcttctgtgcgcacggcccggcgcgatggctggtgtggacccctacctttggaacacgtggggccaggccgagggggttccgccacgtctcctgggcagagcgccagcctcagtcaccgtgtcactgtgtgtccctccacaccccgagtcctggcaaaccaaggcagtgcaggaggacgcctggtgcccagggtgatggacatgggtagcacatgggccccatgtgtccgggagcctggggcctggtgcaccaggtctcagctccttcccaccgtgggttctgggccagttgcaggcagagaacagagcgggtgcctggctcaagccggccagtgtctcccccatgtctcagctccttcccaccgtgggttctgggcc

SEQ ID NO: 276352 - DNA, 164 bp, Homo sapiens
  chr21:46462853-46463017
  hypo
ctgtgggtgctccccgaggctgcccaagggcagcctggaggaggggaaggccccgctccaggtggccacaaacgcaggtctgaggctcttgcacaaaccccacagcgcacacaggtaacacatcacggcatgcacgagtcacacaaacacggccgcaatgctgg

SEQ ID NO: 276353 - DNA, 1143 bp, Homo sapiens
  chr21:46492081-46493224
  hypo
tcacaatagaaaccgtctctgtggagaggatggcacctgaagccatggaataggaagggagcatcagaggctgctggctggtcctgcagagccgcctgagaggcctgtgggagcagcagagggtcccggccttgggcgccatccgctctctgctgctctggagggagaaaaaggacaagttgaaacttgcacaagcagcctccattctggggagttcccttgtattccccacaccaacccgcacctcagcgaaggcctgtggaagacttctgcagtgacagccccgatgaaccatgcttgccgtgcccgtcccctgtgcggtgcctcacgtccactcaggccccggccatctcaccctcctggggagatggagggaagcaccatggggatttgctttttcttgctgccgacggagcccagccaccacgggagggaggcccggccagcctgcggtgggtgggtgacatgtggcccggatctgcccggggcgcctgcctgtaagtgggcccagcagacaccccatggagccgaggcaagccgtcccagctgaaccggcttaagctgcaggcccacagagtcatgagcagtgaagagaggttttcgccctctgaggtttggggtggcctgttacacagaaatacacacaacgtcctcaggcacgtatctctttaagaatgtgtcccgagaaggcgtcccaggagtcttgatttttatttagccgtccacggttgcccctttgggtgcttcgccttcagatggggtgaagggctcacttgttagctggctggccccaaagacaggcttgttttccaccaggcagtgactgaagccggcagcctgctgcataccgcgggccttcccctgacctgtccgggactgcgggctggcggctgacacctgcggagtgcttaccgcataccaggctcccaaacttccatctgtgttcgtcttttaagttttgttgttttccagagtcggagtctcagtgttgcccgggccagagcgcagcggccatttataggcgcggacctcggcctcgcacaccacagctccagctctgagacacaagcgacccgcacccccccaccgcccagccccagcctccagactggctgagatcacagtgtgcgccaccccatccct

SEQ ID NO: 276354 - DNA, 181 bp, Homo sapiens
  chr21:46549426-46549607
  hypo
ctctgtggatactgacgagcgcccactgggcctcagatgccctctgggcatggcagggaccaggcgctcgcttggcagctctcatgtgagccgctcactggacacagccgtgctcccgcctgggagttcgggatggcatgcagagctgtggggagggagcggtcaccagggcgtgagtgtg

SEQ ID NO: 276355 - DNA, 165 bp, Homo sapiens
  chr21:46645777-46645942
  hypo
tctctgccccctagcgtgttttgtgacaatctccctgggtgaggagtgggtgcacccagccccgaggccagtggttgctcggggccttccgtgtgagttctagtgttcacttgatgccggggaatagaattagagaaaactctgacctgccgggttccagggact

SEQ ID NO: 276356 - DNA, 246 bp, Homo sapiens
  chr21:46673896-46674142
  hypo
tctggatgagcccccggtctggtggagccccccggtctggtggagcccccggtctggtggagccccccggtctggtggagccccccggtctggtggagcccccggtctggatgagcctctggtctggtggagcccccggtctggtggcgtccccggtctggtggcgtccccggtctggtagagaacgttgaggtgagtgctcgaggggttgctcgctgctgctgggccccacggtgcccacctggc

SEQ ID NO: 276357 - DNA, 185 bp, Homo sapiens
  chr21:46677735-46677920
  hypo
aaggagcacaagtccgcagtgcccatgagatcctcatgctggccggcgcaggagccatcctcggcctctgcaggtcctcgtgggaaaccgcgggggcacgtggggcggctgcagggtccgcaaagccggctgtttgcgaagggcgcagctccacctggaacagccgaggccgcccacgcgcttcc

SEQ ID NO: 276358 - DNA, 241 bp, Homo sapiens
  chr21:46723184-46723425
  hypo
gtgtgtgggaggcccgggcctcgagccatgtcttggtgcgtgtcggggggacgtgttctgtgaagatgccgcagctgcctcacctcctttccatgtgcggggatgggtgggcagcgtccttgccaggggtgttcccggcagagggaggagagcatcacccttgggccaacaccgccaccagcagcggccggaccatggagctgagcatcagctggacccagggcagcgaggggctgtgggc

SEQ ID NO: 276359 - DNA, 171 bp, Homo sapiens
  chr21:46726342-46726513
  hypo
ggtgaatctaataccgtgtgcgccgctgtggctgccgtcctctctacatcgcacctcccgtcagccccgccggcctccctgcatgtgctcacgtgctcggtctcctgtgcgtaaccggtcttctgacccttggggctcagaccggcctagaggctgcgtcccctaaagctg

SEQ ID NO: 276360 - DNA, 354 bp, Homo sapiens
  chr21:46727437-46727791
  hypo
gagagtctggcccaggagggcggcgggcagagaggacgagaggaagacggagccggggtgcacaagcacacacatgcgtgcacgtgcaaatacacatcagggacacacgtgcacagacatgctccaggaacatgaacgcatgtgcaaatacacaccaggaacacacgtgcacagacacactccaggaatatgcatacttgtgcaaatacacaccaggaacacacgtgcacagacacactccaggaatatgcacgcatgtgcaaatacacaccagaaacacacgtgcacagacacactccaggaatatgcatacttgtgcaaatacacagcgggaacacacgtgcacagacacac

SEQ ID NO: 276361 - DNA, 286 bp, Homo sapiens; identical to SEQ ID NO: 220505
  chr21:46748050-46748336
  hypo

SEQ ID NO: 276362 - DNA, 70 bp, Homo sapiens
  chr21:46756061-46756131
  hypo
gagtagggagaaagcgagcccatggctggagcgcgccaggagggtgaggtgagggcggggcccctggagc

SEQ ID NO: 276363 - DNA, 255 bp, Homo sapiens; identical to SEQ ID NO: 220506
  chr21:46763204-46763459
  hypo

SEQ ID NO: 276364 - DNA, 82 bp, Homo sapiens
  chr21:46763922-46764004
  hypo
aataaataatgaataaaataaaggtccggatgagtttggaatgtggaaggaaccacaccgggagtggcgctgggtgtgtccg

SEQ ID NO: 276365 - DNA, 500 bp, Homo sapiens
  chr21:46771045-46771545
  hypo
cggccccccagggccgcctcggtcccagcgccgaccgcgagtctgtcctccagctgcctcgttcactgggcttgagtcgacaagaacctgccagggagggtggcaggaccacgaggctggggggcctcagagtttgccctgcaatgacaagacccagaatgggggaagggcctccgcacacctggggctccgcggggaccaggacgtggtggcggccggatcccaggatgggggggaagggcctccgcctacctggggctcagcggggaccaggacatggtggcggccggatggaccccaaaaacagagcaagactgacggagagcgtggatcagggaggttctgcaccagctcttcgcacaatgaggaaagatcttgctgctacaaaatagaaggaactcagcaaacaacctctctgagtggtgggtaaagatgcccgcgccctggcacatgtggtactagaacctcatgctgtacaggcgttccgctccgctgagggc

SEQ ID NO: 276366 - DNA, 411 bp, Homo sapiens; identical to SEQ ID NO: 220507
  chr21:46772699-46773110
  hypo

SEQ ID NO: 276367 - DNA, 651 bp, Homo sapiens
  chr21:46779376-46780027
  hypo
cctgacccctcacgcgtccatccctctgtcctcatgggcaccgggtgaggcctcggggacagggaaactggacgggccccactgctgtcctgggccttcctcccgtgcaggtgataaggaggtgagagcatcgtgacggctggcacaggcctgagagggaggggatgggggctgctctaggtggggtcgggaggccccactggggagattcctccaggagacccagaaagctggaagccgccagcctatgcagagggcgctccctcctcatggatacagtccccagagaacccccccgcaagggccttaaagcgaaggcttgttctgaggttcaccaggacaagcaagtgtggctttgccctcttgccatccacacccctgggacatccaatcaggaccagcgatcgtccactgcctagaccagacccagtcatccccgaattcattatgtgggaactgaggagggggctccaggcagggggatcgtgcaggtggtcttggtgtccaggaggcctcacagtatccactcaccgccgtctccaccccctcaggcacaggtccctgtcctcatcctcatcagtgcggtcccacaactcaggtgcggcccccactccccttcccgccaacccccttccccggccctgccgccct

SEQ ID NO: 276368 - DNA, 164 bp, Homo sapiens
  chr21:46785896-46786060
  hypo
gtgacattcctcaccgcattcctcaccgcattcctctgtaaaccaggcggtgttggcacccatgagcctgtgtcttctatgacatcaggagttttatccctcacgtcagaaatcagggttccaggcgccttggtttttcttggcgccagcggcttggctataga

SEQ ID NO: 276369 - DNA, 199 bp, Homo sapiens; identical to SEQ ID NO: 220508
  chr21:46799933-46800132
  hypo

SEQ ID NO: 276370 - DNA, 310 bp, Homo sapiens
  chr21:46800406-46800716
  hypo
ccgtccgtgcacacacgctcacctcgcacccagcgtccgtccgtgcacacgctcacctcgcacccagcgtccgtccgtgcacacgctcacctcgtacccagcgtccgtctgtgcacacatgctcccctcgcaccgagcgtctgtccgtgcacacgcttacctcacacccagcatccatctgtgcacacacgctcccctcgcacccagcatccgtgcacacgctcacctcgcacccagcatctgtccatgcacacactcccctcgcacctagcgtccgtccatgcacatactcaccttgcacccagcatcc

SEQ ID NO: 276371 - DNA, 98 bp, Homo sapiens
  chr21:46800896-46800994
  hypo
caccaaggcccccgcaatccgaggaatatatttgacagaaacaagaaaaaaggatgaaagtggccaagacaagccgatcccttctatctgttttcagg

SEQ ID NO: 276372 - DNA, 589 bp, Homo sapiens; identical to SEQ ID NO: 220511
  chr21:46801820-46802409
  hypo

SEQ ID NO: 276373 - DNA, 218 bp, Homo sapiens; identical to SEQ ID NO: 220512
  chr21:46802648-46802866
  hypo

SEQ ID NO: 276374 - DNA, 89 bp, Homo sapiens
  chr21:46804101-46804190
  hypo
gccctgtgcatgaccgaagccacaagcatcaaaacagctacattcatgctgaagaggacatttatttttatttttgagacggagtcttg

SEQ ID NO: 276375 - DNA, 328 bp, Homo sapiens
  chr21:46804430-46804758
  hypo
gattatagacgttagccaccgtacccagctggcaaaatttctaggtgaaataataaaataaaataaaaatagtggtcggaaatctgtctcctgagacagaagtgtctgattttctataactcagttaaaagtggtgccaatagaaacgcagttacgacgtcaataccggaaggccaggaatgccgcgtggtgaagaaagtgggtccagaggccctccctgaccttggtgtgctcggcctggacatgcctgtcactgttgatgaacagcaggtgcagatgtgtgtgccgccctgactggggtctcggggaggcgcggcgccgtcccact

SEQ ID NO: 276376 - DNA, 70 bp, Homo sapiens
  chr21:46805775-46805845
  hypo
cgtggctgcctctccgtgagccgcacgggcagcgtgctaggcctgcgtgcctcgccggagggagggctga

SEQ ID NO: 276377 - DNA, 174 bp, Homo sapiens
  chr21:46808693-46808867
  hypo
gcgcagggcgaggtcgggggaatggactcccctgggtttctccctgccgatcgctgtagtggttgagtcctccactgagcacagccactcctgtaggcttaccccgctgcagctcgctctcggatcctaataaacaagtgagtcctccactgagcacggccactcctgtaggct

SEQ ID NO: 276378 - DNA, 142 bp, Homo sapiens
  chr21:46808897-46809039
  hypo
ataaacaagtgagtcctccactgagcacggccactcctgtaggctcaccccactggagctcgctctcggactctaataaacaagtgagtcctccactgagcacggccactcctgtagcctcgccctgctgaaccactcctgt

SEQ ID NO: 276379 - DNA, 105 bp, Homo sapiens
  chr21:46810057-46810162
  hypo
ttctccaggggcttcgccgtaagggacaggcctgacaccaggattctccaagaactgcctgcgtctcttcctgctgagcactcacctcaccgaaaccacaacagg

SEQ ID NO: 276380 - DNA, 343 bp, Homo sapiens
  chr21:46811012-46811355
  hypo
cgtgtccccttcaccggcacctgaaggcagagcaggggagttgggtctggacgagcctcttcactgagaacatccccagaaagctcaacttcatcgtaaaaattcatccacatttgtagtcctggtcttaaggttttttattgactttgcttaccgtaagatacaccacgcatccacaagtgtgtgtgtgatgtgtttgcgtggtttacagaataacataaaaaccatccgaaacacaccactgtccacaagctgagtctgaggccaggctcccaggcaaggaggtggtccctggtggcacgggcagggtgcgtggagacggggacccagaggatgcacggga

SEQ ID NO: 276381 - DNA, 163 bp, Homo sapiens
  chr21:46811415-46811578
  hypo
tatgggaggcacaattcgagatgagattcgggtggggacaaaccacatcacctggctacctactactgtaccacgcatacccggccaagatgagattcgggtggggacacagccaagccacatcacctggctacctactactgtaccacgcatacccggccag

SEQ ID NO: 276382 - DNA, 352 bp, Homo sapiens; identical to SEQ ID NO: 220515
  chr21:46812000-46812352
  hypo

SEQ ID NO: 276383 - DNA, 331 bp, Homo sapiens
  chr21:46812982-46813313
  hypo
agggcattgctcccggcacgaggccgcccgcctgcagcaggcccgcaggggcacggtgggtccccgcccgctcctcatgccttgagcgcgtcatccttcccggggttcacggcctctgacagccagacctcaacacggccagcacggtgtgcatggtgtgcacgcctcctgcgccggggccaccagagtgggctctcaccggaggagaaagacagtcggggagagcagcgctgtctgtcacgctttgtcacgctttgccggtgtcatctgagaagtggtgcaggggacaaggggggcgtgacaggactggtcctgcggtagagaccctctg

SEQ ID NO: 276384 - DNA, 281 bp, Homo sapiens
  chr21:46813680-46813961
  hypo
gccggctgtggggccgggggctgagcctgggtgtcagccggctgtggggccgggggctgagcctgggtggcagccggctgtggggccgggggctgagcctgggtgtcagccggctgtggggccgggggctgagcctgggtggcagccggctgtggggccgggggctgagcctgggtggcagccggctgtggggccgggggctgagcctgggtcgcagtcggctgtggggtcgggggctgagcaggcactcttaggccgtctacctccgaacccagctcttc

SEQ ID NO: 276385 - DNA, 138 bp, Homo sapiens; identical to SEQ ID NO: 220518
  chr21:46827462-46827600
  hypo

SEQ ID NO: 276386 - DNA, 417 bp, Homo sapiens
  chr21:46834412-46834829
  hypo
tttcctgtcatcacaggggacgtctggcattttaacagacctgggcggcctcctgcagacaaggctcggaccctgcggccgactctgccccaggcctggcccctgctgatggccatgctccgggcatgtggcctgagggcctcacggacagccagcctcccagaccagaaaacagccctgcccgccagtgagagggcagacagatggacactaatgtccccgaacctaagaaacaaaacccaaaaccctcatttatgcttccacttccgatcacacgcatagaaggccgaatactgaccccgagctgaccaccccggcctgtgggacccgtgagtatggcctgtgtgtgggatgaggctcaggatcaggtgcagatgaccctggattatcaggtgggccccacgtcattacgagggt

SEQ ID NO: 276387 - DNA, 45 bp, Homo sapiens; identical to SEQ ID NO: 220519
  chr21:46835035-46835080
  hypo

SEQ ID NO: 276388 - DNA, 521 bp, Homo sapiens; identical to SEQ ID NO: 220520
  chr21:46835359-46835880
  hypo

SEQ ID NO: 276389 - DNA, 113 bp, Homo sapiens; identical to SEQ ID NO: 220521
  chr21:46835910-46836023
  hypo

SEQ ID NO: 276390 - DNA, 218 bp, Homo sapiens
  chr21:46837282-46837500
  hypo
tctggattggcccccgaacgtgcctgcctgctgtgcagggatccctgggttccccggggcttggggccctttcacctgcaggttccctgtcctgcggtctgtggcttgctcagtgtcctcaggtgtcctcttccgactcgagggtctcacgggtgcccccgccctgcctggcccagctgccctctctgtggcatttctaggaccgcggtctctctggc

SEQ ID NO: 276391 - DNA, 275 bp, Homo sapiens
  chr21:46837961-46838236
  hypo
tgccgcccccggagcgctggctgtgagtgggggcgcctggcgtggggctggacggccagggcctgctgtctagatgtgcagtgacaagacccttcccttccaggggagccggctctgactccgagctctttgtgggctgcatctgcagattgaggacagcgctgagcggagctggccgggtgctcatccctggtgggggcagaggggtctgcatcccggcccccggctgccgaagtggtagggtgggcgtgcccttcccacgcctgcccgccagc

SEQ ID NO: 276392 - DNA, 190 bp, Homo sapiens
  chr21:46838494-46838684
  hypo
cggttcccacctgctctgcacagcccgcctcgtgcacctgctgaccccaccgtgtccacagcccgccctccttggctcacatctcttcctggggtctcagggaagcggcacctcctcaggggcctcccagccacctcacgtcacttcctggggtctcagggcagcggcacctcctcaggggcctccaagg

SEQ ID NO: 276393 - DNA, 51 bp, Homo sapiens
  chr21:46838714-46838765
  hypo
tccctcccaccccgacctcctgtgcctgcggccctgcgaggcgtgatggcc

SEQ ID NO: 276394 - DNA, 490 bp, Homo sapiens
  chr21:46839034-46839524
  hypo
tggagctgggccctgacacacgatgccgtgtgtagtgacatgcaattccatgtagtgacgtgattccgtgtagtaaggcgatgccgtgtgtggtgacgtgcagttccgtgtagtgacgtgatgccgtgtgtggtgacatgcagttccgtgtagtgacgtgatgccgggtagtgacgtgatgccgtgtagtgacgcaatgccgtgtagttacatgatgctgtgtgtagtgatgcgcgatgccgtgtgtggtgacacgatgccgtgtgtggtgacacttaatgtcatgtagtgacacgctcgcaggatcgccaaggccaggctggctccaaaggcttgggtctggcttcctggggccactgggtgctctctgaggccgcccatcactgttcgggccctggggtgggagctgggctgcaaagtggcctggactttatgtcctgccaggtacagtgtttccctcagcagatttatcaggcgttttgggtgtaaa

SEQ ID NO: 276395 - DNA, 439 bp, Homo sapiens
  chr21:46841007-46841446
  hypo
tccctgcccggtaccgggtcagctggtgcctgcctgtcctgccctgcactcctcaggctcctcaaggacagacggacagacaggcactctagagaagggaccttggccagacggctttgccgcccccacccccataggtgcttgctttgagccccttgcaaaggtgaagccagatctgggatcccagggcctggtgcggctggacatgggaggagggccacggtcacgcttgcacggggcagagactcccagaaccacaggcctcaggagagctgggaagggaaggagagggcactgcggtgcctggagagccagagtccgcccgtgtggaagtgttgggggctgtgttgcagtgacagccctggcgtctcaggagcggagcaggacaccgcgtttctggctgtgcaaggctccacgcgggtcagcagcccatcctggc

SEQ ID NO: 276396 - DNA, 56 bp, Homo sapiens
  chr21:46841890-46841946
  hypo
aacacactcacacagacacacgctcgggccgatacgcacacatggctgtcacacac

SEQ ID NO: 276397 - DNA, 150 bp, Homo sapiens
  chr21:46842390-46842540
  hypo
cagaagccaggagccggggcctttgcgtggctgcctggcctgacgcacctcgcgccgtgccaggacccgggcagggcagcaaaaggcatctgtgagtcgccgtcctgtgcgggtctcagggcacagtgggtggcacgggctctcccagcc

SEQ ID NO: 276398 - DNA, 38 bp, Homo sapiens
  chr21:46844058-46844096
  hypo
gccaccccacctcccgcagtgcccggtccgccatccac

SEQ ID NO: 276399 - DNA, 973 bp, Homo sapiens
  chr21:46844299-46845272
  hypo
aaacacgcctggagcgcagctctgctgtgggttagccgtgggtctctgggcgagggttcccgggatacagacacctgccccaaggtgccccacagaggatgacccccagggcagccgtgcctgagcctgcgtggtcacctcccacagtgccaaggcgctcccccaaggcccctgcggcccacctgaccagtggagaactcgcgagcactcggccagtggtgcctccaatttgcagcctccaatccctggtcagaggtgtgacctgaccctggaccagagcgctgggccaggtcctggtggcttctgcccttcagcttggaagctcctgaaaaccggctcccttccggggcagcccttggcccccactgaccctccctcagtcctaggtgtgcagtggcgtggggaccctgggaggcccgtggcgcagccccttcccgcctcctgcccgtcggtttccattgctcaggcactgcctcgcccgcgcctctttctcccagacctgagccaccgctgccaggatccttccccagctggttttccttctctttgatgtgtttccactgagggtccaaaccggtccaggcgcgggttccagaactttcttcagatctctcgcacctgaaaatttcctctgtagccattcgcaggaggtttctcagatgccccgggctcgggggccagtcagtctcatgaggacggggtgggtctgacttgtggcatcgcggcctctccatcggtgctgctgggcctgtgagccaatgggtgggcagcaccacccaccgcctccttcctcacaccagtcttgggctgcgcagagccccagccatgtgtgtgctgagtgcagtgtgaccgcgtccgcccgtctccccggacacgcctgttggagccccggccgtgtgtgtgtgtgtgctgtgagtgcagtgtgaccgcgtccacctgtctccctggacacgcctgtcagagccccagactg

SEQ ID NO: 276400 - DNA, 322 bp, Homo sapiens
  chr21:46846292-46846614
  hypo
tacaggtgtgagccaccgagcctggcctggagttattttgggagagggcagcccctggttcagcgtggcgaggctgcgcttgctctcccgggcgggcgtccacaccctcctcgccgagatggagaagcccaaacccctgcagcgctcccccatcacgtccggccctggaagcccccggaaaccctgccacgccctgagtgggagagcgcaggtccctttccggccctggaagcccccagaaacccttgggtgccaggcctggccgggacagcagcgacactgcatgctcagcccttgcgtgagaccacgggagtgtccgccc

SEQ ID NO: 276401 - DNA, 74 bp, Homo sapiens
  chr21:46846971-46847045
  hypo
aggcgatgtctgtgcgtttgctttctgctgcagtttaaaaagccgggctctctccggagcgtgtgtagggcctg

SEQ ID NO: 276402 - DNA, 266 bp, Homo sapiens
  chr21:46847346-46847612
  hypo
ctgcctcaggcctcttgacccgcctggcactgaccagactgtgtgcccgggtgccgtgcccatgggctccgcctcccccaggcaggccccctcttgctccgcggccacccctgctcttgacctcacacctctgcggtgtgtctggacacaccagcaccacggcgggcggggagcggaattctccaggtggggtgggcaggccggcgggtgttgaggtctctgtgcatgcttgtgcgtaccctggactttgccgtgaggggtggcca

SEQ ID NO: 276403 - DNA, 195 bp, Homo sapiens
  chr21:46848017-46848212
  hypo
ctctgtgggcagctcgagtgtgcatcttgagtgctgtgcaggttggggtccggcgctcctgcaggcaggcggcgtctgggcctgggggctctcagagtttgaggagcgtgtggtgagggtggcctcgggcctcaaagacgcagcgctgtgggaaccgggagactggctgagcccgctctgaggaaggtggggcca

SEQ ID NO: 276404 - DNA, 323 bp, Homo sapiens
  chr21:46848491-46848814
  hypo
ctagaacattcacacgccggagagagggagccctgggccatcacgcagccaccgcccggccccaagaacctgcgagtccactttccacctctggatcggcggttctggacgttcatgcaggtggttcccgcagtgcgaggccttttgtttcgggctcctctcacaagcctcacgtttccaggtacgtcgtggtgttgtgcagacccacaattcatcccttttcatgggtgtgtaatagtccaccatagattctctacgttttaaagcatgttttatgtgcctgaaatgtctctgcactcgagactatagcttgctttctttct

SEQ ID NO: 276405 - DNA, 686 bp, Homo sapiens; identical to SEQ ID NO: 220529
  chr21:46849579-46850265
  hypo

SEQ ID NO: 276406 - DNA, 32 bp, Homo sapiens
  chr21:46855682-46855714
  hypo
cttggacgtccccccggcgctccctggcacag

SEQ ID NO: 276407 - DNA, 820 bp, Homo sapiens; identical to SEQ ID NO: 220530
  chr21:46861363-46862183
  hypo

SEQ ID NO: 276408 - DNA, 117 bp, Homo sapiens; identical to SEQ ID NO: 220531
  chr21:46862421-46862538
  hypo

SEQ ID NO: 276409 - DNA, 426 bp, Homo sapiens
  chr21:46863356-46863782
  hypo
gcccagctcggcatcgcagcagagtcccggtggtggagatgctttgccactggccacccagagctaggagcctcggccaagggctccctccttgcactgtggtctctcgggacctaggaggtcccggggtgtggactgtgctgaactgttctccgacaggcggccctttttctcccacgtgggcgaaaagtgaagcctctgggtggtcctgtacctgtctgtcacatcccgggctgcagccgggtccccagggaggcctccgtgaaaacacaaatcaagtgccaatttcctggtgaagagtctttatgagagcaatgcggccccgtgcccctttacgcggctctgctggtggagaggaatagctgagctgcagcactaaggagagatgcctgctgcatgatcccctagatgcgtccgagggacact

SEQ ID NO: 276410 - DNA, 381 bp, Homo sapiens
  chr21:46864062-46864443
  hypo
ccatgtgacacattcgctccatggtacctcctgcctcccgaaatcacctctaagttcactttgtgccaggttttgttctccagcgcatcttcagtgctgcgagcaggctgggcttgcagcaggagcacgggtgtgcgtgtggagtgaatgaagggccgtgtgcccgagtaggtggcgtgcaggggtgtagtgaggtgcgtgcaggggtgtagtgaggtgtgggatgtgcagagtgaatgaaggacgttgtgctcgtgtgggtgatgtgcggggttgtggtgaggcgtagggctggggtcagctggtcgtccggacttttggttttctggctgtaaaatgcacatgccaggatagttgtgaggtgcacgctcactcgtgcat

SEQ ID NO: 276411 - DNA, 172 bp, Homo sapiens
  chr21:46866054-46866226
  hypo
tgcgtgtatctgttcgttggcccagcaccgtttgttgaaggctgctctttcctcactgaacagtctcgacattcttgtcaaacatgagttgcccgtaggttatgagtttattccagaaccctcagttccactgcaccgatgcgtgtgtctgtccttgcgccactcccacact

SEQ ID NO: 276412 - DNA, 312 bp, Homo sapiens
  chr21:46870763-46871075
  hypo
gagcccgtggctggcgtggcagtggtgagccctcgatggctgtgcggacaccagaggctgagggaggacacacactccatggtgggacagcacccccgggtccaccaaggccaggtggacgcttaggctccagggccctcgtggctgctccggcggtgccatcacctctggagacagggcccgactctgcaggacggcaccagtgggggacagcaggtcctctggggggtgtgaggttctgagctgttagcctcaggctcctcaggagcgggcaggtcatgataacaagagtggctgcgtgcgggtagccca

SEQ ID NO: 276413 - DNA, 65 bp, Homo sapiens
  chr21:46885376-46885441
  hypo
cgggcacttcactgcgtaagtgctatggtgtgatggagtgatgatggtggcgcactcttcaagct

SEQ ID NO: 276414 - DNA, 348 bp, Homo sapiens
  chr21:46885701-46886049
  hypo
cacctgatgctgagcacaggcgggcgtccgtggagtgcacgtgtctgagggtctctgaggggtttgcccttttcttcggagccacggtggccgtgagggatgcaggacattgggtgtggccctcgaggactggcctgtctggagcccactcccccgtgggtgaacgcggctcttggtggagagcccagtttggggagaagggacggtcttgtcctgggaggtgtcagacaaagccgagcatgggactcacaggagacccccagtcaggccgtgtcagggtgaggctgggagtgagggtcctggaaagtccggcttctgggagagggcgctttggctcagaggctgcca

SEQ ID NO: 276415 - DNA, 285 bp, Homo sapiens; identical to SEQ ID NO: 220536
  chr21:46886369-46886654
  hypo

SEQ ID NO: 276416 - DNA, 324 bp, Homo sapiens
  chr21:46888080-46888404
  hypo
gcctctccaggccgcgtcggtggcccctggttccgtcctgcacagccacctcaccagctgtctttctttttgcagagcgcatcagcgaggaggtggggctgctgcagctccttggggaccccccgccccagcaggtcacccagacggatgaccccgacgtcgggctggcctacgtctttgggccagatgccaacagtggccaagtggcccggtaccacttccccagcctcttcttccgtgacttctcactgctgttccacatccggccagccacagagggcccaggggtgctgttcgccatcacggactcggcgcaggccatgg

SEQ ID NO: 276417 - DNA, 241 bp, Homo sapiens
  chr21:46893644-46893885
  hypo
accatgaggcataccgcacccccagggaggctgcccgagaccccttccctctccgagactctcctgccctttgtgggccccccgaaatctggagctcaagcagcaccggggttgccactgccacctcaggaccgctggtgacccctttctctgtctgcatttagggggtgatcgctgagctgaaggtgcgcagggacccccaggtgagccccatgcactgcctggacgaggaaggcgatga

SEQ ID NO: 276418 - DNA, 1845 bp, Homo sapiens
  chr21:46894480-46896325
  hypo
tgtgtgttgtgtggcgtgtgtgttggtggggtgtgtggaatcacgtggtacccaaggggagaatcccccagccccaggtgtgaggaacagcagggaattctcactcaggggcccagatcacaacatgccccacgtgaacatggacccacagcctcgctcctgggggcgtgggcaggagacgccgtggacgtggacccacagcctcgctcctgggggcgtgggcaggagacaccgtggctggactgtgggcagtgtgtgaacatccatgttactttcatgctttttctttattttgcccaataagcccgttgtttttgcctggaacatgccagaagacgccagatcgttcacatggcggccatgacaaggctgcgccctgggacagcttgctgggtgcggggggtcgccgaggcgccgcacccctcccctggcctgtcttgccctcaggggtcagtagcggtccctgaggatgtttctcctccgggttttcctgaagtttaaaacatccagccgccttggcgcgtgttcggcccagccgggcgtgcgctggggaaacctgtgcggggagcatctgcggtgcggcctcctccagggcagggctctggccagaagagaggagcgcgttccccctcccgcctccgcatgtctgaccaccggccgaggcaggttcagaagcgtcactgtcctcgacccgattggacacgacttactgaagctcagatggtgcctgggcagggaaggccagcgtgcccaccccagcggccccccggagagcaccagagagggctggacgaggcgagagggggcctggaggaggcgagagcagcgtcctttgcttcccaggcctgccgggctcggggcctggcctggctgccatctctccagcctttcccttttcaaactcctcaggcatccggagactctggcagcgggctcggggacgcccgggagcttctcagggaggagacggtgagtagccggacggggcccagcccacgctgcagggtcccgggagagcccctcccagcagtggggtgacacatgtgcacacgcaggtgtggctccaagagctccctctatgccacgaagacatattcctggctggggacagggatgctgggctgggcagacgctcggagcctgggcacaggccccgctccggccctgcctggccgccgcgtgtctctggtgagaggatattcctttaaaacgaggtcctgccctgcacactccttggtcttcgaggcaaccttggccttcccttcgccccatccctccgttagctcgtgcgtggccatcagggaatgaacgcgtgtgtgagcctgacgaccaggaggagaaggcggcgcagggagcgcgcggaaggctttccccagctcgggccacctgagaaaacacaggaggggcggggagtggggaggccccagccgcgggactgaggcgcggtgctgtccgtgagagacgggtgcgggaacgtgttccctgcggggaccctctgcagattcacatcagcttcccagcatggcctgtcgggcgccgggaggcctctgtggtgacggcaggcgcggtcctgggtcctggggagccggggagcccacaggcggccacacccctgcggcccacggaaggaagcccctcgcgcacggccctggagcaccctcctgtttcagaggatttttctttatctttcttgcgatcttaagtatttcatttcacaaaccaagcaagtctccaccgggcatctgccggccgaataacaggccacctcccctctcgtcctccagggcgcggccctaaaacccaggctccccgcgccaccccccgtcaccacgccacccttggctg

SEQ ID NO: 276419 - DNA, 894 bp, Homo sapiens; identical to SEQ ID NO: 220541
  chr21:46900277-46901171
  hypo

SEQ ID NO: 276420 - DNA, 264 bp, Homo sapiens
  chr21:46901444-46901708
  hypo
ccagccaaccctaccgatgggcattcaccgtcaccatcggctctgaggcctctctgggtgccgcatggcaagtgctccccagaatccattctgaggggaatttgggcttaaagaacatgcctaatccatattcacgcatgtggccagactgcctctcagagggagcagcggctaccccagccctggtgtgcaagcatcttcccgccgtggtgctgtcggctctgccatctcatcctgccaatgtggccgcgaaactgcgggcta

SEQ ID NO: 276421 - DNA, 182 bp, Homo sapiens
  chr21:46905927-46906109
  hypo
gggccacgtcacagcgggacccctgcctcagggcctccctccctcacgccccccacaccgggctctcacctcacactccaggtggctggggccttgggtcaccgatggctccagcacatgcctccgggctcgcctgcttctcacggctttcggactaatagagtcaccgcaatgcctgtgtc

SEQ ID NO: 276422 - DNA, 1262 bp, Homo sapiens; identical to SEQ ID NO: 220543
  chr21:46906441-46907703
  hypo

SEQ ID NO: 276423 - DNA, 519 bp, Homo sapiens
  chr21:46908936-46909455
  hypo
tcctctgctgcgtgcggggccaagggcgcacggggcccaccctggggctgcactctcacgcgtcaccagcccctgccatggcacctgctcctttgagctttgctttcatttgcaagacatcgggacactcaaaaggctgacttatgggaagggccgtgtgtttgctttcttaaattgtttgaatgaggccgtctcagcggggttcctcttgcagtctgcagtcctagtgatggaatatgtccccaggttccgcagccgtcccggccgggtgccttcagccagcctgggcccacggggtccctgcacaagttgctcagtgtccctgggacccctcggctctgggctgggggagggcggtgagatgcatcctgggtaactcacccttcccttcacccggggtggacgctgcctgaggactgggctggccccagcaggtgctcacggagccccttttttcacttagggggatcctggcgtgcctgggctgccgggggcgaaggtaagcgctgtgcccgggtt

SEQ ID NO: 276424 - DNA, 323 bp, Homo sapiens
  chr21:46910338-46910661
  hypo
gagatgtgccctcccgggtccctgggtctccatgtgccctcgtgggtccctgggcctccgtgtgccctcccgggtctctgggcctccgtgtgcccactcccgggtctctgggcctccgtgtgccctcctgggtctccgtgtgccctctcaggtccctgggcctccgtgtgccctcccgggtccctgggccttcgtgtgccctcccaggtctctgggcctccgtgtgcccactcccggagcgccaggagttaagtataagtctccgtcagggctcttggtggctgcctccctcccaggccccagccggtcgggaaataaagaac

SEQ ID NO: 276425 - DNA, 635 bp, Homo sapiens; identical to SEQ ID NO: 220544
  chr21:46911012-46911647
  hypo

SEQ ID NO: 276426 - DNA, 1587 bp, Homo sapiens
  chr21:46912095-46913682
  hypo
ggccacagggacctcggcgtgacggtcaagacatcagaacatcagaaaagcctcccgtaggccgagccacctccgccggcaagcaagggagcgtctagcagaggcaggagcattttaaaacaaaatggaagtaaaaaccatggcccttagggcgtctggagtctgcatccagctgctctgagctgaggggcgtctgtgctgcaggagggatgccccaggcccaggaagactggaaagcaacattttccttgaatttcctggtttggtgttttgttgatctgtaagtcgctcgagtccagttgaattttaaacgcggctctttgtttccgatttttccttttgctcgtggacagggatccgtcctgagcgtgccgggacctgaggtatgtgcctgcccagcttctaagagacgggcctgcggggacctgggtacaaggctgggtggggtccgggcaggcgcgagggtgcgtgatgaccccagctgacgccgtccctctttccccagggccggccgggtttcgcaggctttcccgtgagtaacctggtgccagagctgcatgctgcccggctggggaggggtctccacctggtagcacagagcagcccggtcgagctggggtgggccttgtcaggcccgagggatagcgacagtcactgcccccaaggaaatgatgggagtgggatgtgggcgagagccgctggcaggccctgtgctgggtgggcacccgtgagggtgaggcagctccttgcacctgcagaggcctgcagtgtccagagtgaggctggggccgggaggtgtcctggtgggggtcacctgcggaggcctgcagtgtccagagtgaggctggggccgcgaggggccctggtcgggctgtcgaggcaggcatattgcggggggcagctgtcgggggagatggagcagccgtcggggatgggggagatgccagccgctcgggcctcacggcctggcctccattccagggacctgcaggacccaagggcaacctgggctctaagggcgaacgaggctccccgggacccaaggtaaggggctcaggtgctgtccctcaaccccctttgtgacccaggggtggctccagcctgcccagatgaccactgttgggagggacctgggaccccccggctgctgctgtgacacgtgaggggtacatccctgctcgggccgtccctgtggtcacctcccgtgaaaggacccagcctgcgaggcccagtcacagcggccctgccttcggggctctgggtgaggctttgtggggaaggagctggccctgactctgctggacctcctgccattccagggtgagaagggtgaaccgggcagcatcttcagccccgacggcggtgccctgggccctgcccagaaaggagccaaggtgagggccgggcagcctccttccggcaggcgtgggggctcctggggctgtggagacagcctggggagggtcttcctgagggtctggctcctgatgcacgagcctctcccaagcagggctctaccatccaggcctggccctggtggcccctcctttctcgcacccatgtcggcggttccgccggcccctcgtc

SEQ ID NO: 276427 - DNA, 476 bp, Homo sapiens; identical to SEQ ID NO: 220547
  chr21:46914469-46914945
  hypo

SEQ ID NO: 276428 - DNA, 138 bp, Homo sapiens
  chr21:46915151-46915289
  hypo
cgtgtgaggctgagcgtgggccggccgggcctggcgtggggctaacggcaggcaccctgcgggaaggtgtctggtaatcatcagtgcccagcagtccccaccccctgtgctccgccccagggtcgccccgggatgaac

SEQ ID NO: 276429 - DNA, 132 bp, Homo sapiens
  chr21:46915604-46915736
  hypo
catgcccatacacacgcgcacacatacacgcacacacacatccacacgtgctcatgtgtgtacacatgcccatacactccacataggtgcacatatacacatgtattcatgcatatacgagcctgtccacgt

SEQ ID NO: 276430 - DNA, 48 bp, Homo sapiens
  chr21:46916179-46916227
  hypo
ctcctcccgagggacgtctgtgcacgactccagcgtgggatgaggtgg

SEQ ID NO: 276431 - DNA, 101 bp, Homo sapiens
  chr21:46917527-46917628
  hypo
caggacccaagggcgccaaaggagaagtgggcccccccggaccaccaggtgagcaactctggacatcccaggcaggagagccatggcgtggccagcactga

SEQ ID NO: 276432 - DNA, 411 bp, Homo sapiens; identical to SEQ ID NO: 220548
  chr21:46918204-46918615
  hypo

SEQ ID NO: 276433 - DNA, 486 bp, Homo sapiens
  chr21:46918886-46919372
  hypo
cagaacgagggctccgagggctctagagggaacagtgtttgcaggcggaatggctgatgctcttccaaagccaaggaaggctcagagcattcccctcattcgaaggatcaacaattagagtgacgagatttctcaacaaaacgggagaagccagaagaccataaatggtttccaaaatatccaagaaagtcaattgccagtgtagactccgacagccagtggtactcccgtggccttcagaacgaggatgacatgcaggccagccactccagacccgagctgtgtcggcagtggagggtatttcagggggaagacaaggccaagggaaaggagtgcagagatggggagagacaacgctggcaggaaccggcgtcccagcgacagggaggtcagaggctccctcgggaaccagcgtgggctgccccacatggcatcccaggaacagtggggtcagaggctcccgcgggaacccgtgtgggctgcccc

SEQ ID NO: 276434 - DNA, 306 bp, Homo sapiens
  chr21:46924377-46924683
  hypo
gagcccgggggcggcggtttcttcggctccagcctgcccggcccccccggccccccaggccccccaggcccacgtggctaccctgggattccagtaagtcccagcctgtgcaggcagagcccatgtcccaggggtctgggtgcaggagccgagggcaggtccagcccggccttcgacacccgcgaaggccggagctgcccctgcaagctcagcagccccgacatgtccctgtccccgtgtggggacgcagcaggccacatgggtgtgggtgcactgaccccggacaccccccgtccccctgcagcg

SEQ ID NO: 276435 - DNA, 598 bp, Homo sapiens
  chr21:46925367-46925965
  hypo
gggcacctgcgtcccgtgccctggctggttctgcagcccctgcccctcagagacactctcccacggaccccacagggagatatacaggaggccaagatgcggtttccagggtggaagcggggccaggccatgggggaatcaggtggacccaggaggacgaccaccagccgggaagtgcccagggcctgtacattgtccacggaggcgcaggagctggcggcaggcaggggtccccatggtgctcatgggggcagccgcctcagtccacacctgtccaaagccctgcggcccctgcccagcaccctgaaacgggcattccttccttccgcccctgccccccgccctccccgccaagccccacacctctgcatttggtcccagcaggtgaggctctgggctacacgccaggccatgctgggccaggtgcacgaggttcccgagggctggctcatcttcgtggccgagcaggaggagctctacgtccgcgtgcagaacgggttccggaaggtccaggtgagcgctctgtgtgacgggttctggacccgtggaagggccgaagccgcctcctggggcttaaggaaggcgagaggctcaggcc

SEQ ID NO: 276436 - DNA, 341 bp, Homo sapiens
  chr21:46926184-46926525
  hypo
gacaaggcgcctgacgggacgaggcggcaggggggctcaggccctccagggccacgtgacgtccacagcacggccccggctggggggcaggctgtcccgtggctctgcaccccgcgttataaacaccaaggtgggatgaaatgcatcctctctgcttagcacgggccttgctcaccagcctggctcctcagacacacctgggattgccccttccaggacaggccagcccctttcctgctttcccaaaatggtctgggtggcaggagtggccgctctgatccaggtgggtgcggccatgcttgcagggccccgggaaggtttaccttcgtgtggcaaaggtg

SEQ ID NO: 276437 - DNA, 247 bp, Homo sapiens; identical to SEQ ID NO: 220550
  chr21:46929727-46929974
  hypo

SEQ ID NO: 276438 - DNA, 33 bp, Homo sapiens
  chr21:46933738-46933771
  hypo
agtgtgcacaggcacgcacggttacatggggta

SEQ ID NO: 276439 - DNA, 162 bp, Homo sapiens
  chr21:46933998-46934160
  hypo
cagtgagcaggctgcggagggagcaggccctcaggttggggaggcgctgggaggaggattctgatggcggtgtgggcctccccagtgacgctctagcccatggcacaggcccagcccacctccacccatcacatcctgctagatctacgagcccaggaaatg

SEQ ID NO: 276440 - DNA, 667 bp, Homo sapiens
  chr21:46935335-46936002
  hypo
ccagcaacaaagcccgcggggcacagtgcagggacagcatggccaggcagctgccctgagtgtcgccagcacgctgtggccaccgccagagtgcggcacagggcagggggaatcctagggggcctgctagcaggataagcggaggcccccattgctaaggcaggcggccctcgaggcaggggtcgtggggatgcactgagggccgcctgcaaagttaccacaggggcgcccgagagtcactggttcacattctgaacaccgtcgcttggaagacactgcaaacccagcttgctgacaccaggaggatggacagccagctggggacaagtctcatctgcagcctcagggcctgaggcttgggcggagcacagagtgcagggggaaggggttgtcactgggctcaggaattcagctgcctgcggggccggggcctgggccaggtatgggtcgctctgtctctgctccagggaggctggccccacagcccccaggctgtcttctggggaaagcggcgggctctgggctggctgcaggcctccgaggcccttgtcctgcacgctcagtgcctgtgctgccttctcctccgcggcactcctcaggccctgggccgggggctgccgcgggtggtggccccgctggcagtgccgcaggccatccagcatggccc

SEQ ID NO: 276441 - DNA, 50 bp, Homo sapiens; identical to SEQ ID NO: 220552
  chr21:46937010-46937060
  hypo

SEQ ID NO: 276442 - DNA, 78 bp, Homo sapiens
  chr21:46942255-46942333
  hypo
cggcataccaaagacgctgtgactggatctctcaaagtctgctggtggtgatataaaacggtacgactgctatggaaa

SEQ ID NO: 276443 - DNA, 136 bp, Homo sapiens
  chr21:46958787-46958923
  hypo
cccgccagcacccccgccccacacggccagggcacgtggtggagcagcagcagcacgaagcacactcgagggcgtgtctctttcagtcctgattctgcccaggagaaaggctcctccggtgcgggcaagggcacgt

SEQ ID NO: 276444 - DNA, 88 bp, Homo sapiens; identical to SEQ ID NO: 220554
  chr21:46998316-46998404
  hypo

SEQ ID NO: 276445 - DNA, 180 bp, Homo sapiens
  chr21:47026083-47026263
  hypo
acagtcgcctgcggtattcagtgcagtcacactctgcacgggcgtttagatacacaagtgccaccgcattacagtggcctgcagtattcagtgcagtcccacgctgcatgggcgtttagctacacaaatgccaccgcgttacagtcgcctgcagtattcagtgcagtcacactctgcacg

SEQ ID NO: 276446 - DNA, 420 bp, Homo sapiens
  chr21:47026383-47026803
  hypo
gtgcagtcacacgctgcacgggcgtctggctacacaaatgccaccgcgttacagtcgcctgcagtattcagtgcagtcacacgctgcacgggtgtttagatacacaaatgccaccccgttacagtcgcctggagtattcagtgcagtcacactctgcacgggcgtttagctacacaaatgccacggcgtcacagtcgcctgcagtattcagtgcagtcacgctctgcacgggcatttagctacacaaatgccaccccgttacagtcgcctggagtattcagtgcagtcacactctgcacgggcgtttagctacacaaatgccatggcgtcacagtcgcctgcagtattcagtgcagtcacatgctgcacgggcgtttacacaaatgccaccgcgttacagttgcctgcagtattcagtgc

SEQ ID NO: 276447 - DNA, 91 bp, Homo sapiens
  chr21:47027994-47028085
  hypo
gtggcgggcgttcccgcggcagctgcagcctcgcagtgcctgcgtgagccgtgctccgctgcgccccgggcagctccgctccgacccacgc

SEQ ID NO: 276448 - DNA, 53 bp, Homo sapiens
  chr21:47036529-47036582
  hypo
tgaaaatgccccctcgtcacctttcccacacaggatcccggtttcccaccagc

SEQ ID NO: 276449 - DNA, 46 bp, Homo sapiens; identical to SEQ ID NO: 220557
  chr21:47167569-47167615
  hypo

SEQ ID NO: 276450 - DNA, 170 bp, Homo sapiens
  chr21:47209072-47209242
  hypo
ggagtgaatgtgtgtgcacacgtgcgtgtgcatgtgtgtgtctgcacatgcaaatgtgcatgcatgtttgtgcatacatagtgtgtgcacgtgtgtgtgtgattgcatgtatgtgtgtgattgtgcacgtagtgtacccgcatgtgtgcgagggtgagtgtgtgcatgtg

SEQ ID NO: 276451 - DNA, 320 bp, Homo sapiens
  chr21:47254672-47254992
  hypo
taaaaggacaaagcagacttcggagctgcctctagaggagagcagcaggtgagttccgagttcacctggcacgcttttcggcagagcccaggaatgcccacttctgagcgctgagtgcacaacccagctcgggaggcctgcggcagcaggaatggggaggcaccgtgagtccctcaaagcgctgctggaaatgtcactctgcgcggtgtccacccgtgctcggggtgggcagcgccactgaatgacgcgggcagcttgggaggccggttcgcgaacgccgcagcagcctctgctgacacgggggctgctccccactcaca

SEQ ID NO: 276452 - DNA, 421 bp, Homo sapiens
  chr21:47285213-47285634
  hypo
tgtttaaaaaattacaaaatcgtagcccacccccagtcgcctttaggggagaatgcgtaccgctatctccaggaacaaagcatgccctgcgcggccggtgctactggatggatattccttcgcttctatcagtggaagatatcgctgttcctgcagaaataacgaaatggaacaatgcagaagcaacaaggtgatgtcccctttgtacttctcagaagaacctccgtgcctcccgccccatccgccactgagtatctcatgcagcggcgtgtcctctggcaccaggcagggactgatgttctccctcacattggcctcattcctctgggtcctgactcatttgggaactgaaagggctgctcggtggagctgggtttgaggatggtcttccacaaggccctgcagacgccacacagccttc

SEQ ID NO: 276453 - DNA, 610 bp, Homo sapiens
  chr21:47286941-47287551
  hypo
gactattcagtgaaagacatcggtcattgaggtatctattcaaaaacacggtttagtactctgccacacaccgaacgcaacgccacagcagccatagaagcgtgtgtggctgtttaacgtggtctttttggggagggcatcctaggcagagcaggcgtggaagggaaggcggcggacggaacaaaacgcgggcacgcaacggctgctgcgccggatctgaggcagggccagcctgtgggagcagcaacatcgctcgcaggacagcgatggagcccccacgaatccgcgtgaaagcagcaaccacctagaaatgaacgtacagctgcttagaaacagaatacggatgacccgaaagacttcccgatggtagtcaccagcatacaggacctgacacgggcgtgcgggcagggtgtgccgctacggggtccctggcgcacctgctacccctgctacccgcattcaccgcacgcggagggtgcgggccgtgaaggttatacatgcaaatatccttccaccagccagttctccttccaggaatctgccacccgacccttgtgttgtgcacagacatggtccaggtgtttgcgacgtgattgtttatcagagagag

SEQ ID NO: 276454 - DNA, 206 bp, Homo sapiens
  chr21:47287811-47288017
  hypo
gaacccagcgccgtcgcacacacagcggggaagagtctcagaaatgttactttgagtcaaaaagctggacaaaaaaaggcgcaagccagatggtgctgaagaggccacaggaggctggcagccagggggtctggcacctcactcggaggcgcagtgggcccgtccggaattagtggccatacggcaagtgccgagtggacatcaaa

SEQ ID NO: 276455 - DNA, 118 bp, Homo sapiens
  chr21:47316477-47316595
  hypo
gtaggaaaggcggccgcggcacatagaactggagacgcactgcccgggccattgtctctgtaggaaaggcagacatggcacatagaaccggagatgcactgcccgggccattggcact

SEQ ID NO: 276456 - DNA, 86 bp, Homo sapiens
  chr21:47328512-47328598
  hypo
cgcgctgtccgccacgctctgcagcgagctccggagctgccctgtcactgcctctgccgcgctgtctgccacgctctgcagcgagc

SEQ ID NO: 276457 - DNA, 209 bp, Homo sapiens; identical to SEQ ID NO: 220560
  chr21:47330900-47331109
  hypo

SEQ ID NO: 276458 - DNA, 306 bp, Homo sapiens
  chr21:47367321-47367627
  hypo
cgcagcaggtgtaccgagctgtactgagcccgtggtcccagcagggtgtgtctgctccgtggagctgcaggtgtggccctccccacccactgcctgtgtgatggtgtgctcagcactaccggcccattccccggggagagggttctcctgtggccacagtgggaattccattgcttgctgacagaggcacatggctgaggactgagggaacttcccaccaaccggctttcgtgctgaaccgtttgaacttcattctcctccacgacccgcatatcctaaagccggcaaggccgctctttgcctatc

SEQ ID NO: 276459 - DNA, 572 bp, Homo sapiens
  chr21:47369847-47370419
  hypo
tgtgaggattcccgaaggcagcaccacccctgagcagacccgtctgcccctccgaccgtcatgcaccagcccctcccggtgccctgtgtcgtcacatgatgcttgttgaggagcccaggcgtccacccccgcgcctcctggcatgacgccgacctcactccttggcccccggaattcccacaggtgggaggtggtcacagaagctttgtcgattccgttctctttttggcaaggacacttccaggtgcctctgcacgggcactgacccacaggtgggcacagggccatgctcccagcctgggcctgacgggccggggtgcaaccaccgccagcatctaccatgctgtgagtgggcggcggtgacgcacccacctgggaatggcagcgagtgcccggagtgccggattccccccgagctttcacgtctaaggattacgaggaagacctggactacgtgcctttatgagatgcctcctgtgggtccctgaggccgtcaggtgccacctcacccctgcgtgtcctgcggaaactgtgacctgtgactccggggcggggtggccttgggggcacca

SEQ ID NO: 276460 - DNA, 127 bp, Homo sapiens
  chr21:47403601-47403728
  hypo
gggaggggcggccgcgtggcccagcgtcccccgagtcgcccttgttgcctttactcagtctccccatgactcagtttcccacctgtgaaatggggcggagtcatccccatgtcgctgccactggatt

SEQ ID NO: 276461 - DNA, 265 bp, Homo sapiens
  chr21:47404060-47404325
  hypo
ctgtgtgtcagccacggccagggtggggcagcctgtccatctgggtgacgtcgcgccctgggacgggtagcgatggcgccaggggccgcccgcctcacgcccgccgtgcctgttcctggcaggtactaccgctgtgaccgaaacctggtgtggaacgcaggcgcgctgcactacagtgacgaggtggagatcatccaaggcctcacgcgcatgcctggcggccgcgacgcactcaaaagcagcgtggacgcggtcaagtactttg

SEQ ID NO: 276462 - DNA, 293 bp, Homo sapiens
  chr21:47407169-47407462
  hypo
tccctatgcatatccgcccatgtgcccgggacacatgtcccctgcgtgtctgcccgtgtgcccgggatgtgtgtccccctgcgtgtccacctgtgtgtctgcccatgtgcctgggacatgtgtccgcctgtgcgtccatccgtgtgtccgtctgcccatgtgcctgggtcgcatgtcaccctgtgtcccagccgtatgtccgtggctttcccactgactcgtctccatgctttccccccacagtgctgctccttcgaatgccaggtgagtgtgccccccgacccctgaccccg

SEQ ID NO: 276463 - DNA, 87 bp, Homo sapiens
  chr21:47412237-47412324
  hypo
caccagactaacgccggcgtctgtttctcttcatcccaggggaacccaggacctgacggtgcccccggggagcgggtgagtggggca

SEQ ID NO: 276464 - DNA, 75 bp, Homo sapiens
  chr21:47412919-47412994
  hypo
gtttcatgtgaaggcgttgcccgtggacccggtgcccactttcccaccaggcggcttccacgtttctgcatccga

SEQ ID NO: 276465 - DNA, 139 bp, Homo sapiens
  chr21:47413400-47413539
  hypo
ggcctcagaggcagcgcccccgggtgcccccttgtccgagaatcaagacatgcgactgtcgtgtgctgtgacagacaggcggggctccagcagggccagagagctgagccggggccagagtcgccgccaccgagggatt

SEQ ID NO: 276466 - DNA, 597 bp, Homo sapiens
  chr21:47413777-47414374
  hypo
ctacaaacacttgccgggtccacggagcttgctggagaagcagggatgcacgcagggacgcctctggggccccaggaggagctgccggcctcctgaatgaagatagccatagccagccacgccgatggccacgcacgtgggccgaggaaacgcttggcgaggccaggaaggggctgtgcggggagggaaggccggaacagcccagtgaccacctggacagcatgctgtggctcccagcgtgcccgggcagccatcctccccaaggatggcccagctccacactcacggctcgtttctcttcagggtgaagctggcccgcagggtgatcagggaagagaaggccccgttggtgtccctggagacccggtaggaagcgctgtggggttggggggcgttggccaatttgggttttgggggtagaagtgctccagcagctcacgcactgggggtctgttcatttccgtttgagggcctctgtgtttccgtagatctcgggggtgtccctgcgtgggagccggctgcagggggtgaggcgcggcctgggccgggctggtgtggattgttgagagcaggcccagcgcccgggggcctgacgct

SEQ ID NO: 276467 - DNA, 221 bp, Homo sapiens
  chr21:47414704-47414925
  hypo
agtgtggtgttgcccgcaggctgggctgggccgttgcatcctcccggagctcacctgccccacggggacaggaaggcctccacacggtcacgcccggagacagcaagtctgtgctcccgagcttgtctgcttctgtggacaaatcgaccttacggctccatgtgcgcagctgcccacacaccgagcacaaggccagaccctgggcacggcagctgtctcag

SEQ ID NO: 276468 - DNA, 808 bp, Homo sapiens
  chr21:47417619-47418427
  hypo
agaggagccccaggacctgccggaccccctggagacccggggctgatgggtgaaagggtgagtgtccaacagctcgggccctagggcggaggcctggccgccagaggccctgggaagccccagccccgcactgtggagctgcctggggtccctgaccgggccgggagtgcccgcagcatcactggctcctggccacagtcggcacctgagccagaggccgcctcggcagggcccctcctgccccgagatccgggtcccagggtccacggggaccagcagggtggccccaggggagggagccggcttctgggctgacggaggggccctgcgggtgaggtgctcccgggcctgtgccagccagtgggtatcccaggccaggccgattcgcacggtgacggctactctgctcccccagggagaagacggccccgctggaaatggcaccgagggcttccccggcttccccgtaagtgtccggaggctgagcccacaggaacatgcccaagctgcctgcggcgccctctttagtggactgggcactcttgggtgggcgggctggccccaggaccgccggctggcccaggaattccatggccgggattctgtcagctcaggcccttccgctgtgcgcccctcacagcctcccctctcaaatcagaacccggtatcactgccctgcttttccatgacaggggtatccgggcaacaggggcgctcccgggataaacgtgagtacgccccctcctccatctggctgtgggcacacaaacattcacagtcacagggacacgcacgtgtgaacacacat

SEQ ID NO: 276469 - DNA, 265 bp, Homo sapiens
  chr21:47421137-47421402
  hypo
tgctctgctgacaccgcccccgcctgcagaatgcaagtgcggccccatcgacctcctgttcgtgctggacagctcagagagcattggcctgcagaacttcgagattgccaaggacttcgtcgtcaaggtcatcgaccggctgagccgggacgagctggtcaaggtgaggcctcgccccgcccggctttctcaagcccaggtgcaccccgaccctgccggccgcccctgcccgcgccagacctcagcctcccgaggccaccgctgc

SEQ ID NO: 276470 - DNA, 226 bp, Homo sapiens
  chr21:47421947-47422173
  hypo
gcagccccagcatccggaacgtgcaggagctcaaggagtgagtgccccacgcggccaggaccctcccacccctcgccccgaccgctgttcccacggcaggtcggccctgacccctgatcccaggtgggctcggccccgcggcaggcctggccccaaccggcccttcctgccctttgctatgcagagccatcaagagcctgcagtggatggcgggcggcaccttcac

SEQ ID NO: 276471 - DNA, 243 bp, Homo sapiens
  chr21:47422523-47422766
  hypo
accatcccagggccggcccggcctctcgctggtcaaggagaactatgcagagctgctggaggatgccttcctgaagaatgtcaccgcccagatctgcataggtgcgcatggggccacccgggcagtcccagatctgcgtaggtgcgcgcggggccgcccgggcagtcccagatctgcgtaggtgcacgcggggccgcccgggcagtcccagatctgcgtaggtgcacgcggggccgcccaggg

SEQ ID NO: 276472 - DNA, 704 bp, Homo sapiens
  chr21:47423060-47423764
  hypo
ccagtgagtacctcggcggccgggacacgtggggaggagggcaccgtggttggggcgagggctctgagaggacggggctctgggaggagggcctggcggtcacgagagtaggtgcatggctcactccggtggctgagcaccaccgtgccgtgccctctctggggagcttagacgctctctggccggcccactgcggctgcatcaccagggcctcatgctaacggctgcccaccccgccccgcagtcacgttctcctccccggctgacatcaccatcctgctggacggctccgccagcgtgggcagccacaactttgacaccaccaagcgcttcgccaagcgcctggccgagcgcttcctcacagcgggcaggacggaccccgcccacgacgtgcgggtggcggtggtgcagtacagcggcacgggccagcagcgcccagagcgggcgtcgctgcagttcctgcagaactacacggccctggccagtgccgtcgatgccatggactttatcaacgacgccaccgacgtcaacgatgccctgggctatgtgacccgcttctaccgcgaggcctcgtccggcgctgccaagaagaggctgctgctcttctcagatggcaactcgcagggcgccacgcccgctgccatcgagaaggccgtgcaggaagcccagcgggcaggcatcgagatcttcgtggtggtcgtggg

SEQ ID NO: 276473 - DNA, 357 bp, Homo sapiens
  chr21:47425491-47425848
  hypo
ggcccctgaatcccagaatccggggtgcacggctgttctgggggccgctaggggactaagaggatcggccgagggctgggctggaggagggcagcagggatgggcggcgagggtgagggtggggcttcctgaaggccttcacctgcggggaccccggcgagcccctcaggtgccacaggcagggacacgcctcgctcgatgcgtcacaccatgtggccaccagagctgcgggaaaatgctggggaccctgcatttccgtttcaggtggcgaacaagcgcccctcacagaactgcaggtagagacgggcccggggcagacgcagtgaggcggtgggcggggcccggggcagatgcagt

SEQ ID NO: 276474 - DNA, 336 bp, Homo sapiens
  chr21:47426310-47426646
  hypo
cggtgggcggggcccggggcagacgcagtgaggcagttgccagcctctctcagctgcctcatgggattcgcactgcagctgcggccctggcgcgacaagggctggacttggccagcgggacggtccctcacggcgctgaggcccacactctgcgtggagcctccccgtgcccaggctaccctgcaaggtcctcggagaggcttcctccagccccagcccccacacagctccggcccaggcccgctcttccccatcccagttgctttgcgctgtatacggccaggtgaccccgagccggccctgagccctcgtcccggcttcctcccctgtaagctg

SEQ ID NO: 276475 - DNA, 252 bp, Homo sapiens
  chr21:47452999-47453251
  hypo
ccagtcccgggcctcggagagggcggctgacacccccagtcccgggcctcggagggggcggctgacacccccagtcccgggcctcggagggggcggctgacacccccagtcccgggcctcggagggggcggctgacacccccagtcccgggcctcggagggggcggctgacacccccagtccctttggcaaaccgcttcgcagtatccactgacgctaagtacccctctgacgatgacgcagtcccatgtct

SEQ ID NO: 276476 - DNA, 216 bp, Homo sapiens
  chr21:47457174-47457390
  hypo
gtgtccacgtcagcgccctacatccacactgtgggcaccatgacctcacatgcggagcggagcagggccggcgcccggagagccaggctggtcacgaacgaggcctagagggcgtcaggccccaaagcactcacaggcttctcctctgtcctcggggccttcagacacctgcatgcgccgattcagccacccgcgcgcgccgattcccctggccat

SEQ ID NO: 276477 - DNA, 114 bp, Homo sapiens; identical to SEQ ID NO: 220567
  chr21:47459901-47460015
  hypo

SEQ ID NO: 276478 - DNA, 318 bp, Homo sapiens
  chr21:47475686-47476004
  hypo
ggtgggagctgggccgagggtcaggcctggaggtggtgcccatcactgggtcccgctcaagagagaagaggctgggaagccaggtgcagctgtgtgcccacaggcgggtgagacaggactgggcctggatcccgcacccgctcgccgcgcagctcagcgcaagcggcctccgggggcctcctctctgcaaggggagcgcgcgcccggccctgaccctgcctgctgattctctggaaggttcatgtccgggactcctcggtgaccctgggcagagccacccacatgcgctgcctcccctcccaccgcctgacaggtctg

SEQ ID NO: 276479 - DNA, 200 bp, Homo sapiens
  chr21:47484113-47484313
  hypo
gatttcatcggactcgagagaaaggggggccacagcagcgttttcacaatagctaaaaggtggaagcaatccacgtgtccccagtggatgaatggataaagaaaacgtgtctatccatgcaacggagtatcattcagacgtgaaaaaggacgaagtcctgacgcgtgctacaacgtggatgagcccgagacgagttctgc

SEQ ID NO: 276480 - DNA, 99 bp, Homo sapiens
  chr21:47489507-47489606
  hypo
gctgaacgtgccttcgcagtgacaactccaactctaagtcggtaccacagggctcattctcgccttccttccctgtgtgtctaacgcttcctctccagt

SEQ ID NO: 276481 - DNA, 188 bp, Homo sapiens
  chr21:47489807-47489995
  hypo
cctcagaccctcagcgatggcactttctgtaggccgcagaggtaggggccgcagagccaagcttgctagcatccatgggacgctgaggccccaaataatagagaccagatggcagcgcttacccccagggccgagctgagggggcggccagaggcgcttggcctgcagggagccgtggaggctggcgg

SEQ ID NO: 276482 - DNA, 182 bp, Homo sapiens
  chr21:47497764-47497946
  hypo
ggtctggatgcccccgtgaagtcgtaaaggcccccaggtggacccaaggaaagcggggaggagagggcttcctcgtggggctccagaaaccaggcactcgggcccctgcctctgcgagacgtgttcactcattttgcggggtccccagtctctgcaaagcacagcaccgacgcaaggctggt

SEQ ID NO: 276483 - DNA, 84 bp, Homo sapiens
  chr21:47501022-47501106
  hypo
gccaagtgcgccaacgcagacactgcgtagccccagaggcctcggggacaacgggatgaggagggcactcgaaggcgcccggca

SEQ ID NO: 276484 - DNA, 483 bp, Homo sapiens
  chr21:47503500-47503983
  hypo
gggcttgatttgtccgacaatttaaaattttcttcctgccggaaagcggctccttcaaagggaagagaggcttctctgcggccgacgtcgctgagtcttccaagacctcagcccacagagcgggaggggcccagagggcagcgtgagtgcctcagaccacgggagggagctgcccaggagccaggaggaccagtgcccccaaagaaacgcaacagggcacgcagccccaccacgccccactcctcccgacctcaaggaacagagcaggcaggagtgggagggaggcgcagacaaggcctgtgtcctgggcctgtaggggagaagctggggagagcaggccctgtaccctgaggatgtggaatgggcgccccaccgcagatggctcctagggtcccttccaggcggtattcctaatttctgggcatgtgtcatccctgtggctcggctgcacgggctgtgagctgctcccgatgcctgtggaac

SEQ ID NO: 276485 - DNA, 251 bp, Homo sapiens
  chr21:47531931-47532182
  hypo
acacctcggagagcgtcaccatgcagtcccccacggacatcctgctcttccacatgaagcagttcgtgccgcagttcatcagccagctgcagaacgagttctacctggaccaggtggcgctgagctggcgctacggcggcctgcacttctctgaccaggtggaggtgttcagcccaccgggcagcgaccgggcctccttcatcaagaacctgcagggcatcagctccttccgccgcggcaccttcaccgac

SEQ ID NO: 276486 - DNA, 157 bp, Homo sapiens; identical to SEQ ID NO: 220568
  chr21:47538429-47538586
  hypo

SEQ ID NO: 276487 - DNA, 65 bp, Homo sapiens
  chr21:47545574-47545639
  hypo
ggggcgtgggaggcgatgagatgggagaagtccagacgcgtccctccaacgagggcctctgcatg

SEQ ID NO: 276488 - DNA, 549 bp, Homo sapiens
  chr21:47565066-47565615
  hypo
cctgttcccttgtaccggctgccatggcctgtgaatgtggggtcaccctggccgaaccctcaaaccctgctgggcccaagcacttgccggggtgagggcggtgctggtggtcaaggtccagacagcggccagtggtgacgccctcaggcccctcctggtccccagcccctccccagccggaggctgacccgcttctcactggggccccagctgggggttcgctgttggtggggcccggggagccctgctgtggccgccactcaccaggtaggcggtgaaggcctcggcgtcggcatccaccagcgtggttagcttggccgaagcctcgcggaagggcgggatcaggcgccgcatcgtcgtgtccagggactggaattggcgccgcccgtaggtcatgaggcccaccatggagcccagcgccgcaccctgcgagaggggtggatgtgggggtcgcagggaccccagacggcccgggaccgaccccaggaagagccaggggcccgggtgatccctgcgggggtcccacccgtgtggcccccacgtctccac

SEQ ID NO: 276489 - DNA, 659 bp, Homo sapiens
  chr21:47602444-47603103
  hypo
atcagggagctggccgccaccctcgactcccggggagcaggcgtcccgcgaccccctcatctaccaggccatctgagctgggcggcgcctcacctccgctcccgggggagccggcctcagggtaggcatgcgccctgggtgggagcaggtcgtggccgccgccctcctggcagctctggctgagcagccgccgcagcatctgattctccttcaggaggcgcacctgcttcttcaggtccgcgttctcgctcaggagccggctcatcagctcgccgccttcagccatggcgggtgcgtccctccttgtccctcacggctcctgcagccccatggaggtgggagcccagagcccgcaggcaccacagaaacagcccaggcacggagttccgtagccaccaccgccttccacgccttgtgatgtcactgccctagtgatgaggtgcccagcaccctgcctgcccccgcgatggctcatggccccgttgaggcagtgaagctggaggcccgtggcgtgcacaggcagccactcccacattatgaccagggcccgagaatgccaaggacattaggcagctacgggatgtagcgactgtactccaagaggggcgtccaagccactccccattgagcggcccagccagggtcgggtgtccaccctg

SEQ ID NO: 276490 - DNA, 171 bp, Homo sapiens; identical to SEQ ID NO: 220569
  chr21:47627575-47627746
  hypo

SEQ ID NO: 276491 - DNA, 107 bp, Homo sapiens
  chr21:47634460-47634567
  hypo
gccaacccactacaccgcagcagctacgcgcacagctatggcagcagctgcagcacagcccagggcctgctgactctgtcaggaggcggccacgcaccagcacagcc

SEQ ID NO: 276492 - DNA, 317 bp, Homo sapiens
  chr21:47640130-47640447
  hypo
ggcaaagtgcagcctaaacacgttccttcaccaggcaggcgccaggagtgtggtgggaaccggacagcagccttggggacgcagcatcaacgacaccaaaggctgacagtgaactgaggacaatagtgacaagctcaccaagaaagaaggcaggatctcatgagaatgcgtaacaggacactccacctggcacggtaggtcaggaagaggtcctcaaagaaggaacacgtaaagtgtgagccagcggggcaggagtggaaggtaagaggctccaggcgaaggaggcagtgcatggcgagccctgggataataagggt

SEQ ID NO: 276493 - DNA, 292 bp, Homo sapiens
  chr21:47689551-47689843
  hypo
cccaggcagcatcctccccacgctgtggccactacgggcttgtggcaaggaatcctggcagcctccttggagccgctgccagaatgggcagcagagtgtgtgcgaggtgaggtggcgctctgtgcggtgggccgcggtcctggtcacattgcactgaacggaatcatgcagggcctagaacagcaggtgctacaggggctgctctgtcctcatccccaagttccgtggaagtggaacaaaataaccgactggaaaccccaagacacagtttactctgcgcaaaccccagggg

SEQ ID NO: 276494 - DNA, 81 bp, Homo sapiens
  chr21:47710424-47710505
  hypo
caattttcacaatggaaacaatttagggcacttgtgtacggttggctgggcaacccacccgccacaggcccagctgccact

SEQ ID NO: 276495 - DNA, 135 bp, Homo sapiens
  chr21:47737837-47737972
  hypo
ctgcacctgcagggctgtctcgaagagtccctccaacgccacagcctgcgagttgttaaaaacaggagcatcccgggctctgcctcacctgtcccaagagcttcagcgtcagtcgggtcacttgctctgctgctg

SEQ ID NO: 276496 - DNA, 220 bp, Homo sapiens
  chr21:47746265-47746485
  hypo
actacttatctacatttttgcgcagcttgctcacttccgacagagaaaaacaaaaggtgacagttcgcattcggagaaaaagacggcgaagaggaagggctcggctgtcgatgcgtctgtccaggaggagagtccggtaaccaaggaggacagcgcactctgtggaggaggggacatttgcaaaagcacatcatgtgacgacacccctgatggggcagga

SEQ ID NO: 276497 - DNA, 154 bp, Homo sapiens
  chr21:47771657-47771811
  hypo
tcagtgcagcagtgacgtgcacctgtgtgtccctcaaggccaagagcaacacttgcagggggtgccttcatgtctaaggaaagcttaccagtggtgctgagcgtttgcctcggaaggacggttgagtgctgtccaagtgcgggctcacctggtg

SEQ ID NO: 276498 - DNA, 98 bp, Homo sapiens; identical to SEQ ID NO: 220575
  chr21:47773781-47773879
  hypo

SEQ ID NO: 276499 - DNA, 1238 bp, Homo sapiens
  chr21:47774497-47775735
  hypo
atgtgcagcatgagcaagcccggtgtcgggctccgggggacacacgggagggcagggaggagacgcaggggcagcaccgcgtggcttgttgcacggtggaaccagtggaggggaactcggggcatctgggctcagcggccaggagccctcactctggagcagggtccctgggcctgctggaggccacagggtgtccaggcagggtggcagcgggctgtgtgccagtttgagttccctgcaaagcggaccccaacacagaatttgctgcacaagaggctatgggggaaatgccagagaagggcaagggcccggctggaacaggcagccaggaccttcccacgagcaggccttgcaccagagagaacccaggaagggctggggtgggtagccccaccaggcattcgtgtatcacctgagagccaacccctgcctctgcgcgtgggtgtgacgaggacccagctgttagtgggcagtggtcacaggaggctggccttgagagcccagccctgagatgtgaggccaccaggggagacgcgaggggcacgtgccctaccgaccttgctgctgagagaattgaggagaggtctgcccggtccagggccctgccgccctgaggagcaccagtccctgtcagtgccaccaattcttgtatgtcttccggaggcctgactgagagacgggtgtgggcgggagagcatgtgagcacgccagtgggctggcggggttcaccagggcgcagcgtgtggtctcatgaacctagtgaggtttgagttttctttgtgcatagcaggaaacacctttgagggttatagctgcgagcgaggtagcttggctcactaacgtgcttgtcccacgtggtttctctgtaggagagcctgccacgcttccaggcggagttagaagaaagccacaggcaccagctggaagcgctggagtctcccctctgcatccagcacgaggggcatgtctcagacagatgctgcgtagagacttcagcattgggacacgagtggcgtctggaaccctctgaagggcacagccaaggtgggcccctcccgcctcgccatggtgtcggcaggtcccgggtctgggggacgttctcggggagcctgggtgcctgggttcgatccaagtcctccgtgaagcagctgagtgctccgacctcttcttctggggctgacacctcaacagagtgtgtcctgatgagggtttggcgttagaggcggggtcactggctg

SEQ ID NO: 276500 - DNA, 128 bp, Homo sapiens; identical to SEQ ID NO: 220578
  chr21:47797823-47797951
  hypo

SEQ ID NO: 276501 - DNA, 266 bp, Homo sapiens
  chr21:47798303-47798569
  hypo
aacggcctctcttgcgctttggggccgttattaaatgaagtaaaggtgacttgaacacaggcactgtgatgctgtgacagttggtctgatcaccgagatgcctgcgtgtgggcaggtagtgcttgccacgtggataacgccggacagaaggatgacccccggcctggcctgcgagatttcctcacaccgttcagcttgggggcaggcagtttaacactcataagagttgtttacttctggaatttttcatacgatattttcaaaat

SEQ ID NO: 276502 - DNA, 232 bp, Homo sapiens
  chr21:47799606-47799838
  hypo
gtcttctgcctgctcgagtctgctgccgaacccctctctagtgaatttttttttctgtgattgtatttttcagctccagatgtcaagggagctctatttcagtctttctctctgctgagggccctgcgtgcattgtgccctcagggctctggcgggcggtggacagcctggccctggccttcacccctgctgtgccaagccacatggtcactgcagccggcccaggacctct

SEQ ID NO: 276503 - DNA, 130 bp, Homo sapiens
  chr21:47805829-47805959
  hypo
ggagaaccgggaaggcgcaaacctcctctccatgctcaaggccgacgtcaacctgtcccacagcgaaaggtcagtgtgtcctcggcaccgaggctgccttgtggccgccagcacccgctgggtcatgcag

SEQ ID NO: 276504 - DNA, 264 bp, Homo sapiens; identical to SEQ ID NO: 220581
  chr21:47811198-47811462
  hypo

SEQ ID NO: 276505 - DNA, 224 bp, Homo sapiens
  chr21:47819671-47819895
  hypo
gtggaaaaacagaaaaacatcgtgaaagggctggaacaggtaaagcgtctccatgttgtggttgggcacgtggtgaggtgtcccgcaggcatggcttcatcgctgagctggcagggagtgggcagggcgtccttcttcactggcagccaccacgtctgcaccagaaacactggcgtcagggagaaacagaagtcattggtgacgggtagcaagagtactttgac

SEQ ID NO: 276506 - DNA, 753 bp, Homo sapiens; identical to SEQ ID NO: 220582
  chr21:47832836-47833589
  hypo

SEQ ID NO: 276507 - DNA, 301 bp, Homo sapiens
  chr21:47851456-47851757
  hypo
tttggagacacagcgtgctcagagcagtcgactctgcgtggcactgaaacacgagcagacggccaaggacaacctgcagaaggagctgcgtatcgagcactcacgctgcgaggccttgctggctcaggagcggagccagctctctgagctccagaaggaccttgcggctgagaagagccgcaccctggagctgtcagaggccttgcggcacgagcggctcctgaccgagcagctgagccagaggacacaggaggcttgcgtgcaccaggacacacaggcccatcacgctctgctgcagaag

SEQ ID NO: 276508 - DNA, 224 bp, Homo sapiens
  chr21:47856006-47856230
  hypo
ggctgctctctgccgcccggcttctcaccagcttcaccagccaggccgtggacaggtgtgcacccacgccacctggcgctcactggtcccttgcagccacccctctgtcccagacccggcccgagggctggggcgcgtctggtgtgaggcccctgctcctttgcacttaacgctctagtcctctttctgagactttgctgagggattccggattggcaagatgg

SEQ ID NO: 276509 - DNA, 249 bp, Homo sapiens
  chr21:47872856-47873105
  hypo
cacctggtggcttacggtcaggcgttccatctctgtcagagacaagtggcataccagaagacagatctacacccgcccgccccccaaatgcatacaattctctgctccaggtggcatgacagaatctctacattgcatcattctgcaccattaataacaccaaaaaaacacctgttggactatatggcccaggcaatagcattacttcatcacaacccggatctactgtacagacgtttccagttctgg

SEQ ID NO: 276510 - DNA, 114 bp, Homo sapiens
  chr21:47897027-47897141
  hypo
gtgggcacctccagtaggaccggtccgattgtttgggtaaatctagcaacattgacttaagcttactcctcccatggtaagtcaaggaagcacgtgccctttttcctaatagaa

SEQ ID NO: 276511 - DNA, 67 bp, Homo sapiens
  chr21:47918528-47918595
  hypo
acggcgacccgggcgactcacctccactccgctccagagccattccagcgtcgagccctggctcgac

SEQ ID NO: 276512 - DNA, 336 bp, Homo sapiens; identical to SEQ ID NO: 220583
  chr21:47965680-47966016
  hypo

SEQ ID NO: 276513 - DNA, 93 bp, Homo sapiens
  chr21:47979412-47979505
  hypo
tcagacccttgtcacgcagcagaggagatcgggcgggagccttttgtgagctcgcttcctgtgtaggctgtggctgagcgtgggtgccggcct

SEQ ID NO: 276514 - DNA, 72 bp, Homo sapiens
  chr21:48083839-48083911
  hypo
gcagttagtctaggcgtgtcgtctgtgatgcgtgttctgactggcagccttcggatccgtgtgtgaattcat

SEQ ID NO: 276515 - DNA, 133 bp, Homo sapiens
  chr21:48084396-48084529
  hypo
ttcacagacaaacacgcttgggctcggcaggagctgccgtggccacccccgctgcccagtgtctgccctctagaagtaggctgtgtttccaggtgttcacccgtggtgcccacagtgccgacccgtggctggg

SEQ ID NO: 276516 - DNA, 78 bp, Homo sapiens
  chr22:16216478-16216556
  hypo
gagtacagtgggacccgcgacccgccctggcctcaggcactggaggacccctgcaacgccatgcgctagactatgcta

SEQ ID NO: 276517 - DNA, 32 bp, Homo sapiens
  chr22:17674261-17674293
  hypo
aaaaaaaaaaaaaaggacagcgcggtggctca

SEQ ID NO: 276518 - DNA, 41 bp, Homo sapiens
  chr22:17735250-17735291
  hypo
gagatggagtctctctcaggcgtgatctcggctcactgcaa

SEQ ID NO: 276519 - DNA, 267 bp, Homo sapiens
  chr22:17828553-17828820
  hypo
agcgagactctgtctcaacaacaacaacaacaacaacaaaagtcttgaatccacgctatgcgaggaaggaacgagggaaggaccacagctctgtccttagttcttggcccccctcccttcccatgtcctccctggggagcctcccgaagggcttgctacaccctgctggctcccgcaccacgtccactgggacctccctgctggtcctgtgcatccggctggtcatcagctcatcgtgcctcagggttacaacgtgtatacctgctt

SEQ ID NO: 276520 - DNA, 82 bp, Homo sapiens
  chr22:17882962-17883044
  hypo
caagatttgttcctgcattccacctgacatcgcatgtctccttaagtctgttgtcatcagcgtggactcattgatacttatc

SEQ ID NO: 276521 - DNA, 81 bp, Homo sapiens
  chr22:17891760-17891841
  hypo
gccattcttgagtctccatccgccttgtattgtgtctttgtgtggagacaggtggcgggcggccttctgggtgagggggat

SEQ ID NO: 276522 - DNA, 461 bp, Homo sapiens
  chr22:17897911-17898372
  hypo
gagcccgggaggcgcgggccgaagccctgggccacttcatttccacaggtacatcctggactggtggagccagcgagaggctggagctggagcctatcggctgggccccgcctcgcctcaggggacactgctcggagacaaagcccggggccctggccaagggcaccgcggaggcgccttcccagacgcggatgacgtggctgtcctgactgacgggaaggaaaatggctgctcgcccagctccatcaccagcagcggcttgtggacaactcgcccacgcatccctggtggcggtccctgaagcccccgcggggtcaggagcacgagcacttgccaggggacgcctggggcgcccctcctcccagaagctcccgcggaagactggagcaggccacctggctgcggataatgggaaccacagagtgagagaactccacatcggcctgaaggaagagcatgtg

SEQ ID NO: 276523 - DNA, 78 bp, Homo sapiens
  chr22:17932151-17932229
  hypo
gctgtatatttaggtcttttcgtgcaggctataaaaatatgtatgggccggtcacagtgacttacgcccgtagtccca

SEQ ID NO: 276524 - DNA, 33 bp, Homo sapiens
  chr22:18038127-18038160
  hypo
ttgcgaagctggcccggccgtcagcatctcact

SEQ ID NO: 276525 - DNA, 91 bp, Homo sapiens
  chr22:18070745-18070836
  hypo
gggttcaacgagctcgccggtaaggcgtcctttgcacattccttcgtgtcaggctgtgtggcaggttccatagctgcggtcgcagtgacgc

SEQ ID NO: 276526 - DNA, 35 bp, Homo sapiens; identical to SEQ ID NO: 220586
  chr22:18074668-18074703
  hypo

SEQ ID NO: 276527 - DNA, 161 bp, Homo sapiens; identical to SEQ ID NO: 220587
  chr22:18081585-18081746
  hypo

SEQ ID NO: 276528 - DNA, 135 bp, Homo sapiens
  chr22:18084142-18084277
  hypo
ctcccagggagtccacggcctagcagagaatagctcaggtaaccatcagttcagaaaccgacacaagtgactgacatggaaagatgcgcgcgatgtaactttgaaaagcaagctattaaacggttatacaagatt

SEQ ID NO: 276529 - DNA, 42 bp, Homo sapiens
  chr22:18110647-18110689
  hypo
actggttggaagcaggtctcttccctccgcactgtttcctat

SEQ ID NO: 276530 - DNA, 85 bp, Homo sapiens
  chr22:18220796-18220881
  hypo
tcctcacgtaggtgcgtaggttctggttaataaaattcactgttgtgtgaaagacatcacggagcaaggacggcgtgtgactggc

SEQ ID NO: 276531 - DNA, 293 bp, Homo sapiens
  chr22:18232881-18233174
  hypo
tggcctgggcagcgcggcagctccgactcactcctggttcacagtgtcccagtggcgacctggaaagggacacacagagtgggcggccgctcctgggaagccctggtcaggacccctcgggaggacgacgaagctggcctgtgctccagaaatggcggctgagccgaggtcctggcctgagccccgcatcctgagtttctttctccttggcgggagccaagctttgttttcctcattccagatactcacccaggcgctcagtgccctggggccgaccccgcacctgaattcag

SEQ ID NO: 276532 - DNA, 396 bp, Homo sapiens
  chr22:18265344-18265740
  hypo
atctcccccacacacgatctgaccccgtggcatccttcctttcctacaaactgcactgagacccaggtgtcatcgtgaagttcatgccagccagaggagccactgtggcgtttccggccataggcctgggcaggagccgctcccaggcgtgccgtgggcagggccgggtcagccttcagggaagagatgcctgtatgggaccaactcaggcagccacagagggatggcccagcaccccacaaaacccaaagtgctcagcgtctaggatctgtttacggggcagagaagtggatgttcttttcctggttcaaaggtagaaacaggcttggagagccgcacccggcatcagccagccaggcagacgcctggtctagcgcttggttctcacaggcatgt

SEQ ID NO: 276533 - DNA, 329 bp, Homo sapiens; identical to SEQ ID NO: 220590
  chr22:18286547-18286876
  hypo

SEQ ID NO: 276534 - DNA, 157 bp, Homo sapiens
  chr22:18287373-18287530
  hypo
ctatgtaatttccacgcctgagatgcagactgggcactgccgagaggctgggcttgagcaggcggtcctcatctccccagaatcataaagacacacagagcacagcactcggccgccatggtgttgccctctctccaaaccccgcattctgaatgca

SEQ ID NO: 276535 - DNA, 91 bp, Homo sapiens
  chr22:18287771-18287862
  hypo
agacaaacggagaacgggatggcaggtccatgctagagcgcttctctggaaaggcagcttggctaacaaagtctgacgccctcagacggtg

SEQ ID NO: 276536 - DNA, 96 bp, Homo sapiens; identical to SEQ ID NO: 220591
  chr22:18291185-18291281
  hypo

SEQ ID NO: 276537 - DNA, 315 bp, Homo sapiens; identical to SEQ ID NO: 220592
  chr22:18291533-18291848
  hypo

SEQ ID NO: 276538 - DNA, 163 bp, Homo sapiens
  chr22:18295061-18295224
  hypo
acatgcactccagccggtgaggagcaggtgtctcatcctccttcccactcatgacgtggctaacggaagtactgctgccagtgtgtgccacagccccatgcacgcacaaacacagttagtgaggatgtggctggagggccggggccggcgccgggtggttaat

SEQ ID NO: 276539 - DNA, 263 bp, Homo sapiens
  chr22:18295543-18295806
  hypo
gttttgaatacggccggggttcactcttttattgggaagaaacagcttcttcctcaccacccccaaaactcgcctcatctcactgtcccttgtgtaaagttaaagccgttaaaatatgtgattctagatgcttttctccttgagtgaccatgtgcttgtggaaattcagcccacttcttcctgctgaatgctccgggggagtagaagtggggtgcgggaggaaagggggtcctgctctcagagacagacgcagcaaaactggg

SEQ ID NO: 276540 - DNA, 246 bp, Homo sapiens
  chr22:18328029-18328275
  hypo
tgattttacagtagagtgaacgaaacttgggaaggaaaacatccaagaggcgtctgtttgacgtgggtaacgtggggaacgcatactgtctggcaagaattctactaggaccacgggaaacaaagcagattaaaacactctctactctaaaagagcttcagtagcacctgggagagggccctgcaggaatcctttcggtacgacgtgtcaagtaccatgagccacgtatgcactcatgggagaaca

SEQ ID NO: 276541 - DNA, 98 bp, Homo sapiens; identical to SEQ ID NO: 220595
  chr22:18329915-18330013
  hypo

SEQ ID NO: 276542 - DNA, 609 bp, Homo sapiens
  chr22:18340817-18341426
  hypo
taaaatggagctggtgttcacgtggctggtagaacccggaagtaattgatggagagtcccatccacctggaggcccgcatcccctcccgggcaatgaaacgtgtttctgcgtacaagcctaccaccccctcccgccaaggtaagcggtgaggagacaaggagcaattataaagaaagaggtgttggcagccaacagggtgctgagaattccgggcggtggtgagaggagcccacagtgccatgacctgacctgggcaggagtgccaatgggcctcaccaccccttgtttcattatgactaatctacttgctggcacttgtgaggcgcttggctgggtgagctgcaaggtaagggctggtttttgagtctaaaggaggtttcagggcttcgtgaaaggggctggaattcggaaagacttctcctgaaatctctgcctggctgctgccgttcagagctccacatgggtgtttttatctcggggagcacttgtgggaccgggtcctatacggcatcatcctgccctattttttagcatgaaaataagagtggcccattttcacagccgctctccttccatgtgtgtgccacggcctccctcttaggcagtgt

SEQ ID NO: 276543 - DNA, 44 bp, Homo sapiens
  chr22:18345292-18345336
  hypo
tgggattacaggcatgagccatcgtgcctggccacacctgagct

SEQ ID NO: 276544 - DNA, 299 bp, Homo sapiens
  chr22:18348548-18348847
  hypo
ctgccactgcatttcgggccctccccgttcccaggagaggcaaggacgcaggggcatttgcaggttggccgcccccggcccatagccacactgctgcaacacccactgcttctcccccacttacaggagagtcaccattacctttccagacaggggagccactgccggtctcttcctttgtgcgtagccagagagtcgatagcagtagtgtggcttacagtagaatttacctgcagacagcaagaggcagggacagaggcgatgagccaggcacggatcctgaacgtgcctccctggtc

SEQ ID NO: 276545 - DNA, 54 bp, Homo sapiens
  chr22:18349167-18349221
  hypo
gtgcagggtggaggcgtggaggctgcaggggtggggcatcgcctggcattggct

SEQ ID NO: 276546 - DNA, 151 bp, Homo sapiens
  chr22:18349528-18349679
  hypo
gtaacgtgcatccccgtggggggtgtcgtcagaaaaatctgaacaccactgaacttggcttttcccatgactctggtaatggaattaacccacgcagtcatttttttctgactcttttttactctcacttaaagagcgactgacgactttt

SEQ ID NO: 276547 - DNA, 751 bp, Homo sapiens
  chr22:18352969-18353720
  hypo
cctctcactgccacccgatctcccaccaggtgcgcacctctgccctctactcagtcaccatacccttctctctcaaagtctagccaagggtcagggaggtcatcccaagatgctcttgaacttcacagatttcctcctcccctgtgcttctacaaagcgacaacctaggctgtgtaaccgagcctttcgctgcacacactcgtgtcgcctgctactcttcatgggtctcatccccataggacagtgagctcctggaggcacacattacacttctgcatctttcacagaatgcagcaaagatgcacacacacacccatgggcaaaagtacctgtagatcaattagctgcaccttgcgacatcttctttccgggcagactccacggtgagaggctaactagaacaccctgagcatcagggacagctcagcgaggttgggtggctccctctgccaggccccatccttgagatcaaatgagctatccagagagcaggtgtgtgtgagaggtggaacagaagacttgacagcaaacaatctgcctgccttatctaaacagcgtcctaattctttcattcttccccgactcgggagtgctttttaccaacatagcagaagggccaggcaccatgacaggagtcagcctttctcggctcacctctctgggctccttccttgctccttctaacagaggtgactgtttgttcaccctcaggacagctgaagtgactaggtcctaacggcatggcatccct

SEQ ID NO: 276548 - DNA, 410 bp, Homo sapiens
  chr22:18354732-18355142
  hypo
gaagtagcatgtgtcgctgcctcccaggttctgcgggaactccttcttcatggagccctgcaggaggtggcggtcgggaggaaggggagcacctcagggagtgccacacaggccctcctagaggcacagccttgcgagagcaaagccaaccctcactaaggggtctgctttgagacagacttctaactggctacggtcaactgtgctcttggctctgccacagagtgacggcaccgccacagtcactgcctccacgcactgacagagaacacttggcacaaccgcgaaagcctgggccagcctgctgctgacgagggagccagcatcacagtgcttcacaccagacttgagtaatgctatgatacagcctggcgacgccgggaaatatcgacaagaaagagtcttagaga

SEQ ID NO: 276549 - DNA, 279 bp, Homo sapiens
  chr22:18355585-18355864
  hypo
gagctcactccgcccgtgtacatctttatatacttctatcggttgaagattacaaaatgaccagaatgaagggaaatgagaaggaaaaaaatacataaattaagaagacacggggaaaaaaagaaatctttgggaagtgcaatttgaatacaaggtgcagcagcaaaccatgccaacacagtgctcacaggcagggaaaccgggtggaagaaaaacatcgcgtcagtgtccacgcaggggtaccggcacaggcaggacggctgcaggggaagtgtcttc

SEQ ID NO: 276550 - DNA, 82 bp, Homo sapiens; identical to SEQ ID NO: 220601
  chr22:18358159-18358241
  hypo

SEQ ID NO: 276551 - DNA, 146 bp, Homo sapiens; identical to SEQ ID NO: 220602
  chr22:18363713-18363859
  hypo

SEQ ID NO: 276552 - DNA, 348 bp, Homo sapiens
  chr22:18367813-18368161
  hypo
caaaatcccagccccgcctcttgtaagaagtcagagtgacttttagacaatcaaggggagagacacgccctaaccaagacaccccaagccacaagctgctgccatgcactcgcatgcatggcatgtgggagtgctgcttagcactcaatgctcatattcctaggaaaatatcccgggaaacagctgcaacacacaaaagaagctttatcataagaacgcttatccaaagatgagaaacaactcgaacatccaacactagagcaacagctaagagaagcctgatgcccacacattccaaaaggtgcttgtaaagagtcaggaacaacatgggaacgcctacggttaaat

SEQ ID NO: 276553 - DNA, 62 bp, Homo sapiens; identical to SEQ ID NO: 220603
  chr22:18371272-18371334
  hypo

SEQ ID NO: 276554 - DNA, 265 bp, Homo sapiens
  chr22:18376242-18376507
  hypo
tcccctctgccccgcgtctgtacctggtttctctctgtgctctcgtaacacctcaggccaaggtaattccgtgtggtggaggcctgtctcgtgcactgcgggatgttcagcagcatccctggctcctgcccacccccaatcatgaccatcaaaaatgtccccagacaactaccaagtatcccctggagggcaaaatcaccctgggttgagagccactgtctcagacagtacttcggccactgcctcggaccgcaccttgtggctc

SEQ ID NO: 276555 - DNA, 105 bp, Homo sapiens; identical to SEQ ID NO: 220604
  chr22:18400898-18401003
  hypo

SEQ ID NO: 276556 - DNA, 180 bp, Homo sapiens; identical to SEQ ID NO: 220605
  chr22:18427241-18427421
  hypo

SEQ ID NO: 276557 - DNA, 134 bp, Homo sapiens
  chr22:18442886-18443020
  hypo
ctccaggctgagcgcggctgtggctccctgccccagcatggctagctcactcccattcctacagtagcttccgcatctcttcatgggtgctgttctcactacactgttgctacgggctccgtgctaggcagtga

SEQ ID NO: 276558 - DNA, 565 bp, Homo sapiens
  chr22:18443245-18443810
  hypo
caggtaccacacatgcgaacccagcatatgggaaggaaacatgcaccctggaacaccccgcccaggagtgtgtgtgggaaggagactccaggagctctgcgaactgttctggaactggacctgttcaggattggcaaggggctccgggaacagatcctgtgggtgtgagactgtgtccccgtccgcttagggaaggaccatgggggtgagagggtggggggaaggaggcagatttggaaacagacacccgccccggggtcagatttgacccaggggggcccgcaaagtggggaaggaggagaggaagcactaagctgtgccagggagattctgaggcgagcaggagcagagcaaggaccgaaggagccagcacggggtcactgggagtcctccaggcatggaaagagcacgagctcagcaggaggtgctgggtcatgaggtgagcagggcaacgagacggtgcgggacctggtaggccacctggcagctttggcattgactggggtgcgaggggaaccactgcaggagtctgagcagggaagaatgacatcgctaccgtgtgtta

SEQ ID NO: 276559 - DNA, 262 bp, Homo sapiens
  chr22:18451007-18451269
  hypo
agcgtgcccagtgccgagccctgcctctgtggaagcgttgggggagggagaaaagcctagcaaccttgccagagctcagacccgccctactgaggggacactcacaggtgagcaggtgttcacaggtgaggacactccacgggggagcagcacaggagccgggagctgctctgggaagagctgaggcgccagagctccacagtcgcagactcaaaccggagacctcaccagaccctggctcgggcaagcttcctcaggctac

SEQ ID NO: 276560 - DNA, 383 bp, Homo sapiens
  chr22:18553593-18553976
  hypo
cacctctgtcatgagcgattaggggaagggtgtgtggagtctacctgtaatatatttccactgtcccgctacatttcagaaccagatgcacaaagaacaaacaagtttcccagcaggactcaaaatagaagggatggtgactgcatgccttaccattcgggatcctcttcttcccggagaactccgcgcaggcaggtctgtacctgcttagaggcagcctgtctgttgagcagcccatcctcagtgagggacgataagagactggggctggggggatgggcagaatctttgctgttgccacaaactgggagtgtccgcagaaaactgaatgtgtctggacttcgccatcaaaacccatgttagtgtggcgcaggaacaaggta

SEQ ID NO: 276561 - DNA, 135 bp, Homo sapiens
  chr22:18616597-18616732
  hypo
tcctctttcacactccaccccgatttctcaaatgcgtttcttggctctctctcgtttgagagtgtgggtatccacacgcaccccctgctccagttccaaattctcagcaagagcgacacacctccagtcttctga

SEQ ID NO: 276562 - DNA, 450 bp, Homo sapiens; identical to SEQ ID NO: 220608
  chr22:18619403-18619853
  hypo

SEQ ID NO: 276563 - DNA, 38 bp, Homo sapiens
  chr22:18641801-18641839
  hypo
aacttttcttgttatcgaactttttgtgtgtgtgtgtg

SEQ ID NO: 276564 - DNA, 97 bp, Homo sapiens
  chr22:18951683-18951780
  hypo
cagggcctggctcctcgggactcagccagtcctgccggtggagtgcgcaggcgtgacgctgagtgctggactctgtttccacgcgaggccttggggt

SEQ ID NO: 276565 - DNA, 271 bp, Homo sapiens
  chr22:18973383-18973654
  hypo
ggccaccagggcagcgtgggagcagatccagcggagcgagggtggcacggcacagctgctccggcgcctcgagggctacttcagcaatgtggcacgcaacgtgcagtggacgtacctgcagccctttgtcatcgtcaccaccaacatgagtaaggcactggctgcgttgggggtggaggcctgcaaccctcaggggtgcgcccaggagctgggtccccatgggtggagcaggtgggctcccggcccccacttggccatgctcttagaaaaa

SEQ ID NO: 276566 - DNA, 165 bp, Homo sapiens
  chr22:19020499-19020664
  hypo
gctctctctcacctccgtgggagcactccggccaccccaccttgttcccgagtctacctccatagcctggcgctgcctgtccaggctgtgctccgagtctgctcgcctcgggcccccccaccgccggcagttgaagtgcagctgcagtgcgcggtagacaggcaa

SEQ ID NO: 276567 - DNA, 75 bp, Homo sapiens; identical to SEQ ID NO: 220609
  chr22:19039218-19039293
  hypo

SEQ ID NO: 276568 - DNA, 36 bp, Homo sapiens
  chr22:19048114-19048150
  hypo
ccctgggagcagcacgtggggcggtgtggatgattc

SEQ ID NO: 276569 - DNA, 63 bp, Homo sapiens
  chr22:19048366-19048429
  hypo
gaaccctgcggaaacgagctcccaacttcaaatgtgtgtgcagggtaccgacacatgggcata

SEQ ID NO: 276570 - DNA, 193 bp, Homo sapiens; identical to SEQ ID NO: 220610
  chr22:19053069-19053262
  hypo

SEQ ID NO: 276571 - DNA, 61 bp, Homo sapiens
  chr22:19120094-19120155
  hypo
ggtgcaagtaaaattcgtcaattaaaccactattttgattacgttccattagctttcttcc

SEQ ID NO: 276572 - DNA, 33 bp, Homo sapiens; identical to SEQ ID NO: 220611
  chr22:19130728-19130761
  hypo

SEQ ID NO: 276573 - DNA, 36 bp, Homo sapiens
  chr22:19584223-19584259
  hypo
aggctgggttcctgccgccagcgagtgggacccctg

SEQ ID NO: 276574 - DNA, 108 bp, Homo sapiens
  chr22:19605268-19605376
  hypo
ccctttgcacagcccgcgaagggcacgtgggaatcctgctccattccaggtcccgggccagtagctccaggccgcgccagggtcggtgcagagcggcatttcccgccc

SEQ ID NO: 276575 - DNA, 219 bp, Homo sapiens; identical to SEQ ID NO: 220612
  chr22:19620238-19620457
  hypo

SEQ ID NO: 276576 - DNA, 67 bp, Homo sapiens; identical to SEQ ID NO: 220613
  chr22:19621109-19621176
  hypo

SEQ ID NO: 276577 - DNA, 231 bp, Homo sapiens
  chr22:19644023-19644254
  hypo
ttcttggagggcccgcggcctcagcccggctccctccctcagctctggtgcgtggccgcagatgacccgagcggcctgggcttgggcttctggtgccctcgaggagccgccctgtgtgctcacacaggctcctggcggcgggcagcacagcactctcacttttggtcaccggtcctttcccgagggcagtctggcggggcacggctccagggccccgagtccagcacctcc

SEQ ID NO: 276578 - DNA, 120 bp, Homo sapiens
  chr22:19713942-19714062
  hypo
gaggacgctgtggggacggtgaggacgctgtggacgcggtgaggacgctgtggacgcggcgagggagctgtcagggcggtgaggacgctgtggacgcggtgaggacgctgtggacgcggc

SEQ ID NO: 276579 - DNA, 120 bp, Homo sapiens
  chr22:19714362-19714482
  hypo
gaggacgctgtcggggcggtgagggcgctgcggacgttgaggacgctgtggacgcagtgaggacactgtggggacagtgaggacgctgtggacgccgtgaggacgctgtcggggtggtga

SEQ ID NO: 276580 - DNA, 36 bp, Homo sapiens
  chr22:19725676-19725712
  hypo
aggaggagtggcttccgggtccggctgtgggctcag

SEQ ID NO: 276581 - DNA, 638 bp, Homo sapiens
  chr22:19771481-19772119
  hypo
gaaggttgagaccccgaggagaggcaggcctgggggaccgtgcagcagctgtgcccacctaggaccacagggctggtggggctggcagcttggtagagggcaggtgcacagcaaagttttcaccggtgccggcttgttgtcttccacgctgggatttcacatgaagttctagctaattgagtataagcatttctaaagaacccccggagggttgtttttctttgtgcaaacactccttttgtgcagagggtgttctgtggcttcttggcagagacacaggtgggaaacacctgattgaacatcattgcctggggagtggagacacgcacagcacgtcaacatggagcgcccagcagcggcggcgggtcctgggctgtgctccggagcccttcccgggatcatctcccggcatcggctgacccctcggtgtctacgtgccaagcccaatctgcctgcagggacacccactgccagaggcggaggcaggttctcctggtcccagacccagggccgtctgttggcctgcaggtaacacgcagggaggaaggaaaaggctctaggcacagctgcttgtctaagagggaccctgttggcggcgcaacgctgggtgagtgctgcccgcccgcggatggggtgct

SEQ ID NO: 276582 - DNA, 355 bp, Homo sapiens
  chr22:19787001-19787356
  hypo
ctctggccaccagtggctctcgtagcgcatgacctcaggtgccaggaatgcgtggtgcggcgaagccaccatctggttccgattacccatgctctgctccaggaacctcattcgcgtctctactcccagcacccgccggggggagactgatctgggctcatcagaggcttcggcaggagggtgtgagggggacacagccgtgcccacgtggctctcagccaaggagtcacagtgcaggcggtgggtgaggacacctgtgggtgctgaggaccttcggtcaccttgcttgctcccgggtggcaagaacgctctcaggcagctcacctccgaaagcgcccccacaggctttccctga

SEQ ID NO: 276583 - DNA, 160 bp, Homo sapiens
  chr22:19789604-19789764
  hypo
gtcaaagtcaaggtccatgacgggctcctcatggcaggcgatgcggctgcacaccttctgctcagagacgtcccacaggaccaccgatccatcctcatagccggccagaaggagtgggcgggagctgcagtcggcctgcggggaacagcagagcagtcag

SEQ ID NO: 276584 - DNA, 170 bp, Homo sapiens; identical to SEQ ID NO: 220617
  chr22:19798779-19798949
  hypo

SEQ ID NO: 276585 - DNA, 213 bp, Homo sapiens
  chr22:19799719-19799932
  hypo
tgggtaggcgcaggcgcctcctaatcaaatgcagaggatgagcacaactgtttggagaacatggggcctcaggcaggctggctctcacctcgtcgctgcccctccctggcacggcaagcgtccagcgtggctggcccccggccaggatgctgctccggcagaagcccacactctccaagcacacggagtccacgacagcgctcctgccctccg

SEQ ID NO: 276586 - DNA, 92 bp, Homo sapiens
  chr22:19827948-19828040
  hypo
cacctgacagataccacctccgccaggtgatgacgctcagcatcagcagggctaggtcatgctgaccacacgtcccactgacatgatagaaa

SEQ ID NO: 276587 - DNA, 427 bp, Homo sapiens
  chr22:19830502-19830929
  hypo
ggggctccgtttggcgattcggagtcaaaggcgcacttcatagctcctttccaaatcccgtgcattgtcaggccctgttcccctttgaagcctcgctgagtgattgaagcgtctactttctgaggggcagatagcaccgggctggtaatctgactctaagccacgggataaaggtagtttgtttcctctcagcccgtctgtcaacacctcctcagtaattagccctaattattacagagggccagcctcccattcggttattaaatcagaaatagtatcacggctgggcatctgtcaacgccccgactggcgaccttcgattcattgaatcctctgtcagtatccgcctttggaagcgcccaggcgggcagggaggcagcggcttcaaagatgcagatcccaggaagaattccggtgaggcagggag

SEQ ID NO: 276588 - DNA, 75 bp, Homo sapiens
  chr22:19839318-19839393
  hypo
gggctgcccaggcctgggctcggcctgttaggcgcctgaggatctcgcagacacggctgatgttgtcctgatagt

SEQ ID NO: 276589 - DNA, 411 bp, Homo sapiens
  chr22:19839604-19840015
  hypo
cgttcgcacacacacggtgtccccacagcagggccgctcaatccagggatccacaaggggggtgtatgccaccccaggagacgccttgtccatctgctgccatggatgtgcgttggcataattggcggctgcccagatgggaatgcgagggccctgctgacggcaccggccacgaggcatgctgggagcacaggggagaagagaggagagccagcactggtgggtggtgggggtgtggacagatgtggcttgcacgacacaacaggacagggatggctgaacagggcgtggcagacccgcactggtccaggcaagtgctgaggatcagggagctgacagctgcagcctcaggagagctgagaagagctgagagactgtcagtcgcaggccatcatccgaggcaatctgtcc

SEQ ID NO: 276590 - DNA, 149 bp, Homo sapiens
  chr22:19856433-19856582
  hypo
actgggggcccccaccgtggtggctgtctggtcctcacggcggccctccgcgggtggggtgggatcagagcttgtctgagctggtgaaggcgggactcatccctgctgtgtctgggcctcctggtgcggtcttccgccctgacatgcct

SEQ ID NO: 276591 - DNA, 123 bp, Homo sapiens
  chr22:19866816-19866939
  hypo
caggctgcaggctccggtttctctgggtgcctgcaagctgcagcggcagcaagatgaaaccgcaccgaaggcttccagctaccacggcccggcaggcttcagagcccccgcatccctccaggc

SEQ ID NO: 276592 - DNA, 132 bp, Homo sapiens
  chr22:19870367-19870499
  hypo
gcaaaggacctgccccggtgtgatgcccagagaggcaagccagaggatactgaggcggggagggcggggccaggtgggcccgaactagacctgcctctcaaccctgtggggacaggacggccccaaggccat

SEQ ID NO: 276593 - DNA, 55 bp, Homo sapiens
  chr22:19870815-19870870
  hypo
caggggccctggtcccgggacgcatgccgtacctccaccacgtcaccaatggcgt

SEQ ID NO: 276594 - DNA, 419 bp, Homo sapiens; identical to SEQ ID NO: 220619
  chr22:19872851-19873270
  hypo

SEQ ID NO: 276595 - DNA, 159 bp, Homo sapiens; identical to SEQ ID NO: 220620
  chr22:19882774-19882933
  hypo

SEQ ID NO: 276596 - DNA, 114 bp, Homo sapiens; identical to SEQ ID NO: 220621
  chr22:19891185-19891299
  hypo

SEQ ID NO: 276597 - DNA, 496 bp, Homo sapiens
  chr22:19892195-19892691
  hypo
ggcctcgtgcacgccgcagagcccaccgagggcctggggccagggggacagggagcctccttggtggaggagccaaccaggggacagagtgcccactgcaggaggggcactgtgatgccaggcaccgtgagttgcgcacctggcctccaggatgggaccaggtagaaatgtcccacccgactacgggaggcactcaggggccaggggagcagccccggggtccatattaatttcagctccattttaaaggcgagttaaaataaacatggggaatatttataaggcaaataaatctggcagaaacagcccctccaagtgtgagtggaggcctcccctcagccccagcccaagctgataaaatacagaaatgctactgtagaccctccgggcttattttgactgcagcagaggaatgtaacatgtaaacactgactcccatattacactgttacaacttgcattaacagcgccggacaaaagccgcattttcacagaa

SEQ ID NO: 276598 - DNA, 177 bp, Homo sapiens
  chr22:19892921-19893098
  hypo
tgtgtcttcccggccgagccagctgcccccagcacagggttgcagaggagcgctccccaagccccagccaccttgctagggagacagcaaggccagggcacccagagcaccgggccccctccccaggcccaagcgggcagcctctgaggggaacaggcacaacgagggtggtgaaag

SEQ ID NO: 276599 - DNA, 370 bp, Homo sapiens
  chr22:19899690-19900060
  hypo
gaacgtccccttagcggccatgagaacaagatgtgctggtggaggaagcggatctcaaacagtttatgcttccaactggcaaaaaaaaataaagtcaggaatttctcaggtttactcaaggaaaaccgaaaggtctggcaatcaaagggactaaaacgcaagcaagccttggcagacaccctgggagggcgtggcagggagagcgaagcagccctgagctgcctgcctcctaaggaccaggagcgcctgctggatcccctgtgagcccaaagagccgtcagcagctgcccgtgaggtgcagagcagggccgggccaggccagggcccctgtgcagtgctccctggtgcggatgcacgtgcagctctgcct

SEQ ID NO: 276600 - DNA, 74 bp, Homo sapiens
  chr22:19903251-19903325
  hypo
tccacaaggagccacgcgagtaagtcagatgctcacctctttcccacctttggcaacgccgcaaaccgtgtgct

SEQ ID NO: 276601 - DNA, 102 bp, Homo sapiens; identical to SEQ ID NO: 220623
  chr22:19924379-19924481
  hypo

SEQ ID NO: 276602 - DNA, 157 bp, Homo sapiens
  chr22:19938443-19938600
  hypo
gggctccagtaagacgctcccacgggaggagcaagaacacagaacagagggggcaagacagctccaccaggagtcaggagtgaatcccctctgggaacgaggcactaggaagaagaacttccagcccaggaggtaggtagcgttcagaagaagcctg

SEQ ID NO: 276603 - DNA, 142 bp, Homo sapiens
  chr22:19945258-19945400
  hypo
ggagaggtaagaccatcagccgtttcacagaggagggaatgtggacctcacgggggtctcatgagcttgcgagccgatggccaggcagccggtgcagaaggttcatccattttgatgaaccgtgaattcatctgtactttat

SEQ ID NO: 276604 - DNA, 257 bp, Homo sapiens
  chr22:19960818-19961075
  hypo
agctcagccatggcgtagctccctgaggggcaggactaggtgtcagaacacacctctgccccacctctccaggaaggagcagggatcccgcgagggcgaggggcactgccaggagagcccctggagaccgcctgtgtgcaggcggtcacaggagcccctgtgagcagggcgctgagcttcagagacagggccggggggactggagctacctccagttgggacagcgcccaagcgagagggccggggcctggactccc

SEQ ID NO: 276605 - DNA, 332 bp, Homo sapiens
  chr22:19961470-19961802
  hypo
ccgtccagggtgcacgcattgcccgcagcccatacacctcttggatcctggggtggtggtgtggcccctcctttccccgccagccgaggcaggagctgcaccagtgaggtgcctgggattccctctctcaggacttgcccaccctgcccgacctggtccctcaccatccagttgccggcactgaggttctgcagagcgccggcggcagcctccagggtgttgaagttccggctctccgtgaggagggagaggtagagacgtaccacctcgggctggtacagcagctcaaagcctaggtgcagggcaaccgccacccacggtcacccagaatc

SEQ ID NO: 276606 - DNA, 93 bp, Homo sapiens
  chr22:19964967-19965060
  hypo
catcatcccgcctccggcgctgggagcctacagcactgcccaggggcccgggctcggcctcctggtacctgtcggccccgggcacctccttgt

SEQ ID NO: 276607 - DNA, 57 bp, Homo sapiens; identical to SEQ ID NO: 220624
  chr22:19965520-19965577
  hypo

SEQ ID NO: 276608 - DNA, 300 bp, Homo sapiens; identical to SEQ ID NO: 220625
  chr22:19966359-19966659
  hypo

SEQ ID NO: 276609 - DNA, 310 bp, Homo sapiens
  chr22:19967264-19967574
  hypo
ccagtgacaagctcacggacctcgttgtcccgggcagccctcagcaggcgcaccagggcaggcacaccaccgcagtcccggatggcggccttgttgtcagtgtcgcggccataggagaggttgcgcagtgccccacaggcccggcgccgcacctcagcccgcgggtggtccagcagtgccacaagcagcggcagcccccgcaactgccgtacacgccgcttgacaccctcgttctcaaagcacagatgctgcaggtaggcggccgcattggccttcacggggtccacggggtgccgcagcatggccagca

SEQ ID NO: 276610 - DNA, 416 bp, Homo sapiens
  chr22:19968734-19969150
  hypo
tggtatgaaggccccgcccacactcaggcctcctccttgtggccgtgccatagtcaggctccagctcagggccaccctcgtcatcagcggccaggctgcgcgtgtcatcctccaagccatacggctctgcctggaagcgctcgggcagggagcggccacctggtggcccaggctcaggacccaccgggaaggcttcccggtggccaggcagtgtgaagcagccatcaccagggcctgggccaagggggccagcacgtgggggccgcatgcccagccctcgggacaggctgccatagctggggctgtcccggggctcggggccttcgggaaagccacccccactgctgaggtaggctcgagagagtgtggccactgggccaccaccacgcagcaggaaatgccggtccagggcacca

SEQ ID NO: 276611 - DNA, 52 bp, Homo sapiens
  chr22:19971874-19971926
  hypo
gagagccacgcccccgcagcaagacctggcaaccctgcggcaccacccatca

SEQ ID NO: 276612 - DNA, 156 bp, Homo sapiens; identical to SEQ ID NO: 220628
  chr22:19972131-19972287
  hypo

SEQ ID NO: 276613 - DNA, 75 bp, Homo sapiens
  chr22:19978174-19978249
  hypo
ccaggctgctgggcacgctccagctgtagggcaacatggcgccgctcctgctccagtgcccgtgtcagcctctcg

SEQ ID NO: 276614 - DNA, 81 bp, Homo sapiens
  chr22:20050530-20050611
  hypo
gacggctggagccccgatgctagctacaatggctggcttgagtggacttctgtcaggagaattgcttgaactcgggaggtg

SEQ ID NO: 276615 - DNA, 321 bp, Homo sapiens
  chr22:20050671-20050992
  hypo
tcctcctcaaaaaaagaaaataagagaaaagagaagagaagaggaaaaagaaaagaagaaaagaaacaacccttgcagttccccggccactccccagagccagttaggccaccaggtgggctggggctagacccggctgcgggcgggccacagagggactaatggccaccacttctctccatcctgcaggcagctgccagacccggccatcgaggaccagggtggggagtacgtgcagcccatgctgagcaagtacgcggctgtgtgcgtgcgctgccctggctacggcaccaggtattgcagcaccgtgggtgcgccacc

SEQ ID NO: 276616 - DNA, 272 bp, Homo sapiens; identical to SEQ ID NO: 220629
  chr22:20073379-20073651
  hypo

SEQ ID NO: 276617 - DNA, 202 bp, Homo sapiens
  chr22:20079436-20079638
  hypo
acgagtacatgcagcgtgtcctcaaggtccgccctgtctataatttctttgaatgtggtaagtctaaccttccccatttcagtcctaaagaatcacaaggtgtaactttggtcagggctggggaggcaggcgctgaccgctagccctactctactggaacgggaggaaagggaagggtagagagcagcgtgctgcagatggg

SEQ ID NO: 276618 - DNA, 42 bp, Homo sapiens
  chr22:20120590-20120632
  hypo
gcccccacgtgcatcgcaaggctgaatcgggtgcccgtggag

SEQ ID NO: 276619 - DNA, 174 bp, Homo sapiens; identical to SEQ ID NO: 220630
  chr22:20123202-20123376
  hypo

SEQ ID NO: 276620 - DNA, 344 bp, Homo sapiens
  chr22:20123633-20123977
  hypo
ccctggacctgccctccacccgtagcttggctggagccagccaggaggggctcagagggacatggcgggccagacactccacctccagcccaggcccagagcctgtctttgcctggccctccggcaggcgagcctggtgtgcaccatcaggtctgggtgggagtggagcctccccgagcctggacccagactactgcctgctaggccctgcctgtgggaatgcgtgtctttgagtgtccctgagcatccacacatggcctcccctgtccccatgtgtcctcatgcatccttgcatgtccttgtgtgtcctcccgtgttcttgcgcaccctgagagtgcttgtgt

SEQ ID NO: 276621 - DNA, 190 bp, Homo sapiens; identical to SEQ ID NO: 220632
  chr22:20126324-20126514
  hypo

SEQ ID NO: 276622 - DNA, 248 bp, Homo sapiens
  chr22:20130992-20131240
  hypo
cccggcttcggtggcgcccgcaaccctgccctgcagacgtcactgtcctcgctgtccagctccgtgagccgtgcaccgcggacgtcgtcctcctccctgcaggctgatcaggccagcagcaacgccccggggccccggcccagcagtggctcacacaggtcacctgcacgccagggcctgccctccccgcccggcactccccactcaccatcctacgcgggccccaaagctgtcgccttcatccacac

SEQ ID NO: 276623 - DNA, 446 bp, Homo sapiens; identical to SEQ ID NO: 100766
  chr22:20228947-20229393
  hypo

SEQ ID NO: 276624 - DNA, 161 bp, Homo sapiens; identical to SEQ ID NO: 220634
  chr22:20248011-20248172
  hypo

SEQ ID NO: 276625 - DNA, 146 bp, Homo sapiens
  chr22:20302965-20303111
  hypo
cccgctgctcctcacggatccggtgttccacggcctgccatggggccagggcgcggagggggagaggtgagggcagctctgccatcagggggcggggaggtgagggcagctcaaacacatgctcctgctgccgtccccagtggcag

SEQ ID NO: 276626 - DNA, 83 bp, Homo sapiens
  chr22:20308710-20308793
  hypo
gtgaataatgacaagcgctcaggccactgccgtggagggcggtccacaacccagagctggtcatgcgccgggcaccctggcct

SEQ ID NO: 276627 - DNA, 208 bp, Homo sapiens; identical to SEQ ID NO: 220636
  chr22:20760013-20760221
  hypo

SEQ ID NO: 276628 - DNA, 82 bp, Homo sapiens
  chr22:20765421-20765503
  hypo
gccaccgtgcccggccaaaaaggactcttaaaactcaacaataagaacatgaacggctgggcacagccgttcatgacacaga

SEQ ID NO: 276629 - DNA, 120 bp, Homo sapiens
  chr22:20857254-20857374
  hypo
tagtcaaacaagttttatgttatcactactgaatggtaaagataataaaactatcaatccaacctaagagcaaaatgtgcaataaaaatgaattgcggctgggctcacccctgtagtccc

SEQ ID NO: 276630 - DNA, 101 bp, Homo sapiens
  chr22:20864298-20864399
  hypo
tctttatttttttcgatattgctgtttgtgtgtttttctgttgccgctctaacaaattaccacaagtttagcatcttaaaacaacacacctttagccaggt

SEQ ID NO: 276631 - DNA, 131 bp, Homo sapiens; identical to SEQ ID NO: 220637
  chr22:20908750-20908881
  hypo

SEQ ID NO: 276632 - DNA, 111 bp, Homo sapiens
  chr22:20921973-20922084
  hypo
tctaaggaagagcccgctgcatgttggaatgtgccctggcagggtttgccctggtgacttggagatgtctaaggaagagccccctgcatggtggcgcgggcctgtctcgtc

SEQ ID NO: 276633 - DNA, 223 bp, Homo sapiens
  chr22:20929349-20929572
  hypo
tgagtttctttgttgcgatcaccttgtctgttgtccctctgtcctcaaagatgatcacggaagccttggcccaaggtgggatgcacataagagcccggttcccgcctaccaccgctgtgtccgccatcccgtcaagctccatccctttgggcagacagcccatggcacaggtatttacggggcagcgcccagggcacggctgggagctcggggcgtcctctga

SEQ ID NO: 276634 - DNA, 614 bp, Homo sapiens
  chr22:20945800-20946414
  hypo
aggaaggcccagcccgaggacagtgtgggcacaggcgaagccgggggcatgcctgctcctgatccggcatgtttagttggagaaaattcactcagttgtgcaccggcactgggcatgttttccttctacgaagtttttaacagatgtgtacctgaccctgcctggagaggggagggctggcagggtcagcgtttgaaatgatgctgcccccggcgggacaggcagacaaggagggcaccgccccgggcctaggcgggtctccgtcctggggcaggggaagagctcagcatggcaggacctagcgtgggcttgctgccctgtgtcctccctgagcccaggcaggtgctggagttcatgtgctgcgtttctgctctgcgggccgccgccgtgttcaggcgcttggggaggcagggcaggcctagggccctgtggctgggctcacccttgttctcccacttcagatgctcgatcttctagtggagcttggccagcaactccaaggactgctgctgtaggaactgcaggcccaggtccaagtccaggatctgcctctgctggtcgatctggacacccacagaccggcggcactgcggggggtgcgacgtaacctgaga

SEQ ID NO: 276635 - DNA, 112 bp, Homo sapiens
  chr22:20958608-20958720
  hypo
tatctggcgcaggtacgccagggcctcctccaggcactcgtccatcttctggacgctgtcctgccccatctcgcccaggtcatggctgaataggagccgttggtgtctgtgg

SEQ ID NO: 276636 - DNA, 228 bp, Homo sapiens
  chr22:21011032-21011260
  hypo
actgtgggctgccctcctaccgctctccccgctgcagtctccatggccaccaccaacctcagctaagcgaaacacgttgccacacgctcaagcctaccgcatccagcaggcgtcttacccttctccttctctaagctgggcaccgaacatcagggtatgcagacacaggagagcccggtaatggcctgattccttgccccctcagccggctttatatagggaggtttt

SEQ ID NO: 276637 - DNA, 176 bp, Homo sapiens
  chr22:21024825-21025001
  hypo
gtagccggagtagtcgtagatgatgttgcagtggaggcgggagttcagcccagtatagaagctgctcatctggcccaggtccaccgcgttgccgtgcgagaagaagaccgtgtacctggcaccaggcacgcagcgaacatacatgcaggagacgcggttgccgtgggcgctcttag

SEQ ID NO: 276638 - DNA, 60 bp, Homo sapiens
  chr22:21099331-21099391
  hypo
ctccttgagagttgcgtgtgcagcttataaatgtcacttacagaccgtaaaggggctgaa

SEQ ID NO: 276639 - DNA, 344 bp, Homo sapiens
  chr22:21101701-21102045
  hypo
ctttgggccaaggtgcggcttgcaccactaccattgtcaacagacatccacagcaccctgcatgtactcatgtgcgtcatgaaaagcgacagccgagctctaagccttcccctgcactgtggctcctatggtctaaggggtcactgctcttcagaaggctcgcacataccccaagagttgtgttctgcttgttgtagccagcaaagtgaaggatgctctcagtggccatggccagccccgtgtgctgggacagtcccgatacccagttctgatgtttgttcagatattcctgaaataggaaaaacacatggggtttcagttatttatctgatttttttagaggc

SEQ ID NO: 276640 - DNA, 174 bp, Homo sapiens
  chr22:21102482-21102656
  hypo
tgaggacaaggccaattccccgagcggctgtcatgcagtcactgcggtgttgcaccgtcaatgggagagggccatttattctttcagcacatccttgctgagcatctgctgtggtagccaccaggcaaataagctacaaagccttggccttgcggtcaacaggcaggctgtgtg

SEQ ID NO: 276641 - DNA, 395 bp, Homo sapiens
  chr22:21105244-21105639
  hypo
aaaatcatgcttgtgcgacgcagactcgagaggctataaactggctggtagctgaagacctctttggcagctaaaccgagaacacagctgagtcaacatggctgaggtgggggagctgggcttggaagacagagcgacctgggggcagccagctccccttgcactcggtggagcctggcaatggcttggtctcctcactgggggatggggccagcaccacccacacctcaaattgctggggactgggtgagctcatgcaggttgaccatctcgtggaaatactcagggaattgtggtaaagatggcccttagtgcaggggatcgtgtcgggcctacctcacgggcttcgtacgtgtcaggaaccgtgatccggtagggggcgtcggggatgtcat

SEQ ID NO: 276642 - DNA, 147 bp, Homo sapiens
  chr22:21150528-21150675
  hypo
catccaccaggtgctcgtcttggatgttggccgcgatgttggccagggcattaatcactgccagggagcaatgcctgaagaagaaggagtgaaataacagccactgccaggccctcaaccgtccccaagggacggcactgcaggggt

SEQ ID NO: 276643 - DNA, 180 bp, Homo sapiens
  chr22:21153867-21154047
  hypo
acagaggcatgcatacgcacaatgccaggtgccccacacgagcctgctgagaacaatgggctgcctctgagagacaggaataggggcgtacttgtcgctctcctgagagatgtagagccggttggacaggctggccaagaacgcctccacaatcactgggtccaccgtcaatccagcctt

SEQ ID NO: 276644 - DNA, 35 bp, Homo sapiens
  chr22:21304979-21305014
  hypo
ccgtgagccgccgcgcctggcctagacttgtgtgt

SEQ ID NO: 276645 - DNA, 467 bp, Homo sapiens
  chr22:21354050-21354517
  hypo
acagcaggccctccgtctagaatccgctttattatggcacctggtgggtctggtgggatctgagggaggaagaggctgcagtcttgctgggcagcccctcggtcagtccagcagcccctcaggccatgctgctgctcagctgcatggcaaagtcctgcacatgctccttcagagtctggcgggcatctgcctgtgcccgcttctcccgtgcccgctcctgctgcagcttggtcagtctcaaccgcagccgctgctcccgccgcttgcaggcctgcagctggcgctgggccttgtcaagggcatcaagggctgcctcggctcgccgcttccagagtaaggcgctgcccacctggtagctgtgttcattctggatgtaggctccggcgggtgggggcaggcgcagcatatacgctgagggggagactggccgtggttcgagaggggagggctgccgctctggtgaaggc

SEQ ID NO: 276646 - DNA, 314 bp, Homo sapiens
  chr22:21380146-21380460
  hypo
agctctatggaatccgcttcgacatcctcgtcaccgggcaggtaggcacaggtaggggtcaggccggggatgggatggggcaggcagacagggctggaggaggcatgaggctgacagtcgtgggctgagaggttcagctcagatctctctcaggcagggaagttcgggctcatccccacggccgtcacactgggcaccggggcagcttggctgggcgtggtgagtgcgagcactgtgggcacctgcaggctgcagtgagtgctgctgaccagggtgtgtccaatgcatgctggagcctccggtgcctgcacatt

SEQ ID NO: 276647 - DNA, 179 bp, Homo sapiens
  chr22:21385183-21385362
  hypo
tgcaagcgctgagtcggggtccaggctgtgccagggcaccatgagggttagcacggtggagacaaggatgtaggcaccagctgcaatggcaagcgagatggcgatggccagaggcacagaccgccgtgggttctgggcctcctcactggaggcggcaatgacgtcgaagcccacgaaag

SEQ ID NO: 276648 - DNA, 147 bp, Homo sapiens
  chr22:21385764-21385911
  hypo
gctcgcccatggatacgtaggtgaacaggtaggcagagcccgtgcgtggcacacgtgccccaaattctgcatagcatagggctgccagcagggaggccacagcggccacaccgaaggacaagagcacagcagggccagccacctcct

SEQ ID NO: 276649 - DNA, 296 bp, Homo sapiens; identical to SEQ ID NO: 220643
  chr22:21803347-21803643
  hypo

SEQ ID NO: 276650 - DNA, 31 bp, Homo sapiens; identical to SEQ ID NO: 220644
  chr22:21970644-21970675
  hypo

SEQ ID NO: 276651 - DNA, 223 bp, Homo sapiens; identical to SEQ ID NO: 220645
  chr22:21977476-21977699
  hypo

SEQ ID NO: 276652 - DNA, 342 bp, Homo sapiens
  chr22:21982766-21983108
  hypo
tggcctcttggagtccaggtcgtcgagggcgcaaagctgcacgccatcctgggcaagctgggcccgcagcgtgggcgcggtgaggacgcgcagctcatgcagccgctcccaagagcaagagaaagcgtcggggccttcaccgcagccgccggtgggaggcacactggggtagccggggtgcgccatcagctcggctgtcagggtgtggcccgctagggtaccttccaggacccgcgccagggccccggacacgcggtgagcggacatgtgccggccgcaagtgctcaggcccacgaaggcgtctgtccacctgtggggggcgggacatcagaggtgggacca

SEQ ID NO: 276653 - DNA, 33 bp, Homo sapiens
  chr22:21993228-21993261
  hypo
aaacagcacttcttcggcattcgattggtcaaa

SEQ ID NO: 276654 - DNA, 147 bp, Homo sapiens; identical to SEQ ID NO: 220647
  chr22:22007501-22007648
  hypo

SEQ ID NO: 276655 - DNA, 81 bp, Homo sapiens
  chr22:22029110-22029191
  hypo
tgctcggggtcacccgtgacggctcttctcagagcgtggtgggggtgccacataaacacaactgcccgacgccatcctgca

SEQ ID NO: 276656 - DNA, 289 bp, Homo sapiens
  chr22:22036110-22036399
  hypo
agaggggagacagccgtgttcacacatgggtcctcctcttgggtgaggcggggcaggccccacatggcgggaaagccgacctttgcgccgttgtcaatcctgcacctggacgtttgtggggtgtaggtggccagcgctgctccaggggccttgggagccacttcttgccagaagcctgcacaaactggcatggtcagtcctcgttagtggagtgagggctctgctagaccgcaccgcaggagtgcaggcatcttgtgtgcacagcccctgcccacgggggcctggcacc

SEQ ID NO: 276657 - DNA, 192 bp, Homo sapiens
  chr22:22037090-22037282
  hypo
ggtgctggctggagcgtggcctgctgagtcaatcacctctgtggcttgtcccattctaaccagaggtcggcccacggctgcccacgttccggtccgatagctccctaacagcaatgaatgctcgttagccatgtgcctggaggaaggtcacagctcagccagcagctagcgaggctgcgtccccgtccctgc

SEQ ID NO: 276658 - DNA, 41 bp, Homo sapiens; identical to SEQ ID NO: 220648
  chr22:22044381-22044422
  hypo

SEQ ID NO: 276659 - DNA, 394 bp, Homo sapiens
  chr22:22057965-22058359
  hypo
ggcaagatccttagcgcgtttcagaaactcccggcggggggatggtgggttctttcaggacccctaaagacccaggtgattctacacagggcactgtgtaggtgccatccaggccgtcccagggcccgtgccgctccccccgggctgaaccagggtactcacacggaattgaagaggtaggcgcgtccctggctcccctgaaaggactgaaagaagaaggtcccgtgagattggctgcgagtgctttctggaacgaagcggtgctgcccagaaccaggggagtccagccccgcggctgttagctgcgccgggacgcgtcaccgggagcagacaccggcgtcccccctccagaactccacttctaataacagccacttaacggagctgcaagctg

SEQ ID NO: 276660 - DNA, 147 bp, Homo sapiens
  chr22:22062353-22062500
  hypo
agtgcctctcgcctcgcaggtactggattctgttctgcgtggcaggtgttctcgatggtctcaatgaatcctcatcagaatcaccacggaagggagaaaagctcactctagtcgtcatcttgccacctcgcccggcccatcacccat

SEQ ID NO: 276661 - DNA, 292 bp, Homo sapiens
  chr22:22068420-22068712
  hypo
cacctgcgcaggcacgcctgcattagagggtcaccttctcacatctgggactgaagatgtgtgtgggcagaacgcagcgtttgtaatcgtgtgaacggaagacacaaacggccggtggcggccacccaggatggtactgggacccggtcaccacggcgctgctgtgcccttccttggtgccccggcctgagatgctgcctaacttggacttggtgcttcttggtctttgcttgtcctgatggctgtgccccgtgtgtggccctgagccacactgctgcgtgttccgtgtttt

SEQ ID NO: 276662 - DNA, 42 bp, Homo sapiens
  chr22:22108627-22108669
  hypo
attacaggtgtgagccaccgcgccctgccaatgatagcacct

SEQ ID NO: 276663 - DNA, 35 bp, Homo sapiens; identical to SEQ ID NO: 220650
  chr22:22201294-22201329
  hypo

SEQ ID NO: 276664 - DNA, 185 bp, Homo sapiens
  chr22:22288338-22288523
  hypo
cccaccctcgccccggtcctccgaagctgtccccagggtctggacgggagcactcacagacaagccgaagagctggttgaaggaagggagggacacgtgccggtcctccatcttgcggcgagtgttccggatggcgtggatggagaccagccactgccgctgtgaggcccgggcagccaatggca

SEQ ID NO: 276665 - DNA, 233 bp, Homo sapiens; identical to SEQ ID NO: 220652
  chr22:22324545-22324778
  hypo

SEQ ID NO: 276666 - DNA, 33 bp, Homo sapiens; identical to SEQ ID NO: 220654
  chr22:22899308-22899341
  hypo

SEQ ID NO: 276667 - DNA, 571 bp, Homo sapiens
  chr22:22899562-22900133
  hypo
gtggtcaaggaccctgactacggtcttgcagcgacatttctgcctctgctcccgccttcctaggacgcctacgccactgcctgggccgtccccaacccccagcaccttcagaggggccgagtcccagagcatccaccgcattacaaatgcgcacccaccctggagagctccaaccacgagcaccgccgcctcggttcaaggcatccttacagccacaactcctcaactggggccaattttccggggcaggcggcccggggtgacccaagtggcgcacattattttctttggtcttcaacccatttccagagagaaaacagggacccgggacaggggtggtgccgggggcacaagcccaaggtcaccctgcggggaagcggaggaatcagggctcgaacttacgtttttcctcagagagttcaccacaccgcgaagttgctggaaggaaagaacgagacaatggctcagctaagcgccctagccgctgcgtggggcggggggggcggcggtgggggccggggggctgggcagcctggtctgaccaatccccgtttctcagtccttccagggc

SEQ ID NO: 276668 - DNA, 455 bp, Homo sapiens
  chr22:22901056-22901511
  hypo
cagggtggaaaaagggggtgcggtgggcgaatggggaggcggggggctgactgggagtgtgggacggggtgttctgggatcacggagacgtccaagtctggactctgtcctgggtctgtgcttctggcgacctcccttttcttcagtgggatgcggggtgcaggggccggttccaggtcccctgagctcaagtctcgccccaccccgccccgcaagtctagaaaagatgcccctgcccttggctgggtaatctctggatttacctactgtctgtaaccccccgggctgaagagaccaccccccgggagtcaattaacttactctctggagcgcgcgttcctccctgctcccaggagtcggtttcccaaaactttctgaggcccgcgcatgctcccctcgactccccgtgtttccactctccacagaaatccacgcattcacgcccctcccctccc

SEQ ID NO: 276669 - DNA, 36 bp, Homo sapiens
  chr22:22939290-22939326
  hypo
aattcaaaatatgctacaaacggccgggcgcggtgg

SEQ ID NO: 276670 - DNA, 165 bp, Homo sapiens
  chr22:23230279-23230444
  hypo
tgggccctggtcccaggcagcgctggcccctgctgctgctgggtctggccatggtcgcccatggcctgctgcgcccaatggttgcaccgcaaagcggggacccagaccctggagcctcagttggaagcagccgatccagcctgcggagcctgtggggcaggtaag

SEQ ID NO: 276671 - DNA, 264 bp, Homo sapiens
  chr22:23437447-23437711
  hypo
gcacagtgggagccggaggcggggggctgcagggagcacaccagcgaccggccctccaaccctccagccactcagcaacatcgccacagcaaccagcaaccagacggcagcagccgaggcaaacacaagcggacggcttcccaccgtcgccgaggacagggaatgactacggcaaatcaggccactttgccaactagggaggtggagtgtcactagtggggaggggcggccaccgcccgctgcacagagcgccatgccggctgg

SEQ ID NO: 276672 - DNA, 215 bp, Homo sapiens
  chr22:23437916-23438131
  hypo
cagcccggcggtcccggagaattgaccgccacctgcgctcagagagccagcggcaacgccgcgaaatcaagctgctcctgctgggcaccagcaactcaggcaagagcaccatcgtcaaacagatgaagatcatccacagcggcggcttcaacctggaggcctgcaaggagtacaagcccctcatcatctacaatgccatcgactcgctgacccgc

SEQ ID NO: 276673 - DNA, 106 bp, Homo sapiens; identical to SEQ ID NO: 220662
  chr22:23438416-23438522
  hypo

SEQ ID NO: 276674 - DNA, 103 bp, Homo sapiens
  chr22:23449790-23449893
  hypo
agcagaagctggggcgggagcaggggtcccaagcacagtgttccagcaagaagcaccggaacccaccaagggagcgcagcagtggagtcgggtcctgggcctc

SEQ ID NO: 276675 - DNA, 101 bp, Homo sapiens
  chr22:23453480-23453581
  hypo
ggctggctctgtaccgagcagggggtgcggccacaaatctccaagcccaggccaggggagagaggcaagcgcactggactcggttccgcctagtggcaaag

SEQ ID NO: 276676 - DNA, 208 bp, Homo sapiens
  chr22:23456377-23456585
  hypo
catggtgaatggagcgcattcatgtctacaaccccgccccacagctctgctctcggcgtgaaaaagctgaattcacggttcggatgaacactcccagcttttctacagtgggctgacttgagcttctcagtctgtaacagaactgaggacttgctctacagatgaggaaactgaggcccagggtgggacagaccggccccggccccac

SEQ ID NO: 276677 - DNA, 42 bp, Homo sapiens
  chr22:23593618-23593660
  hypo
gggtgctgagtcctgtgggacgagaagtggagaacctgggag

SEQ ID NO: 276678 - DNA, 295 bp, Homo sapiens
  chr22:23607403-23607698
  hypo
tcagatgatgcagccggaagactcggaggagaggctggcgttgcagtgggaagttgttccccataacgacgagctgagtactcacgtgtgttcaacctgggctgggtgctggggactccccaaggacagataggcccggtgcctgcccttgtccccatgaccagctcagtagggttggcccagcatcgctctgtcaggtttccgggttggacaagtcttaggaccaaaggagcttgcagtgcccttcccagctccggtgcctcttccaagcccaggaactcgtgatccacgtcca

SEQ ID NO: 276679 - DNA, 113 bp, Homo sapiens
  chr22:23610355-23610468
  hypo
tacctgcctggcgccgtgagtcacttctcagcatgtcattttgggagcgggaagtgtgctgggtgcgtggggaggggagcaggtgggagggagcagcacggaagcgccgaggc

SEQ ID NO: 276680 - DNA, 85 bp, Homo sapiens
  chr22:23624725-23624810
  hypo
atggggagctctgttgcctccggccccagaatgggggaaaagttcagagagaccgaggctccccgagaagaacctcaggctgcag

SEQ ID NO: 276681 - DNA, 364 bp, Homo sapiens
  chr22:23626214-23626578
  hypo
cgcaagctgcgccacgtcttcctgttcaccgacctgcttctctgcaccaagctcaagaagcagagcggagggtgagtgacgatgtggcccctgtcccagcagtgaccccaccctgactctccaggtcatggagggtcttgtcatggcggaggtcagtggtgatgtagctcgttacattccgtttctacttgggcacaatgccaggctccaggttaaagattgtcactagcaatctggagacgtcatggggcatcagggtgaccagctttgactcctgtagtgaggggtaaacccgaccgtggcttccggcactattgcagaaaggtcacctcaggacccatccgggaagcgtgagatcaggggc

SEQ ID NO: 276682 - DNA, 99 bp, Homo sapiens; identical to SEQ ID NO: 220664
  chr22:23737249-23737348
  hypo

SEQ ID NO: 276683 - DNA, 126 bp, Homo sapiens
  chr22:23779039-23779165
  hypo
gccccactcggaagcgaacaggctggttccccgccccagtcccagcttctcctgcgggcagctggcctgagagccaagcactccccaggccatggcaccgggtgggcaggacgctttcctgccagg

SEQ ID NO: 276684 - DNA, 686 bp, Homo sapiens
  chr22:23800963-23801649
  hypo
gagggttcccagagggctgccgggcgaagggagtcctttccaaaacggtttcctgagctctgatgcacacacatgcagctcacccccaagtctagcgttccattagtctaccgttccgttcttcccagcacattcggtgcgcagccgcgaccagtctaaccgtggcacctttccaccggccctgagccctggcgtgcccctccacgacatcccctgggcacggagttgtgtcgacaggtctctgtgactggctgggcatgttttcggggtttgcccgcggggcagcgtgtctcagagtttggctgtacgaagcggtgttgacgggtaaacccggttttgtctctccctccggcggttgagggctggttccgcgttccatctgttagtgatgggatcgtgttgccgtggacgtccgtgccgaggtctgtgtgtggacagcgctcagaccccctggctgcgcgcccgggcgtgtgctgggcccatggactctgcgttcagctctttgaggagccgccggctgtttgcagtggccgcatcacacacgctcccgccagcgacgcggagggtctgattcccctcgacccagcagctcatggtgtttgctctcagtggccgtcggcgcgaggcgggtccgtgtctcgctcagttgaggttcacgtttccccggtgcccggcgtcctggcatg

SEQ ID NO: 276685 - DNA, 92 bp, Homo sapiens
  chr22:23877156-23877248
  hypo
tgtgggaagcgagggcggcctctccttggttcctcggcagcctggaccctcaccccctgcaaggtcctggtggccaccgcttgcagggccgt

SEQ ID NO: 276686 - DNA, 141 bp, Homo sapiens
  chr22:24016561-24016702
  hypo
caccagactctggatctggtcgtccagcagcacactaaaaccaagctaagattccccgctgtgacccagctcctctcctccccgcctccccaggcagcatgggggcgggcagtgcggtgcgggggaggcattaaaggcaca

SEQ ID NO: 276687 - DNA, 153 bp, Homo sapiens; identical to SEQ ID NO: 220667
  chr22:24054816-24054969
  hypo

SEQ ID NO: 276688 - DNA, 35 bp, Homo sapiens; identical to SEQ ID NO: 220668
  chr22:24061196-24061231
  hypo

SEQ ID NO: 276689 - DNA, 35 bp, Homo sapiens
  chr22:24061531-24061566
  hypo
caggcgtgagccaccgcgcccggccgaccataaag

SEQ ID NO: 276690 - DNA, 218 bp, Homo sapiens
  chr22:24159810-24160028
  hypo
ctgaaaatagtctttggggtcgaggagcctcgggagggatgcctcctgtgactgagggatgcctctgccccgtgcaccagatggagcctgggccgacttcttcccactgtggttctccgtggcactttactaagattttggaaaataacgtgggggaatcaccagcaacttcctctgtggtcccccaagtaacaaacaactaaatatcttatttagtt

SEQ ID NO: 276691 - DNA, 460 bp, Homo sapiens
  chr22:24179769-24180229
  hypo
gggccccagggcataagcagcgtgtcctgaggggagtggccagcctggggcggactagatgtaccgggaggctcacccagcaggtccacgaggatggagttgcccagcagcagcgagaagcccatgagcgcccaaggcaggaacggtgcctggaaagtgagcaggccgaagaagttgaccctcacccgagggctgcggcggctccacacgtacaccagcatggccatgagggcctggcccaggaagaacaggctgcccaggagtcccagcagctgggccagagtcaaggtgctccggtgcaggcctcagcccaagcccagggcccctctgacttcccaagaccctggaattcttcccctcatctcccctatgtgctattccctcatcaagatgagccagtccaataaaggcgacacactccacgggcttcaggtcccacgaaatctgccctgcacaccta

SEQ ID NO: 276692 - DNA, 200 bp, Homo sapiens; identical to SEQ ID NO: 220669
  chr22:24205105-24205305
  hypo

SEQ ID NO: 276693 - DNA, 112 bp, Homo sapiens
  chr22:24224724-24224836
  hypo
ctgccgtgcccggcgcccatgggagctgttccagcatcgggccctgaggagacaggtgacaagcctcgtggttctgggcagtgccatggagctctgcgggaatgactcggtg

SEQ ID NO: 276694 - DNA, 44 bp, Homo sapiens
  chr22:24409920-24409964
  hypo
tataggcgtgagccaccatgcccggcctctttttaagcttttta

SEQ ID NO: 276695 - DNA, 108 bp, Homo sapiens; identical to SEQ ID NO: 220670
  chr22:24459508-24459616
  hypo

SEQ ID NO: 276696 - DNA, 142 bp, Homo sapiens
  chr22:24530396-24530538
  hypo
ttgttgatttccaaggctgtttgttgccactgcttttcactgaaggcgcatgaattgaccccctaggtgggtgttcccagggcctcaagtttgcggcatcctcagagggcaggcagggtggtacagtcgagagtgagccaga

SEQ ID NO: 276697 - DNA, 156 bp, Homo sapiens
  chr22:24560370-24560526
  hypo
atctggcggatccccgtggacgagattgaccggccgggcagctttgcctggcacatgaaccgctccatcgtgctgctgctcaaggtgctggcccagctgcgggaccacagcaccctgctgaaggtgtcctccatgcttcagcggaccccagaccag

SEQ ID NO: 276698 - DNA, 131 bp, Homo sapiens
  chr22:24574386-24574517
  hypo
gaaggtggattggtcgccatctgcacgccaggcggcatccttttctatgaagtgttgactttgtaaatctgcccacacccagctggccatatccacccctcgacgccgggatgagccggctctgcctgtgt

SEQ ID NO: 276699 - DNA, 35 bp, Homo sapiens
  chr22:24697722-24697757
  hypo
atatatatcagagccaggcacggtgctcacgcctg

SEQ ID NO: 276700 - DNA, 38 bp, Homo sapiens; identical to SEQ ID NO: 220672
  chr22:24763169-24763207
  hypo

SEQ ID NO: 276701 - DNA, 139 bp, Homo sapiens
  chr22:24995693-24995832
  hypo
gcagggcgcagactcgtcagtgagagcattcctgagcccagcatccaagaagcgagggaggtcgggaaggtgctgctatgaggcagggggaggtccccaaaagtccaggtgagagcatggcatgcgtggaaagtgctgc

SEQ ID NO: 276702 - DNA, 130 bp, Homo sapiens; identical to SEQ ID NO: 220674
  chr22:25016920-25017050
  hypo

SEQ ID NO: 276703 - DNA, 36 bp, Homo sapiens
  chr22:25091139-25091175
  hypo
agggcatttgttcacgtgcagcggcctcttgccact

SEQ ID NO: 276704 - DNA, 254 bp, Homo sapiens
  chr22:25102501-25102755
  hypo
tcatagatctcgagcgtgcaattaatcactatgaactacggtcaccatgctgcgtgtcaggtctccagaacgtactcatcgcatcactgaaactttgtgccctttcaccgtcttccccatctttttcattctccgacaccacccttctactctgtttccatgacttggacattttaggctaatggctgggcaaaaatctgtggtatgtacacagagagatgacatcagctatgtgagcacgggggccgcctttt

SEQ ID NO: 276705 - DNA, 103 bp, Homo sapiens
  chr22:25119952-25120055
  hypo
atttctatgagtatctgaatttaacaagccttcccacagcaagacttgaaacaaagtaggaagattccctggaactttgtggtggaagcggtctgctactgcc

SEQ ID NO: 276706 - DNA, 326 bp, Homo sapiens
  chr22:25294115-25294441
  hypo
acagaagacagtgtcttggacgcccagcggaacacccccacggtgctgcgacctagggatggcagcgtggatgacaggcagagcagcgaggccaccacatctcaggatgaggctccccgggaggagctggccgtgcaggacagcctggagagtgacctcctggccaacgagagcatggacgagttcatgtccatcacgggcagcctggacatggccctgcctgaaaaggacgatgttgtgatggagggctggaggagcagcgagacagagaaacatggccaggcggacagtgaggacaacctctcggaggagcctgagatggaaag

SEQ ID NO: 276707 - DNA, 120 bp, Homo sapiens; identical to SEQ ID NO: 220675
  chr22:25336184-25336304
  hypo

SEQ ID NO: 276708 - DNA, 331 bp, Homo sapiens; identical to SEQ ID NO: 220679
  chr22:25461275-25461606
  hypo

SEQ ID NO: 276709 - DNA, 187 bp, Homo sapiens; identical to SEQ ID NO: 220680
  chr22:25462990-25463177
  hypo

SEQ ID NO: 276710 - DNA, 40 bp, Homo sapiens
  chr22:25464946-25464986
  hypo
tgtcttgcatccggcgctcacttgccggagtctctgggtt

SEQ ID NO: 276711 - DNA, 91 bp, Homo sapiens
  chr22:25483556-25483647
  hypo
accaaccaaccaaccaaacaacaacaacaaaaacaactgcgtcaccttgttgattttgcagagcagtgtctcaggtcgggttcccagaagc

SEQ ID NO: 276712 - DNA, 101 bp, Homo sapiens; identical to SEQ ID NO: 220681
  chr22:25484763-25484864
  hypo

SEQ ID NO: 276713 - DNA, 41 bp, Homo sapiens; identical to SEQ ID NO: 220682
  chr22:25484924-25484965
  hypo

SEQ ID NO: 276714 - DNA, 85 bp, Homo sapiens; identical to SEQ ID NO: 220683
  chr22:25505390-25505475
  hypo

SEQ ID NO: 276715 - DNA, 44 bp, Homo sapiens
  chr22:25513768-25513812
  hypo
aacttcatctctcacagttccggagtccagaagtccaaaatcaa

SEQ ID NO: 276716 - DNA, 327 bp, Homo sapiens; identical to SEQ ID NO: 220684
  chr22:25561924-25562251
  hypo

SEQ ID NO: 276717 - DNA, 125 bp, Homo sapiens
  chr22:25570290-25570415
  hypo
aacggagcccacctcggcaggggaccagtatgactgctccagggaccagcggagcaccagcgtggaccactccagcactgacctggaatccaccgatgggatggaggggccgcctccaccggacg

SEQ ID NO: 276718 - DNA, 184 bp, Homo sapiens; identical to SEQ ID NO: 220685
  chr22:25573211-25573395
  hypo

SEQ ID NO: 276719 - DNA, 386 bp, Homo sapiens
  chr22:25602962-25603348
  hypo
cagggtgactggaagcagaccgtccacatctcaaccttggtctcccggcaggtgggttggctatgagttccccggctaccgtgggcgccagtacgtgtttgagcggggcgagtaccgccactggaatgagtgggacgccagccagccgcagctgcagtctgtgcgccgcatccgtgaccagaagtggcacaagcggggccgcttccccagcagctgaaaggcacccagacttcaaggacccagacccaccctggggggctgcaagggcaagaagaggaggctccagggttggggcgagggccgacctgtccacccttccctggaatctgctcaataaagcctggggttggtcccccacccgccacgttcctcggcatcacttcctg

SEQ ID NO: 276720 - DNA, 195 bp, Homo sapiens
  chr22:25615344-25615539
  hypo
ccctggcagccggacggctgatgcatgcaaagcgggcatctccttgcccagccgcctgaccgccctggcgcggccgaatctgaaagctaatgacattattgtgcagagacacaatgtctgtgggcatttgctgacccgagctttggtgagagcttaatccagcattctcaccctgcttttcgcaggagcacagcg

SEQ ID NO: 276721 - DNA, 155 bp, Homo sapiens; identical to SEQ ID NO: 220687
  chr22:25753158-25753313
  hypo

SEQ ID NO: 276722 - DNA, 42 bp, Homo sapiens; identical to SEQ ID NO: 220688
  chr22:25756562-25756604
  hypo

SEQ ID NO: 276723 - DNA, 33 bp, Homo sapiens
  chr22:26069299-26069332
  hypo
attacaggcgtgagccaccgcgcccagcaggag

SEQ ID NO: 276724 - DNA, 155 bp, Homo sapiens
  chr22:26069540-26069695
  hypo
ctctgagaatcaaacgtgaagtctgtggcccaaacgcaggtttctataggatgttttaaggttgtttgggggagcccttaaagaatcccacccttaatttgccaggatatgtaaagtagtaggtacttgctattgtcttacggcctcttacgtga

SEQ ID NO: 276725 - DNA, 37 bp, Homo sapiens
  chr22:26081888-26081925
  hypo
gatttaaaaccagatctagccgggcacggtggctcac

SEQ ID NO: 276726 - DNA, 122 bp, Homo sapiens
  chr22:26150543-26150665
  hypo
tttaaggggagactcgcgattttataccgtgaattccaaatgtctatggccacctcatgggcttaaaacagcagctgacgaggcaggtgtatgttttgggcccggaccggagtatggcgata

SEQ ID NO: 276727 - DNA, 152 bp, Homo sapiens
  chr22:26371252-26371404
  hypo
gctgatataatttcagactccgtcaaaaggaagatcgcaaaagtgtacggaggtagcttcaacgtctttatgttccgccgctgtgagccccggcatcctaatatcatatagtctgagaggcatctgaaagcgaggcagagggcagcctgggg

SEQ ID NO: 276728 - DNA, 125 bp, Homo sapiens
  chr22:26422520-26422645
  hypo
cccactttgtccgccggcaaaagtactgtcattttggggacggcgaagtgcttgccgtccagagaaagtccacagagagattagaacctgcttcctctcccctggcttctcggagtacaaataca

SEQ ID NO: 276729 - DNA, 761 bp, Homo sapiens
  chr22:26422873-26423634
  hypo
gaaatcgaaggggccgctggtggtctcttgaggtccaccagcctcaaatgcatctcttcagacggtgttgggggcacaaccctactccccgaaaagtcgaaaacccaattcagttcctgcgagtccctcttagaatccagaccgagcatggggagaaaactgagctctccgaccacacccagggacatgctgttgtcgcccacactgcgtcctcggaggcggtgtctggagtcctctgtggacgatgcgggctgtccagaccttggaaaggagccgcttgttttccagaaccgccagtttgcccacctgatggaggaacctctaggcagtgacccattcagctggaaactcccaagcctcgactacgaacgcaagaccaaagtggacttcgatgacttcctcccagctatccggaagccccagacacctacctccttggctggatcagccaaaggtgggcaagacggttcacagcgttcaagcatccactttgaaacggaagaggctaaccgttcctttctctcggggatcaagaccattttgaagaagagcccggagcccaaggaggatcccgctcacctgtctgactcgtcctcatcctccggctccatcgtgtccttcaaaagtgctgacagcatcaaaagtcgaccaggaatcccacgacttgcgggtgacggtggcgagcgaacgtcccccgagcggagagagccagggacggggaggaaagacgacgatgttgcgagcataatgaagaaatacct

SEQ ID NO: 276730 - DNA, 312 bp, Homo sapiens
  chr22:26829744-26830056
  hypo
actgcgacaccaccgctgtcatcactgtggcctgcctcctggtcctcttcgtgtggtactgttatcacgtgggcagggagcagccccggccctacgtctccgtcaactccctcatgcaggctgccgatgccaacgggctgcagaatggctacgtgtactgccagtcccctgagtgcgtgcgctgcacccacaacgagggcctcaaccagaagctgtaccacaacctgcaggagtacgccaagcgctactcctggtccggcatgggccgcatccacaagggcatccgcgagcagggccggtacctcaacagcc

SEQ ID NO: 276731 - DNA, 34 bp, Homo sapiens
  chr22:26867803-26867837
  hypo
gtgccaaccgcaaacggagcggctcagagataca

SEQ ID NO: 276732 - DNA, 201 bp, Homo sapiens
  chr22:26888176-26888377
  hypo
gttcatgggcacagagctagcggccacgccaatgcccctctgagccatgttctcagcctcccgcctctcctgcatggcctcgtactggaagtccttcctccgctccgtgtgggtgagataggcaatgttctcccgtgctcctggctgcatgtaggcacctaagatacaggaggacagggcggtgaggagaggtgtttccag

SEQ ID NO: 276733 - DNA, 185 bp, Homo sapiens
  chr22:26930491-26930676
  hypo
gtcaggctttactccaggaacgtccgacccatagcctggggcaagccaggggcagcgagccaccttttaaggagaccccagaggagccactgctgggcccttggctgagaacagtgaagtaagcaacatccagcccactactgcagtgtccccagccggccctcgcctctgcttctgagaagcac

SEQ ID NO: 276734 - DNA, 219 bp, Homo sapiens; identical to SEQ ID NO: 220692
  chr22:26961223-26961442
  hypo

SEQ ID NO: 276735 - DNA, 90 bp, Homo sapiens
  chr22:26965195-26965285
  hypo
cagtaacagttccatggatacaaagtacaaaaacaggtgaaattctagggggagatgtcaggatggtggttaccccggtggggcaagggg

SEQ ID NO: 276736 - DNA, 76 bp, Homo sapiens
  chr22:26999516-26999592
  hypo
ggttactattgcttcgtgggattgtcatggctactcaactcacggttcagtccaactataaaacaggcctggccgg

SEQ ID NO: 276737 - DNA, 388 bp, Homo sapiens
  chr22:27007746-27008134
  hypo
tttttgctatagtagaagcagcatttctccagagcccagaaccatggcttactgccagtgtgatcttatgctaattggatcacctctccgagcctcagtttcctcatccgtaaaatgagattgagaacaattcctccctcttcagtttgatatgaggattggacataatgtatgtgccaggagtacgaacggccgcaggcacagagcagatgctggagaaatggcagctactgttgtgtggtcattttactgtggcagagagtgtgcccctccgccgcccagtactcacggtcccgcggagacaatgatgctgcgcacacggtcgaagccacggtctgccagatttgagcactcccccgagaattctgctcgacggccctggaagttt

SEQ ID NO: 276738 - DNA, 193 bp, Homo sapiens
  chr22:27019112-27019305
  hypo
tgccagatcctggggcgagcccccaacctctcacccttcacgggactctgatgcggatctccaccttttttttttcctggcacagatggtggtgtgggatgaggacggcttccagggccggcggcacgagttcacggccgagtgccccagcgtgctggagcttggcttcgagactgtgcgatctttgaaagtg

SEQ ID NO: 276739 - DNA, 103 bp, Homo sapiens
  chr22:27045854-27045957
  hypo
aacagagcgagactccgtctcaaaaaaaaaagtgagtggaggagttccacgacatcctcgacctggggtaggacatgtcgggtgtgtccgacagtctcccaga

SEQ ID NO: 276740 - DNA, 35 bp, Homo sapiens; identical to SEQ ID NO: 220696
  chr22:27099774-27099809
  hypo

SEQ ID NO: 276741 - DNA, 232 bp, Homo sapiens
  chr22:27486749-27486981
  hypo
aactcccccaccaccgcagggttgcaagagctctgatgggaaggcctgccaggggaggcgacgggcgcagggtggatgcctctgtagcaccccaggcagctctgcagacacacccgcctcactggcacgcaggccatgatctctctcccccactgccttgactcgttaatttatattttaacaatccgcaagagctgactctgcacgaggctgaaggcgtaagagatggagg

SEQ ID NO: 276742 - DNA, 215 bp, Homo sapiens
  chr22:28187361-28187576
  hypo
ctgtccacccaagacgcgcctaaatatagacaccatcctaaaacaaacacatcgtcggcaagtcaaaatcctgacttgagtcaaaatgatgaggttgggcgatcctggcccctccagaccagagaactgggtggaacaagcagcgggtagtgagaaaaggacagaaggtgaaaccactggttgcagccccccaccccctccgacaaacagaggac

SEQ ID NO: 276743 - DNA, 198 bp, Homo sapiens
  chr22:28191122-28191320
  hypo
tggagaatgctgatgctggccgcagcgtctgctgtgcatgctaaacacccggcttcaaatgagagagtgcgtcccgggcgtcctgggctgggcagtaaccgcggaacaaagagaaaaagcagagaggccgcattcatgaattagaaaacctaagcgggaaagctacccgggatgcgcgccttgaaagccccaagttct

SEQ ID NO: 276744 - DNA, 32 bp, Homo sapiens
  chr22:28361345-28361377
  hypo
gtatttcagacgtaaaggtacagagaataaca

SEQ ID NO: 276745 - DNA, 252 bp, Homo sapiens
  chr22:28371499-28371751
  hypo
ttgtaagtcacagtgctttgcggttgaagtcgcccacataccgctcctgacgctaattccaccgccttgcctcccgcacgacagtaccactcccgcgtgtgagagccctcattcccagcatttctagatacctccactgcatgtatgcacctggaccctgaaaggcgttattttgtattttcatatatagtggcataaaatcgtttgtagcgttttcttattctttgatctcagctgcgtctttagatagcc

SEQ ID NO: 276746 - DNA, 91 bp, Homo sapiens; identical to SEQ ID NO: 220697
  chr22:29076604-29076695
  hypo

SEQ ID NO: 276747 - DNA, 189 bp, Homo sapiens
  chr22:29435189-29435378
  hypo
cctccacgttccgggcggagcagggaagcctgaactttaagaaggccacgtggctaaatggcttccctgaggcatgtctctcctgggaaggcattccctaccccagatcctgcagcctttcatcctgaggccattagactctccaggtgcacctgcatcaaagcgcacaggtaccgcgctcctgatctg

SEQ ID NO: 276748 - DNA, 1019 bp, Homo sapiens
  chr22:29445631-29446650
  hypo
ctagcctcgcaccccggggcccggcccgtgcctttcctccgagcggcagtggcagcctgctcttccccaccgtggtgcacgtggccccgccctcccacctggagagcggcagcacgtccagcttcagctgctatcacggccaccgctcggtgtgcagtggctacctggccgactgcccaggcagcgacagcagcagcagcagcagctccggccagtgccactgttcctccagtgactctgtggtagactgcactgaggtcagcaaccagggcgtgtacgggagctgctccaccttccgcagctccctcagcagcgactatgaccccttcatctaccgcagccggagcccctgtcgtgccagtgaggcggggggctcgggcagctcgggccggggacctgccctgtgcttcgagggctccccgcctcccgaggagctcccggcggtgcacagtcatggtgctgggcggggcgagccttggccgggccctgcctctccctcgggggatcaggtgtccacctgcagcctggagatgaactacagcagcaactcctccctggagcacagggggcccaatagctctacctcagaagtggggctcgaggcttctcctggggccgcccctgacctcaggaggacctggaaggggggccacgagttgccgtcgtgtgcctgctgctgcgagccccagccctccccagccgggcctagcgccggagcagctggcagcagcaccttgttcctggggccccacctctacgagggctctggcccggcgggtggggagccccagtcaggaagctcccagggcttgtacggccttcaccccgaccatttgcccaggacagatggggtgaaatacgagggtctgccctgctgcttctatgaagagaagcaggtggcccgcgggggcggagggggcagcggctgctacactgaggactactcggtgagtgtgcagtacacgctcaccgaggaaccaccgcccggctgctaccccggggcccgggacctgagccag

SEQ ID NO: 276749 - DNA, 46 bp, Homo sapiens
  chr22:29482738-29482784
  hypo
gccctctctctatatatatcttttttgagatagggtctcactccat

SEQ ID NO: 276750 - DNA, 80 bp, Homo sapiens
  chr22:29525175-29525255
  hypo
ctaaaggtgcatctagaggccggcacaggggtgcacacctgtaattctaggctggaggctgaggcaggagaatcgcttca

SEQ ID NO: 276751 - DNA, 330 bp, Homo sapiens
  chr22:29580364-29580694
  hypo
tggctcagagtaggcgctctgtaaacacatgtgggacgagtgaggacgttccctggacgatgcctggggtgcccaggccacagagctgccattgaatctcctgggggttaaggtccaccacgttccactcagcaggaaaaattcagagctgacattaattcagaccccacatacgtgattcttactgagttagacaccaagacaatctcgccttttgttggggctgtgggagccttacgtacgcctagagagaagccagtctaaaatcagtcgctttttgaaaccatcagctcgagaaattaaggattctgtcagcgtgccctgaatttc

SEQ ID NO: 276752 - DNA, 138 bp, Homo sapiens; identical to SEQ ID NO: 220700
  chr22:29587096-29587234
  hypo

SEQ ID NO: 276753 - DNA, 90 bp, Homo sapiens
  chr22:29594544-29594634
  hypo
tgcacataacttttgactcccgaaaaactttaccactaacagcgtactgctgaccgggagcttactgatcacataaacagtccataaggc

SEQ ID NO: 276754 - DNA, 580 bp, Homo sapiens
  chr22:29607421-29608001
  hypo
tgcctatgtgtgtgtgcacgtgctcactgcagtgcgtatttgccctgtgtgcctgtgtgtgcatgtgtgtgcgtgtatctgtgtgtttgtgtggatctgtgtgcatatgcatgaacatgtgtgtccatgcattgtgtgtacatatgcctgtgtgtgtctgtgtgtacgtgctcactgccatgcatatttgctcctgtgtgcctgtgtgtgcatgtgtgtgcgtgcatttgcgtgtgcaggcactgtgtgtttgcgagcatctgctcactggcatagtgtattcattctgtgtccagggcccctttcctgtctccagagcttccgactgtcctctgcccagattgtcctcttcctccctccctccttcactcacgaagcccctgggccagcctggtgagtgtcacgtaggctccaaggagcctctgaacccccttaacctgtacaccaagttttatgcgtatttctggagaggagccacgattcaccgcaattttctaaaggggcttatgcccccactctccatattcaaccctaacaggttcaaaaccacacctttggttttttttgttttgagacagag

SEQ ID NO: 276755 - DNA, 41 bp, Homo sapiens
  chr22:29627464-29627505
  hypo
agagtgtgagggtcccgctgcttccccgaaatggtagatgc

SEQ ID NO: 276756 - DNA, 34 bp, Homo sapiens; identical to SEQ ID NO: 220702
  chr22:29678067-29678101
  hypo

SEQ ID NO: 276757 - DNA, 174 bp, Homo sapiens; identical to SEQ ID NO: 220703
  chr22:29686337-29686511
  hypo

SEQ ID NO: 276758 - DNA, 150 bp, Homo sapiens; identical to SEQ ID NO: 220706
  chr22:29714174-29714324
  hypo

SEQ ID NO: 276759 - DNA, 205 bp, Homo sapiens
  chr22:29733758-29733963
  hypo
ctctcaagtctggccgctgtttccacccacaagagcccccgtggtccagctgccccagcactcctcctccctgccacggaatcccccggggccggtgcttctgccccaccccttccctgcagacgcagccatctttctcaagtgcaaatcagactggttcatctctttgcttaaaactttccaatggctccggctgtgccaggat

SEQ ID NO: 276760 - DNA, 109 bp, Homo sapiens
  chr22:29735487-29735596
  hypo
gctggcaatccccgcgatgacaaggcgacgtgtcatggggtggtgaggactgggcaagaatccatggctatggggcccagtggcagccggatgccaggtggtcaagaca

SEQ ID NO: 276761 - DNA, 354 bp, Homo sapiens
  chr22:29744977-29745331
  hypo
gaacttttgcctgccttccacgcacaccaccacagactctcacgtgtccccgactcgactgtactgcagtgaggaggaaaaggggcggtgtccattacgcgcacatcactcatctgtctgtcagggctgtttacgaggtaataggaagggagggtttcatggcagtatgggccacagtggggctgagctgccagtcatgactcacaccctggccagctcgctggctcacctgtgtgctctcgtcatggaagccctcgaggaagctctccagcagctcatctgcgttgtcgatccgttccgcgtactcgcccacaatccagatcatggcagcccgggcctcaggctcatccaggg

SEQ ID NO: 276762 - DNA, 159 bp, Homo sapiens; identical to SEQ ID NO: 220707
  chr22:29758099-29758258
  hypo

SEQ ID NO: 276763 - DNA, 149 bp, Homo sapiens
  chr22:29845784-29845933
  hypo
gctcacgcaggcctccggagagtttacccacatggtccagccacacagcagatgggtatatgcctgaaatgcaaggatataaacatggtttactagcacgaagagatgttcgccacacatcgttgttaagaaaagaaaaaagggccggg

SEQ ID NO: 276764 - DNA, 180 bp, Homo sapiens; identical to SEQ ID NO: 220708
  chr22:29846233-29846413
  hypo

SEQ ID NO: 276765 - DNA, 33 bp, Homo sapiens
  chr22:29900365-29900398
  hypo
aatacttagccaggcgcggtggctcacgcctgt

SEQ ID NO: 276766 - DNA, 120 bp, Homo sapiens
  chr22:29977662-29977782
  hypo
ttaacaaggctgtccgggatgtgcagcagagggtcagtgtaaccaccccatgggttcattttgcccgtttcccagacagcggatttatcaagacagaggaattgcaataagagtttaatt

SEQ ID NO: 276767 - DNA, 45 bp, Homo sapiens
  chr22:29977962-29978007
  hypo
gagtggatctctgggtgggggccacaaaaccggatgatccggttt

SEQ ID NO: 276768 - DNA, 31 bp, Homo sapiens
  chr22:29997160-29997191
  hypo
gggttcccagtgtcacgcattttctttttcc

SEQ ID NO: 276769 - DNA, 120 bp, Homo sapiens; identical to SEQ ID NO: 220709
  chr22:30004164-30004284
  hypo

SEQ ID NO: 276770 - DNA, 80 bp, Homo sapiens
  chr22:30032865-30032945
  hypo
gttgggctagaactcgatgaaactggtggggctgacgtgagctttccagtttttccctgagcaggcgcctagctcatcac

SEQ ID NO: 276771 - DNA, 39 bp, Homo sapiens
  chr22:30051627-30051666
  hypo
attactgcttggtacgcagagcaccgaggccgagccagg

SEQ ID NO: 276772 - DNA, 179 bp, Homo sapiens
  chr22:30073518-30073697
  hypo
ttcaggccctactccggttccattgtccaagcccaagcccctcggtgggccggtggggagccctttgtggtggtgcccatctcccaccccacctctccacactgcatggcagactcctggcaccctcactgggcactgccccacccattgccatacttcccgtccggcagaccttctcc

SEQ ID NO: 276773 - DNA, 161 bp, Homo sapiens
  chr22:30074060-30074221
  hypo
tgggaggtgggacccgagttgtgcccattgcctctgtggctgctggaggatcggttgtcaacacagtagtgtccttctgtgcttgtatgacccaagctcctaatccgaaatttctcattaacagcccatgaacccaattccagcaccgttgcctcctgaca

SEQ ID NO: 276774 - DNA, 263 bp, Homo sapiens
  chr22:30084259-30084522
  hypo
aggcagtaaaacaccctgttcggcccctcggcactgaagatgtgtttcagtgcagctctcctcggcaccggattcgttgctgcaacagtgggagggaagagccagatgcaaactcgttctgcgagcccgaggttctgttctcatgatccttgctgtgatttctcttttgatgttggcaattttaaaatgacatcagtctatctggacctttttcctaaggctcttgctcagaccactcagtagatagccgccacctgcccagt

SEQ ID NO: 276775 - DNA, 209 bp, Homo sapiens
  chr22:30086757-30086966
  hypo
gcccatgcctggtgcggaggcttcatgttcttgtaggcatcttcagggaactggcaggagcgctttgggttggagactctgagcagggcccttgggtttatagcctgcccaaggaactgggcctggctgcgggactcccatggttggaccttgtctagattcagtgaaagttttgaaggacagtgcatgacagacgtcactggtcaggt

SEQ ID NO: 276776 - DNA, 589 bp, Homo sapiens
  chr22:30090268-30090857
  hypo
cttgcctcaggccacgtcaccttaccccagccatgttgccagggcatgaggactaagatgcttgccctgccaagcccggaggggatgagcagcctcagctggtgccgccacagacagcacaccacagaggtggctcagggaccttggtagatgggaatgtgagaatctattaaaataggcagggatctccggtcctctgtcaagaggcaatgctgacggctttttcctgctggcgtgcctctgcccaccagccttccccttgcacatcctcatttgtcacctcctaatttgaattattgggcaaatctggccgcttatttgggactgacagccaacttcttgagcatctatttgaacagccttccctttcgctcccagccacctttgaggtgagtccaagtggcaggacaggaccctgtgtgacagagcggaggtcttgtgccctctcagcttcttctctgctttcttacagctcaccttgcagagcgccaagtcccgagtggccttctttgaagagctctagcaggtgacccagccaccccaggacctgccacttctcctgctaccgggaccgcgggatggaccagat

SEQ ID NO: 276777 - DNA, 689 bp, Homo sapiens
  chr22:30091060-30091749
  hypo
ttcctgactcccttcgtccaaggcaccggtgtgtgtgtgtcttgcactccagagctgacctccaccgcccagcctgggaagtcattgtagggagtgagacactgaagccctgagaagccagtgccatcatccccaccccgcccagggttccggaacattcattcccccaccggtgaggacctggcatgcagcgaagcagcccagcccggcggatcccaggccagcacgcctgccggcttctcatcgtcagggagcccgcccagagctcgtgacgagcaagtgctgggtccccgccaggcaccccgaggcggcgctctggctggcagctggtggggaataggcagggcagctgtggctggggagagactttaggcagaagctgtgatgcaggctgactgccagccgaggggctgggtagtgccgtgcgggagctgatggtacagggcactcgctgtccccctccggccaccctagaccagggtccgagaggcaggcaggagccactcatgtcttccccattgcccgacgcccatagacgctccttcctgtgtggggctggggtactccctggtcgtactgcagtcagcacccgtaacccggctatgaccagggatctgtaagccctgtggctccacaggtgctgcttctcactggcccagactctgagctccaccggcccagtctgcacg

SEQ ID NO: 276778 - DNA, 67 bp, Homo sapiens
  chr22:30141125-30141192
  hypo
cctatggatgtaagcggggtaaacatctagcgtgtagccaaacgacctgacccgttctaggggtcgg

SEQ ID NO: 276779 - DNA, 39 bp, Homo sapiens
  chr22:30158325-30158364
  hypo
ggaccccaacccccaggccccggaacggtacgggtccat

SEQ ID NO: 276780 - DNA, 270 bp, Homo sapiens; identical to SEQ ID NO: 220714
  chr22:30190730-30191000
  hypo

SEQ ID NO: 276781 - DNA, 40 bp, Homo sapiens
  chr22:30192061-30192101
  hypo
agccttcagcatggcgggctagggtttgcctcccttcaca

SEQ ID NO: 276782 - DNA, 94 bp, Homo sapiens
  chr22:30215045-30215139
  hypo
tcctggaggctccgcggtctcatcacagtaagagctcatgcttaccaatggctgagacatgccaggcacggtcctgagtactctactcatgcta

SEQ ID NO: 276783 - DNA, 257 bp, Homo sapiens
  chr22:30221027-30221284
  hypo
gaggtgtcgagtatcgggtgatgacctgtcatgggatcagtggcttactttggattccttgtgagtggacatgcggaggaaggtgagaaaaacacttcgatggaggcgcttctgcatgtcaacaacctcaggggctgaggccaccccctcgtcgaatttgcgggggacatagcgcaggtaggagtccaggcacttctgtagagtctcgtcaaagatcacctaaaccaggagacagaggagagcgaggatttatccct

SEQ ID NO: 276784 - DNA, 31 bp, Homo sapiens; identical to SEQ ID NO: 220715
  chr22:30309742-30309773
  hypo

SEQ ID NO: 276785 - DNA, 31 bp, Homo sapiens; identical to SEQ ID NO: 220716
  chr22:30310013-30310044
  hypo

SEQ ID NO: 276786 - DNA, 80 bp, Homo sapiens; identical to SEQ ID NO: 220717
  chr22:30352153-30352233
  hypo

SEQ ID NO: 276787 - DNA, 174 bp, Homo sapiens; identical to SEQ ID NO: 220718
  chr22:30422074-30422248
  hypo

SEQ ID NO: 276788 - DNA, 34 bp, Homo sapiens
  chr22:30431160-30431194
  hypo
ggttgacggagcaagacaccgtctccagaaaaaa

SEQ ID NO: 276789 - DNA, 185 bp, Homo sapiens; identical to SEQ ID NO: 220719
  chr22:30624613-30624798
  hypo

SEQ ID NO: 276790 - DNA, 205 bp, Homo sapiens
  chr22:30634183-30634388
  hypo
aggagcgggattcacgaggcatttctatgtccctacttgtaattccttcggacaaccttgtgaagtagataagatggcattcatcactgatgattcttgcaattttcaagataagacagctgagctcatgaaaagggtcacgggactgcatcggggagcgccaggcccaggatcctggccggccgcaggggcagggccttcccag

SEQ ID NO: 276791 - DNA, 90 bp, Homo sapiens
  chr22:30647190-30647280
  hypo
ggccaaaaaggcaagagcaccgcactcttcaatgcttgaggagtgagagtgtgatgccaccagcggaccgtgcctccactgttctcaccc

SEQ ID NO: 276792 - DNA, 245 bp, Homo sapiens
  chr22:30653608-30653853
  hypo
gccaaggggagaagcagggccggggtgtggggagggggcgtccttgtgcccgatgcccctgcccagtgctgcgtggcgaggccgctggggcctgagtcacagctgacggggccgcgccccgcctgcctgagtgacccaggccggcataaggcgatgactgggcagccctccgcatgaccgcaggggtcggccttaggtgttttgactcagacctgccacaggccgtgtgcagcacatccagcctc

SEQ ID NO: 276793 - DNA, 197 bp, Homo sapiens; identical to SEQ ID NO: 220720
  chr22:30656576-30656773
  hypo

SEQ ID NO: 276794 - DNA, 72 bp, Homo sapiens
  chr22:30681973-30682045
  hypo
ccagccccccaacaccgggaacagccctcaccaaagcccaggggctgtccaccgatgcgcaccatcctccac

SEQ ID NO: 276795 - DNA, 43 bp, Homo sapiens
  chr22:30708028-30708071
  hypo
gcatcagcctcccaaagtgttaggattacgggtattagtgact

SEQ ID NO: 276796 - DNA, 42 bp, Homo sapiens
  chr22:30734441-30734483
  hypo
catctcaaaaaaaaaaaaaaaagaggccgagacctcgactaa

SEQ ID NO: 276797 - DNA, 181 bp, Homo sapiens
  chr22:30768084-30768265
  hypo
aggaggaaggtgagcgcagggcggcagcggagaggcaggtgcagcagctggaggagcaggtgcagcagttggaggcgcaggtgcagctgttggtgggtcggctggagggcgctggccagcaggtctgctgggccagcacggagctggataaggagaaggcccgtgtcgacagcatggtccg

SEQ ID NO: 276798 - DNA, 64 bp, Homo sapiens
  chr22:30843508-30843572
  hypo
tcagcttttcctgaattccgaaagggaggagggtatcatgacgcacgtccgaccccactccctt

SEQ ID NO: 276799 - DNA, 318 bp, Homo sapiens
  chr22:30857341-30857659
  hypo
tgtgggcgttatagcgctggctgggtagaacatctgtcatctcccctgcccgctgtcgctcccccatcttggtcttcaggaaaactccgaagccgatgtccgcaccatcagatgagaactgccacctgtcagggggagggggaggagacaggttgctgctcagcctgatgggtctctgaggggttagggcctgcccctacctgagaacgcagcctggaaataggatctcgtattccacttggtgtgatgagccgcggttgatctgcaccgagtgctcgtactgagtcttcacctggtcccgcacgtacatggacttgg

SEQ ID NO: 276800 - DNA, 120 bp, Homo sapiens
  chr22:30873893-30874013
  hypo
tctcaaaaaaaagaaaaaaaaaaaaggcagcaggaatggggcaagaaaagaggtcaaaatgcacccagccacacaaaaattcgctcactcagccaggtgcggtggtttacccctgtaatc

SEQ ID NO: 276801 - DNA, 155 bp, Homo sapiens
  chr22:30888310-30888465
  hypo
cccaaggcattgcccgtgcgtgtggaggctcaccagggtcaggccaggggtagtgcccgagtagaggacgagccagggagaagcagggtctttagcattgacctctgcttcccaggcagatggacacaaccagggggccacgtcgctcacctccc

SEQ ID NO: 276802 - DNA, 213 bp, Homo sapiens
  chr22:30939013-30939226
  hypo
atcgggccccgcagcgagggccacacctgaccacacagtgagcttcacctgcgagtctcatggcttctcacccagagacatcagcctgaaatggttcaaaaatgggaatcagctctcagacttccagaccaacgtggaccccgcaagagagagcgtgtcctacagcatccacagcacagccaatgtggtgctgacccgcggggacattcactc

SEQ ID NO: 276803 - DNA, 521 bp, Homo sapiens
  chr22:30939623-30940144
  hypo
agctcaaataccgccgctgagaacactggacctaatgaacagaacatctatattgtggtgggcgtggtgtgcaccttgctggtggccctactgatggaggctctctacctcgtccgaatcagacagaagaaagcccagggctccacttcttctacaaggttgcatgaacccgagaagaatgccagaaaaataacccaggacacaaatgatatcacatatgcggacctgaacctgcccaaggggaagaagcctgctccccgggccgcggagcccaacaaccacacagagtatgccagcattcagaccagcctgcagcctgcgtcggaggacaccctcacctatgctgacctggacatggtgcacctcaaccggacccccaagcagctggcccccaagcccgagctgtccttctcagagtatgccagcatccaggtcccgaggaagtgaatgggaccgtggtttgctctagcacccatctccatgctcttccttgtcccacaaggagccgccatgatgagcac

SEQ ID NO: 276804 - DNA, 141 bp, Homo sapiens
  chr22:30940937-30941078
  hypo
ctccagcgcccggtcgccacccttctttgccccgggaaccccatcccggcacctcccaccccgcatacaccacctaccccatgcaaaaccctatgatggcaggaatcgagacctccaaggacccgtcgttgcctccatgct

SEQ ID NO: 276805 - DNA, 1179 bp, Homo sapiens
  chr22:30950916-30952095
  hypo
gcaagccgctgggcggtgggacgtcaccaccgcaggaaatcgcgaatgaacttccagagcttggtgacccacaggttggcgccgaggtccatcaggtactggatctcgggcgtgagcatgcgccggcagagctgcgcgtgccgctgcccgatgctcttcttgaggttgtagcccaggatggacttggtgcccagcggctgccagggctgcatggcctcgtcctggatggcggcggcgtccacggcgtggcccccgtcgatgcagatggtccgcatgcgctcgttggcatggcgcagggcggccacctcgcgggccatgcgctcccgcccgaaggcctccaccttgcgccagaagctggcgttgaagtggcggtagaggtgggagtccagcatgttccaggcggtggcgcgcccatacagctcccccgagagccgcggcacgggcgagtcgcggcgggcgttgagcttgaagtagagcacgtcctccagctcccagcacagcaggtccttcagcagcaccagcgactcgtcgaagtactcttgaaggagcaccaggtggaagcgacgctccacctccaggatgtgctcctgcacctgcgggctgctggggtccaggctgttgtcatagcccaggtcgaagaagagcaggtttcggaggtagtgggcattgaagccgttggggtcgtagtagcgatccgggtcttgcaggaactcggtcagcttgtcgccggccgagagcttccacgtgaggggcaccaccggcccgaagtagtggaaggaggactcgaacaagcgggcggggtcgcggagcaccgtgatgaagatggcgttggtcggcaccaggccgcgcacctcgtcgtagtggaagcgcatgtggttgcagatgatgttgaagcaggccccgggccgatagtcctgcaccaggctgcgggcgaagaaggtcgggtagtcgaagtcattgcggccgttagggaaggcgaacttgagccggtgcttctggccgaagcggaacaggatgttgagcagggtgctgctggccgtcttgtgcgtcttcaagaacacgatgttgcgccgcggctggcactcccccgccgagccgttggcccggatcactgcctctggctcgagtgcaggtggagagcaggacgctgcggcctccggggtcctgctggggacagag

SEQ ID NO: 276806 - DNA, 353 bp, Homo sapiens
  chr22:30977857-30978210
  hypo
gtcccaagggttagacgcatcctggaagtcagtgccagacccccataaaagagtgagaaaagggaccctggtccctgctgctccgaagactggctggccctcccctccctgctccggctctcccacttccttcaggtctagctcagactcggacagaccactttccgacctggccagagctcctgccttctacatcacctagtctacaatctttgctgcatgtctgctgctgggctagcgtgtgagcaccagagggtggtgctcccagcgctgtctctagcccagaggggctggcaaaaccttggctgactaaggtgccttgggaaggccaggcccagcgggggcgggggaag

SEQ ID NO: 276807 - DNA, 50 bp, Homo sapiens
  chr22:31059626-31059676
  hypo
acttcatgaggtaggcgaggcacagggcagctgagcggctcacaccagca

SEQ ID NO: 276808 - DNA, 33 bp, Homo sapiens; identical to SEQ ID NO: 220725
  chr22:31062272-31062305
  hypo

SEQ ID NO: 276809 - DNA, 165 bp, Homo sapiens
  chr22:31078361-31078526
  hypo
tagcccaagacctgtcgtctcacgggtgaatgggaagggggttgtgtcggcaactgtaattgtgctgtacttggagttgacacatacaattcaagaggcagcctggtgctggggagtgggcctcggaataataatctagaggtgggagttcggcttctatgactc

SEQ ID NO: 276810 - DNA, 44 bp, Homo sapiens
  chr22:31126862-31126906
  hypo
attaaagagctaatgctggccgggcgcggtgcctcacgcctgta

SEQ ID NO: 276811 - DNA, 85 bp, Homo sapiens; identical to SEQ ID NO: 220726
  chr22:31169318-31169403
  hypo

SEQ ID NO: 276812 - DNA, 119 bp, Homo sapiens
  chr22:31220230-31220349
  hypo
agcctggggaggaggcggctcaggaagttgtgtgttggtgggcactgtgcttagaacagggcctggagcagagcttgctgcaccggagggaggaggcccagcggcgagtgcagcagtca

SEQ ID NO: 276813 - DNA, 188 bp, Homo sapiens
  chr22:31220642-31220830
  hypo
tcctgttttatacacgtcaaagggtattctggtgaggtgtcaccgcacacaaatttccccttaggaaagggttccaatgaaattgcatcatgcacctaagcccatctttgtgcaagttgaagagggagatgggcttgctgcctgctccgggatgccgagggatgaggtccaggcggtgcccatttcag

SEQ ID NO: 276814 - DNA, 45 bp, Homo sapiens
  chr22:31250071-31250116
  hypo
ctagggtttacagtacgcatttttaacttacggcagtctccttcc

SEQ ID NO: 276815 - DNA, 128 bp, Homo sapiens; identical to SEQ ID NO: 220728
  chr22:31260802-31260930
  hypo

SEQ ID NO: 276816 - DNA, 36 bp, Homo sapiens
  chr22:31261979-31262015
  hypo
agagcatccagggacgagtcccgggcagtaaatcag

SEQ ID NO: 276817 - DNA, 237 bp, Homo sapiens; identical to SEQ ID NO: 220729
  chr22:31264325-31264562
  hypo

SEQ ID NO: 276818 - DNA, 709 bp, Homo sapiens
  chr22:31266249-31266958
  hypo
atggggcaggcacctcaccccggccaggaacaggaacgggcaccatctcggggactgatgttttttgaatggcgctatccaccctgccctgctcggcctggctgtgcaggcctcttggtaccacgtctgttcgtaatgaccgtaacaactctattttcttccacagatgactctggggacgacgacgaggctaccaccccagccgacaagagcgagctgcaccacaccctgaagaatctttccctgaagttagatgacctcagcacgtgcaatgacctcatcgccaagcacggcgctgcactccagcgctccctgacagagctggacggcctcaagatcccatctgagagtggggagaagctgaaggtggtgaatgagcgggccaccctcttccgcatcacatccaatgctatgatcaacgtgagtacccacccccaccgccctggcacggggctccctggctccagccccggggtccctcggtgggtgaccagggtcagcttgaagggtcagcgttccatttcctgtggttccacggtgtttcccaaagccagcgccccccagctagcttccgagttcttaaatcatctccttcactcggccgtcgttgggcaaggacattcttcctaattgtctggaggaaacgagttggttgtggactctggtgcagtctgcagttatttacttcatgcctcgataaggaaggtcg

SEQ ID NO: 276819 - DNA, 200 bp, Homo sapiens
  chr22:31279750-31279950
  hypo
cacccagagggataccgtccccctgcctccgccaccgcccttacacccactggcacaaaaccagcaaagaggtgccatctggtctggctgctggggcacattgtctctgagtctgttttcagggtcctcactctaaggcctacagcagtgagagagggacagggttgtgggtgaagcaggacggccgctgtaggactcca

SEQ ID NO: 276820 - DNA, 221 bp, Homo sapiens
  chr22:31301689-31301910
  hypo
agggagtcctggacgcggggagctggagggtgaggcgacccgggaggagacaccgccaggcaggggagggcggccgggtaggtgtggtccggctcacaccgcagccaccgccaccgccaccaccaccgccacagggagaacgcggagaacatgtactacttctcagagctggccctgaccctcaacgagcacgaggagggcgtagcgccaaccgacagccg

SEQ ID NO: 276821 - DNA, 215 bp, Homo sapiens
  chr22:31475552-31475767
  hypo
gaggtcccaagggacgcgtgaattttgaagtattcagaattggtcttagagggcgcctgaccctcgttctggataataacatggcatctcgcccaggtagagaaagcctaggaccttgaaatatgtcctccgaagtgagctctgtttgcctctcctgctgtgtagcattgacaagtcgctttcttctgtgccttgattttcttttttcttttttt

SEQ ID NO: 276822 - DNA, 432 bp, Homo sapiens
  chr22:31483868-31484300
  hypo
gccctaggcagagccgtgggcagctggtgccagccctccgcccctggcagccaaaatgacctgcctctcgcacccactgcagctggaggtcacagcagatctggcagagcggcggcgcatccgctcagccatccgggaactgcagcggcaggagctggagcgcgaggaggaggccctggcatccaagcgtttccgtgccgagcggcaggacaacaaggagaactggctgcagtgagtagcggggggtggaacatgcgggtgagaaggtgagtgtgagccctggctcagctcatgtgtgcaggcaggcgtgagcacaagtgtatctgtggattgcatgtgctaatggcagtacgtccacacacgcttctggaaaaacagagatgtttgtgggcatggagcatgtactgattgtggcgtcgcggccgtgctgat

SEQ ID NO: 276823 - DNA, 227 bp, Homo sapiens
  chr22:31486793-31487020
  hypo
acgtggctggaccccgaccctgccaacgctccctgtcggtgctcagcccccgccaaccagcccagaaccgaggtactacctattctcaccctgcctaggatctgtgcagaccctgtcccacccagttgctgacagccctcctgttccttctagagtccaccccccttgccagcggaccttcctcattccagcgggctggctctgtgcgggatcgtgtccacaagttc

SEQ ID NO: 276824 - DNA, 443 bp, Homo sapiens
  chr22:31487249-31487692
  hypo
agggccccagggggcggggcttggctgctaggccccttgaaaacagagcaggggggcctgtggcacgttcagaggagcctggtgccccgctgcccgtggccgtcggcactgccgagccagggggcagtatgaagaccacattcaccatcgagatcaaggacggccgtggccaggcctccacaggccgggtgctgctgcccacaggcaaccagagggcaggtaggcgccccccactgcctccccaatggggatgagtgcctgcaaccgcacttctgcatgcaggacaggtgctgcggccaggactcagggtgtctccaaagggtgtgctgggagcgagggcattatcaaccttgtctggcactgccctcactccacctgatcctcctgacagccacctttctccccactcagaactgacactggggctgcgggcgcccccgacc

SEQ ID NO: 276825 - DNA, 341 bp, Homo sapiens
  chr22:31489497-31489838
  hypo
cactggaggagctgcgggcggtggctgaagcaggccgggtggcagtgacccaggcagccgaggtagctgtagccaccgtggagccggtggcccgggcagctgaagagctgcgggcagagagagcagcactgagccggcggctggatgcactgagcaggcaggtggaggtgctgagcctacggctgggggtcccacttgtgtccggccttgagcctgagctggagcccagcgagctgctcctggctgccgccgaccccgaggccctctttcaggctgccgaggatgccgggacccccgtggcccacccacctgccttcagcacccgccgccgctcctccacc

SEQ ID NO: 276826 - DNA, 207 bp, Homo sapiens
  chr22:31494668-31494875
  hypo
gaccaggccagcccacgggccggcagcctggcggcgctcgagaaacggcaggccgagaagaagaaagagctgatgaaggcgcagagtctgcccaagacctcagcctcccaggcgcgcaaggccatgattgagaagctggagaaggagggcgcggccgggtgagctgcagaagtgggctgggcagtggggggcggggcgtgataggca

SEQ ID NO: 276827 - DNA, 110 bp, Homo sapiens; identical to SEQ ID NO: 220734
  chr22:31495079-31495189
  hypo

SEQ ID NO: 276828 - DNA, 567 bp, Homo sapiens
  chr22:31522437-31523004
  hypo
ggtgacgacagcgacggcgcagacatgatcgccatagggtgaggtggcagggcatgtggaccccctcctgagcccctcgggccttccgggccctccacccatggcaggggcttccagggcacctctccaatcccatggccaccctgcccccacccctccaggttgcaggaagtgaactccatgctcaacaagcgactcaaggacgccctcttcacggaccagtggagtgagctgttcatggatgcgctagggcccttcaacttcgtgctggtaacgcacccctcaccccctggacagccagagaccctgctgaattcctggctccagctgtaccctggctcactgtggggcccgctgggcctctgtggctgggtccgtgacatgggtgggtggaggagcagacctgaaggtgggcgcgagggcgggggagttgtgttctgtcccccagccacgtggcctcccgctgcaggtgagttcggtgaggatgcagggtgtcatcctgctgctgttcgccaagtactaccacctgcccttcctgcgagacgtgcagaccgactgcacgcgcac

SEQ ID NO: 276829 - DNA, 266 bp, Homo sapiens; identical to SEQ ID NO: 220735
  chr22:31644627-31644893
  hypo

SEQ ID NO: 276830 - DNA, 118 bp, Homo sapiens
  chr22:31655943-31656061
  hypo
gcagctgccctactctgtcacgctcatctccatgccggccaccactgaaggcaggcggggcttctccgtgtccgtggagagtgcctgctccaactacgccaccactgtgcaagtgaaa

SEQ ID NO: 276831 - DNA, 139 bp, Homo sapiens
  chr22:31685462-31685601
  hypo
caggggtgggggaccgtcatacccagagttcccaggtcctttttctccttggagttcatccgcacccgctggctgatcccaatcactggctgcacagctgccgcctcactccgagcgggcagggcgttggcaggagcga

SEQ ID NO: 276832 - DNA, 44 bp, Homo sapiens; identical to SEQ ID NO: 220736
  chr22:31744073-31744117
  hypo

SEQ ID NO: 276833 - DNA, 143 bp, Homo sapiens; identical to SEQ ID NO: 220737
  chr22:31942754-31942897
  hypo

SEQ ID NO: 276834 - DNA, 34 bp, Homo sapiens
  chr22:31976811-31976845
  hypo
agtcaccatgctcggcctttttagtttgcatttt

SEQ ID NO: 276835 - DNA, 154 bp, Homo sapiens
  chr22:31998583-31998737
  hypo
ctgcctcaggccatccttcacgcagagcgacagcttctgtataggtcttggttcatgtggcaccagcaggcagcagcacgtcaccaggagcaggagtggcaaacagtggcctgtgcccaccaccgccacgggcggctcaagaaagctttctgcc

SEQ ID NO: 276836 - DNA, 346 bp, Homo sapiens
  chr22:32009374-32009720
  hypo
gaggagaaagaaggcgcggctgcagtgggcgctccaggcctaccaggggcagctcctccaggagggtgccacgcggctcctgcgctttgcagccagcatgaaggcctcccggcagcagctgcaggcccagcagcaggtccaggtaggcccagggccccttcctgtggggagcaggcagggtgtggcatgagctgaccagaggctgtgttgtaggcggctcacagtctccatcgtgccgtccgccgctgtgccacgctctggaaacagaaagtgctgggccggggcgggaagcctcagcccctggcagccatcgcacccagcaggaaagtgacgtttgagggtcccc

SEQ ID NO: 276837 - DNA, 367 bp, Homo sapiens
  chr22:32014093-32014460
  hypo
ccctcaggtcctgtcggcggcaagcgagcagcctgcgcaggtggctggagctgaacagagaggagccggggcctgaggaccaggaagtagagcagcaggtgcagaaagagctggaacaggtgaggccccaggccatccccaggtgtccctggggacgccccgggctgtgctccctctcagccctgcctgtccctccatggccccaggtggaaatgcagatccagctgctggcagaggagctccaggctcagcgccagcccattggcgcctgcgttgcccgcatccaggccctgcggcaggccctgtgctagcgtgttcgcaccaggaacgcaggtgctgggctgtcggggaggcctcaggccacctc

SEQ ID NO: 276838 - DNA, 70 bp, Homo sapiens
  chr22:32019702-32019772
  hypo
cggtctgagggcgccgaagggcaggaggtagtagaggacggtcaagggccaggagcgcagtttcagagcg

SEQ ID NO: 276839 - DNA, 304 bp, Homo sapiens
  chr22:32025196-32025500
  hypo
gggcctgcaagattgttgtgcgtgaggggtaggtgcatgtaggtggaagtgtgtgtgcatggaggatacgtgtgcaggtgcaagggtatgtgcatggaggggtgcgtgtataggtgcgaggatgtgtggggtgtgtaggtgtgagggtgtgtgtagggggtgtgtaggtgtgagtgtgttatgcgtataggtggtgtgtgcgtaggtgtgaggttatgtgcctggagggggtgtgcacaggtgcaaggtgtgtgcatgtaggaggcatgtgcgtaggtgtgagggtgggcgcatataggggtgt

SEQ ID NO: 276840 - DNA, 383 bp, Homo sapiens
  chr22:32078008-32078391
  hypo
ctgcctaaaagttggtctttcgcagatcttaatgtacatggcattgattatgagacggaattccagcctggagacggagcgacggccgtgcattcattggctgcaccgcggccttggatctgctgctcccgtcctgtacgctccctgctgctcttggctcagtgggcaaggaaggagccacgggggaggtctcacgcccagatagtgggatctggaatggacctcaggttggctctggagcccgtgccaaagaccctttcaggcaaaattgtgacaaagtatcatgattttcacagctcttgaggagcgctgagttttgggattcacagcatgggtttctgggctcctcaggctccgaataaggcaaacgctacatgtcttca

SEQ ID NO: 276841 - DNA, 120 bp, Homo sapiens
  chr22:32101966-32102086
  hypo
acagagggagactctgtctcaaaaaccaaactaaacaaaacaacatagctatatagaagaaaattaatggccaatcgtagtgactcacacctgtaatcccagcactttggggaggctgag

SEQ ID NO: 276842 - DNA, 38 bp, Homo sapiens
  chr22:32275827-32275865
  hypo
accaggattagagtcgctgaggccgtcacacaggccac

SEQ ID NO: 276843 - DNA, 31 bp, Homo sapiens
  chr22:32276566-32276597
  hypo
acggagatgttaatcgtcatcaaagtttcta

SEQ ID NO: 276844 - DNA, 220 bp, Homo sapiens
  chr22:32352537-32352757
  hypo
ccacgcatcccatccggctgggcctggccctcaacttctccgtgttctactatgagatccagaatgcacctgagcaagcctgcctcttagccaaacaagccttcgatgatgccatagctgagctggacacactaaacgaggattcctataaggactccacgctgatcatgcagttgctgcgagacaacctcaccctctggacgagcgaccagcaggatga

SEQ ID NO: 276845 - DNA, 213 bp, Homo sapiens
  chr22:32354707-32354920
  hypo
ccccatgccggggccgatgaatacggctcaggaagcctgtttcaagttgacctaattttaagataaagtggttattgagtttcacttcagttagtaggtcaggtatttgaaagtcaacaagctttatatggctaatacttgcttttgataagcacgtagacaaaatgttgctgggccatggtggcgtgcgcctgtagtcccagctgcttggga

SEQ ID NO: 276846 - DNA, 41 bp, Homo sapiens
  chr22:32356772-32356813
  hypo
agagcaaaaactccgtccccgccccccccccccccccagaa

SEQ ID NO: 276847 - DNA, 95 bp, Homo sapiens
  chr22:32384071-32384166
  hypo
cctgaatgatccggcggcatggcagaggtggtgcctactgatatggctccgatgactggaggaacaccagggtccttggtcttgcgccaatgtag

SEQ ID NO: 276848 - DNA, 430 bp, Homo sapiens
  chr22:32665358-32665788
  hypo
tcctgtagaagctacctcatcgatgtgcaggccctggatgagaagctgctcatcatcatcgccctgcagttcctgcacggctactacaagcccatcctgttcgagcccaaccagacctggcccgggcacgtggctgtgtggcaggacacgtgctccatcgtggccatcttgctaacatcacgcagaaggtgcaccccgtcatctgatctctcaccagctaccctttgactgcacccaggctctggccgtacccaagcccataggtggggtggtggtctttgtcgtcagctcgctgttatacctgaaccagagcattcccccgtacggtgtggctctcagcagcctcaccacaggcaccgcagctttcccgctgtgcacccagctgggtgtgtgaatccccctggactgcgcccaggccaccttcatctcc

SEQ ID NO: 276849 - DNA, 261 bp, Homo sapiens
  chr22:32667491-32667752
  hypo
ccgtgagaagaagccgaagccatccaagaagaaagcaggtggccgcacagaggagagggtcgggcccggggccgcgtggcgtgtttccactacttcgaggacatttatggctactcaggagtgttcatctgcggcccctcacctcactggctcctggcgacagactgaggggtgctgcggctgcaccccgtgggcatcaatggccctgtcaactctttcgctctgttccacaatgtcaactgtccccgcggcttcctgtac

SEQ ID NO: 276850 - DNA, 56 bp, Homo sapiens
  chr22:32668363-32668419
  hypo
agcctgcgggccagcgagctgacgggcatggccttcatggtcgacaggcagctcta

SEQ ID NO: 276851 - DNA, 175 bp, Homo sapiens
  chr22:32668773-32668948
  hypo
gaataagcatatcgcgtggttcgccacccaggatggtggcatcgggctgctgctgcccatgcaggagaaaacctactggaggctgctgatgctgctgaacgtgctgccacaccacacaggcctcaacctccgcaccttccggatgctgcgtgtggacctccgcaccctccagaat

SEQ ID NO: 276852 - DNA, 198 bp, Homo sapiens
  chr22:32792002-32792200
  hypo
ttaaagcacttaacatcatcatgaatgactcggaacagaagagcaacttctactgtacctgacgggttaagaaggtcatggaagagcggttgacccaggcatagttcccagcagctgccattcccttcagatagtcttgaccctctggggaagcgattcgagcacaagccaactgccgatcattgactataatcttgt

SEQ ID NO: 276853 - DNA, 160 bp, Homo sapiens; identical to SEQ ID NO: 220742
  chr22:32804846-32805006
  hypo

SEQ ID NO: 276854 - DNA, 212 bp, Homo sapiens
  chr22:32914022-32914234
  hypo
cacttacttgagatgcggatggggtggtgctggcttcttggactcttcaccctgctgggaggtactacggccctgcacagggggccggggctgtgaggcgagggtggcacctggcttggaggcctggtttggggagctgccactggatgcccgggatagctgcggagagcctggtgacctttgctgctgtggagatccggactgggggctca

SEQ ID NO: 276855 - DNA, 259 bp, Homo sapiens
  chr22:32960689-32960948
  hypo
ccaaacagtgctcccggactgcacccaaacagtgctcctgggctgcacccagtgctcccgcattgtacccaaacagtgctcctgggctgcacccaaacagtgctcccgcattgtacccaaacagtgctcccggactacacccaaacagtgctcccggactgcaccctaacagcgctcccggactgcaccctaacagtgctcccggattacacccaaacagtgctcccggattgtacccaaacagtgctcctggactgca

SEQ ID NO: 276856 - DNA, 189 bp, Homo sapiens
  chr22:32997561-32997750
  hypo
ctcctttgccattttttactttgacttgtgggaaacagcaatctttttagaaccacgtatgggctggcaagactccgggctagtgctggggacacagaagaggtaatttggggccagattattgggggcctttgaaaccaaagaggggagttcaggttgcttggatggacagtggggaagcaggatagt

SEQ ID NO: 276857 - DNA, 107 bp, Homo sapiens
  chr22:33250662-33250769
  hypo
gaagaagtcatcatcgtgactctacccaccccgcgcccccaccgcgtaattgaatgctgagtgtggacggcacttcttccagcacttggctgcgttaccgtgctcag

SEQ ID NO: 276858 - DNA, 38 bp, Homo sapiens
  chr22:33305903-33305941
  hypo
gacgcacatacaagcggtgtgctcggagactgcgagaa

SEQ ID NO: 276859 - DNA, 43 bp, Homo sapiens
  chr22:33361654-33361697
  hypo
gagattccatctggctttttcgttgttgttgttgttgttgttt

SEQ ID NO: 276860 - DNA, 42 bp, Homo sapiens
  chr22:33361997-33362039
  hypo
tcaccattgtaacctgagcacgcagcacataggcagtcaatg

SEQ ID NO: 276861 - DNA, 75 bp, Homo sapiens
  chr22:34144333-34144408
  hypo
gtctcaatctccagacctcgtgatgcacccatctccacttccacctcccatcccgtagctttaaatattcaactc

SEQ ID NO: 276862 - DNA, 151 bp, Homo sapiens
  chr22:34242012-34242163
  hypo
ttctacagagttttccgctgtctgaattttcatgacagcgtctctgtttgtcatttaacctgcatctctgccctctgtatacttcctgtgacttcatagctagatctagggtcttgaacagatccaagttctgttgcgggaagtcagggac

SEQ ID NO: 276863 - DNA, 50 bp, Homo sapiens
  chr22:34257537-34257587
  hypo
cctcacccacagaatggccacgcagacacgcctggcctctccatgctgcc

SEQ ID NO: 276864 - DNA, 44 bp, Homo sapiens
  chr22:35526200-35526244
  hypo
ttatacttttttatgaaaagttcgccatgaatattgcatctctg

SEQ ID NO: 276865 - DNA, 243 bp, Homo sapiens
  chr22:35719273-35719516
  hypo
ttctcatttcggggcgtctcggttgtcggctggtgggatgttctgtggggagggaggcttgccaactgcgtgctttgctgtggagtgggcagggcagatgtagttaaaaaaaaaaaaaaagcagggaaagaatgtctgttctctgtctgagtgccaggtgggcaggctcacaggtgagctgtggttaccggctgtgtccccttgtcccctctcagtcctgggctgacgcgttccgcagctcgc

SEQ ID NO: 276866 - DNA, 183 bp, Homo sapiens; identical to SEQ ID NO: 220745
  chr22:35730462-35730645
  hypo

SEQ ID NO: 276867 - DNA, 317 bp, Homo sapiens; identical to SEQ ID NO: 220746
  chr22:35742069-35742386
  hypo

SEQ ID NO: 276868 - DNA, 57 bp, Homo sapiens; identical to SEQ ID NO: 220747
  chr22:35758435-35758492
  hypo

SEQ ID NO: 276869 - DNA, 42 bp, Homo sapiens
  chr22:35806956-35806998
  hypo
acttctggtaacaggcagctcgttacttcatgaggtagccca

SEQ ID NO: 276870 - DNA, 217 bp, Homo sapiens
  chr22:35820082-35820299
  hypo
gtctgggctctgtcggagtcccctcgggcagcacgtgccgttagccagccatgtgctcccacagaaatacccggagcacgccatccacaaggtgctgcagctcatgctgcggcgcggcgagatccagcatcgcatgcagcgcaaggttctctaccgcctcaagtgagtcgcgccgcctcactggactcatggactcgcccacgcctcgcccctcctg

SEQ ID NO: 276871 - DNA, 143 bp, Homo sapiens
  chr22:35821626-35821769
  hypo
ggggtggcaaccttactgggcgcgctgtgggttttgcatccaaggctgcatctccggttcctgctagcctttcatcttgctcaggtggggactcgcgtgcatctcaggcccaaggtcctcccgtcctgcttgttcatggagtg

SEQ ID NO: 276872 - DNA, 654 bp, Homo sapiens
  chr22:35842433-35843087
  hypo
actttgtctagtacccccatcgctgtacctccagcacacagagctgctgcgcaccctggaagtgaatgagcgagtggacgagcagatgactcagaggccagctcacagtctcgtgggcgaggcagacaagaaacaaccaagcagaatgcccccagtgagcactacggcatgtggaggggaacaaccggggcgcctgcaggagggagtggctgcccgtccgcagtgggaggaaggagtgaggaatggaagcctccctcaactctgcccgcagaattttccagattggcttctcctctagtcctggactcaccgcaccccctcaccttcatatttctctcatctcggttccctgagcatcttcatcacccaaatcctttctgagagtcttttctgaatgggggggtttgttctagagattctagttccctccgcagagacaagtgctccggtcaccagtgtcctgccccaactgcccaggtgggtcacgaggcccctgcatgagccaagccctccgggggcctcagcatcacctgtaccctaaggcatcagtctgctctgccccgactccgggcagcggtccgcgcttctctaggacagaaccagctcagggacggcagctagaagaccaggggttcagccccaaggctggtcctg

SEQ ID NO: 276873 - DNA, 74 bp, Homo sapiens
  chr22:35843123-35843197
  hypo
tcgggcttcccggctctgggtgggaaacctgcgtccctctcggtgttgctgtgaggattcgacatgaagctgtg

SEQ ID NO: 276874 - DNA, 641 bp, Homo sapiens
  chr22:35848319-35848960
  hypo
cagatgtcacaccctggaaccgtgtggtgtttctgttgtctgcctacagtaggacgtaggctccacgccacagggactctggcttcctggtcggccactttgtgtctggagcatggagccgggcaggtgcccggcagatgtgtgttgaataaacaggtgggtggccgcctcacgttcctccacggtaaagtgacgctaaggatcatagtcacctctgggctacatgaaataccatgcggaaacgtctggcagcgggcagggcagggcagggcacttcactttctgtactagctgtaaagtgagaaagaagcccttggcactggaagcctggcttttcgttgactctgcagctcctggttagccctgtgtgtgagtttgtgttaaataatcagtccgactcctccgctggggtggtggtgccagtgtggccagttcttgtgcaaatagaacattttcaagatagttctgccacttgtacagcactctacgtgctgtagagttcagccctgagagagagggacaggatcctgtgtgtcccgtccgccttgcatgtgggtctcaccagcggcttccttcatgtcactctggagcactctcacccaccccgagaggaaagtgccgctatccctgctttgcagatg

SEQ ID NO: 276875 - DNA, 38 bp, Homo sapiens
  chr22:35875348-35875386
  hypo
atggggattacaggcgtgggccacggcgcctggcctag

SEQ ID NO: 276876 - DNA, 431 bp, Homo sapiens
  chr22:35947750-35948181
  hypo
tgctggtgtcgggcgacgagaactgcgcctacttcgaggtgtcggccaagaagaacaccaacgtggacgagatgttctacgtgctcttcagcatggccaagctgccacacgagatgagccccgccctgcatcgcaagatctccgtgcagtacggtgacgccttccaccccaggcccttctgcatgcgccgcgtcaaggagatggacgcctatggcatggtctcgcccttcgcccgccgccccagcgtcaacagtgacctcaagtacatcaaggccaaggtccttcgggaaggccaggcccgtgagagggacaagtgcaccatccagtgagcgagggatgctggggcggggcttggccagtgccttcagggaggtggccccagatgcccactgtgcgcatctccccaccgaggccccggcagcagtcttgtt

SEQ ID NO: 276877 - DNA, 140 bp, Homo sapiens
  chr22:35951597-35951737
  hypo
gagacaggcctccacggtgtcccgctggagcccagcctgctgctgccactccctttctctatgtgggtctggaaataagtctcgtcccctcgcaggcctccttttcttcatgagtaaatgggaggcgggaggaaggcatc

SEQ ID NO: 276878 - DNA, 240 bp, Homo sapiens
  chr22:36089709-36089949
  hypo
ctttgatattgttcgtgatttctagaggtggagatgatattactcacaaaatcgtaaacacgctgtgtgtccaccgtggatcctaatatccagggagggatattactccccatatagggggcgggggtgcacccagcctgtcatattgtttcttatgtccggggaggagaggatgatattgctaccaatatcgaagaagtgtacacgccccctgtgatatggttcctaatatccgcgttg

SEQ ID NO: 276879 - DNA, 153 bp, Homo sapiens
  chr22:36123184-36123337
  hypo
cctgttccagctcccggggcagggctgttcgaggatcccgtgtggttaaaccagaaggtaggaaggcagcgaataacacggacgtggtcttgctcttctaaaagcttaccatgagggtggggggcgacgaatgctaaacggacacatcagtgc

SEQ ID NO: 276880 - DNA, 139 bp, Homo sapiens
  chr22:36246094-36246233
  hypo
tatgttccaggctttaagtgcgtcagagaatactcccaatccaggacacagaaaggcagatgggactggtattactactctattctttcttgggcggggagcatgtacccgtgtgcacgcatgcgcattctctgtctct

SEQ ID NO: 276881 - DNA, 89 bp, Homo sapiens
  chr22:36462715-36462804
  hypo
ttggcgatgtctcccggctagggatagcagaatgggatagaaacgcaggccacgcggtctggagcggtggctcacgcctttaatcccag

SEQ ID NO: 276882 - DNA, 163 bp, Homo sapiens
  chr22:36519454-36519617
  hypo
ggggccagaggaaggctgggcgcctttctcatctggacccagacccagacagaccccggggccattccgttctgcaggcaaacaagccagtcccgctagaatgtggcagtcacaggctttcaacatggaaggtggagctgcctggacgctgtgttttttttct

SEQ ID NO: 276883 - DNA, 32 bp, Homo sapiens
  chr22:36582596-36582628
  hypo
tcgagacggagtttcgctctttcaccaggctg

SEQ ID NO: 276884 - DNA, 33 bp, Homo sapiens
  chr22:36646818-36646851
  hypo
gtccaaaagatgttgaagaacggccaggcgcag

SEQ ID NO: 276885 - DNA, 174 bp, Homo sapiens; identical to SEQ ID NO: 220757
  chr22:36677171-36677345
  hypo

SEQ ID NO: 276886 - DNA, 150 bp, Homo sapiens
  chr22:36683790-36683940
  hypo
caaacaaacaaaaaaaaatttgttaaactaaggttattcttgttacatgatatggcgtatcagagctgtttttacgtgttaattattctttaattattagtgaggtgaagatttccaagtatgtgtcccacactccgggctgcttcttgg

SEQ ID NO: 276887 - DNA, 184 bp, Homo sapiens
  chr22:36684242-36684426
  hypo
gtagttggctcagtcgggtgccgcccaccctcacctgggccccgcccacccttacctgcagcttccgcagctgtttgatggcttcgtcccggttcttgttggccgagtcgatgtgcgcctccaggtccttcaggtccatctccagcttcttccgggcggccactgccatcgagcgctgcttcct

SEQ ID NO: 276888 - DNA, 278 bp, Homo sapiens
  chr22:36688047-36688325
  hypo
tgcttcttctccaggttgcacgcgctctggcgctggtggtccaggtccaccagcaggtcgtccagctcctgctgcagccgcgtcttggtcttctccagcttgtcgtaggcggccaccttctcctcgtgccgctggctcaggccctccaggtccttctggagcttcctcttcacctcctcagcagtttccaggcaccccacactgtcctccatcttctttttcatgtcggccacctgggcaggagcaaggagtaagcagatgcccgagatggcacctgc

SEQ ID NO: 276889 - DNA, 171 bp, Homo sapiens; identical to SEQ ID NO: 220759
  chr22:36692853-36693024
  hypo

SEQ ID NO: 276890 - DNA, 129 bp, Homo sapiens; identical to SEQ ID NO: 220760
  chr22:36695463-36695592
  hypo

SEQ ID NO: 276891 - DNA, 71 bp, Homo sapiens; identical to SEQ ID NO: 220761
  chr22:36696999-36697070
  hypo

SEQ ID NO: 276892 - DNA, 260 bp, Homo sapiens
  chr22:36707808-36708068
  hypo
cacctggcagacaggcccaacgataatgcatgatgacaaccagcctgggcaccgcggtggagtgccgcaggcttctaacagcatggagcaggtgaaggggctctgtaagctgtgtaaatgatgatgctgtcaccggccacattactgggtgagtcattgtgcaagaaccgtactcaggtcacacccctgcgtccccagcagctgcccggctcctggtcctagagagcctcgactccacctctcctgtgaagatctggcca

SEQ ID NO: 276893 - DNA, 238 bp, Homo sapiens; identical to SEQ ID NO: 220762
  chr22:36713506-36713744
  hypo

SEQ ID NO: 276894 - DNA, 71 bp, Homo sapiens
  chr22:36721696-36721767
  hypo
agcgtggagggctccgtgagagcggagtccccatccaccgtgccggggtcaggttccgcatgggacatgac

SEQ ID NO: 276895 - DNA, 194 bp, Homo sapiens
  chr22:36722630-36722824
  hypo
gtgcgaggacgccacgtacgccagatactggatgaccttcttggtgttctccgtcttgccagctccagattcaccactaccaagagaggcaaggaagtcccgggcttaggcatggccaagtccttgacctctgtcccttcccactgcacgctccactgcctcgcattctgttgggtgcccgtgaaggacccaac

SEQ ID NO: 276896 - DNA, 203 bp, Homo sapiens; identical to SEQ ID NO: 220763
  chr22:36732742-36732945
  hypo

SEQ ID NO: 276897 - DNA, 403 bp, Homo sapiens
  chr22:36740160-36740563
  hypo
gatgatggagctaagccctgcggaaagagcactgaggctcaggtgggaggaaggagattcactggatgctcgtggaggcaagacatcgagcaagcggcttcgcgcccacgcggcgcggccacgacacggcgctgctccattcacaggccacagaggctctttgtgcccatccgcccccatcccagggcctcaccccctgaagaaaaagacagagcagctgtggctcagaattagccacgccacccacaatgctgggcaaacaggctgcacgaaggctcctgaggtcatgatttggaagcttgatggagagatagaccatgaatgaggcagcacctccccatccaggcagcacctccccatccaggcggccccgcccaggggcgctgacatgctaataactctg

SEQ ID NO: 276898 - DNA, 78 bp, Homo sapiens
  chr22:36741013-36741091
  hypo
caggcccccaggccttgccccgagccaggtgctggctgggtactttagaaagttcccatggatgccgggtgtggtggc

SEQ ID NO: 276899 - DNA, 92 bp, Homo sapiens
  chr22:36838769-36838861
  hypo
tgtcaaggtggcaccgagaagggaggtgcccacggtggaagcttatggtgatgtggaaagtgcaccaggcccaggctcgccacccactacct

SEQ ID NO: 276900 - DNA, 197 bp, Homo sapiens
  chr22:36855433-36855630
  hypo
gattacaggcgtgagccaccgtgcctggctggggcccggaactttctaaggcagaggcggcagagacaaagaggtggctggaggtggggcagtgccgagccaagtctcaggacatccctactgccgagcctcccctcccacaaagtaaaccggcaggtgggcagtgcaggcggggcccagctcgggtttcactcctt

SEQ ID NO: 276901 - DNA, 142 bp, Homo sapiens
  chr22:36860797-36860939
  hypo
ccaaagtcctgggattacaggcgtgagccaccgcgcccggctccatgttctgtatatttagaaggaacctgtgtgagtggccaccaaacgttcactctgaaccatgctggcgctgcctgcaggtgagcgtgcctgcccagag

SEQ ID NO: 276902 - DNA, 36 bp, Homo sapiens
  chr22:36867728-36867764
  hypo
gtgtaggacaggcgcggcagctcctgcctgtaatcc

SEQ ID NO: 276903 - DNA, 117 bp, Homo sapiens
  chr22:36868766-36868883
  hypo
cgagggcggtggaacggttctgtatggcgctggaatggtggacacatgccattatacatttgtccatgaactttctcactggcaagcagtctgtgctgagagcggcagctgagacac

SEQ ID NO: 276904 - DNA, 97 bp, Homo sapiens
  chr22:36871884-36871981
  hypo
catgtctttgtgcacgctgtttcctcagcccttcctcctcctctgcgcatccctcatggctcagctcagaggttctctctaacgtgaagcattccct

SEQ ID NO: 276905 - DNA, 85 bp, Homo sapiens
  chr22:36880506-36880591
  hypo
actctgtctcaaaaaaaaaaaaaaaaaaaatagctctaaggtcttgcactaaccggtatgacctgtctggcgtctttacaggcag

SEQ ID NO: 276906 - DNA, 171 bp, Homo sapiens
  chr22:36885622-36885793
  hypo
gcttttgttttaaagcgcttgccacaaactcttaagatgcggatgggtttcccctgtgaagcactccacaggcgggatgcaggcccatctgaggaggggcttggaaggaagaggagcacttgagacggggcagaactgggctggcctggggctcagcgacagctccattgc

SEQ ID NO: 276907 - DNA, 452 bp, Homo sapiens
  chr22:36901807-36902259
  hypo
actccgtcttaaaaaaaaaaaaaagcgaaataccctttttcgtccattcctcccatacctactggccaatcaaggtgtgtggttcgtgtggggaaggtcccagcttccgcaggtgagctctggcaccggccttacctgcactgatgcacctggcccttctggtcagttaggatgaagtagtggccattccaggcctgtcggtccttgtccagagtgacgtgggcgatggtggtgttgtactggacacggagccccagcgtgtccgcgaagtcacccaggtagcgcaccatgtcgcgggcgtcggggaagtaggcacgcgagtagtgtctgaagagcagccgggggtcgtggctgagcagagagttccagtcgtggcggaggttgaactcggcgttagccttgcccgtgtaccgcttgttgatgctgatgagcttgcggtgccgcgggtagcg

SEQ ID NO: 276908 - DNA, 183 bp, Homo sapiens
  chr22:36902499-36902682
  hypo
cacccggcccggcggctgggagacacgaggcccagaaagaggcggggcctgcgggaactctcactgcaatctgggtcacggccaggcccagaagccgtcctcagagctcatttgcccggactccaccgtttcaagctgggacttggggctccccggaatcccgagcccctccatcttatctcc

SEQ ID NO: 276909 - DNA, 50 bp, Homo sapiens
  chr22:36906969-36907019
  hypo
cactaagcatcaaaggccctcgtagtctcggtggaaggacaaactccagc

SEQ ID NO: 276910 - DNA, 125 bp, Homo sapiens
  chr22:36907687-36907812
  hypo
tgcagatgtcaatgacgcagcgtaaaatgccccaggcattctccacgctcaggttgatctggctggcaaactcattaggcttgaactgctgggtgcctaggatgacgtggcgtgaggagtctttc

SEQ ID NO: 276911 - DNA, 262 bp, Homo sapiens
  chr22:37159744-37160006
  hypo
cgtgtcttcattcccgtttcctagactgggagaggtgtgtgtggtgactcaccgaggttggcatggctgctaagtggcagggccagtgtacgccttaggccatcaaagtccaagcccagggccccttctccacccacagctacctctgcaatgcccttgtgctcttgaaccaaaggacagagatgccgctgggaaacatgggtgtctgcagcccgtacctgggagagagatgcctggagcctgtgaccgagccttctccagc

SEQ ID NO: 276912 - DNA, 110 bp, Homo sapiens
  chr22:37160269-37160379
  hypo
aggcagggctggggcggtgccgccaaggacaagagctcatgtctgggccaggctctgctgggcacttccgtgcctcactgtgaaacctcccaactcggtagagtgtctga

SEQ ID NO: 276913 - DNA, 177 bp, Homo sapiens; identical to SEQ ID NO: 220765
  chr22:37168633-37168810
  hypo

SEQ ID NO: 276914 - DNA, 103 bp, Homo sapiens
  chr22:37234764-37234867
  hypo
cttttggccagcctcggtgtgctggccagttcaactcaggagccttcagcactgagggccagccccagtctgcggtgtctgcccaggacggccagtccctgcc

SEQ ID NO: 276915 - DNA, 358 bp, Homo sapiens
  chr22:37329775-37330133
  hypo
gagctaggagccagcgaagccgagggtccaggtgggagggatttgcagctgctcccacgggcaccgggccaggcctcaccctcagtgccaacccacaggacagcaagaccgagaccctccagaacgcccacagcatggccctgccagccctggagccctccaccaggtactgggccagggtgagggtcaggacctcccgcaccggctacaacgggatctggagcgagtggagtgaggcgcgctcctgggacaccgagtcgggtaggtgaaggctggagtccagagcttctggccaggaccagctcatagtttctcactgccagaaaatccccaatgcagcagccgtagcaggcctgca

SEQ ID NO: 276916 - DNA, 147 bp, Homo sapiens
  chr22:37332531-37332678
  hypo
ccttgcccccacctcggacctcctgatgctcaccggcccaaatgtctctgctcttgcagaacgggagcgcagagctttggcccccaggcagcatgtcggccttcactagcgggagtcccccacaccaggggccgtggggcagccgct

SEQ ID NO: 276917 - DNA, 84 bp, Homo sapiens
  chr22:37348947-37349031
  hypo
cagactcattcacccggcgaatgagggtcacgttgacgagccgctgggcatcctgggtgtctgcccacccgcaggtgatgtggc

SEQ ID NO: 276918 - DNA, 624 bp, Homo sapiens
  chr22:37367461-37368085
  hypo
tctatttcccgttgaactggttttggtaagatattttacaggctaactgtgtatttcatctagcagccagcaagcgtttgcacatcgttataaattatgtcttgttataaacttgttctaacaacaattcactctgagcaggcattccgcatgctcattacataatatttttgtctctgtgcagctgcacatctgcaccgtagtgtagctccctgtccccgggtgaccgattggaactaggtttctccatccccaataggcctcactgtgtctcatcacaccaaagtatttttaaaaaggcttaatgaagacagcatcctctgtatcatcccccgggaaggctgagcaggttgcgcaccataaatacacttcaacgttcctatctgcctaagccttgaatcccctcctctatgatatagcaaggtaaatgcctgcatcctgactgcatttaatggaccacgggccctgggttggggttgcagcacccagtgagctatgagagcagcccccagctgctccgtctgacagattgaagccaggctctccagccagcgcttccagcttcatcagttctgtttgttcaacgttatgttccttctgccctggtctcgcagcctgaaattc

SEQ ID NO: 276919 - DNA, 185 bp, Homo sapiens
  chr22:37507694-37507879
  hypo
gggacagggccccgcgcccgggctttgccgtgaccgccggttttcagccctacctggctcccttttagttgtaggaacctgggcagattccctgacttctgagcggtgcttcttccatctgtcgaatgaaaaaaattcgccccttcttgatgaacgggaaacaacgtgtgcgaaggcccagcact

SEQ ID NO: 276920 - DNA, 142 bp, Homo sapiens
  chr22:37509140-37509282
  hypo
ggacactcttgtcctcgcagcaaagagacacgttcacatagatggaacggaagccttgttgctctgggaatctgcattcctaacactgagcctcagcctccttggtccccaaggaaaaagaagcctccgggaggcctggtga

SEQ ID NO: 276921 - DNA, 200 bp, Homo sapiens
  chr22:37527573-37527773
  hypo
ctttaaaaatgaatcggtgttttgtgactcaaagtgacgggaagacttgttagtatccacgctaagttatggagcctgctcaggaattttgagcagggacaggagaagcacagagcatgtctgcacagacagtggggtggagagagcttgtgctggcaggtcctgttcgttcagcacaccggcaacggtaataccagata

SEQ ID NO: 276922 - DNA, 110 bp, Homo sapiens
  chr22:37562423-37562533
  hypo
ctgggccagaagtgaagctaagatgcactccacgcattcaaccgttgaaccctcattgcagccaccagagttctgtgccacccctgctccgttcccgcggtggagggagg

SEQ ID NO: 276923 - DNA, 208 bp, Homo sapiens
  chr22:37622731-37622939
  hypo
cgcttctgctgccgcgtgggctgagggcacagcacggcccggatggcctcgtcgaacacggttttcaggcctctctgggtgagagctgagcactccaggtatttcaccgagtctggttggggagatggacaggagagccaaggcctaagtggcggggggggttctgggccaacatgtctcctatgccatacaaccccttccacgccat

SEQ ID NO: 276924 - DNA, 52 bp, Homo sapiens
  chr22:37683793-37683845
  hypo
cctgtgaatgagacctggggcgagtcacttcgccttcctaagcctcagtgtc

SEQ ID NO: 276925 - DNA, 168 bp, Homo sapiens
  chr22:37769150-37769318
  hypo
aaggatgtcatgcagatcctcgtccttggcgaactggaccttcttgcgcagggcgtgaccggcggccatgtacacctcctcccggtggtgcttcttgtagggccggaagcgctcccagatcttgtgcgtgctctcggatgagtactcggggctggaggagtaccctga

SEQ ID NO: 276926 - DNA, 86 bp, Homo sapiens
  chr22:37770930-37771016
  hypo
cactgcaggcggtcgtagttcttggtgacgttgttgaagaccaccagccaggccaggaagccgaagaggtcgcactcacagttgaa

SEQ ID NO: 276927 - DNA, 136 bp, Homo sapiens
  chr22:37875332-37875468
  hypo
gcccttgggatcagcgggccaaggggcaaaggaggaggagagggacccaccgtgcggttgtggggctgtggctctgaggcatggatgggccggttcaggctgggccttcccacatagacgtcgcgggccagcggga

SEQ ID NO: 276928 - DNA, 206 bp, Homo sapiens
  chr22:37893389-37893595
  hypo
ctcccctggacctgggcacacggtgcagtggagcctgcgtgccacagagcactccaactttgccttgccacggccctttcgtttcctccatcagaacgaacaccttcaggaccaaacttctatactgttccgctctgtagccctggcaccaaacccagtgtctggcacatagcagatgactaataaaagcttgttatatagccaag

SEQ ID NO: 276929 - DNA, 215 bp, Homo sapiens
  chr22:37902176-37902391
  hypo
tccacaatcttgacccgctcaccttgaggcaggtgccaccctgggcccgctgcagctgaacctccagcagagccttggtgccctccaggctggtgagcgttgtcagcagctcatcccgctccgcctccaggccccgcacctgcttgcggtactggtccttctcgatgaggctctgtgagtactgcaactggatccggtcacggctctggatggcc

SEQ ID NO: 276930 - DNA, 193 bp, Homo sapiens
  chr22:37964558-37964751
  hypo
gcccagtgggagggggtccccgaggacctgctggccctgccctcggcaggcactggggagcaggctgggatggcggccaccactacccagagatggatgcgcggcaggagcgggtggaggtgctgccccaagcccgggcctcctgggagagcctggacgaagagtggagggcgccccaggcaggcagcaggac

SEQ ID NO: 276931 - DNA, 65 bp, Homo sapiens
  chr22:38002844-38002909
  hypo
aaaataaaataaaataaaaaaatatatataattcatttcagtagtaaaagacataaacaaaaagc

SEQ ID NO: 276932 - DNA, 118 bp, Homo sapiens
  chr22:38014384-38014502
  hypo
aaggcgtgggagggaggccacggcctctgatgcacctgggcgtcccctcccatcccccctccctgcacaggtgctggaaacatgcatgaagagctgcggcaagcggttccacgacgaa

SEQ ID NO: 276933 - DNA, 109 bp, Homo sapiens
  chr22:38017617-38017726
  hypo
tgcagatgctggcccgcctgctgaagagctcccatcccgaagacctccgcgcagccaataagctcatcaaagagatggtgcaggaggtagcggccgagcccagagcaca

SEQ ID NO: 276934 - DNA, 99 bp, Homo sapiens
  chr22:38019344-38019443
  hypo
gatggagaagatctcgaagagggtgaatgccatcgaggaggtgaacaacaatgtgaaactgctcacggagatggtgatgagccacagccagggcggcgc

SEQ ID NO: 276935 - DNA, 79 bp, Homo sapiens
  chr22:38019473-38019552
  hypo
ggtgcacctgcctccctgcctaccccactccctgcccactccacagcccacgcggaccctgacccgcccatcctgctgc

SEQ ID NO: 276936 - DNA, 259 bp, Homo sapiens
  chr22:38037235-38037494
  hypo
ggccggggcggggacgccaggtaggggcctgggttgagtcattcctcaagctgttggccatggggtccccaggggacaggagaaagtttcctgctcagggggagacagcctctcttgatccttaacctccatacctccttcccaggtagaacagcggctggagccggccaagcgggcagcccacaacatccacaagcggctgcaggcctgtctgcagggccagagcggggcagacatggacaagcgggtggtgagtggg

SEQ ID NO: 276937 - DNA, 318 bp, Homo sapiens
  chr22:38060991-38061309
  hypo
gtgccagtttctaacgccagccgcgtgaattcctgcagcagtaaccacaactgctatttgttaagtgctgttccatttacaaagcacttgcccctgtgttgcccagcgcccgtttggaggtaggcattacttggattccgctttctcaggagtccggagaaacttggggtggttgagtggtttgtccaaaggtccacggctgtcagggtgaaatcgcgaacctcaggcaggactgaccgagccaggccctgtttacctgcagtagctccacgcatcctcacagtacccacatgagataagtgccgtagacatccccat

SEQ ID NO: 276938 - DNA, 180 bp, Homo sapiens
  chr22:38061511-38061691
  hypo
gacgctgtccctgccgccctcctgctgactgcgtctccatctccctacaggcaccgggagcctggccgctgcagtggagacagcctcgggacgccaggccctggtggtgggcaagcccagcccctacatgttcgagtgcatcacggagaacttcagcatcgaccccgcacgcacgcttat

SEQ ID NO: 276939 - DNA, 80 bp, Homo sapiens
  chr22:38064610-38064690
  hypo
cctcacttttaaaggacatagaggagggagtcacttttcctggctttgggtgtggtcctgggagccgttgcagccattct

SEQ ID NO: 276940 - DNA, 147 bp, Homo sapiens
  chr22:38081627-38081774
  hypo
atagggtgaggcaccgcgaagaccattggtctgggaccacacagctgtaggtgtgatgccagtatacaaatccaggcagtttggctccctcttggagactaccaacgagttgacatcagcatctaaagtaggggccagcacggtggc

SEQ ID NO: 276941 - DNA, 778 bp, Homo sapiens
  chr22:38086594-38087372
  hypo
gatgcagcagggcgcgccaccacttgccagagccatggtggctcggggtgcccagcccaggtccccccagctactgctccatgtaagtcattgtcttgtgcctctttagggaggggctggagacaggtctgaggaggaggcgtcatccacggagaaaccaaccaaagccttgcccaggaagtccagagaccccctgctctctcagcggtgagtcttggcctgctgcctccccggtcccacccctcctggctggcagtagtgacctggcccttagggtggtgtggagcaggtgtagggcccggagcagccctctgcctgtccagtgatcctctgcctctcctcattgccccgtcctgtcccacccacccctgatagtgtctgacctccagtgcttttcgtgcctgggtgaagggcctgtgtctctgagctgagttgctggcaggcactctggaggtagagcaggccaactctggcatgaacttggcggtcctggcattcgcaacctgtcctgacatcccctccgtgagccaggtggtgagtcaccccacaatgcaatcttaaactgaggctttctgccctcccctaggatctcctccctcacagcatcactacatgcacacagccgcaaaaaggtcaagaggaaacatccccgacgggcccaggactccaaaaagcccccaagggcccctcgtaccagcaaggcccagcgccgccgtctcacaggcaaagcacggcacagcggggagtgagaccgagaacgaagcggtgccccagtcta

SEQ ID NO: 276942 - DNA, 97 bp, Homo sapiens
  chr22:38095179-38095276
  hypo
gaaaacacattaggatttctttttggctaagttctgccacaaacttgctgtgtgactttaggctgttcacgtttgtcaaagacgtcgtcctcaactc

SEQ ID NO: 276943 - DNA, 242 bp, Homo sapiens
  chr22:38146508-38146750
  hypo
cttcattcttagcttgggatcgccctgggcagcctccgtctcaggtggaagacggggtgggcagaatacagagcagcgggacaaacgcagccccaggggttctcggccgtgagcagagcctgtgtctctcccttagacaggtatacagggaggggctgggatgccaacctactgggtcccccgactgtggctgtggaaggttctggatcttcagctgtcccaagccccggttggtccacttc

SEQ ID NO: 276944 - DNA, 44 bp, Homo sapiens
  chr22:38149210-38149254
  hypo
tccacacaagagaggatgggcgccgctcgcctcaccagaaggtc

SEQ ID NO: 276945 - DNA, 44 bp, Homo sapiens; identical to SEQ ID NO: 220770
  chr22:38149554-38149598
  hypo

SEQ ID NO: 276946 - DNA, 90 bp, Homo sapiens
  chr22:38150056-38150146
  hypo
cctaaacttacagcttagggcgctctcacctgctgcggatgtgggtagccagcctacagttcaagaagcagaccgtgcatctgggcgcgg

SEQ ID NO: 276947 - DNA, 77 bp, Homo sapiens
  chr22:38182164-38182241
  hypo
gtccctctccctctccctctcggcctccctctccctctcggcctccctctccctctcggtctccctctccctctcgg

SEQ ID NO: 276948 - DNA, 103 bp, Homo sapiens
  chr22:38199826-38199929
  hypo
tctcagcccagggccgctgccaagcggacccggcacgtgagtaggaggtcggccgcagacaaggggtcctagggtctctgaggtctctcctgctggcctctgg

SEQ ID NO: 276949 - DNA, 86 bp, Homo sapiens
  chr22:38208855-38208941
  hypo
ccacaggcatcaacacgtgtctcactcattttcttcagagcatccacaagaatctagaagcaaaaatagcccgcttccaccagcgg

SEQ ID NO: 276950 - DNA, 388 bp, Homo sapiens; identical to SEQ ID NO: 220771
  chr22:38209275-38209663
  hypo

SEQ ID NO: 276951 - DNA, 65 bp, Homo sapiens
  chr22:38211829-38211894
  hypo
caagacccagaggtgcgactcccagcagggcaggctcgggggcggagagacgtggtgagagccag

SEQ ID NO: 276952 - DNA, 38 bp, Homo sapiens
  chr22:38238232-38238270
  hypo
cctgggtggtaaagcgagactctcgtctcaaaaaaaga

SEQ ID NO: 276953 - DNA, 49 bp, Homo sapiens
  chr22:38266335-38266384
  hypo
gaggtatacacaagcggaggtgagtgcagcaggccgacagccgtggcct

SEQ ID NO: 276954 - DNA, 32 bp, Homo sapiens; identical to SEQ ID NO: 220772
  chr22:38285336-38285368
  hypo

SEQ ID NO: 276955 - DNA, 323 bp, Homo sapiens
  chr22:38328789-38329112
  hypo
gtatctggcttccagagggccgtgaggatgacatgctggtggactggttcaagctcatccacgagaagcacctactggtgcggcgagagtccgagctcatctatgtgtgagtccccccgcctggggcatccctccctggaatccgtagagcttagaatggagaacccttaccctcttccctcatcagtaacagcgcagggcagggcagccggggctcgggcagaattgttaagagtcaccttattcccacccctagcttcaagcagcagaacctggagcagcgccaggctgatgtcgagtatgagctccggtgcctcctcaat

SEQ ID NO: 276956 - DNA, 266 bp, Homo sapiens; identical to SEQ ID NO: 220773
  chr22:38363621-38363887
  hypo

SEQ ID NO: 276957 - DNA, 67 bp, Homo sapiens; identical to SEQ ID NO: 220774
  chr22:38364989-38365056
  hypo

SEQ ID NO: 276958 - DNA, 337 bp, Homo sapiens
  chr22:38369807-38370144
  hypo
cccctggggccccgcggtctctgtcttcacctgggctttggcatccacaccaggtggtgagaccgtgggcagagccacgcctggtggcttggagatccaggcggagtgtccactggccacggccagggcactgcccagcccatagccggctgctgagtagctgctcacatggcctgggtgcccattgggcggcaggtactggtccaactcagccacatcaaaggtctccatgttggacattacctcgtggctgatctcaccaatgtccacgttgccgaagtcgatgtgaggcttcccgccctcccccatggagcgcccgtcccgcttcgggtctgcc

SEQ ID NO: 276959 - DNA, 130 bp, Homo sapiens
  chr22:38375998-38376128
  hypo
aggcacctcctagccggcagcagcattcctctgcggcttagcctccctgtctactccccccaccccggccctgagcccagccctagccccagctttctcagagggtccctccagccgagactctgtcaga

SEQ ID NO: 276960 - DNA, 285 bp, Homo sapiens
  chr22:38378821-38379106
  hypo
ataggatgaggtcccgcagcagcagatttgtcccgcagttcttcatccctcactcttccaaagactctcatctgaattccgttttctttaaacctcccctgagttctccatctgactgcctcagtttccctgaatctccagccaaccctttggttctttccaagcgtttccctcgtatcctcctgaccacagcagctggtggcatagtgtgcgtatctgtgggcaggagttagtgaaggcctccttccctccctccaaagccccaggccccacggtctgccaccc

SEQ ID NO: 276961 - DNA, 803 bp, Homo sapiens; identical to SEQ ID NO: 220776
  chr22:38379136-38379939
  hypo

SEQ ID NO: 276962 - DNA, 79 bp, Homo sapiens; identical to SEQ ID NO: 220777
  chr22:38379969-38380048
  hypo

SEQ ID NO: 276963 - DNA, 310 bp, Homo sapiens
  chr22:38380262-38380572
  hypo
caagggcggggtgtcgcctctctccacctcacagcagggtcccaggcctgggcgggccagggaggagcaggctgcgcactcacctcctcggacctctcctccagtctggggctcgtccttaggaagtggaaaaccgtgtcccaaggtgtgcggtccagctcggggctgggaggtgacgctggtgggctgggagggaggggcggggggccctgagcctcaggccacggcctcgttaggacggagcctgaatccttaccaccaaccaccctggccggacagcccgagactgactgagcgactgagcctgagc

SEQ ID NO: 276964 - DNA, 251 bp, Homo sapiens; identical to SEQ ID NO: 220780
  chr22:38381980-38382231
  hypo

SEQ ID NO: 276965 - DNA, 109 bp, Homo sapiens
  chr22:38415281-38415390
  hypo
gcttcttcagcccccgggcttgacattccccaagggtcccggccatccccacatgactggcatctgtgccctgggcaaccatcagctgagagcccgtgactactgccca

SEQ ID NO: 276966 - DNA, 196 bp, Homo sapiens
  chr22:38424123-38424319
  hypo
ccccttttgacatcccgcagcttgttctgtgtgttccctgactaccttgtgtgcatgagagagagagactgcgctagagatggaggaggtcaccacatgagaacagtggggacctgggtgatttagacagagacacagagccaggattggaggctgcgtgggctgctttcctgctgcacggcgatgctttagggtg

SEQ ID NO: 276967 - DNA, 801 bp, Homo sapiens
  chr22:38434365-38435166
  hypo
cttgggggaaaggaccaggccgggcccaggcaggtggaagccatggctctggccgggtcacagggcggctggggtttgacctggcggccatgatgggctctggacccaggagccacccgggcacaggatgggacgggttgagagattggtcgtccaggcgttgagtgtgccctcgctcctccccaccttccgccgtggccttgagccccttgcgcccgcgcccatggggttaaatctctccctgtctctctctgctccaagttgttttccaagtgaggcagagaatggttctcttgttaccaacatggcttctgggcattgggtaatgcgctccctcttctcccgcagcgccacaaagggaccttttgttcccctccctgcccctctcgctggctcttcccggccccccacccacccaaactccctcctccccccgccggcgcccgcaccccggggctgcgcgctgaccgtggcggccgcggcgccctccctctcccagcgcctgcactggcggccgccatcttgcgagcggccctcagggcggcctgggctttcccagggttctcggggccggggcagtcgtagggggcggctggggctccacaggacgttcgtgacccaccttgcgccccccagggagtggcaggaccctcccgtccccagcctccgcgccaggcctcgtccctgcatgggacaagaggcagccctccgccatttcccgcggcccttgcctcccgggagcggctcccctctgacgactgagtggactgcgcttgagggggccgccgctgggaaccagcc

SEQ ID NO: 276968 - DNA, 114 bp, Homo sapiens; identical to SEQ ID NO: 220783
  chr22:38470384-38470498
  hypo

SEQ ID NO: 276969 - DNA, 142 bp, Homo sapiens
  chr22:38474475-38474617
  hypo
ggcctccaggttgccgggttcctctgcaacaacaggcaggggctcagagtccccttcagcctcagcgtcctcagtgtcactggctccgccctcagtgcctgggcctgacggggcagctttagcacaacgcaggcagcagttg

SEQ ID NO: 276970 - DNA, 34 bp, Homo sapiens
  chr22:38486388-38486422
  hypo
gattacaggcgtgagccaccgagcctggcctaaa

SEQ ID NO: 276971 - DNA, 326 bp, Homo sapiens
  chr22:38506277-38506603
  hypo
atctgggagttgggggttcccgctgtatggctgagtgctctcggggatccttacccccgtacccacccctggcccagcctggctccaggcttccctttccaggacatctgtagccccggctggccctccgtcctccagagcgggcctgatttctgtgccctgggaggaggggctcaggcctggcttggccacccatgtgctcaccttgtagatggccatggtggacctgtaaaactggtccatctcgggggccatggaggggctgtcccgggtctgagcaggaggctgggagctggtggcgatggcacagccgggagcagtggtag

SEQ ID NO: 276972 - DNA, 544 bp, Homo sapiens
  chr22:38506928-38507472
  hypo
cccaccttactgggcgggcgctgcccgatgccctcccccaggactctctctgccagacccagcagcagcagcccctggaggggaacgccgctttacttctcactgtcctcaggcctgcggctcacagtggggccacgccctctgagcttggctcccacagccgctctggcccgcccagctcctccacttgccggagcaggagcagcacaaacgctggagttgcccagccctgggcagacctcggccctgcacacgcgctgcctgtccacgcggagtccccggcctctctgggtgacaaatggggctctccctggtcctccaagatgaagttgaagattgtggccctccttgggcctgccgggggtatgtgggcctggcagctgcctctgcataccctaagggccggtttaggggaggcctagaggaaagaggaggtgtccctgcccagggatcctggaaaacagagtgtccgggtacaaaggaaaagtccggtcaaggccaagggtcaaggccgaggggagccgggggtcaggggaacaggtgg

SEQ ID NO: 276973 - DNA, 321 bp, Homo sapiens
  chr22:38508432-38508753
  hypo
tagggctgggaggggaaggtcggtgagtccgaccacgccagggcacggggccaagggctggggcggctgagccctcacctgaagtactggatgccgaccatctcgcaccaggcccgtgcccggtccacagcccgcccgtctggatccgtgcactggtgagaagcagccttggtgagtgccgggcccacaccccgcccggcccgcaccccgcccggccctgccctgcactctcggagccccagcctggggagccccaggctctttcgagtcaggctgagccacacagcagcagagcggctcgggcaaaaccccttcctggga

SEQ ID NO: 276974 - DNA, 121 bp, Homo sapiens
  chr22:38512227-38512348
  hypo
aatgaggcaggaggacggctgagccacccgcccatccacctttccctttccccacaattcacaccccagggccttgggtagcagagtgcccactccaacctctgttcgggataggtgggct

SEQ ID NO: 276975 - DNA, 199 bp, Homo sapiens
  chr22:38516844-38517043
  hypo
agggcctggagccccggaacacctcatccttcatgcgaaagtacatgccgcgcatgtaggccatggacttacctaggaacaaaggggtcagaggcggggagatgcagcggccacacgcagggctcccgtagaacagcctgcagagcgcctgaacgcaggaggtggcaggaggaagcgggtttaccgaggcctaagcaaa

SEQ ID NO: 276976 - DNA, 85 bp, Homo sapiens
  chr22:38520281-38520366
  hypo
ggagccactgcgcctactctctgtgcatatttttgagtgacggagggagtgtagctcagaggttaggtgacgggaaccaagtcat

SEQ ID NO: 276977 - DNA, 255 bp, Homo sapiens
  chr22:38520660-38520915
  hypo
tttactctctcctgcgctgacctggaagctccaccagggcagaagccgcctctgctctgggcagcgctgtgtgtcaaggggatgcaggaggtgcccaagagggctgataaatggaggaggcccgggtcccacctctaggggtcttttcctggaccaggtacccagccccacagcaagcctagaggtggcaggggagagactacactgttgctggaggccaaagcaaactcccgaagatgcggggctggcgacaga

SEQ ID NO: 276978 - DNA, 126 bp, Homo sapiens; identical to SEQ ID NO: 220788
  chr22:38525495-38525621
  hypo

SEQ ID NO: 276979 - DNA, 256 bp, Homo sapiens
  chr22:38528842-38529098
  hypo
tggccaggtgcagcggggtgttgccgtgctctccgcgggcatccgcgttggccccgtgggtcagcagcactatggcacagtcgaagcggttgcgcatcaccgccacgtgcagggccgtgttccccgcggagctggtgctgttcacgttgcagccccgtttcagcagcatgcgggccatctgcgggagacggtcaggctgagttagcacaggcactcggggagctgccgcaccccgggacacgtgggcactgccact

SEQ ID NO: 276980 - DNA, 31 bp, Homo sapiens
  chr22:38531761-38531792
  hypo
ttaaaatttttctggctgggcgcggtgtctc

SEQ ID NO: 276981 - DNA, 123 bp, Homo sapiens
  chr22:38541364-38541487
  hypo
ggaaccgaggcctgcggcccccactgcccacacaagcaggtacacacacgttgtccaaatggtcttgttcccttgctcacctgatgatacggctgtgatggaagcactcgcggatccctagct

SEQ ID NO: 276982 - DNA, 37 bp, Homo sapiens; identical to SEQ ID NO: 220791
  chr22:38578432-38578469
  hypo

SEQ ID NO: 276983 - DNA, 36 bp, Homo sapiens
  chr22:38578709-38578745
  hypo
accacgcccggctccgaaatttttaacataagtata

SEQ ID NO: 276984 - DNA, 142 bp, Homo sapiens
  chr22:38592934-38593076
  hypo
gttcacgctcctaatgagactccaatgccagtgctgatcctacaggaggcggagctcaggcggtgacgctcactcagcccgctggttcctaacaggccacggacaaacagtactggtcctcagcctgcgatttggggacccc

SEQ ID NO: 276985 - DNA, 364 bp, Homo sapiens
  chr22:38618369-38618733
  hypo
ttgtgaactcttggaaacatcgtgaaatgccccgatatcccatgaacagcactgtgcccccagaagaaggcggggcatattccagaacgagaaacgaggacggaagcaggcaagctctacagagggtggcccttgacaggtgctctgggcgctcccacccagggggtgccggtggggaggagatgaggacacggagaagagctacagagagacgcatgccagtgacagtgaccagaactgacatgcaggacagacatgcagaccaagagcgggacctaccgtaagggccgtatgttggcactgcccgcggccaaaccccgggcaaaagcagggcaaggggggcggggagagaagccaaagaaat

SEQ ID NO: 276986 - DNA, 386 bp, Homo sapiens
  chr22:38633207-38633593
  hypo
gaaggagttatccccgcttacagataaggaaattcaggcatggagcacctaagacacttaccccaagagcccccgggctttgagaaaagactcagtacttgccctctcacgtttctgcgtgcagctcccagggtcaggaggcagacacactcatataacttgctataacttcaatacacactcgctgtgtgcctactgtgtgccacacactgcgtgcgggaccccgatgaccctgggcacactgggccattctaagctcaccccctgtgcacaccttcagcgcctaaagctggcctcatggcccagccttctgctgcagagaaacactctggttacttggaaagactgggggcattctgtatttcagataacgggtggatgagcct

SEQ ID NO: 276987 - DNA, 114 bp, Homo sapiens
  chr22:38634943-38635057
  hypo
gctaacagtgatgaaaaacacgtgggaaaactgtgaaatgccacgcaaacattcctaacaaacagcaactgcataaagcgacatacggacaccgcctcctgcctctgaacccca

SEQ ID NO: 276988 - DNA, 89 bp, Homo sapiens
  chr22:38639963-38640052
  hypo
tggcggggaacagacggatggaaaggagggaccccacgcagagcagaagagcttcccaggccggggacacagcacgtatcaagcccttg

SEQ ID NO: 276989 - DNA, 123 bp, Homo sapiens
  chr22:38687260-38687383
  hypo
tagacacaggagaacgggaattcgggctggcaggcggggcgggccgtggcacctgctgtcttgggaaacacaggtcaatacatccacacacacacacacacacacacacgcaggggacgccgg

SEQ ID NO: 276990 - DNA, 558 bp, Homo sapiens
  chr22:38694440-38694998
  hypo
gcagaacaggagcagcaggacggtgtaggcagcaatcagggcagcagggggcgccgccagcaccacccatgccctgctgcgggcacccaggagggaccccaggtgaagccagatcctccttgttccgacgggagacagcgccctgcctggccctgctgcccatggtggcacaagctgtcagcacggatgaggctggagggctctgggaccccagtgaggtcaaccacactgtccagctcgtacctcccgtctgtcgggagcccctcccgccaccagctcactctggccctctgagtcagggccttccccatccagtcccccaagcccgccttggcctccaggtgactcacgaatttcagcatgttccagtcaaagacgtagtcataggagaagccctgccggtggaagaggttgcggaagagctgacgtaggtaagagtagtcgggcttgtcgtcaaaccgcagggagcggcagaagttgaggtatgttgagaattcggctggagggtgttgcagaggatagagaaggccactgtgaggcccacgctcccagaccccc

SEQ ID NO: 276991 - DNA, 38 bp, Homo sapiens; identical to SEQ ID NO: 220794
  chr22:38695215-38695253
  hypo

SEQ ID NO: 276992 - DNA, 127 bp, Homo sapiens
  chr22:38742147-38742274
  hypo
cattttactggcgccggccttcttcagcgtcaactttctggtcgtttgaccaaagtggaccattgtttccccaaattacactttaataaaaaaaaaagaagaaaagctaagccgattgaatgatggt

SEQ ID NO: 276993 - DNA, 54 bp, Homo sapiens
  chr22:38795422-38795476
  hypo
tttaaatgagtatcttcagaaagctatttaattgttctgatttttttttttctg

SEQ ID NO: 276994 - DNA, 53 bp, Homo sapiens
  chr22:38795506-38795559
  hypo
agatttctaaacttagactaggttccaagaatctacttggttttgatagaaat

SEQ ID NO: 276995 - DNA, 93 bp, Homo sapiens
  chr22:38818418-38818511
  hypo
tccatcaatacccagaaaagtcaatacctggaaaaaactgcaatgagaaaagctagacgcaggaagcagtcatctgatcgcagccatgggctc

SEQ ID NO: 276996 - DNA, 158 bp, Homo sapiens
  chr22:38827317-38827475
  hypo
gattgggcatcccctcgccagcagtgcccactcctccccattatcgagtgcccagggtcaattctgagcttccacaatcctcagccccagcggcaacactcactccccaggcccaccagcccactggcctccacagtgcagcccgatggggacatggt

SEQ ID NO: 276997 - DNA, 69 bp, Homo sapiens
  chr22:38845518-38845587
  hypo
agccctcacgcatgcgcatgcgtgtgtgcctgtgtctgtgcctgagcatgcacgcgcaggctgaaaggg

SEQ ID NO: 276998 - DNA, 159 bp, Homo sapiens
  chr22:38874142-38874301
  hypo
aaaaaagactgcttcgaggaaataactccaaataggagtacaaataggagtgctctaggccagtgtggtcctgctccggcagtatcagcgtcacttgggaaacttgttagaaatacaaacttttaaggctgggctcggtggctcatgcctataatccca

SEQ ID NO: 276999 - DNA, 139 bp, Homo sapiens
  chr22:38884002-38884141
  hypo
aagaaggtataggcggtacccttgttggtgctacgggctgttcggccaatacggtgcacataatcctctgagctgtttggatagtcatagttgatcacaaacttgacatcttccacatcttccacgtcaatgatgagtc

SEQ ID NO: 277000 - DNA, 81 bp, Homo sapiens
  chr22:38885334-38885415
  hypo
gggaccactggagcgcggggagcatgcatcaagggtccgtggcagtgagaagtccccacacacgctcgctctgtgaactgg

SEQ ID NO: 277001 - DNA, 148 bp, Homo sapiens
  chr22:38904742-38904890
  hypo
tacttgttcaccaccgtgacccagtgcctacctggcacagtgcctgaccttttagccattcgaccacgccatacccttgtccagtgagtctgtgactgtccctttgtgtttctgggccaactgacatctcaacggcttttgttttttg

SEQ ID NO: 277002 - DNA, 84 bp, Homo sapiens; identical to SEQ ID NO: 220797
  chr22:38995555-38995639
  hypo

SEQ ID NO: 277003 - DNA, 154 bp, Homo sapiens
  chr22:39122031-39122185
  hypo
ctccaacgttacaggcgagaacctagatctgctgaagatgttcctcaacctcctctccccccgcaccagctacagggaggaggagcctgctgagtttcagattgatgacacctactccgtcccggtaagtggctctgggcgggtagctgggtgg

SEQ ID NO: 277004 - DNA, 229 bp, Homo sapiens; identical to SEQ ID NO: 220798
  chr22:39132169-39132398
  hypo

SEQ ID NO: 277005 - DNA, 71 bp, Homo sapiens
  chr22:39144764-39144835
  hypo
aacgtcttcagggacgagaagcgcctggaccacgcgggagggcaggacgggggaggcggaggtgtgagggg

SEQ ID NO: 277006 - DNA, 341 bp, Homo sapiens
  chr22:39148552-39148893
  hypo
caccgagctccctccgctgctgctgctgccgtcatcgtcaccctgggagtagcgcgtgaggcgctggcttcttcgggacatgatgaggtgggatgtggactcttcccctgaagagaatctaaggagagagaggaggaggactggatgtgaggcctggggctgtccccagctcctctctagaggaggtgggacagaggcatcgcctcacagccgagaacagaccacccccccggcccccggcccccggcgttcagtctaaacagccctgatggggggcaaggcagggatctgtgaagcacccctgcactgtgcagcggctggagtcacgcccggcctggggc

SEQ ID NO: 277007 - DNA, 97 bp, Homo sapiens
  chr22:39149136-39149233
  hypo
tgctgacatgtgctcgttcatcgagggccccaacgaaccttgatggaaaacctttcccatgtagaccccacctatgttctttttttttttttttttt

SEQ ID NO: 277008 - DNA, 42 bp, Homo sapiens
  chr22:39175179-39175221
  hypo
tctaccctgtcacaccgccccaccccacgtctcccacacaga

SEQ ID NO: 277009 - DNA, 286 bp, Homo sapiens
  chr22:39411545-39411831
  hypo
tgaggactccggtgcgggggtctctgcattggggtttctctcttgtgccttcagaaacccgatgaaggcaatgtatccaggcacattctacttccaatttaaaaacctatgggaagccaacgatcggaacgaaacttggctgtgcttcaccgtggaaggtataaagcgccgctcagttgtctcctggaagacgggcgtcttccgaaaccaggtagcaccaaagtcctagttacaccctaaataggagctaagcagctgggaatgcagaaaacgcaacaataagtga

SEQ ID NO: 277010 - DNA, 89 bp, Homo sapiens; identical to SEQ ID NO: 220801
  chr22:39424923-39425012
  hypo

SEQ ID NO: 277011 - DNA, 83 bp, Homo sapiens; identical to SEQ ID NO: 220802
  chr22:39425582-39425665
  hypo

SEQ ID NO: 277012 - DNA, 95 bp, Homo sapiens
  chr22:39444961-39445056
  hypo
cctgggcagcagagggagactatgtcccaaacaaaaacaaaaacaaaaaaaacaaaaagagtagcctgggcctgggaattcggtgtgataccaac

SEQ ID NO: 277013 - DNA, 120 bp, Homo sapiens
  chr22:39449270-39449390
  hypo
gattacaggcgtgagccactggcccggcggcacaaccaaatcttattaaactcaccctaggctggccgcggtgactcatgcctataatcccccagcaatttgggaggcagaggtgagaga

SEQ ID NO: 277014 - DNA, 204 bp, Homo sapiens
  chr22:39474506-39474710
  hypo
cctcctctgtaagacgggaatggcccctgccagcctagggcagcctcacatgagctcacccccgcgcagcacttagaagactggcctgggcctcagaattcggttctaccatgatttaacaataataatatacagaggtgaaatgtcaggaaggaactgagctgaaaggttaaaagctgttattttggggtgaagagttttatt

SEQ ID NO: 277015 - DNA, 120 bp, Homo sapiens
  chr22:39475634-39475754
  hypo
atatttaattaatccaatgtggctaacatattacttcaacattaattaacataaaattcttgacaagataatgaagtttctttttcttgtcacaccgagtctttgaaatgagctgcgtgg

SEQ ID NO: 277016 - DNA, 123 bp, Homo sapiens; identical to SEQ ID NO: 220803
  chr22:39529109-39529232
  hypo

SEQ ID NO: 277017 - DNA, 140 bp, Homo sapiens
  chr22:39530873-39531013
  hypo
ctccttcccatgccacggctggccatcaccccaccccaccccagcccagagagtgcgccccgggcaaccccagggtcggccagctcagccctgcctctgggccccacagagcactcgcgtcccagcgtttactcctttga

SEQ ID NO: 277018 - DNA, 39 bp, Homo sapiens; identical to SEQ ID NO: 220805
  chr22:39571321-39571360
  hypo

SEQ ID NO: 277019 - DNA, 133 bp, Homo sapiens
  chr22:39686245-39686378
  hypo
ttgcagatgggaagagaggacgtccacactgtccacgagctcagcgcacagtaggtgctcaggacttcctcccagagactcgacaccccaagtcttcgcgttgtgccccctcgtgtcagagccactctcctct

SEQ ID NO: 277020 - DNA, 311 bp, Homo sapiens
  chr22:39687860-39688171
  hypo
aagaccccattccacgaggagagaaagagggagagtgaaggaggtgaattgggcagcaagagatgttttaatccaaggaaaaccctacagggcgatcagagaccccttacacagacgaggccccgacggttggtggcacagggaaccgacgcctgcccccatcactcttccaaggccccacagaggttgctcaggcttgcagggggtggggacccaggaaggctcggtcagccagcgcctccctgggccattccaggctctgagctgccgtgtggcggggtgggcaggctgccagccgagggagcccacca

SEQ ID NO: 277021 - DNA, 356 bp, Homo sapiens
  chr22:39690525-39690881
  hypo
ggactcctcgctccgcactggacacccctgcactgccttctgggtgtgccaggttggcatggggaggctgggctcacacccaaatcaggacatagcctatcgtgagggtctgggtgagctgggaggtgttcagaatagaagagcaacccatgaaggctccccggaggaagcaggcctggcgctgagtcacaggagcctggggcagggtaacccccacctgaagtcactgtctccccagcagtgacatcattagcaagccagaatgcgcagggcatacagctggaggaccaggcaagctgaggcgggggccaagtgggtagttcggggccaacccccatcagcggccaatggcctct

SEQ ID NO: 277022 - DNA, 41 bp, Homo sapiens
  chr22:39744066-39744107
  hypo
gtgctgggattataggcgtgagccaccgcggatgctgggca

SEQ ID NO: 277023 - DNA, 154 bp, Homo sapiens; identical to SEQ ID NO: 220808
  chr22:39755185-39755339
  hypo

SEQ ID NO: 277024 - DNA, 237 bp, Homo sapiens
  chr22:39756397-39756634
  hypo
cacacgcactccccacgggctctctcgcccctcctcgccatcttctcaggctcattcctgaccttcacattgccaatctcatggccaactgtcattgatggatctctcagcagcgtctggcagccgtgaggggtttatgcatcctcccttgaatccaaacggctgcagaatgtggacgccctcaccccgctcgccgcagaatgtggacaccctcaccccgctcgtcctctctttaat

SEQ ID NO: 277025 - DNA, 229 bp, Homo sapiens
  chr22:39770342-39770571
  hypo
gctccatcgtgaacgagggctacctcaacagcgcctccgagggggaggagttctgcatctacaaccgcaaccccaacgcctgcagctatggcgtggccgtgggcgtgctcgccttcctcacctgcctgctgtacctggccctggacgtgtacttcccgcagatcagcagcgtcaaggaccgcaagaaagccgtcctgtccgacatcggtgtctcgggtgagccccaccc

SEQ ID NO: 277026 - DNA, 149 bp, Homo sapiens
  chr22:39772140-39772289
  hypo
acgaagggacggacgcagcccgggccgccatcgccttctcctttttctccatcttcacctgggtgagtacagccaccgcgcaccagcccacactcgtcccctttccccactgagcccctggatgggtggcctttcgctagcctgggacc

SEQ ID NO: 277027 - DNA, 136 bp, Homo sapiens; identical to SEQ ID NO: 220811
  chr22:39773595-39773731
  hypo

SEQ ID NO: 277028 - DNA, 230 bp, Homo sapiens
  chr22:39777671-39777901
  hypo
tccttgtcctcgccggcctttgtccccaggcgggccaggctgtgctggccttccagcggtaccagattggcgccgactcggccctcttctcccaggactacatggaccccagccaggactccagcatgccttacgcgccctacgtggagcccactgggccggatcccgccggtatgggcggcacctaccagcagccggccaacaccttcgacaccgagccccagggctac

SEQ ID NO: 277029 - DNA, 98 bp, Homo sapiens
  chr22:39778980-39779078
  hypo
actggcccgaggtcacggtgagtgagtggcaaagctggccctgacgcctgggtttcttggccccagctgcccagcaggtgcctcgattccctgccctt

SEQ ID NO: 277030 - DNA, 36 bp, Homo sapiens
  chr22:39785123-39785159
  hypo
agggccgggcacggcgcctcacgctgtaatcccagc

SEQ ID NO: 277031 - DNA, 49 bp, Homo sapiens; identical to SEQ ID NO: 220812
  chr22:39872956-39873005
  hypo

SEQ ID NO: 277032 - DNA, 210 bp, Homo sapiens
  chr22:39877226-39877436
  hypo
aacattcttccctggcgccctctcctgcgtggagtctgctcacgtcgcctcctcggtgagcctgccctgcccactccattcatcactggacataatgacgcactcgctcctgcccgttacccgctttgtctttctccagagcacagcctctttgggcgcgcagttttctgagctgactagtgtgtttgtagtttacgcaggctccctacc

SEQ ID NO: 277033 - DNA, 363 bp, Homo sapiens
  chr22:39907959-39908322
  hypo
acagggacatgaagacgggcctgagccggtccttgcagacccttcccacagactcctccaccttcgacacaggtgagaagggctgctgcccctcctgggacctctctggactttcagtaccactcctgcactcagcagatgtttcctgagcacatctgtgccaggcactgtgccagcacttgccctccatgccaggcccttctttctggggctgaggcagctgtggactgagcaggcatgggcagagctcacgtgcctctctctcttgccttggcagatacattctgcccgccccggcccaagccagtggccaggaagggccaggtagacttgaagaagtcacgactccgcatgtccctgcag

SEQ ID NO: 277034 - DNA, 37 bp, Homo sapiens
  chr22:39930313-39930350
  hypo
tctaggcggagaccgctgtagcgaggacctatcccct

SEQ ID NO: 277035 - DNA, 131 bp, Homo sapiens
  chr22:40024709-40024840
  hypo
tgattagttggcgccggcaatggcaggagcagcagacggcctctcccagccgcccagcccctttactgacctggccagtccagggagagtggcccccagtggccaggccacagcctcggctcccctcgccc

SEQ ID NO: 277036 - DNA, 141 bp, Homo sapiens
  chr22:40025211-40025352
  hypo
ccacatgacgctcccgggccagactgttctcccctgaactccagaccccaagatctggcaaagcgactccatggggatgtaccccggccatcccaagctccacatctccagatggagccccacccccgctgaaggccgctc

SEQ ID NO: 277037 - DNA, 135 bp, Homo sapiens
  chr22:40025722-40025857
  hypo
cccccgggaggcagcgaccacacagctgtggagcccacaggcctgaccccctttcagagatgtgtatgccgttcggggcgctgtccacaggggcgtctgcacaggatcctgcagactgtgcggctgatgctctct

SEQ ID NO: 277038 - DNA, 220 bp, Homo sapiens; identical to SEQ ID NO: 220814
  chr22:40026479-40026699
  hypo

SEQ ID NO: 277039 - DNA, 204 bp, Homo sapiens
  chr22:40033278-40033482
  hypo
accaatggggcttctcgcttcacagaggaccagtgggacttcttgcttctcagaggatgtgaacttgagctgaacctaaaagattcaagaaaaatgtctccaggcagatggggggacagggagtaggtggggagggtactcttgatcgaggcaaccccactgctgcggtgtggcgtgtgggttagaaatcggagccccagcctg

SEQ ID NO: 277040 - DNA, 326 bp, Homo sapiens
  chr22:40042592-40042918
  hypo
tcaacctgtgcctcgttgtcatagcgacccagttctcggagaccaagcaacgggagcaccggctgatgctggagcagcggcagcgctacctgtcctccagcacggtggccagctacgccgagcctggcgactgctacgaggagatcttccagtatgtctgccacatcctgcgcaaggccaagcgccgcgccctgggcctctaccaggccctgcagagccggcgccaggccctgggcccggaggccccggcccccgccaaacctgggccccacgccaaggagccccggcactaccgtaagtggccctgcatccgacgcggcactcag

SEQ ID NO: 277041 - DNA, 735 bp, Homo sapiens
  chr22:40045203-40045938
  hypo
atggccggtcagcacggatgcgcgccctgcaccgtgctgggcccatcatgtgccttaagggagagaatcctcctacagcctgcatggtgggcgttcctgccccaacttctacaacaggggcagacaaagctcagagagctgcagccgcttccccaggcacccctgaccgcctttccaggctgggtcggctggttccaggcagacctgtgggcctgggagccaagcgcactcagggatgtgtcccagggtggattgggcctggtgtgggcaacgactctatgcccctctcatttgcttttcagagctgtgcccgcaacatagccccctggatgcgacgccccacaccctggtgcagcccatccccgccacgctggcttccgatcccgccagctgcccttgctgccagcatgaggacggccggcggccctcgggcctgggcagcaccgactcgggccaggagggctcgggctccgggagctccgctggtggcgaggacgaggcggatggggacggggcccggagcagcgaggacggagcctcctcagaactggggaaggaggaggaggaggaggagcaggcggatggggcggtctggctgtgcggggatgtgtggcgggagacgcgagccaagctgcgcggcatcgtggacagcaagtacttcaaccggggcatcatgatggccatcctggtcaacaccgtcagcatgggcatcgagcaccacgagcaggccagtgc

SEQ ID NO: 277042 - DNA, 71 bp, Homo sapiens
  chr22:40061913-40061984
  hypo
tgggcgtggacacccgcaacatcaccaaccgctcggactgcatggccgccaactaccgctgggtccatcac

SEQ ID NO: 277043 - DNA, 546 bp, Homo sapiens
  chr22:40074972-40075518
  hypo
ggggcagggcagcccggggccatctcgggggttgaatctcggtcttgctgcctccgagcgtggccctgggctggcctctgcctccagcagcctctgggatgtctccgtcctcatcctcaccgccctccctgccacgcaggacacgctgcgggactgcacccacgacgagcgcagctgcctgagcagcctgcagtttgtgtcgccgctgtacttcgtgagcttcgtgctcaccgcgcagttcgtgctcatcaacgtggtggtggctgtgctcatgaagcacctggacgacagcaacaaggaggcgcaggaggacgccgagatggatgccgagctcgagctggagatggcccatggcctgggccctggcccgaggctgcctaccggctccccgggcgcccctggccgagggccgggaggggcgggcggcgggggcgacaccgagggcggcttgtgccggcgctgctactcgcctgcccaggtgggcaggggctggagaggtgtgagggtcgccagagggggggcaccgcagggccagatgggcagcag

SEQ ID NO: 277044 - DNA, 166 bp, Homo sapiens
  chr22:40083965-40084131
  hypo
tgctaagaccccctccgagggcttcaggggggcctgccaagggggggccttgttcttgttcccaaactctgacttggaagaactcagcttgtggccgggctggtgagggtgtggggtgcgcccttcccttttgggctgagggagagggggccgggaggggttgtca

SEQ ID NO: 277045 - DNA, 313 bp, Homo sapiens; identical to SEQ ID NO: 220819
  chr22:40089236-40089549
  hypo

SEQ ID NO: 277046 - DNA, 87 bp, Homo sapiens
  chr22:40226344-40226431
  hypo
gctggaattacaggtgcgagccactgtgcccggcccctaaaataatctgtcttttcagtcagtgagctattacgaaattaaagaaca

SEQ ID NO: 277047 - DNA, 39 bp, Homo sapiens; identical to SEQ ID NO: 220820
  chr22:40262908-40262947
  hypo

SEQ ID NO: 277048 - DNA, 98 bp, Homo sapiens
  chr22:40320324-40320422
  hypo
gggaaaaagaacttcgggcagtagcactgtgacaatcatcaccacggtcgtactttccatgagttttacgcagtaggctcacggaagtgacaatgcat

SEQ ID NO: 277049 - DNA, 200 bp, Homo sapiens
  chr22:40348320-40348520
  hypo
gcacccggcctcaacgtgtggttcttacggtgacaaggtagtttccaaatggcctcttttacccctttctgtgtgacatttgctaccctggccaaacaccacattcccatgtgacgggagaaaggaattccaatgccatgaattcagaagcgatggatggagtgcagtgtgctcttgtgtttttacgtggctacgaggcg

SEQ ID NO: 277050 - DNA, 180 bp, Homo sapiens
  chr22:40360353-40360533
  hypo
gtctggggaaggggcggcaggcgccatgtccagccacgaaggtggcaagaagaaggcactgaaacagcccaagaagcaggccaaggagatggacgaggaagagaaggctttcaagcagaaacaaaaagaggagcagaagaaactcgaggtgctaaaagcgaaggtcgtggggaaggggcc

SEQ ID NO: 277051 - DNA, 84 bp, Homo sapiens
  chr22:40380593-40380677
  hypo
agctgggtgtggtggcgcacctgtattcccatctacttgggagctgggagagggagctcccgcgtagggagaatcacttgatca

SEQ ID NO: 277052 - DNA, 649 bp, Homo sapiens
  chr22:40417215-40417864
  hypo
ggggcaggtgggggcgggggcagggcaagagagaggcctgggcacatgtgtcttgcttttctgtccccacgttcccaggttcacctggagttcctcccatgtggacagaaacctcctcctgctcctgacaggacagaacgtagagccctttgacacggagttccgggagctgtacgccatctccgaggaggtggacttgtaccggcagctgagcctggcgggcagggttggcctccattactcctccactgtggctcgaaagcttatcaaccccaagtacgccttggtgtcaggctgccgccacccgcctggggagatgatgcgctgggctgcccggcaacagcgggaggcgggcggcaacccggaggggcaggaggagggcgccagcggtggcgagtcggcctggcgcctggagagcttcctgaaagacctggttacggtggagcaggtgctgccccccgtggagcccatccccttgggagagctgagccagaaggatggcaggatggtctctcacatgcacagagacctgaagcccaaatcccgagaggcacccagccgaaacggcatgggagaagcggcccggggggaggccgcccccgccaggcgcttcagcagcaggctcttcagtcgccgagccaagaggcct

SEQ ID NO: 277053 - DNA, 108 bp, Homo sapiens; identical to SEQ ID NO: 220821
  chr22:40444189-40444297
  hypo

SEQ ID NO: 277054 - DNA, 79 bp, Homo sapiens; identical to SEQ ID NO: 220822
  chr22:40593308-40593387
  hypo

SEQ ID NO: 277055 - DNA, 55 bp, Homo sapiens
  chr22:40620809-40620864
  hypo
tgatcttatgaagtcgtgtgtggttcttgagtgccttctccgggcgccgtgtgcc

SEQ ID NO: 277056 - DNA, 39 bp, Homo sapiens; identical to SEQ ID NO: 220823
  chr22:40621438-40621477
  hypo

SEQ ID NO: 277057 - DNA, 40 bp, Homo sapiens; identical to SEQ ID NO: 220824
  chr22:40624792-40624832
  hypo

SEQ ID NO: 277058 - DNA, 198 bp, Homo sapiens
  chr22:40642784-40642982
  hypo
ttttgttccacccacggtgctgttgtctagatgagtctaccttgggagaattacaagtagaaacccctctcggaaaggatctagtgagcccacgtagtgctttggaggatatggcattgtgtggctttgaggaattgcttagagaaaacaagagatgctaaaagaaaaaaggcaaagggccaacggctgtcacctgtc

SEQ ID NO: 277059 - DNA, 282 bp, Homo sapiens
  chr22:40693256-40693538
  hypo
attcctaggctgatcgtttcatattgaaaggaagctttagcggcatatgactagattatcctcagctctatcaagttcagcattcccatccgtgacgggatgggggaacacaaactgggaataagtagaataataggatcaacaagaacttggtggggtgactgtgaagttaaatatgatagaggttcattcatttaatagatatttatggagcatcttctatatgccatgctcataaagatatacgtaaggtcttaagctcaaattaaaaaatcaataaaa

SEQ ID NO: 277060 - DNA, 37 bp, Homo sapiens
  chr22:40764628-40764665
  hypo
taaaaaatcttgaaaagggccgggtgcggtggtggct

SEQ ID NO: 277061 - DNA, 338 bp, Homo sapiens
  chr22:40804024-40804362
  hypo
ctgtcctcggccctcgtggttgctccttacagggcctgtttttcccacaggctggtttccagccaagttcgtggaagtcctggatgagcgcagcaaagaggtgaggggggtgggcgggctaggcacggctggcacccttctagccagggcctgcgtgcctagcgagtcctggcctgtagcatggcagagaggacagaggagggtgactggctgcaggcgtcaggcagggctttctcagacccatccctcccatcagtactccatcgcgggggatgactcggtgacggagggggtcacagacctcgtgcgagggaccctctgcccggcccttaaggccc

SEQ ID NO: 277062 - DNA, 220 bp, Homo sapiens
  chr22:40812787-40813007
  hypo
ttccagctgaaggacggcaccttccctggtcctctcgcccaggccttggagacgggagggctcacagccaccactgcatccacagtgcttgcccaagactggtcacgcacggaagcattcaataaaaacaaaccaacccagggctagagacacctatgaacagagaaggccgtcagggaggcagcaggggacctggggttacctccgctctgaatgagaa

SEQ ID NO: 277063 - DNA, 154 bp, Homo sapiens
  chr22:40815004-40815158
  hypo
catctcaccaaaggtgtccccgggggtggagttttcatcgcccgtgctgagcagtgagcgctccgagggggtgggagacacggggggcgtggagcccgtgctgccaaacttcaccaccccactgctggccaccgtggccaccaccacctcagct

SEQ ID NO: 277064 - DNA, 35 bp, Homo sapiens
  chr22:40896203-40896238
  hypo
attacaggcatgagccaccgcgcccggcccagtct

SEQ ID NO: 277065 - DNA, 41 bp, Homo sapiens
  chr22:40911584-40911625
  hypo
tacctgggtggctggggcacgagaatcgtttgaactcaggt

SEQ ID NO: 277066 - DNA, 34 bp, Homo sapiens; identical to SEQ ID NO: 220826
  chr22:40912133-40912167
  hypo

SEQ ID NO: 277067 - DNA, 256 bp, Homo sapiens
  chr22:41034283-41034539
  hypo
atcttggagttagacgggatcctcgtgggctcttagtcacacacaccttccccaaggcaaaaattcttgcacaaaatacctgataaaattatttattcgataaatattttttgagtaagaacactgagggggtaagctagatgagatacagtcactaccctgggggtgcttacaccaaactggaggatgctaaggcacgtactgcggtgactgcaatgccaggccggtatcccaggtgactaaaacaggatgcagg

SEQ ID NO: 277068 - DNA, 203 bp, Homo sapiens
  chr22:41044524-41044727
  hypo
ttcaaagcctggctctgccccgagccatgtgaccttaggaaatagactgtgtccctgagtttcaatctcgtcacctgtaaattaggagtaaccatacagatcgcaagtcaacacctgcccttgcaccgctgcggggctcagcggtcactgacatgcagtgaaaaagtggaagttctagctgggcgcggtggcttatgtctgta

SEQ ID NO: 277069 - DNA, 208 bp, Homo sapiens
  chr22:41048754-41048962
  hypo
ttgagagttcaacgcggagaacctgctctgtgccaggcccccacctgggaggtgtgggcaaccttcctgccttccgggtgctcagagtctagtctggagacaataagaaaaatggttaatcaccatggaatgtgctagcgccttagcccgaagcaggggtctggttattgaggtttgttgaaggaagatgcctgtaagggctgggtgc

SEQ ID NO: 277070 - DNA, 149 bp, Homo sapiens
  chr22:41087989-41088138
  hypo
cacacaaagcaatgaaagaacgaagcaacaaaagaagaaacaagcaacgaaagcgcagatttattgacgtgaaagtacagagcgtgagccggctcaagcaagtgggttaaaagtcccgattacaatgttctttagggtttttattaagc

SEQ ID NO: 277071 - DNA, 96 bp, Homo sapiens; identical to SEQ ID NO: 220827
  chr22:41156760-41156856
  hypo

SEQ ID NO: 277072 - DNA, 35 bp, Homo sapiens
  chr22:41157096-41157131
  hypo
caaagcgagactccgtctcaaaaaaataataataa

SEQ ID NO: 277073 - DNA, 35 bp, Homo sapiens
  chr22:41177928-41177963
  hypo
tcttctgccagttccggccgggtgcggttgctcac

SEQ ID NO: 277074 - DNA, 120 bp, Homo sapiens
  chr22:41398409-41398529
  hypo
tccggcaaatctcccgatattaaatgagttttgaacactcctcagtatcaggcactggggatacatagatgagcatggcagataagggctcaggaagaactgtagattgttgaagagtca

SEQ ID NO: 277075 - DNA, 139 bp, Homo sapiens; identical to SEQ ID NO: 220828
  chr22:41486563-41486702
  hypo

SEQ ID NO: 277076 - DNA, 204 bp, Homo sapiens; identical to SEQ ID NO: 220829
  chr22:41536178-41536382
  hypo

SEQ ID NO: 277077 - DNA, 159 bp, Homo sapiens
  chr22:41573032-41573191
  hypo
ggaaaaccaatggcgggtgccccatctgcaagcagctcattgccctctgctgctaccatgccaagcactgccaggagaacaaatgcccggtgccgttctgcctaaacatcaagcagaagctccggcagcaacagctgcagcaccgactacagcaggccc

SEQ ID NO: 277078 - DNA, 541 bp, Homo sapiens
  chr22:41634441-41634982
  hypo
tgagccgtctcagggcgggcaggccagccagggcctcgggggccagcacgctgagcgcgttgtgcgacagccgcagccagcggacgcgcagtagcccctggaaggccatggcgggcaggtaaaccagggcgttgtgggccaggtttagcgtggccagcgcacccagtgccccgaacgtccccggccgcagctcctccagtgcgttcccctccagctccagccgccgcaacgagcccagcccgtccagcgcctcctggggcagctcacgcaggtggttggaggccaggttgagcaggagcaggcggcccaggccacggaaggcgccctcggccaccagctccacctcgcagtggcgcaggtccaggtgtgtgaggtgaggcacgccctggaaggcggctgcggggatcaccttcagcaaattgccctgcaggtccagccgctgggtcagctggggacagcgaggagaaagtggggctgagccaggcagggaccccgcctttgcaagtgctgcttcttccccggaacactcttttctcctgtc

SEQ ID NO: 277079 - DNA, 420 bp, Homo sapiens; identical to SEQ ID NO: 220831
  chr22:41639282-41639702
  hypo

SEQ ID NO: 277080 - DNA, 135 bp, Homo sapiens; identical to SEQ ID NO: 220832
  chr22:41641907-41642042
  hypo

SEQ ID NO: 277081 - DNA, 802 bp, Homo sapiens
  chr22:41656916-41657718
  hypo
ttctgctggcactcacgatcggggactcagcaatgtcctgcggggatggggagaggagagtggaagaggagtggggataaggtcacctgagagcacgtcatttggcacctgagccctgcggctgcccctgcctatctccctgtcttggaggtctggtatgttccttctctgtgccccacaccagtggctgggccaggctactgtcagcactcgcaccatctcacttcaccacttctgagcctggcagatgacactccttggtcagagtggcctgcctggcctgaagccccataggggctggctcaccagtgggagccagtcacacacctttccggaaagtcacacacctttccagaaatgcacgacaggaattctggctcattttcggatgggttaacaggcttggagagggcacgtgacgccccaggtctcttggttgagtgccagccctgggattagcatccagaactgtcagcctactatgccgagtgcacctcaaggctgcaggggcaggatggacagaaaccactcaccctaaaagcttctgccaaggcagtggcgccatcattctccagacggtttctgccagccacaaagaccttcagggccagaggcttgccttgggcactggatttccggtgacattcggtcagagctgcagccaggatctgtggggaaaggcaaggggccctggtcatgggcaggagccccttctcccagcggggtggccactgctgctgaactgctcttcaacatcccacgccacccatcggtgcaggtcaggggacgcaggactgctaac

SEQ ID NO: 277082 - DNA, 110 bp, Homo sapiens; identical to SEQ ID NO: 220835
  chr22:41658259-41658369
  hypo

SEQ ID NO: 277083 - DNA, 87 bp, Homo sapiens; identical to SEQ ID NO: 220836
  chr22:41664703-41664790
  hypo

SEQ ID NO: 277084 - DNA, 224 bp, Homo sapiens
  chr22:41666686-41666910
  hypo
acgtgatctgctcccaccgtacatactaaggaagctggtttttgcagaaaaatccgcatatccaccaataaagcagaccatgaacacacctggggcctcagctgtctgctctacaccagatctgcttagtagttccacctgcacgtgggtccacagggccaggaacaggcagccggagccggagcgccacagtccctcacaacagataccggcaggtcattcgg

SEQ ID NO: 277085 - DNA, 524 bp, Homo sapiens
  chr22:41667721-41668245
  hypo
ctgacacctggactccacctcagcctactcctagttgtgtgactctgggctacacttctctcgcccgtcaagacctcactcctcacttgcacactgctgcagcagcagagagaacccctctggcatcagcactacgcccggaacactgggccatcaagggcagatcccaccctgcccctgccctgggctgcttcctgcacagaggagggcctaggaggtggtgtgcagtgattcactcgagccactgcatctgtagcaggcgggaaggtgcatgcagcactcctaccggccaggctctcccaggacaacctctgaggaagaaggaagggctctatctcctatttcatataagagcccagcctcagagctgcacgcagggcaaggccacgtacggcaaacaaggtggtgctgttagggcttgatcccatgtgccgaaagcaagctcagctcctgctgagtcctgtagccttcaggcccatggctccttcattcctgttcttcacaggtctcggggagggctgagt

SEQ ID NO: 277086 - DNA, 44 bp, Homo sapiens; identical to SEQ ID NO: 220839
  chr22:41669065-41669109
  hypo

SEQ ID NO: 277087 - DNA, 164 bp, Homo sapiens; identical to SEQ ID NO: 220840
  chr22:41669352-41669516
  hypo

SEQ ID NO: 277088 - DNA, 103 bp, Homo sapiens; identical to SEQ ID NO: 220841
  chr22:41676091-41676194
  hypo

SEQ ID NO: 277089 - DNA, 88 bp, Homo sapiens
  chr22:41768561-41768649
  hypo
tcctgacaccaggctcgtgtctacccatagggtgggtacccatgtgggtaccatgtctcgggtcgtagctcttcgtcacccagccact

SEQ ID NO: 277090 - DNA, 160 bp, Homo sapiens; identical to SEQ ID NO: 220842
  chr22:41779337-41779497
  hypo

SEQ ID NO: 277091 - DNA, 265 bp, Homo sapiens
  chr22:41790057-41790322
  hypo
ccagtgggctgcttcgggaccacctgtctctgtgtcttttagaatcttccctggagaaggagagggagactcccagtcccatcgaccccaattgtgtggaagtggatgtgaacttcaatccggaccccgccgacctggtgctctccagtgtgccaggcggggagctcttcaaccctcggaagcacaagtttgctgaggaggacctgaagccccagcctatgatcaaaaaggccaagaaggtctttgtccccgacgagcagaaggt

SEQ ID NO: 277092 - DNA, 104 bp, Homo sapiens
  chr22:41839259-41839363
  hypo
aggtgtgtgtgtgtgtcacacgcgcgcgcatgtgtctgcctgctctaatgtcagaagcgaaggaagatttttttccccccctcgagacagtcttgctctgtagc

SEQ ID NO: 277093 - DNA, 43 bp, Homo sapiens
  chr22:41839903-41839946
  hypo
acaggcgtgagccaccgcacccggccggaaggtttttcagaaa

SEQ ID NO: 277094 - DNA, 180 bp, Homo sapiens
  chr22:41871436-41871616
  hypo
gccactgtgcctggctagtgggaagagagtgttgagtcttccttggctccagctttctttgacttgcctcgttttcccagcacctggtttggaaggcagtggtgggctctgggcctctcagcatgaaggaaggaaggtattgtagagagacttcttgtagcctttaaaaagcagcaaatg

SEQ ID NO: 277095 - DNA, 172 bp, Homo sapiens
  chr22:41877561-41877733
  hypo
agacctccgacctccgtcctttgggaagagagggcagcatgtctgactttggccgagtggggttgtggggagttctgagtgggtgtacatgtgatgtgccgtggggtgggcccttttcccatctgccacagctctgaacccgtgctgttgctcatcacggcttctgccagag

SEQ ID NO: 277096 - DNA, 567 bp, Homo sapiens
  chr22:41970755-41971322
  hypo
ccagtggagggcgacgaggtgacctacaagatgtgccctatccctcccaagaaccagaagttccaggccgtggaggtggtgctcactcagctggccccccacactccccacgagacgtggtctggccaggtcgtgggctcctaggctgagtggttcacaggccagctggccgggggttggggagccacacagggtgaacgggcagcagccggctccatgccccactgccctggctgatgagtccttcggtggcctcagtgtgcacgtctgtctgtccgtctgtgcttgtggctatgagcgtgtgcctccacccaccccacgacccgtgactactgtgcaagctggccaggaggtaggtggagggcaaggccaccagacctggcttcgcgctgtccactgcctctctcctcccctccctgccgcagacacgcaggacccgctcgccctcctgcttacccgtccccacggtgactgagctgcgagagcctgcgctgggctcactccctggcctccgcccctgagctgtcccgtgtcagtccctggcccggagccaggctctctgtgcta

SEQ ID NO: 277097 - DNA, 178 bp, Homo sapiens
  chr22:41973278-41973456
  hypo
gccaaactcttcagaagtcacgacacacagatgtgggccccggtcacgcctcatgagctgtctctgggaagaaaatctcccggcatcgctgcaccgtgtcctgaggagacaccacgctgtggccaacagtccgggggtcggcaaagatctcaaagtcgttcccaccctgcacacagag

SEQ ID NO: 277098 - DNA, 40 bp, Homo sapiens
  chr22:41995509-41995549
  hypo
gggaaagtccctatcagaaacgattctaaattttcttgcc

SEQ ID NO: 277099 - DNA, 97 bp, Homo sapiens; identical to SEQ ID NO: 220845
  chr22:42033731-42033828
  hypo

SEQ ID NO: 277100 - DNA, 31 bp, Homo sapiens; identical to SEQ ID NO: 220846
  chr22:42034495-42034526
  hypo

SEQ ID NO: 277101 - DNA, 537 bp, Homo sapiens
  chr22:42095789-42096326
  hypo
cagacccgctccggtgaacccgacgcgaaaccgggcccccgcgctgtgttcactctcctccctgtcagcccgtcccggacccggccgcagcggcctctcgggcccctcagccccaggccggcctgcgggcctccgtggagcccggtccactggctctgcgcctgaaaggacggaaatccggatcccccgggacctcacccagtctcagggacacaccttcccgccttccgccttctggctccttccctttgctgcccctgcctccatttcccggggattcggccttagctcaggctcccgccatttcagcctcccgccatttcagcctccactcacctgcgggccaggggcgcatgcggcggccgctcctcattcccttcagctgtcggggtgtgaatcggaggaggggcagtctgggctccgaggggacaggagtgacaggttacagccgggcagaagtgggggtgaacgggaagactgttccttgggcagagctggccaaagcgggctgcctgggtcctcattgcctaccgcgtt

SEQ ID NO: 277102 - DNA, 41 bp, Homo sapiens
  chr22:42109088-42109129
  hypo
atgcgtgagccaccgcgcccggctgggcattagaatttttt

SEQ ID NO: 277103 - DNA, 36 bp, Homo sapiens
  chr22:42256093-42256129
  hypo
ccaccgcgccaggccgacatggtgattcttaattgc

SEQ ID NO: 277104 - DNA, 36 bp, Homo sapiens
  chr22:42329321-42329357
  hypo
gtggggtcctcttcccgtgtgcggacagcggcaggg

SEQ ID NO: 277105 - DNA, 221 bp, Homo sapiens
  chr22:42395140-42395361
  hypo
agacgcatgtctcctcagggcggggcggggagggggtgcgagacgcgtgtgtccttcgaagagaggccggagctgaccggcggttgtgagcagccgggggccttcggtggcagcgtggctgcccttgggtgcctgcgactttgttggatgaggacaggtactgggtgtgtatctcctcctacttccacgaacaaggtgtcgctctttggtaagagggatga

SEQ ID NO: 277106 - DNA, 291 bp, Homo sapiens
  chr22:42667141-42667432
  hypo
aagagccctctgggccgggggcagcccaagacctagctggtcccgcctgggtccctggcagcccccgcccatgggttccaggtgtccgtggaggaacgacttgggtcctctcagagcctcagtttccaccgcggaaaacgcgaggagggaggcccacctacctcacctgtaaaacggacgctccagctgccttctgctgcggcattaagaagctgcaatgccaggctgactgcgcccagggtcccgaattaatttgccgataaggcggaggatttgcggtgccaaggcctc

SEQ ID NO: 277107 - DNA, 295 bp, Homo sapiens
  chr22:42669780-42670075
  hypo
cctctggctcaaagacggcttttggaaacactgtatcactccttttattacaaactcctctgccctcctccaggcgcctgggccactccaggattacaaatggagccttctgcctctaggtcactgattctactaccatctgtcagcgtggattgattgaggagactggccctgctcggcagatcagtgacttgtgcgaagtgagccagggtgtcggtgccttcagagcaggcggatgtccttcctcacttgccagctctcgtgagcagacacacagccctcacctttatccttc

SEQ ID NO: 277108 - DNA, 58 bp, Homo sapiens
  chr22:42706987-42707045
  hypo
atacccaagaaaatacggcctggagggaggaacacttaggaaccgtatggctggccca

SEQ ID NO: 277109 - DNA, 93 bp, Homo sapiens
  chr22:42713566-42713659
  hypo
gtggaaactgaggctcggagaggccaagtgactggcccaaggcagcaccctcagaggagggctctgctcctgcattcccgctgggggctgggg

SEQ ID NO: 277110 - DNA, 190 bp, Homo sapiens
  chr22:42733979-42734169
  hypo
cagggaagcctttgacgggctcagatgggccacatgcccctttctccaccagtcactgtggccagagggagggggtactgggccccacctgggtccagtgggggcatgcgtcccaggaagaaaaccctctgggcccaggtcctactctgtacacaactcccgcctcggtctccacgcgtcccctgagatc

SEQ ID NO: 277111 - DNA, 192 bp, Homo sapiens
  chr22:42744709-42744901
  hypo
cctggtgtaagggggcggtggctgccctggcaggcttccctcccgcagcctgccccataagccttgggctggacctccaggccgcagaggtggctgatctgtcacactggcggttgtgaagcaggtggcagcttctctgtagtcacctatgaaaggatctagcatttctgctttccccggttatcaaaacca

SEQ ID NO: 277112 - DNA, 42 bp, Homo sapiens
  chr22:42796231-42796273
  hypo
gtgtagcacttgacagtttacgaagtctgctgggacttgtcc

SEQ ID NO: 277113 - DNA, 200 bp, Homo sapiens
  chr22:42822800-42823000
  hypo
acgacccatgactcacgaccgaagatgagcactgagtcccctccctcactgtgccctcgagccctgtccctagggccaaagcctcacagaccctccctgaggggtcccaggtgccacgccctgaggccatcatggtactggatgtaccttcctattgctgtctgggaggatgctgagcacccaggcgggggggctcgtgg

SEQ ID NO: 277114 - DNA, 422 bp, Homo sapiens
  chr22:42829718-42830140
  hypo
gagaagtttcctaccgcgcagggggcaggcggggaccccagtgttattgactgttgatccatcacagtgatacatgctcacatatgtcacagtgagatgcagacccgctgcttcacgctattcctggctcctgggagtagcaggttgtctaagcaccttgatgccatggtgatagacctcgtgtcaatgcctcagggtacacggggagcattggaaaagcatcggtctgtgcctctacaagtctcattacgacttggcactgggaggcagctgaatgccaaactgcctcggaacaagggagcctgctcttccagccctggtgccgcctccgctcctgcccctgtgccagctcactgaccctacctctcagcctgtcacggtgccccccacaccccaactctgtacctcggactcccgggagt

SEQ ID NO: 277115 - DNA, 82 bp, Homo sapiens
  chr22:42916273-42916355
  hypo
ctggagcaatacacacgggactggccatggataggttattgacagttacgagaggagccgggtgcggtgattcatgcctgta

SEQ ID NO: 277116 - DNA, 120 bp, Homo sapiens
  chr22:42944613-42944733
  hypo
agagagattacgtctcaaaaaaataaataaatgactgtacgtttcacagtacacatatttgctaaccccctgtgtatgtttgtctttaaatctaatgttcttcacagtgaaaccctgtct

SEQ ID NO: 277117 - DNA, 164 bp, Homo sapiens
  chr22:42956595-42956759
  hypo
gcaggctgtgaggacgtcccaggggctgagtgacttgggagaggcttttcacaatggagaggtggagctggtatgtcttggtttcagagcagcttctggcacaagcgatttgtgtactttgctttttacccaggaattttttttctttcgttcttttttcttat

SEQ ID NO: 277118 - DNA, 50 bp, Homo sapiens; identical to SEQ ID NO: 220852
  chr22:42972462-42972512
  hypo

SEQ ID NO: 277119 - DNA, 144 bp, Homo sapiens
  chr22:42995215-42995359
  hypo
aaggcaccccagtgtctcagcgtttataaaactaagggaatggactagttccagctctgaaaatcttacggcccaaacaaagaaatatttctgcattgaaaggctctattcacgccgggcgcagtggcttacgcctgtaatccc

SEQ ID NO: 277120 - DNA, 143 bp, Homo sapiens
  chr22:42995599-42995742
  hypo
cgagatgtcgtctcaaaacaaaaaaaacaacaggttctattcaacacgacctctcccacctgcctgatcagacacgcagtgtaagaaaacatgaaatgccataccatgtggtggagaaagccgcctgaggctgcaaacttcat

SEQ ID NO: 277121 - DNA, 350 bp, Homo sapiens; identical to SEQ ID NO: 220855
  chr22:42998893-42999243
  hypo

SEQ ID NO: 277122 - DNA, 192 bp, Homo sapiens
  chr22:43000041-43000233
  hypo
gaaggccctcctgagtatagcgctggagatcctccccaaggtctttgggcttcttctgtcgcctcccaccctcaggcctctctacaatagctaccctcaacggccactcatgcggcagacgctctgcctgcggactcctatgtcaaggggtgctctttgggaaaccctcccggatttctccaggccaactct

SEQ ID NO: 277123 - DNA, 189 bp, Homo sapiens
  chr22:43005280-43005469
  hypo
ttttgactgagtctcgtaatgccccacctccatcgcaccgaaactacagctctgcaactgcttccagggcttcaccaggtattccgcgaggtcctggcaagagcgctgctggcaggtgagaaggcaaacgttccctggaccccaaattctctcctctataccccctacgggaacctggcataggtgtga

SEQ ID NO: 277124 - DNA, 34 bp, Homo sapiens
  chr22:43089901-43089935
  hypo
cgctgccttggggcgccccggagcagccgcagca

SEQ ID NO: 277125 - DNA, 34 bp, Homo sapiens; identical to SEQ ID NO: 220856
  chr22:43137119-43137153
  hypo

SEQ ID NO: 277126 - DNA, 34 bp, Homo sapiens
  chr22:43138068-43138102
  hypo
tgagatcaagagtgagccacggcacccagcctaa

SEQ ID NO: 277127 - DNA, 83 bp, Homo sapiens
  chr22:43140873-43140956
  hypo
cacctgcacgtaatcgctcattaaaacagcgtgttgcccccacattgcctcgtgctgtctgttggcgcgctctcggggttgga

SEQ ID NO: 277128 - DNA, 256 bp, Homo sapiens
  chr22:43149956-43150212
  hypo
cctgcccagatgggctaagacgggacccttctgggtgttcgggtaaaagctggcctcagaagctggtgatgtttcctcaggaggctgcccatggtgtggtcctggcgacgcaccagcagcacgtcaccctcttgacccgggcgtgtgcctggctagctgagttttaagcctctctctggtgacatttggctttggagaaggttctttctctggcaaagcatttagatgtagctaaaaatacattattggccaggtg

SEQ ID NO: 277129 - DNA, 742 bp, Homo sapiens
  chr22:43164501-43165243
  hypo
aggactggacatgccgctgccggctccgagacgggggcccacgggcaaggacagagacaggcctctacttgctaaggctgggccctggctgacagccagccagggaacagggacttcagtcctatagccacagaaaccagatcccaccaaccacctgcgcggactcagaaggcaactcacttgcagagcctccggaagggacacccacccagcaggcactgggccccctccagccaccctcaggcatgcggggctgcagccagagaggggcacagggtcgggcttgggcctgtcagaccctcccctccacagtctgagtgacctggccagtggcaggatggaggcctgagaggtggcgccgttcacggaactgggagggccatgggaccggctggggcgctggctgacggtgacgggcgtgtgtgtgagaacctgaatggatgagggtgggtgggtgggtggtggggtggaggcagctccctccccgtttactggggtgtgacttgagcacctcgcaagcacaggcagtgcctcagccgcttactctgtgaggggccgaccgtgcccacctgcaggcccactgtgtgccgggcaccctgagccccgcgtttccagtggctccaactctcccacaggtgacccggtggatgctgctctcctctgtgtgagggaggaagcgaggggactgtcatggcccacgagcctgttcgcctccacaagcggctcccaaccccaggctcct

SEQ ID NO: 277130 - DNA, 272 bp, Homo sapiens
  chr22:43166965-43167237
  hypo
aggtgatttcctaatgctgcattttaagagagaatttgttcctgggaaaggctgtgtgtgtaagacgaacctctgtctcccactcctctctctttgctgacccgattcctcttggcgcagaggttcagaaacatcccctggccctcactggcttcatctcaagaacagaagtacaataagtaccttttccgcaccactgcctgagccctcagtccagccttcaccggtttccacctggtccttggattgtcgttatcacctttttctttttt

SEQ ID NO: 277131 - DNA, 109 bp, Homo sapiens
  chr22:43191428-43191537
  hypo
ctgcgacaataacccgtctgctccggcccccacagggaccagcctctgcatacactcttcagtggtccgcctgtgaagccaatttgctgaaagacgactcccaaaatgt

SEQ ID NO: 277132 - DNA, 171 bp, Homo sapiens
  chr22:43238823-43238994
  hypo
gcgttgcctttctacgccaacatcataaaaaggttctccccagtgtccaccgagcaggagcccagattctgccctggtcatcatcaacatgttctagggctcactatgtgccaggctgtatggggctctcttgctcgctcctgccaacaccctgtacggcaggtcctagta

SEQ ID NO: 277133 - DNA, 137 bp, Homo sapiens; identical to SEQ ID NO: 220859
  chr22:43253987-43254124
  hypo

SEQ ID NO: 277134 - DNA, 149 bp, Homo sapiens; identical to SEQ ID NO: 220860
  chr22:43266094-43266243
  hypo

SEQ ID NO: 277135 - DNA, 51 bp, Homo sapiens; identical to SEQ ID NO: 220861
  chr22:43273690-43273741
  hypo

SEQ ID NO: 277136 - DNA, 141 bp, Homo sapiens
  chr22:43298921-43299062
  hypo
tttatcagttctcaatcctgcgagtcacacgagctctctccatggtagctaaaaggaatcaactcttagcacgtcatcagccagtaacttcatggccggcagaagagcaactcccggcgcttctgccgcattcctgagaga

SEQ ID NO: 277137 - DNA, 175 bp, Homo sapiens; identical to SEQ ID NO: 220862
  chr22:43351234-43351409
  hypo

SEQ ID NO: 277138 - DNA, 69 bp, Homo sapiens
  chr22:43363016-43363085
  hypo
ataattaacttaaacgaacttgtccgtaagcagcttcaagtctggtagggtagacggacgagtacccag

SEQ ID NO: 277139 - DNA, 93 bp, Homo sapiens
  chr22:43365553-43365646
  hypo
gaccattgtaacaccggcattatccaagcaatatgggattgattatcgctgtagattggaaatagttttcccttctcctacgtagtttctacg

SEQ ID NO: 277140 - DNA, 163 bp, Homo sapiens
  chr22:43390391-43390554
  hypo
cacacacatgaatccagagccgtgtcctgcgccacaaagaccctcgggcgtgcttatggggacaccccagcctgcacacccaagctctgtccacacataccctgcccatggccaccattcagccacctttggctggaggcacgtgcacacagtgcacagccta

SEQ ID NO: 277141 - DNA, 92 bp, Homo sapiens
  chr22:43402810-43402902
  hypo
aattccgtctcaaaaaagaaaaaagaaagagaagcagaacccacacagctactgcattctcaaccaaacacgtaaatgcaggttaagagaat

SEQ ID NO: 277142 - DNA, 218 bp, Homo sapiens
  chr22:43434409-43434627
  hypo
actcctgtaagtcaccgggctaccgggagactgcatgggaacaaccacgctcgcgcagcctgtcccgcagccatcgctcctcccacagctcctggctgcccacggcgcttccctgtagcaaacccagctgctgacgtcataaaaggcacacagccggacctgtctgtgctcatctagttccatttacaacagactcatccacaaaaccgaagtggtag

SEQ ID NO: 277143 - DNA, 34 bp, Homo sapiens
  chr22:43437050-43437084
  hypo
attatcctcccaactcgggcggcagcaccaggac

SEQ ID NO: 277144 - DNA, 267 bp, Homo sapiens; identical to SEQ ID NO: 220863
  chr22:43465387-43465654
  hypo

SEQ ID NO: 277145 - DNA, 359 bp, Homo sapiens
  chr22:43524607-43524966
  hypo
agatccccgaaccccgggtcctgggtaagagccttgagatccctgaccctgacttgcgctgcggccagtgggggctgtcagagccgctccttggggcgccacagtccccaccactccgtatcatcatctgtgtcacctgtgtccacatctgcctgatcccatgggcttttgggtttgagatgcctggttctgagtgcacaaaccagtgcatggtcctgggtctccctctggtccgagagccttcacctggcaggcaggactcccgtctcctggccagggcaggggcctccctgagcagccttcctggtagcctggtcccatggtgtccactcggcaccgcccaccacaagggcagctga

SEQ ID NO: 277146 - DNA, 194 bp, Homo sapiens; identical to SEQ ID NO: 220864
  chr22:43529307-43529501
  hypo

SEQ ID NO: 277147 - DNA, 226 bp, Homo sapiens
  chr22:43555231-43555457
  hypo
agctgcagcagccatggccccgccctgggtgcccgccatgggcttcacgctggcgcccagcctggggtgcttcgtgggctcccgctttgtccacggcgagggtctccgctggtacgccggcctgcagaagccctcgtggcacccgccccactgggtgctgggccctgtctggggcacgctctactcagccatggggtaggtgggcgtgcactggcctggggataag

SEQ ID NO: 277148 - DNA, 143 bp, Homo sapiens
  chr22:43559030-43559173
  hypo
gcaggtgccatcacgcttgtgatgtggtggccgtcacgctttcatgaccactgggcctgctagtctgtcagggccttggcccaggggtcagcagagcttcagaggtggccccacctgagcccccacccgggagcagtgtcctg

SEQ ID NO: 277149 - DNA, 202 bp, Homo sapiens; identical to SEQ ID NO: 220865
  chr22:43566412-43566614
  hypo

SEQ ID NO: 277150 - DNA, 328 bp, Homo sapiens
  chr22:43567652-43567980
  hypo
agcctggctcatgatggcagcgctaacaatcgccttccatagcaggaactcaggaggcggctcctgggactggcctgtgtgccagtcctcctaggaggcagtgtgggcggggtggggtcgggtgtgccctggcctctgtgtgaacctgctctgcacctccctcaggccctacctgcttcagcaccacatccgggtcatagttcatgaccgtgaagtgcttctcgtagtcatccaggtcgttgagtgcaaaggccctggaagacaagtgtgcagacacatatgggttcttgagcggccttgtccctgcgagggaggtgccacccactca

SEQ ID NO: 277151 - DNA, 578 bp, Homo sapiens
  chr22:43570048-43570626
  hypo
tggagaggtcctgcggtccgtgaagacggccgtgacgttcggggcccacagctcggctcctgcaccacggtttccacagtgggtgctcatggaggagcaggcggacacagacgctgggccggggaaaagggccatggagcacaccgatgccgtgtctgggacttaccacctttcccgctgctggaagtagctgacaaactggggcagctcagtgcgcaggttgaaggttcggggcagccagggtgggccctcggggccacctgcccggcgcgcgatggaggccaggcagtccttgacagtcagcaggttctcgcaggggaactggttcagcagcacgcctggcctctcctggctgagtttcctgcagggcggaggcaggtgcgccagctcaaggggaggccggcagtgcctagaagccctgactgggagggcccctgcggccagaggtgccctcacctgtagtccttgaagtgtgagaagttgaagaggatgtcggcgtccgcctcactctgggtgagggtgaagcgcgggtgggtgaggctgctggccacctgctgcacgtccgtgtagaccctgtg

SEQ ID NO: 277152 - DNA, 348 bp, Homo sapiens
  chr22:43581409-43581757
  hypo
ctgctgctgctggcggcctcctccacacctgggccagtagcagcaggaggcttcactcaggaagagctgcaagtttgtgaatggtaaagcagtgattcagctctgtccttaacggctggggaagggtcacggaaaaacactggctgccccttagtagggcaacagcaggcaaggcggcctgggcaggggacgtggcacggtggcgaccaccctctgtgtgccaggcatatttctcatgccacctcccatccttccaatactgtgggagccagatggtgtctcaccatccccttcccagatggagaacaggtctcagacgggcgagtgaccgcccgagggagggcgtgc

SEQ ID NO: 277153 - DNA, 418 bp, Homo sapiens
  chr22:43608344-43608762
  hypo
agatgagaggggttcggggaagcctctcggagcagtgcagccctgcctctcggggtgggcgggcgtggtggggagggcatgctcacctttagcctcgcagtcctggaaggaggtggtgccttcgtgtttggtgagcaaaccccctccacaggggaagcagccggtgcgcccgggctcaggctggtacgtgcccacggggcaggcctggcagggcttgaagccatcggccgagaagaagcctggagaacactggcctgaaagtcagaggtcatggctcaggcgggcaggagggcaccgcagggccgaggctgtgggtggtctcaggccccgctcttggcccttgcccggccctggaaaaggtactgggcacccgaggcctggggtggggacggggtggggaaaacgcagcagccggggt

SEQ ID NO: 277154 - DNA, 201 bp, Homo sapiens
  chr22:43609924-43610125
  hypo
atgactgcacagacatcgtgaagggttttggaaacgacaaggaactttagaaaataccacactctctggccacaccaggcacctgggccttcgacaggagggcctcatcagagacaggaggagcccccgcccaccccccacccccacctctccttctaggcccgcacttgcctccacattccgacacgttgcgggcaccag

SEQ ID NO: 277155 - DNA, 265 bp, Homo sapiens
  chr22:43689261-43689526
  hypo
ggcgcaggcccacgcgatcctcacagctacctgggtgacaggtcatgttattgaccccattttacagatgaggacacggaggctccgggagctggagtagcttgagtagagtgacacagcacaccagagtgaaggcgggacccagccctgcggtctggctgcagaacacgcgcctttggccccaggctaagctggctgcgtcagcgcatgtgctcagaccaatgctgcgaagagccggctgctcctcacacgagctggagtccag

SEQ ID NO: 277156 - DNA, 50 bp, Homo sapiens
  chr22:43861119-43861169
  hypo
catggactcttgatgtctgccgagtgaacggagaccatgacagttgggag

SEQ ID NO: 277157 - DNA, 301 bp, Homo sapiens; identical to SEQ ID NO: 220871
  chr22:43926571-43926872
  hypo

SEQ ID NO: 277158 - DNA, 78 bp, Homo sapiens; identical to SEQ ID NO: 220872
  chr22:43926902-43926980
  hypo

SEQ ID NO: 277159 - DNA, 48 bp, Homo sapiens
  chr22:44026051-44026099
  hypo
taaaaaattgagacccgtgctttgtccactttgcgtatacctgcaagg

SEQ ID NO: 277160 - DNA, 42 bp, Homo sapiens
  chr22:44317774-44317816
  hypo
tcagctctcctgaccttccccgggacttaggacctgaccctg

SEQ ID NO: 277161 - DNA, 207 bp, Homo sapiens; identical to SEQ ID NO: 220874
  chr22:44322831-44323038
  hypo

SEQ ID NO: 277162 - DNA, 81 bp, Homo sapiens
  chr22:44449271-44449352
  hypo
ttttctagaagttctcagtgatgggcatttaaaggattcggctgctgctccctgtggctttcacagcgctgccctgaatgg

SEQ ID NO: 277163 - DNA, 74 bp, Homo sapiens
  chr22:44487741-44487815
  hypo
aaatgcaaatatattaccttcgggggagtgggtaactggcatcctggggccccgctgccattgtccttatgagg

SEQ ID NO: 277164 - DNA, 842 bp, Homo sapiens
  chr22:44493264-44494106
  hypo
ccgcgtgagcagcccgtagcagactgagggccatgatgtgcagtggcctgcgggggtttcatgtccagggtccccggtcaaggctagcaggtcatgaatgctgacaggcagcaagggctgactgtgagctctggagcccccagatacagaggtgtttctcatctggagcaagcgcctgctctgaatcaggcccctgccccgtgagacgcagctgctccctggtctgtgcagagcctctgattctggcctactgtcaccatcaccaggtgaccaggagatcccggcgggatctgcagacatggacacactgccacacatagctgcctgcctggggcctgctgtccaccctctcaggcccactgttcccctctaggcggggtcaggaatgaaagctaccccacggggacaggtaaagaccggagatgcctctgagaaagtgtttggtaacagtaagcctcgaaacggcatctctgtcctccacctttcacagtctctgggtcagacgccccattcctctcagtggtcccgccgactgaggcaggacccctcaagaagcacacagtcctgggacatccgagccaccatggcatgctgcccagtctggggtcagacgtgggctcagagccttcaggagggagcagcgagttccctgtgggggccacatgagctgggcgggcccgaatcttgcttctcctcagttcagcgagagcaaggtgtggggacatgctagatagggcaatgctgagatttttagtgtgggttgaaggggatgtttccagaaacgggctctctgaaggctgggattgggtagtgacctgctcactctccgtcctgcaccccct

SEQ ID NO: 277165 - DNA, 146 bp, Homo sapiens
  chr22:44495150-44495296
  hypo
tcagaggtgctcggcgcccgctggcttctgtgtggtgctgggcatttctgctgtggagcacgcctagccttggtgggtgccccctccgcagtcccgcctccccactgtctccacggcactgtcctccatgacgggctcagctggct

SEQ ID NO: 277166 - DNA, 131 bp, Homo sapiens
  chr22:44495597-44495728
  hypo
cagattccggccagcggaggcatctcatgccctgtgaatgctgctctctccttatttctcctgaaaaatggaaatggtttggaccagctgctggcggagtctgggaggagcgaggccgggcagaatgatga

SEQ ID NO: 277167 - DNA, 336 bp, Homo sapiens
  chr22:44496284-44496620
  hypo
ggaatgagtgctggcgtgagctagtgtagtaccttacagatggagttggaactccgtctggagcctggtggggtctagattcagatttaaccctgaaaagcaggaggggtcaccctggccactcctggccaggagccatctgatgccgatgcctgcgctgagtggacagtcagtttccaccacgtctggaggcgtgaatcccagctgggcgaggaacctggctgccccgctcccagaagtcagggaacagtgagggaaggggcccatggtgctggccttcttgggcagcggctgtccttctccagcgtggctcctgctcaccgtgaggcagtgctt

SEQ ID NO: 277168 - DNA, 186 bp, Homo sapiens
  chr22:44500128-44500314
  hypo
tgctctcagactgcaggttgcgtctcaaagcaggctggcagacattttccactcttgatcaatcattttccaaaataagcatagacacagcaacccggagagcagcttcggtttggctgtcggtggcgtgttagttactgtagtggtggcacagaggcgatatacgttaaatattagttctcactg

SEQ ID NO: 277169 - DNA, 42 bp, Homo sapiens
  chr22:44527472-44527514
  hypo
gccccgaggctgggcgctccggtggagcgtggactgtgagtt

SEQ ID NO: 277170 - DNA, 40 bp, Homo sapiens
  chr22:44545748-44545788
  hypo
gggcaggctgggcgcggtggctcacgcctgtaatcctagc

SEQ ID NO: 277171 - DNA, 463 bp, Homo sapiens
  chr22:44559545-44560008
  hypo
cgcacatggccctccgcagacttcctcacccgtgtctgcccaccctgtggcccgccccgggctcactgggtccttgtggacgtcagcgttgcagaggctcggtcctgtccatgccggctgtcctccagcagtgggccgtgtgtgggaacgactgttggaccctaacgctgacccaccccccttccttggcaggtccacaatgtgtccttcgcctttgagctgatgctggacggaggcctcaagaaacccaaggctcgtcctgaaggtaatgcccctggctcaggttcccccgggagaggtgcgcacggaggggaagaaaaacgggtcctagaagtggctggaaggctggcatgttgttccccagatgggccccacgtctctggctctggggcaagggtctgccaaccccagctcctcagtctcctcattttgggaaccaggaggacttcgctggtggagctgg

SEQ ID NO: 277172 - DNA, 241 bp, Homo sapiens
  chr22:44564263-44564504
  hypo
gcagggtgtcagcccgcgccaggagctctcacaaaacctgtgtgtctggggaggcactgcccagagcgtcctggacatggtggtggccagtctttaaggggaagcgctgtgtgtggatgcggcagctggtgtcatgctggagacgtggcttctgagagtacctaccgcaatgacaggaggatggcacgcctctgaagtttctctgtttccttctgcagacgtggttaacttggacctcaaa

SEQ ID NO: 277173 - DNA, 89 bp, Homo sapiens
  chr22:44612660-44612749
  hypo
cttctccatcacgtcggtacagtcggccttcaatgtctgcgggttccacatcttcagattcaacaaccttggatcaagaatattcagag

SEQ ID NO: 277174 - DNA, 188 bp, Homo sapiens
  chr22:44681357-44681545
  hypo
ccgcaatgtgtgcacggcctgtggggcttgtggcagcgggcctgggggaggctgcggctgtggggcccgctgacccggccgaggggcccgagcggggttcccccaccgccgggggtcctgtttcatccatcgtccttggatgccccaccgtgccaggtagaccttgcagatgtcgtagttcattgccg

SEQ ID NO: 277175 - DNA, 121 bp, Homo sapiens
  chr22:44745294-44745415
  hypo
cacagagtcctgagcggtcggcaaatcacagtgactgttttctccccccatggaccaactggaggggagcgctcaggtgtctgctgtccaggtgtccgttggctggcgcccctgacctgcg

SEQ ID NO: 277176 - DNA, 199 bp, Homo sapiens
  chr22:44790443-44790642
  hypo
ggcttccaaggcaacgcagagcagctgcgagacaagaagcaggtgaaaacgcctgtgcggcagtcgctgctgggtggattctcctaagcacaggttttcaggagctggaaccacatttcctagtctgtgggttcaatcacactctgaggttcctcagggaatgacccccacgcaatgctaacatcggcttctttgttaa

SEQ ID NO: 277177 - DNA, 240 bp, Homo sapiens
  chr22:44808388-44808628
  hypo
atagctggcgaggccgggggagcacgtccctccagagcacccagcaccgccccatgccctgtctaagcaggtcacccctccctggttgtctctcacagtccctgattccggagcactagtcctggagaactgatgtgcttccgtgaccccaacttgcttgacctggtctctcccgtcgggatggacactccccgagcaggtccactgcttactccgggctcccagcgccctccgttcctg

SEQ ID NO: 277178 - DNA, 931 bp, Homo sapiens
  chr22:44892380-44893311
  hypo
aggggtcagccctcgtggtccgtcagcgtgcggcggagtccctgtgcctaagtagcagagcggtagtcattgaaacaggccgggatgccagcaagagggaggcgagcatgcagtgagcgataggtacaaagctagcacgtaagaggaagcacggcaaggtgggcaaccagggcgccaggaaggacggaaggaagatctcctcggggaacacgtctggagaggcaagaagggaggtcttcaaacaggggcaaagctgtcgtatgggcatttcttctacacagcaaagagcgtatgctacctgggtggctgcagacgctaccaagtgctggcggattcttaaagattccgtgctcgggcaggcagggctggcgctggactagtcccgttggaagctggatgcactgggcaaggccccgtgcccgcagaggccagctggcggcagagcatctgcctctctcgcacagccctattagaggcagaagtcttcctgatttgggcgcgccgcgcatgccggagcggagacttgtaggttctccgcaactctgccaggaacccctgatagttgttgcgcaaggggctgtcaggttgcatgtgggggatagcccacttctccgcctccccagtcagtcgagacacaaggaaggccacacgctcggcctcacccgggaagcgggaggcctggaagatcatgaatctgtccatctgcatcaggaaccccgccaaccggcctgggtccccggaaaagggctcgggcagagaggttggaggtgtggtcatgggtcgagtcccgtttgaagtaattgaggagatgggcggggtgatctgcagagcccccgggatccgcgccctggtgcgtaacaaggtcagctctgccatcacgctctccagcatgttggtgagattggccttctccgcccgcagggtggaagcc

SEQ ID NO: 277179 - DNA, 169 bp, Homo sapiens
  chr22:45004116-45004285
  hypo
tgccggccctctcccgctgtgtggcctcggggaagcctcttcccctgtctgagcctctgcattctcatctgtagaatggggatgctctgtcctgccttccagagcgttgctgatatcagaatccaggtgtggaacttgggcagcagagtagcgccggtgccctccaggc

SEQ ID NO: 277180 - DNA, 338 bp, Homo sapiens
  chr22:45074487-45074825
  hypo
ccctgcctgctagttctttaagccgctgctggaaggcatccttctctagaaagtcttcctggctgcctcctgttcaccgcaggccaggcggacccacggccccctcagtgccatctcaccctgggctctgctcatgcctttgggccagcgcttgtcatacagagcttctctgccctgttcccaggtctccccgacagcctggggctgctctgtgtgattcatctctgggtcccagggctcagctgggggctggcacagagtgggaccccagcagcattcgatgaattgagagcacgagtgagcgacagacatcagggcacctgcgttaggggacagga

SEQ ID NO: 277181 - DNA, 269 bp, Homo sapiens
  chr22:45075605-45075874
  hypo
taatagtaagactcagcctccccgctctgggacactcagtctgatggggcaggctggtcagaagacatagagccatggtgtgtttggaactttcacagagggaagcctggggctcgggaagcccggaaaagatgccggcgcagcctgagggcttgtacaggtgccactgtgccgaagggtggctacgagggaggcaggtgtatgggtgagggtgagtgcagtgtggctggaggcttagggaaaggtgagtaggacggcgagagacccac

SEQ ID NO: 277182 - DNA, 52 bp, Homo sapiens
  chr22:45085115-45085167
  hypo
atcctgcccacctgcgtccagttagtctgctaactcacgggtcgtctttgga

SEQ ID NO: 277183 - DNA, 176 bp, Homo sapiens
  chr22:45088597-45088773
  hypo
tacaggttgggagtgcagcccgggagtccgtcccgctctgccgcctgccctgaggagcctcagtctgcaggtctgcagagcggggatgttccccgggcctgcctggcagggcggctgcaaacacgaaggttcggaagtgcacgagctctcagcacggggccaggcacagctgggtg

SEQ ID NO: 277184 - DNA, 32 bp, Homo sapiens; identical to SEQ ID NO: 220880
  chr22:45113077-45113109
  hypo

SEQ ID NO: 277185 - DNA, 32 bp, Homo sapiens; identical to SEQ ID NO: 220881
  chr22:45113349-45113381
  hypo

SEQ ID NO: 277186 - DNA, 262 bp, Homo sapiens
  chr22:45120588-45120850
  hypo
tgtcttgacctctgcgagcctctcttgcctcccctgtaataaaaggggaaccccggtgaatgcctgcggctgggttggtgaagactgaatgagcttctctggaataaagagtaaacacttgggaagaagctctgcaggcggagagaggaggagcccgtggcatccgggatttggacaggtggaaggcaggagcaaaccaagtgttgcaggcccagccctgccaggtgtctctccagaaggtgtgagacgcagaggccactgt

SEQ ID NO: 277187 - DNA, 37 bp, Homo sapiens
  chr22:45121861-45121898
  hypo
attggtggcataacacggcctgcggacttttgtctgg

SEQ ID NO: 277188 - DNA, 163 bp, Homo sapiens; identical to SEQ ID NO: 220882
  chr22:45122235-45122398
  hypo

SEQ ID NO: 277189 - DNA, 280 bp, Homo sapiens; identical to SEQ ID NO: 220883
  chr22:45123031-45123311
  hypo

SEQ ID NO: 277190 - DNA, 129 bp, Homo sapiens; identical to SEQ ID NO: 220884
  chr22:45123857-45123986
  hypo

SEQ ID NO: 277191 - DNA, 62 bp, Homo sapiens
  chr22:45135950-45136012
  hypo
taaacgagtgaaatcggtggttaattagttagtggttggtctaccatcggcatcaccggggt

SEQ ID NO: 277192 - DNA, 191 bp, Homo sapiens
  chr22:45136242-45136433
  hypo
ctgcactgtgacagcgtctggggtggaggtggcacttaggaaaacccagggtgggttacgataggcttcccagtgaccctgactgcacccctgctgagagctcagatttgtttgggcgtccgtgtgtgtgtgtgtgtgtgtgtgtgtaagtgggtaggtgtgtgtgtctgcacgcacgcacaagtgtttgg

SEQ ID NO: 277193 - DNA, 135 bp, Homo sapiens
  chr22:45137750-45137885
  hypo
agactccgtctcagaaaaaaaaaaaaaaaaaaaaaacctgatgtgaggtgaaagaagccagccaggaaacaccacatactggatgattccattccgagatgttcagaataggcaaatccacggggacagaaagta

SEQ ID NO: 277194 - DNA, 42 bp, Homo sapiens
  chr22:45175293-45175335
  hypo
ttgttcaacatattgcgagaccactcacgtcggtacgcgtgg

SEQ ID NO: 277195 - DNA, 199 bp, Homo sapiens
  chr22:45181176-45181375
  hypo
agtgccacaacctggcggcttaagacaacaggtcactgtctcagttctggaggccaccagtccaaagtcaaggtgtctgcagagctgcactttcccgaaggctccaggggagggtcttttttgcatcttctggtggttcctggtgtcccttggcttgcggccgcatcacactagtctgtgactccgtcctcacacaccc

SEQ ID NO: 277196 - DNA, 85 bp, Homo sapiens
  chr22:45220426-45220511
  hypo
agtagggcttcaatacgtatttgcctgtgttaaggaaggactgttacctgagcacagagggtcttttcttttctttcttcttctt

SEQ ID NO: 277197 - DNA, 183 bp, Homo sapiens; identical to SEQ ID NO: 220885
  chr22:45242866-45243049
  hypo

SEQ ID NO: 277198 - DNA, 338 bp, Homo sapiens
  chr22:45277448-45277786
  hypo
tcatacagcacagtttctcccggagtcgtgagaatgacaggagggaccgtggcagctgcgggatttgccggcctcctcgctctgcacctctgcgtgtgtgcatgcgtgtctgtggtcgtggccgcgtgcgatgcacacacgcgtgttcagtgcaattcggcaccatgtgatatgctcggggtgggagcccgtggctcctggacgcttatcctgttgtgctgagtccctcaggactgggatgtgggaatcgggcaagggtgacaagctgccactgcccaccctggatgcagaagcccttggcagcaagtctggtccccgaaggccggaacctcccgagc

SEQ ID NO: 277199 - DNA, 123 bp, Homo sapiens
  chr22:45288210-45288333
  hypo
aagtagaggaaaggcgtggacaggctgatgaggccagaggacgccccatggtgggctctccccacagacagggcaattgcagagcctggaactggctgccgctctgcgcgaaacgcctccctc

SEQ ID NO: 277200 - DNA, 268 bp, Homo sapiens
  chr22:45312207-45312475
  hypo
gaccacagacacggcggtgctgggggccatggcggcggcattgctgggggaggtggagatgatggcgtaggccacccccgcactgctcagcggagaggcgagggcggcgggctcggcgagggcctggggctggctgccgggcgctggcacatggctgacagtgttgttggcggtggggagggctgggctggggttcttgacgctgaccacggtggccttctggaatgttgggggctgcttgggtggccggtcccggcccggggcaacg

SEQ ID NO: 277201 - DNA, 213 bp, Homo sapiens
  chr22:45312785-45312998
  hypo
ggcttggaaggcagcgcttgggcgcgaggggacagtctgtgcagtgtgacgccctgcagatcaagtcccaagcggcaaagccccctttggccttggaagtctggaaagcgctgcccctcggcagggactgggaggggcttcgagggctcctgggccttgcccagttctgcttctcagtctgggtgggggctgctgctgcgctcccgtgaaaac

SEQ ID NO: 277202 - DNA, 48 bp, Homo sapiens
  chr22:45322691-45322739
  hypo
gccgtgtctgtatccgggtgttgccatgtgggccgggagtgaccgtgt

SEQ ID NO: 277203 - DNA, 163 bp, Homo sapiens
  chr22:45389286-45389449
  hypo
caccacagcggcaccggctccatcctcccacccgccagggctctcccacagcctagaggatggggaggctgaaccagaccccagcttcccggtcaaccggagaacaggccacagccaagaacagcgagtccagaaccgctcccacacacggcaacgtgcagtt

SEQ ID NO: 277204 - DNA, 77 bp, Homo sapiens
  chr22:45392668-45392745
  hypo
cacacatgcatacatgcagacgcacataagcatacacagaggtgggcacacacgaacacatgcacacacacacatgc

SEQ ID NO: 277205 - DNA, 137 bp, Homo sapiens
  chr22:45392805-45392942
  hypo
acacacgcgcacatgcacatcgcttccccgttctacttttcaccagagcacctgccaccttccgacccactccacgtcacgcattatgtttctcatcgattacctgtctcccccccgagtctctgagcaccacaagg

SEQ ID NO: 277206 - DNA, 103 bp, Homo sapiens
  chr22:45474745-45474848
  hypo
tacaaaagaacgctcgacggttgcatgcaaaaaactggatggatctcccagatgccgtgacaagcaaaagaaggcagctcaggccgggcgcggtggctcacac

SEQ ID NO: 277207 - DNA, 146 bp, Homo sapiens
  chr22:45581809-45581955
  hypo
cccaagggctcccgcgtgtgtgttctgatcttcagtgcgtagcacattctccatttagaaaagagtggtcagaataattgtggacggtacagtggctttttaaaactacagtctttaggtgtaaggtttggcgccgggagcaattt

SEQ ID NO: 277208 - DNA, 144 bp, Homo sapiens
  chr22:45584841-45584985
  hypo
cgagttaagcccgctcccaccagctactctccgataaagatacgctgtttgagcagcacagaggaggttcgttgaaaccgctgttgccgtagatgatgcctgtgacgcgccgccgcccttccactgtttcgccccgaacatctg

SEQ ID NO: 277209 - DNA, 147 bp, Homo sapiens; identical to SEQ ID NO: 220887
  chr22:45591073-45591220
  hypo

SEQ ID NO: 277210 - DNA, 1078 bp, Homo sapiens
  chr22:45592909-45593987
  hypo
ccggccccgggagtcgagtggcctcgcctggctgcggctccagcactggcgtgccatcgcagaccccggtggcggtggacaggtaggcacttggcagcactccgagggctgggcccggccggggctctgcgcaggctccgcacgcggctaggtcatcaggatgggcttctgccgaacttccaggatgtctagggccggcaggagggaagcaggtgaaacagtaaccctcaacagcggtgagtgctatggtcacggcagtgccacttctgaaggaagcccgcctcagccactcatgcatctcctctccaggcctcacagactgcagaggagacgtgtctccaccatcctcaccctgcagactgggaaatgggctcgcagcaacggcacaccctgcagggcctcaggtgcaagctggtgtgggggccagagccactgcctgtcacagctgctgcaggcctgggtcagcgaggtggcctgagagcctcccctcgcccgtgagtaacacacacctgggcatctgtggccactcaagaggggacagcaggtgcgccagaaaggtgaacaaagggaggacttcagctctgggaaagctacggctccacccaaagtctgagacaaagaggccaagagccctgcaaagaaacccaaccaaccgacaggacagggcgggatgactccgggtggctcacaagtaccaaggccctggaggcagagctggctgtgagaaggtgcggctgcttccccacatccgccagcattacctgttaaaatccgatgcagcggcaacgtgacgtaggttaagtgtgcatagagaaggaagtttccatctgctctgttcagcttcagccaggacccgaccagggaccgtcctgtgcccgacagggaccgagaccgcaggttggttgcattgtgcagatcggctggaggaaagaaggccaggtcaaggcccccacagcatgggacgcggcgggagcagcaggaggccagctcccagtccaggctgaggccaaactctgctgaggccaggacgctccttaccaacacccccacaccagcacccacacgctccagagctgct

SEQ ID NO: 277211 - DNA, 386 bp, Homo sapiens; identical to SEQ ID NO: 220890
  chr22:45594190-45594576
  hypo

SEQ ID NO: 277212 - DNA, 85 bp, Homo sapiens; identical to SEQ ID NO: 220891
  chr22:45594816-45594901
  hypo

SEQ ID NO: 277213 - DNA, 159 bp, Homo sapiens
  chr22:45595258-45595417
  hypo
gctgcacgaggtggcgactgtgtcaccaaagagcacgtggttctgggaggctgcacagagccaggagggccaggcctcaccctgagggcgagctggcccaaggcagcgcaagggagggaagccctcctctctcccgccacaccccgtgtgtgcggagcc

SEQ ID NO: 277214 - DNA, 207 bp, Homo sapiens
  chr22:45596933-45597140
  hypo
tgggactgagacttcgggagccccgtcagcctcctcgtcacggctccgacatccaccaaagtcctggcagctgctgggctccagacggtgttcccacaagccggggaaggtttttaaaagataaaagaaacaaacagcagcaaccacaatacacagagtcagcatgtgtcacgcactggctccagacgaccccgccagagaaggaga

SEQ ID NO: 277215 - DNA, 572 bp, Homo sapiens
  chr22:45603891-45604463
  hypo
atcacacggctgttcggggcagcaccacagcacaggcaggcgaaagagcaggttccccatcagaaaggtgtccgtgtgcgcaccaaagccaggcccaagaggacactgggagctgcccggtacccactgacaggagggtggccaggccgccatggtacactctgcaggcattacacagcagtgagaccagattacaaccacctgtgtcaacaggcatgactcacaaacatgacatgcggagaaagaagcctgaaacaacatatactgcccgattccaatgtatgagctgtgagaacaggcagaaccaccgactccacacacatgagctgtgagaacaggcagaaccaccgactccacatgcacgagctgtaagaacaggtagaacccgccaactccacacacacgagctgtgagaacaggcagaacccaactccacacgcaggagctgtgagaacaggcagaaccaccgactccacacgcacgagctgtaagaacaggcagaacccaccgactccacatgcaggagctgtgagaacaggcagaacccgcccgggaagtttgaggagacagag

SEQ ID NO: 277216 - DNA, 323 bp, Homo sapiens; identical to SEQ ID NO: 220894
  chr22:45607125-45607448
  hypo

SEQ ID NO: 277217 - DNA, 360 bp, Homo sapiens; identical to SEQ ID NO: 220895
  chr22:45607751-45608111
  hypo

SEQ ID NO: 277218 - DNA, 208 bp, Homo sapiens
  chr22:45613816-45614024
  hypo
gggactagcaggggagagggcgcgtgggaagtgagcactaagcctgggccgtccacaccccagtgcggtgtctgccacctctgaattgccactaactctcctcctggttctgcacgacgctggactggtggcatgacagcaccaagagctcaacagtgctggtttcaggagcgaggaacgtgatgacagctcgcgcgtgccctgcacc

SEQ ID NO: 277219 - DNA, 120 bp, Homo sapiens; identical to SEQ ID NO: 220896
  chr22:45653545-45653665
  hypo

SEQ ID NO: 277220 - DNA, 168 bp, Homo sapiens
  chr22:45717844-45718012
  hypo
tcgctttgttgtgccgcttgctgtgttttgcttctctgataagtcatctgtgttcatgtgcactggaaattcttctagagcagtgtcccaagagacagcgaaaaccccagctcggagcccacagagcccatccttcatctgctcctgtgtgtgcgttttccttctgtg

SEQ ID NO: 277221 - DNA, 38 bp, Homo sapiens
  chr22:45741339-45741377
  hypo
ctcaggatagatgccgatcagcgcgtcggctctggaat

SEQ ID NO: 277222 - DNA, 617 bp, Homo sapiens; identical to SEQ ID NO: 220897
  chr22:45808543-45809160
  hypo

SEQ ID NO: 277223 - DNA, 184 bp, Homo sapiens
  chr22:45814422-45814606
  hypo
gagcagcactgacccgcccagccacttctgtgccggaaagaccgggtaacgaagacgacaacatccctgctctcttggggtgtgtcagcgggtgatggaatagtgaggagctatgaggaagacaaaacagggaccaggcacagagaggaatgcactccgccttcttgagcgcctcctctctgct

SEQ ID NO: 277224 - DNA, 437 bp, Homo sapiens
  chr22:45821511-45821948
  hypo
gcccacgcggggtgtcggcctaatccaaggagggagttccctgccttggtaagttggtgcaagacccggagctcttatgcatacacccaacaggtggtgatcccccgagtccagcccacccgcccagcagtgcgcaggcagccaggggttcaaggacccacccacatccgtgcctgacaagtctcccctccacccgactcctgctgcccttagcatatcctcccctcgagggcccccagtgagatttgctggcctgggtgtcagaatgcccctggggtcactcggaccatcttctttaatgtcttcacctgcttaggccatcgagtcagtggaaaggaaaaagcaagagaaaaagcaagaacaagaggacaacttggccgagatcaccaacctcctgcgtggggacctgctctccgagaacccgcagcaggcagcca

SEQ ID NO: 277225 - DNA, 149 bp, Homo sapiens; identical to SEQ ID NO: 220899
  chr22:45822398-45822547
  hypo

SEQ ID NO: 277226 - DNA, 72 bp, Homo sapiens; identical to SEQ ID NO: 220900
  chr22:45826806-45826878
  hypo

SEQ ID NO: 277227 - DNA, 209 bp, Homo sapiens
  chr22:45897738-45897947
  hypo
cgttatgtgagttgcggatcattcactcctgttccgtttgtcgtgctcctaagcccgaatactccacgatattcatctgccttgatgacgctaggcttcccaattggaggaattatgaatgtgcggctacatgtctttctgtcttttggagcacatgttgtatgcgtttctgctgagtgtaaggctgggcggggcgtcggtggctcaag

SEQ ID NO: 277228 - DNA, 46 bp, Homo sapiens
  chr22:45914455-45914501
  hypo
ctgtcgtcaagacagaaggacgtgcgtgtcctggtggtgcatctgg

SEQ ID NO: 277229 - DNA, 269 bp, Homo sapiens; identical to SEQ ID NO: 220901
  chr22:45929578-45929847
  hypo

SEQ ID NO: 277230 - DNA, 154 bp, Homo sapiens
  chr22:45932767-45932921
  hypo
gtgtggggtgcggccggggagctggccggcctgggttactggttctggaaagacaggaggtgagtcctgctttccccagccgttgtcaggttaactgcctggctaggccgctgcagtcagcgcttaagtcctgatccaccggctctccctcggc

SEQ ID NO: 277231 - DNA, 78 bp, Homo sapiens
  chr22:45938766-45938844
  hypo
ccaggcaggcacagcgcggcagtcccggctctcccactgacttcccgcatgctcgggacaagtcactttgcattcctt

SEQ ID NO: 277232 - DNA, 88 bp, Homo sapiens
  chr22:45940276-45940364
  hypo
ttcgtgttggagttaggctttccccacccgcagagacagggagaagcaccctggccttccggatgacgacattccccaggcatgtccc

SEQ ID NO: 277233 - DNA, 34 bp, Homo sapiens
  chr22:45949260-45949294
  hypo
gtggcagggggggacggggcgggctcgcctatgc

SEQ ID NO: 277234 - DNA, 42 bp, Homo sapiens
  chr22:45958411-45958453
  hypo
agacacaaccaagagccctgcgtagccctggccactgtctgg

SEQ ID NO: 277235 - DNA, 427 bp, Homo sapiens; identical to SEQ ID NO: 220902
  chr22:45959026-45959453
  hypo

SEQ ID NO: 277236 - DNA, 182 bp, Homo sapiens
  chr22:45975266-45975448
  hypo
atgatcacaggtgccgtcccggcagcgggcttctgggaacggaatgtggatgaggccacaaggacccagcggcttcccccggcacagttggtcacgggtgccctggtctttggaattctgggctggggctgcgtgggggagggccccagcctggcccttggaattgtcgtgcctgtagccct

SEQ ID NO: 277237 - DNA, 125 bp, Homo sapiens; identical to SEQ ID NO: 220903
  chr22:45976304-45976429
  hypo

SEQ ID NO: 277238 - DNA, 407 bp, Homo sapiens
  chr22:45982090-45982497
  hypo
gtccatgtgagtgccgcactgcacacccgagattggttttccagcccaggacctggctaggaagggtcggcggggtacagcccgctcagcaccccctgccgtggccgcctctgcaggaggagacagcatggtggggagaggggactgtcttgccctgctgaacccccaggggtcggctacacccctctctacaggcctttttggtgtagcgcaggtgagacaatgcagccagagaggttgggagattacacagctccacatctgcggtgtcaccgtggacgggaccgtcatggtcccagcgggagggtggaaggaagccaaacttgagacgtctgccttgcacaaaggcagtggtgctcgtcaaggtttgggctggaagacttagcacctggcgggcatctgaaaat

SEQ ID NO: 277239 - DNA, 70 bp, Homo sapiens; identical to SEQ ID NO: 220904
  chr22:45982908-45982978
  hypo

SEQ ID NO: 277240 - DNA, 259 bp, Homo sapiens; identical to SEQ ID NO: 220905
  chr22:45983008-45983267
  hypo

SEQ ID NO: 277241 - DNA, 392 bp, Homo sapiens
  chr22:46009356-46009748
  hypo
ctgcccattcggaccggttctgcacttccctccattcatggagaaaggagcctcgaagggacaatgatcaccgtctccttctgagaactgtgctggctggcatcctgcagacaccgaagggccagtttctaaggacatggcctgggtgttctgtccagctggatggcaggccgtgaccccaaaatcagcagtgatgataacgaagcgagtgaagcagtatggagatggccagtgatcacaatccaagataactaaaggcaaatctgtgacaagtaaactcagtgacatgtatatgcttgccgcagtgttcagtacgcagttagcacatagccaatgccagtcgcctggcttaacctctccttttcttttggaatatgaacaatccacttcat

SEQ ID NO: 277242 - DNA, 87 bp, Homo sapiens
  chr22:46040672-46040759
  hypo
cctcagaactctcaagcaggacttctcaacctcagcactgttgacttttgggtgggacaattctttgttgtgcgtgtggcgggatgg

SEQ ID NO: 277243 - DNA, 209 bp, Homo sapiens
  chr22:46042935-46043144
  hypo
acttaccagccactgtcctatgccctctcgttgaatgctcacaatgacccaatgggatgaccctgtcaccatcgtccatcccatctttcagaagtggacgctgagtcatgctgaagttatataatgcactcagctcacatggctggtagcacttgaggcagggatctggacacagacggcttgactccggagctcctctcaaccacaag

SEQ ID NO: 277244 - DNA, 159 bp, Homo sapiens
  chr22:46051559-46051718
  hypo
ctaggcgacacagtgagactctgtcttaaaaaaaaaaaaaagttccagttactctaatcctcggtgacactcataaactttattttttctaattggtgtgtattgatagcttattgatttcctatttgaattaactttgcatttcggtcaaacccatat

SEQ ID NO: 277245 - DNA, 119 bp, Homo sapiens
  chr22:46082801-46082920
  hypo
aagattggcgaaatcgggggttttcaggaatccatggtttacaacctggggagagcatatgacagtgatcacagctccacattattttttctttatactgcaaacgcgaattattgtgt

SEQ ID NO: 277246 - DNA, 214 bp, Homo sapiens
  chr22:46145006-46145220
  hypo
gacctgtgcttcatcgtggaattcctaccactgcatattcctccctaggctttaagcgtgaaggcagacacatcatatttggcttaacacctgccgtaacactgggtacatagtgtagtgaaattaatggacgctggatgactttgcttgctttactggtgagtcaagcgtagagtagttacttgcttggagcgatagcaggccaaattctgac

SEQ ID NO: 277247 - DNA, 34 bp, Homo sapiens
  chr22:46153006-46153040
  hypo
ctggggctgtggaggcggacgactggggagtctg

SEQ ID NO: 277248 - DNA, 56 bp, Homo sapiens
  chr22:46158114-46158170
  hypo
ccctgaccagcgtgcgtttctttctggaggcgcagggacctcggcttatttttctc

SEQ ID NO: 277249 - DNA, 50 bp, Homo sapiens
  chr22:46229653-46229703
  hypo
cagtcatagcaacccggaagaagaactgctctgccctccagaggtctctc

SEQ ID NO: 277250 - DNA, 116 bp, Homo sapiens
  chr22:46229733-46229849
  hypo
cagcgatacggcatcgcgatcaggggagcggatgccagagcctgactgcctacttccaaatccaccttgaacacatccagttgcgggaccttggccatgttcgcctctgtgtctaa

SEQ ID NO: 277251 - DNA, 494 bp, Homo sapiens; identical to SEQ ID NO: 220906
  chr22:46255144-46255638
  hypo

SEQ ID NO: 277252 - DNA, 488 bp, Homo sapiens
  chr22:46261684-46262172
  hypo
ccatgactgtgaaatggagccgacacctctgcagcttcgaccacacagggcttgtggcttggcatggccgcagacgcactgccaggccggcagccttcgccaagaactggattcctcccggcctggcccggctcggctggcattctcgccagtttcattgggttgagttccagagcgatggcagcgattgataatgctgtaattggagtgacttgggtattttctgaggtgttgccacgatgactcatactagggcaagttgagggcccgcactgtccagccggagtcggttagagaccctcaggaggctcacaggctccagggcctggatgttaggatgtgaggcctggggttaccgagatcccacacccaggagatgctcgcgtggagccttcgctcacagcggcctgcgcgaatggggcttgctccgagaggttcagctggcaccgagagctggcaccgagagcgtttccagctgcaatctgttc

SEQ ID NO: 277253 - DNA, 161 bp, Homo sapiens
  chr22:46278023-46278184
  hypo
ccgacatcgttgaggatgggaggttgaaccccagtggacagtcacttccaccctggctcttacggctgcacgagccaggctgagaattctgcaggtgccgttgtctgtggtctgactgtgacctgaacctggcggctggcaagctccgtgtgtctctgagg

SEQ ID NO: 277254 - DNA, 202 bp, Homo sapiens
  chr22:46278408-46278610
  hypo
ggtgatccccctgccgacaagcgcccatgtgtgtaaagtggggtaatggaggtggctcagggagcactgaccgtgaaacaggcgaagtggccactgcctgagcgttccacattgttccagcgccagcctgacgggcatttgtgggcattgggcggagcacctatgacatcgacagaaccccagcgcccgccccagaggacag

SEQ ID NO: 277255 - DNA, 181 bp, Homo sapiens; identical to SEQ ID NO: 220908
  chr22:46312229-46312410
  hypo

SEQ ID NO: 277256 - DNA, 143 bp, Homo sapiens
  chr22:46318751-46318894
  hypo
acctcggtgcgctcgctgcaggtgttgcacttgacgaagcagcaccagtggaatttgcagttgcactgccacaccttggtgtactggtgggtgttgtagcctcggccgcagcacatggtgtcacagccgtccgcgccgggcga

SEQ ID NO: 277257 - DNA, 58 bp, Homo sapiens
  chr22:46329875-46329933
  hypo
ggcaccagcaacagcgtagcccaccctcagggctctccacatgcgccgggcgcacacc

SEQ ID NO: 277258 - DNA, 134 bp, Homo sapiens
  chr22:46339130-46339264
  hypo
tcgggctgagtcagcgtctccacactaagctcttccctgccgttgtcataaacagatcattggaaaaagtcatgccaggtccaaacacgccggcgcccgtgcgcccgaggcctttgttccgacccagcggaggc

SEQ ID NO: 277259 - DNA, 269 bp, Homo sapiens
  chr22:46407789-46408058
  hypo
aactcagaggcctgccctcccggctcaggctcccgagacagagcccagggccaggcggtggctgactccactagcggagtgccctggactggccgaggccctccctcccggggccactcacatgaatctttgcttcagggccggcttctggggagacccagagcacgacaggagctcatagacaggcctctgcgggtgcgtgggttacaatggcgtctgcggtcctggaactcagaggcagaggaggcgggaccctgtcatcccaatca

SEQ ID NO: 277260 - DNA, 158 bp, Homo sapiens
  chr22:46410623-46410781
  hypo
cacggctatcccttccaatatttccgaggccagctgcccagagaaggagggctgggtggagaggaccgtgccagcagcagtaggcctgggccaggagacaggcacgcacctccgcggtctctggcgagtctatgtccacacagcggcaggacctccac

SEQ ID NO: 277261 - DNA, 52 bp, Homo sapiens
  chr22:46437045-46437097
  hypo
tctcccagtgctttcgtactgtaaacatcacagtccacggtccctgtgaaca

SEQ ID NO: 277262 - DNA, 120 bp, Homo sapiens
  chr22:46437983-46438103
  hypo
gtgaacattttccctaaatacaatgatcttcagttaaaatatttgtatcttacatagaatctggaattatttctgtaaacagaatttagtaaaagaaatataaaaatcagctgggcacgt

SEQ ID NO: 277263 - DNA, 36 bp, Homo sapiens; identical to SEQ ID NO: 220910
  chr22:46455649-46455685
  hypo

SEQ ID NO: 277264 - DNA, 95 bp, Homo sapiens; identical to SEQ ID NO: 220911
  chr22:46455925-46456020
  hypo

SEQ ID NO: 277265 - DNA, 471 bp, Homo sapiens
  chr22:46498385-46498856
  hypo
agcaggctcccagttcatcccgcagcctcgtgtcgctgctccagctgtcccgggtacgacgtgcccttctccaaaaacacctcacccacccagctgggctggcctcgagaactggggagtcagaggcccttggctgtccctgaaaaaggaaaacgggcctcctgatgggggcttcctgggctcacccaacacagaaggacctcctagtgcccgtgcgccggcaggtaaacctctttgggtccccgttccctcatccctgaaacatggggagcacagttgctcctgcgctggctgtggctgtgggggaaggaagagccgctccattcctgcgtttgatcaggttgtcacgaggactgagtgagtcaccaggtgtgaggggctttggtgggtgtgtcacagtggcaaagcattcacaccggccaggtccccagctgggagcatgtgcccaggagcctgcggtgtgcagctggt

SEQ ID NO: 277266 - DNA, 58 bp, Homo sapiens
  chr22:46499693-46499751
  hypo
ctgttgggggggtgccgtggaaggtggagcggggagcagcctccgatccctggagcag

SEQ ID NO: 277267 - DNA, 171 bp, Homo sapiens
  chr22:46505610-46505781
  hypo
ctgggctctgttgtgtgcaccgcctgtctgcagggcccagcctgcctcgagcactccctggggacagaagctcctgcgctggcctctcctgtcacctagccaccgggcatcctggagtgcagccctcatgccccgaggccacctgccatcgcccaggatgactcaagatgc

SEQ ID NO: 277268 - DNA, 333 bp, Homo sapiens
  chr22:46521745-46522078
  hypo
tcgcctgagagtggcgtcttccaccctctgaccgccatggctccacaggcagcccgcaagagcctccagcctctggcagccctggaccagaccttggtaacacctgccccattctacacagccgaaccaaggcactgagcgctcaggagcccagaggaagcctggtggctgtgagccgggccggctggctcattcagcccaggccccacccgccctgggatgatctggaccccggccctgctctcagctctcaatgctcccttcccagatgagccaagacgtcccatgcagacggacaccttccccaagtgcccgtcccggcgctgcacagcc

SEQ ID NO: 277269 - DNA, 132 bp, Homo sapiens
  chr22:46555874-46556006
  hypo
tagtgtagggacagagattccgatcacaagctgtgactggaagacgccgaccaccactgcagcagcctgaaaaccacagtcttgaaccgccagcgaagggctgggaagtgcggatccagggctggtgcactg

SEQ ID NO: 277270 - DNA, 159 bp, Homo sapiens
  chr22:46582357-46582516
  hypo
cgtgggctgggggccgagggagcaaggattcccagtaacgagggaggaaggagcagcaccatgtgcccattactctatagacatctcgaaccacctggccatgtagctgtcattaacctaaatttacagttattgaaactgaggttcagccaggcgtag

SEQ ID NO: 277271 - DNA, 43 bp, Homo sapiens; identical to SEQ ID NO: 220915
  chr22:46585895-46585938
  hypo

SEQ ID NO: 277272 - DNA, 181 bp, Homo sapiens
  chr22:46594236-46594417
  hypo
agtagcttggagctcggcggcacaaccagcaccatctggtcgcgatggtggacacggaaagcccactctgccccctctccccactcgaggccggcgatctagagagcccgttatctgaagagttcctgcaagaaatgggaaacatccaagagatttcgcaatccatcggcgaggatagttc

SEQ ID NO: 277273 - DNA, 367 bp, Homo sapiens
  chr22:46597070-46597437
  hypo
gaaagacacagagccgggcctggaccccgcctctcagcttgctctagagggctattctctgcatgctggcatgatcgcgccttgtaaaaggtggcagtgttctcagcttagtcaatcaggaattgcaagaggcaagtgagcccctgaggactctggggggcctttgtgaccgagcagctttgggagtgaccctgacagacctttacaggtggtgcaagttttgactccctttctcctggcgcgttaagcagaggataagcgctgtggaaggagtgaaggtgtagggagatcatggcccccagagcagtggggaaggggacagggaggctggaggagagcaaggaaaaggctccgtgtcaggtggcgc

SEQ ID NO: 277274 - DNA, 120 bp, Homo sapiens; identical to SEQ ID NO: 220916
  chr22:46598479-46598599
  hypo

SEQ ID NO: 277275 - DNA, 217 bp, Homo sapiens
  chr22:46599515-46599732
  hypo
attgggcgaaaaggaaaaaagaaaaaaactctcagcaaagctagaggggatcctgccaatgagttcccagctcacagactgattagcaggccaccacacatgagctggaggccaggctcctcccgctgcgcaaggtgagaacttcccgtggctccaccccattctcccaatgcccaggtgggtccccgtcccttgcgggcctgtccagacaagggaa

SEQ ID NO: 277276 - DNA, 94 bp, Homo sapiens; identical to SEQ ID NO: 220917
  chr22:46678247-46678341
  hypo

SEQ ID NO: 277277 - DNA, 634 bp, Homo sapiens
  chr22:46704066-46704700
  hypo
gaaaaatttgacttcgatctttcattgtcttcttcgaggtaaacaaatgagttttcttcccttgccttgggcataaccacattcagtaaagtctttcctttaaatgccagtgttatgagttattaatcattctttttttaaacaaatagtgcaaatgaagatgatgaagtcttcttcggaccctttggacataaagaaagatgtattgctgccagcttggaattaaataatccggttcccgaacagcctccgttgcccacatctgagagtccctttgcctggagccctctggccggggagaagttcgtggaggtgtacaaagaagctcacttactggctttacacattgagagcagcagccggaaccaggcagcccaagctgccaagcctgaagaccctcggagccagggcgtggaaagattcatacaggagtcaaaattaaaaataaacctctttgagaaagaaaaggaaatgaagaaaagccccacgtctcttaaaagggagacatactacctgtcagacagccccttgctggggccccctgtgggtgagcctcggctcttggcctcctccccggccctgcccagctctggtgcccaggcccgcctcacccgggcgccggggcctccgcact

SEQ ID NO: 277278 - DNA, 317 bp, Homo sapiens
  chr22:46745023-46745340
  hypo
gactccatctcaaaaaaaaaaaaaaaagtggactctggaaagtgctctgcttccgtggcgactggtcggctgaacttggtctcacttgtcactcagttctgctgtttgtacctgccaagtaagggagggggactcgggaggctgggcagcctccagccccaccgcctccacctgcatcactttgggcgagtcatatgtgatgaactgggccggctccagtctcccctctgtaacgtggggagaattctccctctcacggctaacgtgggaatcggcagatggaaaacactagctacgcagagtgtgtactgtacacg

SEQ ID NO: 277279 - DNA, 351 bp, Homo sapiens
  chr22:46748629-46748980
  hypo
gcgatgggatcaggcgtccgcgctggccagagtgctgctcgctcatgtgcagacccttactgcggtgaggcctgcgtgagcctgtgctgtgcctggtgtcaggggacaggctccgagtcagtcacagtgtgcagtcctgctgtggggacagagtgcagccattgttgggttagtacagtggcggggatgtgcctgccggcgtgatgatcaggcaggtcttgacacagcacagacctgagctgtgggactggccaggagagccaggctgcagctcaggtgtagggcgtcttgcagtgaattgcacttggagatcttccacctcttgtggaggggagacggcaggcggagccg

SEQ ID NO: 277280 - DNA, 249 bp, Homo sapiens
  chr22:46750300-46750549
  hypo
cttgggtggaaaagcaaggacgcgggtgctgctgcatctgtgggtcaggccggggatgctgcttgccgtgttcagcacagcctcttccctgagtgacccggcctccaccttggcgcgtggagctgagaaggcccactctcagcaccctggctgccggctcatgttctggcacgaatgctggggcgccttctcttagacggaggcgggggccagcaggccccacccaccgattccaggacatctccttac

SEQ ID NO: 277281 - DNA, 94 bp, Homo sapiens
  chr22:46751900-46751994
  hypo
accctcaatcaagatggcaccgtgtgggtgacagctgtgcaggctgtgcgtgcccttgccacaggacaggtgcgtggggtgtgggggtgagccc

SEQ ID NO: 277282 - DNA, 42 bp, Homo sapiens
  chr22:46755416-46755458
  hypo
ccctgtcacctgggccgggggagtcgacgccctgtggcttgg

SEQ ID NO: 277283 - DNA, 444 bp, Homo sapiens
  chr22:46770692-46771136
  hypo
ccattgcggggatgcgcccggctgcggatgtgaagaaacccctccgcaggagcagcgaccctgccatatgggccccgcacacggagcccccgccagcccggggcctcggcctcgggaagcacctgggaggcggcggggaaggttggccctggctggtctgacacacgcctcggggctcgtccttcatgggccaggcctggtgctccacctaccactgctgggaagccatggaggcttctcaagggtgacctgcgaggtgggggtgcctgccttccctcttgaggtaagaggggtctggtcccaccgcttgccgtaaaaaaggaggagcagctcaggtctgcacgtggccctgagcagctcgccggaaggttccagcctggtctttttattccgtttcccttcccagggccggtccagccccacagacaccgtctccacccacga

SEQ ID NO: 277284 - DNA, 110 bp, Homo sapiens; identical to SEQ ID NO: 220918
  chr22:46785285-46785395
  hypo

SEQ ID NO: 277285 - DNA, 141 bp, Homo sapiens
  chr22:46786062-46786203
  hypo
ctctgggggagagaagtccacgtgggggtgcctggctcaggtgccaacaccccgaagtccacaggaacctgctggctccaggctgcgggcccgtggggctgtccctgcgccatcccagccgccccaacactccccagccca

SEQ ID NO: 277286 - DNA, 402 bp, Homo sapiens
  chr22:46787966-46788368
  hypo
acagtgggcaccttcgtatttgtcctaaaaagaatcagagatccaaatggaggcttacgtatggggatagcccttgggcgtttttttaaagttgttttgaaaaattagaagccacctgaacgtccaccattgggtgggtcagggtgacaatcaagagcttgtacttcgggttcagaaagtcctgggttcatgcctgacccttgccgtttaccagctacattgcctgggctggtcaccgggactccccaggcccaagtagcaccccctcaaccccgccccggaaaacggggcaggctgtgaccaggctgtgacttgggcagactcgtgagcaacgttcagacctgtgtgtcaggtggggactccgactgtgtgtaaaatgacagtgaacgacaggcccagaag

SEQ ID NO: 277287 - DNA, 98 bp, Homo sapiens
  chr22:46790967-46791065
  hypo
cattcactcacttggcgagcaagtattaaggactgtgtacaaatcagggtcataaagacaaccaggccagagatagagtctggcgtttatggatgtgt

SEQ ID NO: 277288 - DNA, 245 bp, Homo sapiens
  chr22:46804736-46804981
  hypo
atattccccttccccctcttcggagaaccccaggggcgggcgccggaggaagggcgagtagcaggtgcccgagtgtgcaccaggaagcccagcgcctgggtccctccctcgggcacccacctagcaggtgccttggtggcacggggccccagtcacctggaggcgaaagctggtgggcccaccactggtggcctccatcagaacgctgtcctccttccgggtccggaacatgagccccaggtacc

SEQ ID NO: 277289 - DNA, 407 bp, Homo sapiens
  chr22:46805659-46806066
  hypo
cagttcttcccgccgaatcggagtggacactcacacagatacatattccacctgttgacacaggtgcctccattctgacaccgcctcccatcgcagaagttcctccgagcagcgcagcctggcaacacagagcgtgcggcagagcctgactcggaggaaccgcccggggtccccggcgccagacgtggcgtgggaaaccaggacggaatggacccggggctggacagaagtcagaccaggtctgaacgcccctggcaacggcaggaacatgggaactaagaaggtgctgaacgcactgaccacatttggagacgctgggacgccaggccatcacggcagccggcccggtcacctggtgacacatatgcaagaccctaggatcatgtgcgcctcgggttagctggctg

SEQ ID NO: 277290 - DNA, 604 bp, Homo sapiens
  chr22:46812243-46812847
  hypo
tactgcgcagcagccggccaggcccagaggaccccccccaacccctgcaccaacaccccttgcaggaaaggcaattcccaggcctcgcttccaggacataaagctcagtagctggacctggtcactcaggccgagcaaggcaggcagcgcacacagtgactggagacagcaggggctgcccacggtacctctacacccctcggcgggcaaccctggccagcacaggctccctggggcaggcggaaacagagccagcaaggaaaagccacatgctcactcctgcagccacctgagaaaaaacctacagtgccgctgagcactgcaaggagtggcccagaagcgctaagctgtgcagatccggaatcctgctccaggagtcatccccggggtccagcctcttcttattttccttcgaggtattttcttccctgcgtgcaggccctcctccttggcttccactcagccgctctacgcagtgctgggagtttctgtgtgcgcacaaaagcatttggtccttacgaagtgctcacatttctccagccttttaacctgctgcagacgattctgcattgggaggccggtgggggtacggtttcaatgctgg

SEQ ID NO: 277291 - DNA, 222 bp, Homo sapiens
  chr22:46813168-46813390
  hypo
gaaagtggtgggaagggtcacgaggagcaaattcacgcagatgcacgcagccttccagaattcaaactggcctcccaggagcctcggacaggactttgccagaatgcaaacctcagaccgagctgctacttcctggtggtcccaatacccctaggcaggtaacaggaccctgttccgccaggtagccaccctctacacaggggctgccggctgcttttgatg

SEQ ID NO: 277292 - DNA, 745 bp, Homo sapiens
  chr22:46815672-46816417
  hypo
ctcacactcaaatgcgccctcacccatgcacatgcactcatactcgtgcacatttacccacgctcacgtgcatacccgcattcacacccacatgtgcactcccacacgtgccttctcacattcatgtgcatttattcatacgctcacacgtacacttacccaaactcatgcacactcacccacgcacacgtgcactcacccttatgtacactcacccacaatcatgtgcatactcaaaacccacgtgcacttaccgacactcacactcaaatgtgcactcacccacacgtgcgctcatactcacatgtgcacacctacccacactcgtgcatactcatccacattcacactcacatatacactcacccactcaaatgtgccctcacccacacgtgcactcattcatactcacatgtgcacacctacccacactcgtacatacccacattcacacccacatatgctcacccacactcaaatgcactcgcccacacacgtgcactcatatatgcacactcagccactcatgtgcactcacgtatgcactcacccactcgtgcactcatgtgcacatttacccacatgtgcatgctcacccactcaaatgtgcactcacccacacatttacacgtgtgcttcttcacacacgtgcacacacccacacacatgcatactcacccaggtgcactcacccactcacgtatgcactcacacgtgtgcacacgtggacacacccactcacatc

SEQ ID NO: 277293 - DNA, 270 bp, Homo sapiens; identical to SEQ ID NO: 220922
  chr22:46816771-46817041
  hypo

SEQ ID NO: 277294 - DNA, 196 bp, Homo sapiens; identical to SEQ ID NO: 220923
  chr22:46828035-46828231
  hypo

SEQ ID NO: 277295 - DNA, 86 bp, Homo sapiens
  chr22:46835121-46835207
  hypo
ccccggaaggtgacgaaggactggggcgggaagctcctggtggtcacctcacagtagggcctctcatactcgccaggaggacacac

SEQ ID NO: 277296 - DNA, 191 bp, Homo sapiens
  chr22:46838112-46838303
  hypo
ccttcccctccaggacggggctctggggtgtgggttgctgatggctcacagctgagaccctgcactcagattccgcctcccggcccagttccactgccctcgctggggcagcccccatccagcaatgggtcagggtggacacagtgaccatcagactgcccaacgcaggccatccccgaggggccatccca

SEQ ID NO: 277297 - DNA, 203 bp, Homo sapiens; identical to SEQ ID NO: 220924
  chr22:46838991-46839194
  hypo

SEQ ID NO: 277298 - DNA, 175 bp, Homo sapiens
  chr22:46847860-46848035
  hypo
tggagccaggcagccgcaagccaaggcctgcagccaccaggcgccggggaggcaggggggctcctcctagagcctccaggaagcgcagccggccctgccaacaccttgatttcggccttccagctgcagaactgagggaaggcatgtctgttattttcagcgccccggtttgtga

SEQ ID NO: 277299 - DNA, 283 bp, Homo sapiens
  chr22:46850525-46850808
  hypo
attccacacctagttcagctcgcccacctccaagctgtccgggtgggacgcgggaaaccctctgctcctgcgcttagcgttcgcaaaggtaaacacatcgcagaaacctgcctcccaccctggagtggcccgtggtcctcgcagacacgcgacaggcaggccagtgagaagcgccaacagccctggttcccaaactccttagctcctcagcgaaggagcacccacggctgaattgtgtccccagaaagatacgctcagttacgaactcccagtacccttgaaa

SEQ ID NO: 277300 - DNA, 235 bp, Homo sapiens; identical to SEQ ID NO: 220925
  chr22:46859885-46860120
  hypo

SEQ ID NO: 277301 - DNA, 102 bp, Homo sapiens
  chr22:46867879-46867981
  hypo
ggtctgcttgattccgggaggcacggcacccacccagcactctctctgcccgtgctccaggcattcctcccaggcctggagcggctccgcggcacctcaaaa

SEQ ID NO: 277302 - DNA, 44 bp, Homo sapiens; identical to SEQ ID NO: 220926
  chr22:46888632-46888676
  hypo

SEQ ID NO: 277303 - DNA, 167 bp, Homo sapiens
  chr22:46905651-46905818
  hypo
ggaggaggggtttcacgaggggatggctgtgggggtcaacagggtagcaggtgcggcagggcagtacccatgcacaatgcaggggctcagtccagggacccggcacacaggtgagtccttctccaagatgtcatgatgcgtccagtgaggaacgaaagacacgaagt

SEQ ID NO: 277304 - DNA, 299 bp, Homo sapiens
  chr22:46921744-46922043
  hypo
ggacccttcagcagcgacactggggccagcgtggggttctggcacgcccagcaacatgggcccgctccaggcgtggccagcaccgcccctcctgccggctcctgcccagggctttgggaacttgcccggagtttcacctgcctgctacttcacctagacttttaaaaatggtctctcaacaccctggtcggtacatggggccagacatagacctcttgtccccgggcagctggtgctgaggtgggcgccctgccctggtgagtccatgtcccgtggacctgtggccccttccattctcc

SEQ ID NO: 277305 - DNA, 82 bp, Homo sapiens
  chr22:46922073-46922155
  hypo
cctccattccctccaggtctgatgactcagagagaggcagaagttactgtcctggcaaacccgtctacgaagcttggccaca

SEQ ID NO: 277306 - DNA, 1035 bp, Homo sapiens
  chr22:46929238-46930273
  hypo
cactagcctgctgaggaaggcgctgatccccggtcttgaacttgggagaaccgcaggcctgctcccaggaaaatgctgacggaagcggcgcggtgcctctccccctcgctgggcctaggccgggcgcccacccccagcatccaaccggcggcaacaaatccttgcagagttgcccgggcccggcccaattgcgccccggcatgccaggcggagcccttggcgggttcctgaggctctccaggaggcccatcaggagctactcctcccaccccgacggccactcaccagacacagacacctccatgagcgcctccagcggccggttgttgtccaggtcgcggctgagctgcagttcgcccgtggcggggtccagcagcaacaggcgcagctcgttgccctgcacgaaggtgtagttgaggctgtctgacacgtcggggtcatgggccgggatgcagccgatcacgccggtggggaaactgttggacttgttggtgacatagttgttgaagaggatctggaagtcgggcagcacaggcgggttgtcattctggtccacgagaaggatgtgcaccgtggctcggctcaccagcggagccgacgtggcctgcaccaccagcacatactcccgccggacctcaaagtccagctccaccatggcacgcaggtccccgttgagcaggtccagctggaagaaatgccgcatgtccccttccacaatctgatacatgatctgggcattagggccttcatcagggtcgttagcacgaatctttgccaccaccgaccccactgggttgttctcctcaacaaacagctccagttcgtccttctcaaacatgggggcattgtcattaatgtccaagatggtcacctggatttctaccgaggcgctaaggggagtgggactgccccgatccacagccagagcccaaaggttgtacacggccacattctcccggtccagccggcgctgggtgcgaatcacaccggacgtgggctcgatgtagaagtccccatcgccgtcgtccccaccct

SEQ ID NO: 277307 - DNA, 31 bp, Homo sapiens
  chr22:46931122-46931153
  hypo
cctcgcggtccagctcggcacacactgtgat

SEQ ID NO: 277308 - DNA, 776 bp, Homo sapiens
  chr22:46931418-46932194
  hypo
acccctgaagaattgatgagcgggggccggcccccatcctgggccttaatgctcagcgagtatttctggacatcctcgaaatccaaggggttgatcacatccaggatcccgctcagcgagtgcaggtagaactggccggccacgttcccgctgaggatgctgtagtgaatggccgcgttctggccctggtcccggtccgtggcctgcactcgcagcacagccgtgttgagccccacgtcctcgggcacctggaccacgtagttctgctcgctgaactgggggtagttgtcgttctcgtcctccacctcgatgtacacggtggccgtggcactgagcgggcccggattgcgcccctggtcgttggcctccaccaggagctggtactcggccgcctcctcccggtccagcaccgcccgtgtgctcaccacgccagagctctcgttgagctggaagacgtcccacgcgccccccaacacgcggtaacgcaagttggcgttgatgggcgagtcgcggtcgctggcgcggatggtcagcacctcgtagcccacctccaggttctcccgcacgcgctcgcggtactccgactgctcgaagaccgggctgtggtcgttggtgtctttgaccaagacagtgatgtaggtggtggccgagcgcggcggcgtactgtagtccacggctttcaccctgaggacgtgcgtctccttggtctcgcggtccagtacgctgtccgtgctcacggcgcccgtggcagagtcgattcggaagtagccccggga

SEQ ID NO: 277309 - DNA, 372 bp, Homo sapiens
  chr22:46979973-46980345
  hypo
gttccagtgctggccgtcgggttccctggatgcaccccttcacggtgggtggtgtgagtccttcctcactttctggccctgtgagatgctccaggctcagcttgtccattccctgcccaggcctagagtcagccccttctgcagggagcccgggttccttttgttggagggcagaatcggaaaccaagatccaggtggcgggtacgctcatcactaccggggtgtcattgcttctgggccctcttagctgacagcaaggaaatgcacgtgtgagctgacgcgcacatatgtacgtgtctctgcctgtgtccgcgtgtagcctcctgtacctgtattgagcaaagtgtgagttcgcgccgctgatgaactctg

SEQ ID NO: 277310 - DNA, 59 bp, Homo sapiens
  chr22:46992940-46992999
  hypo
tccacgcctgctttcgataagtcctgccctcccctgggaatcggcggccagacctttgg

SEQ ID NO: 277311 - DNA, 87 bp, Homo sapiens
  chr22:47004839-47004926
  hypo
cctgtagtaccagccgccccagaggctgagttgcgaggatcactgggcagtggcacgtgcctgcagtaccacctaccccagaggctg

SEQ ID NO: 277312 - DNA, 267 bp, Homo sapiens
  chr22:47004986-47005253
  hypo
aagaccttgtctctaaaaaaaaaaacaacaacaacccgaaaagcccaaaacatttttttttgttttttcttggctcttgggttttgccccagagacatacatcgcagaccgctgagtggcgctggttgctgtctgggccggcttggcctcaggcgatcctgttgccctccgcgcaggagcctgggtccaccttctcctggctgtgtgcttccttaaacacggaaggtgttccgcagcctgctgtgcggggtagccctgtgttgggct

SEQ ID NO: 277313 - DNA, 363 bp, Homo sapiens
  chr22:47005522-47005885
  hypo
tgtgctgggccccagggacacggcacgctgatggtcagagaggcccacgcacacactggattccgcattgtggagtgcgagtgctttggggatgtggaacagcagagcagggtctgcagagcatcccaccggggagggccgtggggccccaggcaggaggcggtgcttagggctggctcctggcttcaccagtcttcttcactgtgttgttgtttgtcactgggcagtaagaggcgcctctctgaaacctgaggggcggcccggctgctggtaggtgtggacgggggcctacactggtggctgttctgagtcggttcgccttccagcacccctgagtgtggcgccctccttgctggctcctct

SEQ ID NO: 277314 - DNA, 153 bp, Homo sapiens
  chr22:47014558-47014711
  hypo
cttcgggaggcacgcggctgcctggaccaggctggggtggtggggagaggggaggcacgcggctgcctggaccaggctggggtcgtggggagaggtggacagatgtgcagccccgtctggaggcgtgcggccggcgtgcgctgcaggttggca

SEQ ID NO: 277315 - DNA, 873 bp, Homo sapiens
  chr22:47022397-47023270
  hypo
cccacctgatgggtgcagggcgggggtctctgggtcggggttttctttggaaagctggaccggccgtgccctgcgtgtgggagctggctcgtggggcttggaggtgtgtgtgggagggacggtggcagggcggggtctctgggtcggggttttctttggaaagctggaccggctgtgccctgtgtgtgggagctggctcgtggggcttggaggtggcgagcgggagagtgaccacgcccctctcttgcagggaacccgagcgtcatgttagggtgaagcagaggacctcagtgctgaacatgctaaggaggttggacaaaatcaggttcagaggtcacaagagagatgacttcctcgatctagcggagtctccaaatgcctcggacaccgaatgcagcgacgaaatccccctgaaggtaccgcggacctcgccccgggacagcgaggagctgagggaccctgtgagtacctgtcctcgtcccccggtgtgggctggggtgtcgtccccgtcctctgtggccgggccaagcgtggactcaggcagattcgtgtcctgcccatgctggtcagagatggactgggcctgactctctgtctcacctgctcccgacccctgcagaccttgtggggccggggtgctgccacgccgagccttctgtgttcgcaggtctgattagcggctggattggttttcctcactggcttttctgggtgggtggcagacttctcacgcacatgtgacgcggaagcctcggcctggccctgggagcgttgacatgcggatggagcagggcgggcgttgtctggaagccgctggtgcctggcttgtcttctattcaagccaaggtgcacgtttccagcccccaaagctgg

SEQ ID NO: 277316 - DNA, 490 bp, Homo sapiens
  chr22:47023708-47024198
  hypo
tactgctgctgctgctctctcgacactgcccgatcaggcaggtggggccgcttggcttcctggggcatcactacagaccacagagtgcccggcctgccgggatcggccatccccaggcaaaggttgtggttggtcctgggggtggaccgggaccccggtagggtgtctgcccttgtgcaggttatgtggcagaacggcaggggcctgccttcgccggagagctgtgtctcatccgcctctggctggggctggcacagagggcatgggtcacgattctccgatggtggtctgtgtgctgagcatgtggtgggtgtctcgggaacaaaaatctccctcccgacacatacatggttcaacagggaggggtgacggggattccacgcaaaggccagagcggggctgtttccccagctccctctccgccatccgtctgtcctgctccaggtgttgtctcggtagggaccctcccgcctgagggaccctgtgagta

SEQ ID NO: 277317 - DNA, 197 bp, Homo sapiens
  chr22:47037419-47037616
  hypo
cggtcttgaccctgcgggttctctgcgcgtcacactttttgtccttggtagaccaggtcacctgctggacagtctctgctctggactgtgctgaaggcggcctaacatggtccataccctgtgcttcctggtcgtggcggggttgggtgaccctcgggggactatccctctgttggtggtgccgtgtgcttccatga

SEQ ID NO: 277318 - DNA, 297 bp, Homo sapiens; identical to SEQ ID NO: 220936
  chr22:47054011-47054308
  hypo

SEQ ID NO: 277319 - DNA, 273 bp, Homo sapiens
  chr22:47054675-47054948
  hypo
gtctgccccagccacgctgtggcccccgcccccctgcccccatcctagcagtatcatgtcctgggcgccagtgccgccctggctcctagagaggcatgtctgcacctgacatctttgctcttgtttgtgggtcccatgtgggaccctgagtgctcacagtctcctccctcaccctgccctgcgcctcacagtgccgccagcaggaagcaggtcattcaggaccccagcgcaagttacaaagccagtgccctcctgtctcgctaacaccacgag

SEQ ID NO: 277320 - DNA, 33 bp, Homo sapiens; identical to SEQ ID NO: 220937
  chr22:47056194-47056227
  hypo

SEQ ID NO: 277321 - DNA, 94 bp, Homo sapiens
  chr22:47059000-47059094
  hypo
cgtggaggacttccggttccagcccgaggagaacactgtggagacagaggaacccctgagcgcccgcaggtaggggttcgccgagctggggctg

SEQ ID NO: 277322 - DNA, 165 bp, Homo sapiens
  chr22:47064650-47064815
  hypo
ggccctgcggcgcccgcccggcctgagcctcccgtctccttccagcttgttcatgtgggtccagccggagatcacacagaagctgtatgtggcgctctgggctgccttcctggcctcctgcttcttcccctaccgcctggtggggcttgccgtgggtaagtagat

SEQ ID NO: 277323 - DNA, 89 bp, Homo sapiens
  chr22:47069564-47069653
  hypo
agctgcagacgacctcgtcacggagctacgtacccagcgcaccggccggcctgggtaaagaggaggacgccggtcgcttccacagcacc

SEQ ID NO: 277324 - DNA, 61 bp, Homo sapiens
  chr22:47074764-47074825
  hypo
gtcctatcccaggcggtggagcggagcccccgtggctctggactgcgcggacgttggcgtc

SEQ ID NO: 277325 - DNA, 234 bp, Homo sapiens
  chr22:47075161-47075395
  hypo
ggctttaccagcgtcgggtggtttagttcgagtcccttttgtggagaaagggagatgaaaactgaccacgtgccaggtgtggccgaagcccccagggagggccacattcggggagcggggggtcgggggagggccaccgactggctctgctgccagcacaggcccctccctggaagtcctcgggagcggagcgcggatcggcacgggctctgggctccccgtggagagaagctg

SEQ ID NO: 277326 - DNA, 264 bp, Homo sapiens
  chr22:47107084-47107348
  hypo
tctgtgagtcctcacgtaaaaggcaaatcatccattcttttaaaatgagttcctgtaacaccttcaggcggatttcctagataaaattccctcttcaattctacatcgctcttatgggacgggatcaagctgacctcagggaacgtgaacatgaacctctctcgggccacagtctgcgcgatgacatgcagcgttcctggtatttaattgccggcaaataataatttctttgaaagagattacgtctcttttataatttttcct

SEQ ID NO: 277327 - DNA, 212 bp, Homo sapiens
  chr22:47113342-47113554
  hypo
agagaatggacaaacggcagccccacgcgagagcgtggaaaatttatgcaagactactcgccaccacggtggaaaacagcgtggaaaacttcacaagtgtcatgttgagccgagagccaggcacaaaaggtttcatactgtatgatctgatttctatcaagtacaacagtgaacctagttgtttagaagtcgcagcagtggttcccctttgg

SEQ ID NO: 277328 - DNA, 95 bp, Homo sapiens
  chr22:47139211-47139306
  hypo
aattgaaaataacaccgcctgaaggcatgtgcagagggtgctgaccccagcttaaagagagggtgtggttcgggcacactggttcacacctgtaa

SEQ ID NO: 277329 - DNA, 160 bp, Homo sapiens; identical to SEQ ID NO: 220938
  chr22:47163644-47163804
  hypo

SEQ ID NO: 277330 - DNA, 284 bp, Homo sapiens; identical to SEQ ID NO: 220939
  chr22:47172072-47172356
  hypo

SEQ ID NO: 277331 - DNA, 203 bp, Homo sapiens
  chr22:47187931-47188134
  hypo
acaggcgtgagctaccgtgccaagcctgttcaatcttttaaaaaattatatttatcttttgcaattctgcattcaatttcagacaaaatgatggcaggtgagaattcccaggtgggcgtttcttcgagtttttagtctgtgggcagaggcctcagttccttcattgcactcccagacaccctcatcaccgtgtagatgcccga

SEQ ID NO: 277332 - DNA, 115 bp, Homo sapiens
  chr22:47189586-47189701
  hypo
taaccacagccagcggcaggggcggcccacgctgcaggaggggccagggcttcagcagaagcccaggcccgaggcagagccgccctcaccccccagcggcgacctccggctggtg

SEQ ID NO: 277333 - DNA, 119 bp, Homo sapiens; identical to SEQ ID NO: 220940
  chr22:47192836-47192955
  hypo

SEQ ID NO: 277334 - DNA, 171 bp, Homo sapiens
  chr22:47193289-47193460
  hypo
gtagtcgggaggagcgccctcaccctcacccccattctctcacccctgcagaaagtgccagcgatgccgcccctctgcagaggtcccagtctctcccacactcggccaccgtcacgctgggtggcacatctgaccccagcactctcagcagctcagcgctgagcgaaagag

SEQ ID NO: 277335 - DNA, 885 bp, Homo sapiens
  chr22:47197333-47198218
  hypo
ctttgtttagcttacgctctgttatgagcctggggatgaaagtagcaaatagaacttaatagctcattttactcttagcattggctcaatatttactcacacaaagactgcctgctttgaagccccggaaaatgacactcaagttggtcacatgtatctggtgaatggtagtgcgatttggtaacatgtagaacacgcagtttcctgaggaccgtctagggcctgcctcgcagcagtggggcctcggagggcaaactgtgtgtggagctcagctctggccctcaaggctttcgaacggtaggacagaaggcacgacgacccgtccgtcaaggagtggggccaggccacggctgtgttccacttcccctgaggggtgaccatccagtctaggctttatgagagcgtgctgatagatggaggtcagcgggagagggtgttttgggggttgggagggcatgaacagaagtttggagccgtacaccttggcagcactaatacgagtagatgcccccttggtgtccgtggctctagggcagccgtgaaggggcctgggcccttggtgacaggaggaagcaggtgcggccttggagtaggccctcagtgtgatggctggccgtgtccttactcatgaagtggctcaacctacctgtttcgtcagctgtagagggagcatgagacctgccctgcagggtcctcgtgaaggtcagtgggaatttatgtagagtcactcatccaggctctgttgagcacctgctgtggttgtaggcactggggaggaatcggcggcgaggcttgcgagggccctgccctcaaggagctgacattctcgtgtgaggagacagagggagctcgctcagtacccccgcaaccatcagaaggcaggaa

SEQ ID NO: 277336 - DNA, 1004 bp, Homo sapiens
  chr22:47298495-47299499
  hypo
ctgggacagagccccgctgtgtccgctaaaccagcccttccactgagctgactcttcgcctccactcagagtcccgttcaagtgggcacgttgttttcacctttcctgcgataactgcaagcaacacacctgcatttttgacacacaaagttgtaatggttgtgattcccgaagaacaccagcagacagacacccggtgggcacgtggggacacgaagactcagatgtctctgtcctcagcagcgcacagttgaagtgagggatgaagacagatgtgcgtgaaacccagagagatcatatacagttgtcaatgaaaccacagtttgtatcctgccgactgcattccagggtggctgaaagaattggagaagacagcccgaggaggggcagcgtatggggcagtccactctggagggtcatgcccaattgctggggccgcctcacgtctctgctctgtgatttcttctatttcctggcccggttgggccgtggatctctccctggtgcacctggagtctctgtggatctctttcctcaggggactctgcaacccagcctcacgccctgcagggggtcacagacctcagcctggtgggcgttcgggaccgagggctgagggccgagggttgaggtgaagtgcagtggcacagccatcccaggctgcaggcgaaggggctccccttcgagaacccacaggatggtagcagagcgaagttcagcctgcgggggcgtctgtactcggggaagctgtggaccaggcatggagccagcctgtttgccctccccgccctgatggctgctccggctggctaggcctcttctctgagattcttggcttagtacctctggcttttgccgcttgaatttggggacctgtcggctcttcctgtttcgcttcagtggacttccaccctagctctcgcctctggttgctgctctgagcgtgagtctagagggaccagcaaggtcctgagggagttgcgaggaatcgggccctgtccagg

SEQ ID NO: 277337 - DNA, 145 bp, Homo sapiens
  chr22:47307379-47307524
  hypo
tgcacggtggcccgcggggtgtggaggagcagagcgcttctgctgggagagccagctcagggacggactgagccaggggctgctgaagtgctgcacattgcttgtgggacaataaataattttttttaaaatcaagtttcaattg

SEQ ID NO: 277338 - DNA, 290 bp, Homo sapiens
  chr22:47327901-47328191
  hypo
agattgattcattgtcgaggaatgccttattctgatgttacgcggtttctttcctggctcatgcatgcccccatttgtgcgtttatagaaagtgtaagtcctgtgctagtcagagcaagactctgtcagtgaagacgatggtgactagtggcgggttcaccgtgtcagacactgcgctaagcaggtcattacatgatcacctggaattcttaaatgccctctggcgacaccaccatacatgactgttgtgactcccccaggttgcccgtcaaggccgtgctgtgaccgtt

SEQ ID NO: 277339 - DNA, 198 bp, Homo sapiens
  chr22:47354378-47354576
  hypo
ggtgtccgtctcaccgttggagagctgggagtcctggccagttccacctgttcaatgtgtgatgcagagttaattctccagcccatcttcactcagccagcctccgtgtctacttggcacaaggattagctcttcatgcataagcgttttgtagcagggcgtctctagccctgtgcccagcgtcgggacttttccccc

SEQ ID NO: 277340 - DNA, 110 bp, Homo sapiens; identical to SEQ ID NO: 220945
  chr22:47370212-47370322
  hypo

SEQ ID NO: 277341 - DNA, 305 bp, Homo sapiens
  chr22:47372443-47372748
  hypo
aaaccacggcaacacgcagaccggcgtgtcagctcccggacgacctggccgcttctgcctcttagctccttttcctactcttggtcttactgtctccatttcattcttttggaactgctcgaaccatcttccttaagcaccctcttcaccacatcatcgccctgattgaaacccttggggaagctctctcttggttttctgaagtgcaggctctcagcccggcctccaccagttgttcccagcgttctttcaagggcgtgtttgttcatcggctctgtggcagccgtccacgccgttgctgcaga

SEQ ID NO: 277342 - DNA, 187 bp, Homo sapiens
  chr22:47380645-47380832
  hypo
gtcagagaaaaggccagaaacgcagtggcgtcatgactcctttagagaaaggtcaggaaacggccaggcccatgactcggggtggagtggactctgcctgtgagcaggtattgcccttcaggtggggctggcgtgagttgaccattgatgttaataccagggaggcgacagggtagttgggggaagc

SEQ ID NO: 277343 - DNA, 154 bp, Homo sapiens
  chr22:47381551-47381705
  hypo
ctgttggtggcagccgaggctgtttctggtcttgggctgttgtgaataacatttctgtgaacactcatgtccacatcttcttctagtggcctgttaagttctggctgttccacgtcagaatgcgatttctccaacactgcgttccccacagggt

SEQ ID NO: 277344 - DNA, 235 bp, Homo sapiens
  chr22:47393097-47393332
  hypo
ggtgctgtcagcaccgggcacctttgccgttggttcccggcagggctgagtgcttagggtccaggtggccagcgaggtggtcagttcccacagacggttctggtcaatgagctatgcccatggatgcctgtttttcaatttagatgtaagtgtcttacatttacaaatagaaatgtaccattcagtgttccctgagatgcacgtgcttatcacctgacatcgggaaatactggcc

SEQ ID NO: 277345 - DNA, 63 bp, Homo sapiens
  chr22:47405907-47405970
  hypo
atgccaacaaaacgcggtactggagaatggttccacctgtgtgggaaacggctttatgtacct

SEQ ID NO: 277346 - DNA, 181 bp, Homo sapiens
  chr22:47406193-47406374
  hypo
cagcgcagccaggccggggaacaggcagcgtggctccctccccctggctctcgtcctcattaggctccagaagggcagagctgagcgtttgaaatgatagtgatatttcatctgagacgtaaggacatgacaattggcaaggcacatgcgtaattgctgttatgtgcgacctaaggtgtgt

SEQ ID NO: 277347 - DNA, 364 bp, Homo sapiens
  chr22:47411015-47411379
  hypo
gggcacagagccaccgtcggagtcacacatcgcacacacccagcaagtgatagtgtgtgaccggacatggtgctgaaggtggcctatgtcagccatgggcttggtgattttgagagccaggatgcggttcctggcgcaggtgcctgggggcgcctagaggagtgcgagactcccgagggtccctctgcctaagctgcctggggagggcggctcgctttatttaattcacacgctcaaagcatttcaggaacaatgaatgccttcggccctctgtttaaatgactgaattatagaggtgtgagggggccacgcccaccccgttttacacttggcgcctcccttctaatttcgaggaaacctgcaa

SEQ ID NO: 277348 - DNA, 272 bp, Homo sapiens
  chr22:47428637-47428909
  hypo
ctgacttcagcttatctccacggcagagcttcattcacgccagtgcaaggcggcacccacttgctgcagcccagacgtccacgcagagctgtgggctgggagtggccagtgaaaccaggtgccacctgccaggccaggcacctgccctggaacgttcctttcacactgccgtcccaggctgccctgtgtggcccctccttcctcaggcgctttgtttcaagcagtgattttcctctggggctgtcgctgtcgtcctggctgctcttccccaa

SEQ ID NO: 277349 - DNA, 360 bp, Homo sapiens; identical to SEQ ID NO: 220948
  chr22:47436579-47436939
  hypo

SEQ ID NO: 277350 - DNA, 74 bp, Homo sapiens
  chr22:47441099-47441173
  hypo
gtgaactgtggctgcgtggcacctggctgcacacgcggctgtgtgttcactgtccctcggactctgcgggaaaa

SEQ ID NO: 277351 - DNA, 110 bp, Homo sapiens
  chr22:47441203-47441313
  hypo
tcctccgcggtttggaagtcccattaatgcgacttctctctgagaagtcaacctgggcctcctcactctgcagacgtccagctccctcccggaagcggtcatgcagaggt

SEQ ID NO: 277352 - DNA, 214 bp, Homo sapiens; identical to SEQ ID NO: 220949
  chr22:47455004-47455218
  hypo

SEQ ID NO: 277353 - DNA, 92 bp, Homo sapiens; identical to SEQ ID NO: 220950
  chr22:47465507-47465599
  hypo

SEQ ID NO: 277354 - DNA, 120 bp, Homo sapiens; identical to SEQ ID NO: 220951
  chr22:47465779-47465899
  hypo

SEQ ID NO: 277355 - DNA, 120 bp, Homo sapiens; identical to SEQ ID NO: 220952
  chr22:47465959-47466079
  hypo

SEQ ID NO: 277356 - DNA, 120 bp, Homo sapiens; identical to SEQ ID NO: 220953
  chr22:47466259-47466379
  hypo

SEQ ID NO: 277357 - DNA, 59 bp, Homo sapiens
  chr22:47486206-47486265
  hypo
cccagtcccagcccagggagcgctcagacagacggggcgtcttggaggtgcatagacat

SEQ ID NO: 277358 - DNA, 137 bp, Homo sapiens
  chr22:47489047-47489184
  hypo
tcatccataaaggagataggcgtgtgcaggcggtgcggtacttgtgacgggagcttgtgaagtgagccgcctccctgatgtgtcttggcggccagcaggccctgtgatcctgcgccgagtctcctgtggtctcctct

SEQ ID NO: 277359 - DNA, 49 bp, Homo sapiens
  chr22:47511004-47511053
  hypo
ctggcccctggatggcggcaccttctggagtgaacgttggccctgtcct

SEQ ID NO: 277360 - DNA, 280 bp, Homo sapiens
  chr22:47525841-47526121
  hypo
ctccccaccagacaggttaccggagcgggcgtgtctggaggagcaggcagagcaggtgctgtacacctcgtgtcctctgggacccatcccttctaggcccctcctcaggacaccccctcctgccgggctccccccaagcgcagcccccttcccaaacccacgtttgcctcactgtcttccttgtccggtagagcacacccctcagcacttctctgtgtgaatgagcctggcagggacctaccttgagatctacatgtctggataccgctgccttctggcc

SEQ ID NO: 277361 - DNA, 227 bp, Homo sapiens
  chr22:47532466-47532693
  hypo
cctcttgcaccctgttgcatcggtagggtggtggcagatgtgtactcgccccctctccagagcccccagacctgtcccggtgtcccatctcacggtaggtctcctcccagtcgccccggggctgtgggtgtcgccagcccatgctgtgcaggtggcgagtgtgagcaaacctggtcccgggccctggctacgtcttcactcggcgcgggcaaagaagaaagtaaaat

SEQ ID NO: 277362 - DNA, 411 bp, Homo sapiens; identical to SEQ ID NO: 220954
  chr22:47534596-47535007
  hypo

SEQ ID NO: 277363 - DNA, 747 bp, Homo sapiens
  chr22:47540105-47540852
  hypo
gtcgccacgcaaggcggtctgtgtgactgcaccagcgtccctccttggcccctgtgcttactgagcccctgtctgcctggcgtgcacacagtatacaagcacatacgcgcatgcacttagggcacactcaggggctctccagagtcagtgcccaccacctggaggcgcgtcggtgttactgtctccagtcagcactggcgggacttcacgggtgcagcccgtgaaggtgcctgctggctgagatcctgggactgggtgcagcccgtgaaggtgcctgctggctgagatcctgggactgggtgcagcccgtgaaggtgcctgctggctgagatcctgggactgggtgcagcccgtgaaggtgcctgctggctgagatcctgggactgggtgcagcccgtgaaggtgcctgctggctgagatcctgggactgggtgcagcccgtgaaggtgcctgctggctgagatcctgggtcttggggtctggaggcggctgagccgtttggtgccgctggaccagagccatgtagatgttgactgtaatcggaactaccttggtaatggtggcagacgttaataagcgcgcaccacgtgccggctgcagcgtttttctgtgcatctccccttattctcacagcagcctggcaagggcagggctgttcacacctgtttacatctggggcaggtgaggtgccaggaggtggatgacctagacctagccctggatccccacctgcgtcttctgccaaag

SEQ ID NO: 277364 - DNA, 546 bp, Homo sapiens
  chr22:47542709-47543255
  hypo
ggaaggcagccagccgcccagcctgagtccagaagggcgagggaggagcagcggctccagccaggtcaggcctcggcgggtggcgggcactgtccatcacggggccaacaaggagacaagggagggctccgccacctgcagagggctaaggagcaatactaaaccaactcggagtcggtctgcttttgctataatcagttgccaagcacaggcaatgccagagattaaatattcctccccgtaaaaggtgttttgttctcgtaaaaaccatttctgtgactcctgttaccttttaataacagatgtgtaaggctcaagtgggtgtgttttgctgacttgaccttgagtggatcctgctgccggcctggtatatagcatgtggtggtctgtcggagggctccccagggggctgcggtcctccaacacacacacgttctgcacccacctcctgggacatcgtgaggacccaggggtcacacatagtgccctcagagaggccttggggcataggtgcgccctgctgtttccatccgggctgcatttggc

SEQ ID NO: 277365 - DNA, 89 bp, Homo sapiens
  chr22:47614609-47614698
  hypo
gggtgcctctggtgcgtcacggcccagggaggtgtgggcgtccccgaaggaggcgtaggtatcactaagggaggcgcaggtgtcatgga

SEQ ID NO: 277366 - DNA, 238 bp, Homo sapiens
  chr22:47666573-47666811
  hypo
agcattttaaaaagcgttcatgtgagtcatcatttattgaacactggctgtgtgccaggcattgggctaggcaggcgcctgcgttgtttttaatccttaccagtactgtgcctggcagtcacggttctgtctttgtcgtggccaaggagcatgaggcttagggaggctcgaactcgcctaagatctccagacaatgccgtgcaaagccagggtgcgaccagtccgtctggttccatgt

SEQ ID NO: 277367 - DNA, 470 bp, Homo sapiens
  chr22:48027378-48027848
  hypo
tttttgtcctgttccggcttccacagattggacgaggcccacccaccttggggaggggccagctgctgtgttcagtccgccattgcaaacacgaagctcttccagaaacgccctcacagacaccccggaagtcacgtacccactctgtaggtgccccggggcacaggcaagcggacgagccagttatccctcagagctcctgctgcctcgcccgctttctctcggaaacgtgaagtgtggcctcagctgaaagtgaggtgagcgtgagtgtggacatgtgtcagtgtgcgtgtgcatgggaggagtgtgtgtgcgcttgatgacgatgatggagcccagtgagccaccgtccgtggagtgtcagagcctcctaggatggccacgccgaaggtgcggaaggaggcggctggcccagcgtcagacgtttccagcatccgcgggagtgaaacggaggctggtgggtggttgtg

SEQ ID NO: 277368 - DNA, 130 bp, Homo sapiens
  chr22:48280049-48280179
  hypo
tttgctgtttcacacggggaagccgccgttcaaggtcacgtgtctagtaagtgatgacgcagatctccgttttctagtaactgtgcaacccgatgtttgttgatttaatacaattcgaatcatcgggatt

SEQ ID NO: 277369 - DNA, 36 bp, Homo sapiens
  chr22:48528663-48528699
  hypo
aaaaatgaaaaattgccaggcgcggtggctcacgcc

SEQ ID NO: 277370 - DNA, 217 bp, Homo sapiens
  chr22:48723482-48723699
  hypo
gccaggcttcactgcgccgctcatttgcgctcactgtaacaccgccgggagaatcctcagtcaaaatcaaagcctctttctcctctcacctgtaaattacagaaagtctctctgctttttccacgttcaacccagttgccgctgagcatccatttggattgagttagccttggtaatcgtcctctaaacagaagctcggggtcgcctgggcctgccc

SEQ ID NO: 277371 - DNA, 60 bp, Homo sapiens
  chr22:48727541-48727601
  hypo
cctggtagatggagaagacacgccctctgctgctggtgcgtctgagggatgggaagagag

SEQ ID NO: 277372 - DNA, 359 bp, Homo sapiens
  chr22:48728451-48728810
  hypo
cacacatgacatacacacaccgctcactccaccatacacacacacaccacctacgcaccacttttattgaggttaaagagtccagcatttcccacggaggaagcaaatcctttctcctccacagtcacgcgttctgcacgcgtatcccacgctgccatgtggacgtctaagtggagagacagaggctcttcccggcagcgctgccgctcaagcgggagaggccgaccccgaccctgaaaccctcgcaggcgcctggtgctagcagaggctggggttgtcctcgttgtaccaagggtgccggagagggaaggtgggtgggccagtgctgcctcagagccggggacagggtctggtccttc

SEQ ID NO: 277373 - DNA, 218 bp, Homo sapiens; identical to SEQ ID NO: 220957
  chr22:48793077-48793295
  hypo

SEQ ID NO: 277374 - DNA, 43 bp, Homo sapiens
  chr22:48809224-48809267
  hypo
aaaaaaagaaagaaaggctttgaggaaacgtaccatgcttcac

SEQ ID NO: 277375 - DNA, 34 bp, Homo sapiens
  chr22:48917485-48917519
  hypo
gccacagatggacccgatccgttaggtgtaaaag

SEQ ID NO: 277376 - DNA, 341 bp, Homo sapiens
  chr22:48918775-48919116
  hypo
ggaatagctggaaggggctgcggcagctggagccccccatggcggggctgtgtcggttccttcccagcaggagacccagagcccatgggtcacggtggaggatggccaggctggatgggggcggccagggagccactggtgcccgtgtcaaggcttccagctcacgggcctccatctcctcccctgccgctcgtgccacaaaaccctgctgcgccctgcacggagcctctgctggaggcgggctcggcttggtgggcacttcgtggcgcttggctcctgtgctccctggctttgccgtgggacagggctggtgggccggcgggcagcctccaccagggcca

SEQ ID NO: 277377 - DNA, 570 bp, Homo sapiens
  chr22:48921050-48921620
  hypo
ttggggacatccctcggcccaggggatgctccccatggggggtcccatcttaggccgatgcccttagggtcagggagcagcctggagacctccacacagggaccctgggatacgctgagggcttggtccacaccccaccctcaccccgacaggtgcccgctgcctgctccgcctgctggactccgattccagtgctcattcttgcctgccacctgctccgccttctggactctgcttccagtgctcattctcgcaaatgccccttccccctcccggctgaacctctgcccaggtggaggcccttcccactcggtggcccaggtccaccctctgcctcagcggtccccaggcttgagcatgcatccgaattccctgggggcttgtggaccaacagatcgctggactgaacccatggtttctgattcaggggtcaggccggggccccagaagctgctgctgctgctggcctggtaccccgcctaaagaagccctgcctacccgagccctcctgttcttccctgcctccaggcccctgcagaggcacggtggtgtgcacggctcattctcgcc

SEQ ID NO: 277378 - DNA, 377 bp, Homo sapiens
  chr22:48923829-48924206
  hypo
accagacaggcagatgaaagcggcatagacagagctggcttggccgcctgggccccccggggccccccggtgcctgtcctctcctcctccacaggccccgcgatggctctgatggcgtcgatgatgctgattctcagttaaggacgctgaagttcggaggtgccggaaacccgtgaatcaggagcctggtgtggtcctggtacctgacaagcttcgagcggagtgagatgggagtgggcctgggggctgctgcagagttgcggtgaggactccagtagggccttggggcatgagtcggtgccacctgggtgcatcgtgtctccaggaaagggttctgctctgggggtccattccccgatgcctgtgtatagccaagg

SEQ ID NO: 277379 - DNA, 159 bp, Homo sapiens
  chr22:48946285-48946444
  hypo
tgtgagggctttgacccccacggagccaggtgcccctgggaaatgccggcattgtgtgaaggagtgtcttgtatcaaagcagatatgccctgccccctaccctcatcccacggttcctagcaggttccatcgccttccgcacttgatgctgctggatcc

SEQ ID NO: 277380 - DNA, 153 bp, Homo sapiens
  chr22:48955833-48955986
  hypo
gggtcttctttctatgcacacgccggccatcctccatcaggcagctgccctggccaccgatgccttcgcagcataggatttggggacctccacgtgccgtcccatgggaaagccgagtccttgtaggggaggagcgtcactgctctcagcagg

SEQ ID NO: 277381 - DNA, 110 bp, Homo sapiens
  chr22:48956016-48956126
  hypo
ttctgggcgggggtgtgatgtggctgaggcgtctgtccctgtcgtgcgcccaggctggtgccgtcaggctcccggcattggtgcaccccggcattggtgtggccactgca

SEQ ID NO: 277382 - DNA, 88 bp, Homo sapiens
  chr22:48959486-48959574
  hypo
cctctgagcagcaatggtcacggtgcctgttctgctaccagcgagctgagcagggtatcgggagctcgggctcctgggaggacaccag

SEQ ID NO: 277383 - DNA, 306 bp, Homo sapiens
  chr22:48965019-48965325
  hypo
atctccggggaggacgatggatgcagggccacgggccgtggatactcagactaaagctctagaggagtgtgaggtgggtgcagtcatggaagtttctggaaactgaaaaacctggcccggccccgacatttgaaatgaccctttgcttctcaccatgtgcttggcatcgattcaataaaccgtgtgtttggggtgtctccggggggtctgggcgccttgctgttttgtgacctctgggatggctggtctgatagtggacttggaggctgccaaggacatggggagtgtggccgctacaatcaaggc

SEQ ID NO: 277384 - DNA, 314 bp, Homo sapiens
  chr22:48977759-48978073
  hypo
catggagcgaagcacgcagctgtgggtctgcgtggaacatgggactgttcgctcacacacgcacccagtgagtggacagggctcctttgagaccaaccatgggacccggtagcctttgtactgtgggagccctgacctgcctgtcggggcaggcggccctttcctcgttctccttttacctgggctctgtgtgtgagcccacctctcccagagacacgcactgcggtgccccccaacagagacacaccacacactacacgatgcacacacccacaccacacaaaaaacacaacgcataccatacaccccacata

SEQ ID NO: 277385 - DNA, 277 bp, Homo sapiens
  chr22:48996154-48996431
  hypo
ggcatcctgcctcctacttgcgcaggtccagcggggatcagagtggaggcctcgcaccagctctgggacatgaaggggcccgaggcagcccttgtggccacacgggccttgtcatggttcggcctttccactctgtgttccgaactgtgcagtgtgtatgtgtaggcacagatgtgtgcccgtgcccatgcctaggactttgcgtgtgtctgtacgtgtgatttcgtgtgtgtgtgcatcttcgttggcgacacacgtgtgcaatagttcttccatt

SEQ ID NO: 277386 - DNA, 107 bp, Homo sapiens
  chr22:48998395-48998502
  hypo
cccgttttctgcgacgtgggccctgtgtctttgttgtaacatatatcgtatcctggaccatgtggcctctggtacagagacgcttggctcgccgcacatgtctgttg

SEQ ID NO: 277387 - DNA, 414 bp, Homo sapiens
  chr22:49008040-49008454
  hypo
acaaagtccttggccgccagcgtgggtgactccagtgcacacccccgcagcacagggcggctcacttgcatgttcaagtgtaatcaaggcgagcctgtgagatcacggcaggccacgcgtgtctcacagcctgtgcgcgtcttgggagactgcaaaggggttaaatggcccgtgtacctccctgcaacactgacattttgagcgtgtgtcaaggtgtccctatagcacgcccacctgttgccttccctggggccctgtccctgggcacaggtggcctcgtctctcctggaccctccagccctcccatccagtgggctcttccgacccccagcagccctcgcctaatgggaggtgcccccgccccacctgtctgctgttccccacgtgtctcccgttccccgcgtgtctcccttt

SEQ ID NO: 277388 - DNA, 256 bp, Homo sapiens
  chr22:49010565-49010821
  hypo
ttgaccgagagcttcgttcacaccttctgtgccgcacacgtccagcacttgtagtgtgtgagacagatgtgggggccggggtaggcactgggggtggcactggggctggccagctggagccggccctggagagaaggccgggcatggggtcagcagagcgggcctggcctcccagtcaccggggccagaagccactggctgcttggggagaagccacgcactgtaagaactcagcgctacctgggggattcatcct

SEQ ID NO: 277389 - DNA, 292 bp, Homo sapiens
  chr22:49013241-49013533
  hypo
aggataaatgggtgctgtttcggggcctggtttgaggccattcgttactgcagccgtgtggagctcctggaagcatgcaggcactcccgtccctgcctcagtggccccggaagcgcctctcgcagaacctcggcactcactgtcctcactgtcgtcacctctcaggctgagtggcccatgaaagaaactggggatgcagcaggagagagaatggcagagtctgtctccgcgtctatctcctgggaacataaagctgccccatgcctgaggcgggggctggatgttctggagc

SEQ ID NO: 277390 - DNA, 137 bp, Homo sapiens
  chr22:49014306-49014443
  hypo
gggtaacggattggcgttgtttcatattcatcatctgtaatcaggtggcctcgtccgcacccgcagctccgtctgggaagtcctggaggcagcgtgcacagtgggcccttgctatctgtaatcgggtggccttgtcc

SEQ ID NO: 277391 - DNA, 772 bp, Homo sapiens; identical to SEQ ID NO: 220959
  chr22:49026210-49026982
  hypo

SEQ ID NO: 277392 - DNA, 180 bp, Homo sapiens
  chr22:49038918-49039098
  hypo
gctggggctgagctgggggtcgcgacagcccagaaagactgagaggcactgcaacccggctgccatgtggatctcagatgcacggcctccagcgccatgggataagaacgtgtaccgttcaggctgcccggtgcgtggctcgctgtggcgatctgttacgcaggaagctcctgcaaggcc

SEQ ID NO: 277393 - DNA, 343 bp, Homo sapiens
  chr22:49042351-49042694
  hypo
tggctgtggggtgtctgtaacgtgtggccgctcagtcgcttctgctcctctctgcaggtcagctggccgccggcacctgtgagattgtgaccttggaccgggacagcagccagcctcggaggacgatcgcccggcagaccgcccgctgtgcgtgtagaaaggggcagatcgccggcaccacgagagcccggcccgcctgtgtggacggtaagcacccgtggccccaggacccctccgggtgctgagcgcggcgtcaccaaaggtgcctcttccctgacgcggccccttacctgaaggtccccctaggcctcagcgcatcctcgggtcaggcccctggctgttg

SEQ ID NO: 277394 - DNA, 158 bp, Homo sapiens
  chr22:49045921-49046079
  hypo
ataataagtttcctcgcatgtgaattgcatttgctgaagagaaaacttgtgctgtgttgggtcggtgttggaattgaatgtgagtagggttgaaatcggggaggcacttgctgcccctaccgcgttccgtgaccacaggcgctcggaatgccggagca

SEQ ID NO: 277395 - DNA, 240 bp, Homo sapiens
  chr22:49046594-49046834
  hypo
acagtatcagccaccgagcctcccctcccccagggctgccctctgaggcaggcacccaggtgcgtgatgccctggcgggctggccaggccctgcttctgctcctttctagctgtttatgcagacgcgccaggttcccttttccatcagcacacacgtgctgggtcccgcagccaccacagcacggcactgaggactgagaccctgtgtccgagtccagcgctcacccagcccttgccagg

SEQ ID NO: 277396 - DNA, 187 bp, Homo sapiens
  chr22:49047904-49048091
  hypo
ggctgggcacagcgcgtcatctccacctcgaggcgccaacggggcccccagggccagctgaaggcatgttgtggctgggactagggtgacgggaattttccaccaggagcgacgtgaatcacctgctctattgtacgcaagagactgggagtgcgccaaggtccctaagatgcggtgtctgtggccg

SEQ ID NO: 277397 - DNA, 42 bp, Homo sapiens
  chr22:49053747-49053789
  hypo
ctacaccctgctaataatgccgcttgcctcatcttacatatg

SEQ ID NO: 277398 - DNA, 337 bp, Homo sapiens
  chr22:49054731-49055068
  hypo
accatggcctcagactgcagcgtccaaagaggtcgtgtaagaggaggtgacgcctttgcccgtcattgtcaggagcaggtgcgattaccgggcaggacacccggggaccttgatggtctctgggcagcagagtccggggcaagtctccgagggccctgctgagggcgcagcgccttctggaccccgcggcggaggatccagcattcttcctggcctgttggctgcagaggcgggacacaggcagagaccctgcctcactctgggccctcgtccacccacaaagggacccagaatcatagccgcagccttgttgctcgctgggctttgagcaagtgga

SEQ ID NO: 277399 - DNA, 168 bp, Homo sapiens
  chr22:49057067-49057235
  hypo
ccatgccccaccctcggccccgagccgcctcgggcacgtcttgcctgctggaaccttgccccagccctctctccttgtgcccttcccacgtttacagaagaaggctgggctgaatggtgtgcaggcctcgaaccccggccgcagaactcgccccgatgaggggaaact

SEQ ID NO: 277400 - DNA, 202 bp, Homo sapiens
  chr22:49063357-49063559
  hypo
tgttgatatttatttatctcgcgggcttcgctggaatcttgagggtccttgagactccgcactgcgttataactcctgcctggttaattcaatttctcttatattctgactcccctggcaaaaataatcggcttctggccaccagggccacagactttctgtcatgagcatgggtcttcaccgggagcgttaatcccccagc

SEQ ID NO: 277401 - DNA, 86 bp, Homo sapiens
  chr22:49070489-49070575
  hypo
ccccccacagaaggagccctcgttcagggagacgccgtggggaggggggccaccttagcttgcccgttgggtctgcagtgtgatgg

SEQ ID NO: 277402 - DNA, 91 bp, Homo sapiens
  chr22:49087333-49087424
  hypo
ggcagatgcagcctcgcgaggaacgcagcctggagaggctcacagtcgcagtggcatggctgggcaacggaggacgcgccaggagcaggct

SEQ ID NO: 277403 - DNA, 257 bp, Homo sapiens
  chr22:49104033-49104290
  hypo
ctgataactcccccagggcacggcgggggttctgtggagacagggccaggttcaggttccgtccaggtgtgctccttccgtccctgggcctggcctggtggctgctcacaccagagacccggagggcccttcagctcctctctgtccccctgagtggggcatgcagtgcaccccgccctcccaaagccacggctgacctgggtctctagagctgctcttcccaagggcgggagcttggggaacgccgggtggacatg

SEQ ID NO: 277404 - DNA, 843 bp, Homo sapiens
  chr22:49138231-49139074
  hypo
agagcaggtggggcaggagacgggtggagcgggtggtgctgtgtggcggagctggcggcgcagtggagcgggcgttgtggtggacccggtggcgtggcagaccaggcgacgtggtggacccggccgcatggtggaccaggcaacgtggtagactgggcagcgtgatggaccaggcgacatggtggaccgggccgcatggtggaccaggcaacgtggtagaccgggccgcatggtggaccaggcaacgtggtagaccgggcagtgtgatggaccaggcgacgtggtgggccgggtggtgtggtgaagccggcagcacagtggagcaggcattatggtggactgggcagcatggtgtattagaagaggagagatggcctggggtgctcagcggggctgagtccccagctgggagctcaggtgcgatgaagcccaagggactgacggtgtgaggagggccctctgctgcctccatgcagcccacacgcggggcccccacagtgcggacatgttggggcaatgctgcctggccccgccctcagcccagccctgggacgcaggctcagcagcccccggattccagtcaacatccccaggactcactcgggtcaggcacagtgtccaagctgtgtgagtctccgggagccgctggaacaaaatgccacacacccggtggcttcaaaccatgaaacccgttctcactgttctgggtccagacgtctgtggtcacagtgtctgctgggccgtgctcccgcaggaggcagcagcagagggtcctccctgcctcctcctgccattcttccggttcgggggtccagacgtctgtggtcacggtgtctgctgggc

SEQ ID NO: 277405 - DNA, 115 bp, Homo sapiens
  chr22:49140371-49140486
  hypo
aatgggctttgcagggcactcggcaaagtcgctctgcagacacagcctcctcgttagagagcggtgctaaacctgtgtgctcttccggcgacacggtcctaacttgggtggtttc

SEQ ID NO: 277406 - DNA, 784 bp, Homo sapiens
  chr22:49145662-49146446
  hypo
acacagcccctgaggggccccgggagtggccttggctccctggagagcccacgtctcagccacagttctccactcgcctcggacttcacccgttctctgccgcccgcccactccgtttccctgtggtccgtgaaggacggcctcaggccttggcatcctgagcttcggtctgtccagccgacccgaggaggccggactcagacacataggcggggggcggcacctggcatcagcaatacgcagtctgtgggagcccggccgcgcccagcccccgccgaccgtggcgttggccctgctgtcctcagaggaggaggaggaggaggcagctccggcagccacagaaggctgcagcccagcccgcctgagacacgacgcctgccccaggggactgtcaggcacagaagcggcctcctcccgtgccccagactgtccgaattgcttttattttcttatactttcagtatactccatagaccaaagagcaaaatctatctgaacctggacgcaccctcactgtcagggtccctggggtcgcttgtgcgggcgggagggcaatggtggcagagacatgctggtggccccggcggagcggagagggcggccgtggtggaggcctccaccccaggagcaccccgcgcaccctcggaggacgggcttcggctgcgcggaggccgtggcacacctgcgggaggcagcgacggcccccacgcagacgccgggaacgcaggccgctttattcctctgtacttagatcaacttgaccgtactaaaatccctttctgtt

SEQ ID NO: 277407 - DNA, 315 bp, Homo sapiens
  chr22:49146942-49147257
  hypo
tgtattggtcaacacttgagcgtacaatatcttgaacatgcttcttccaatgggttttgtttcccatttcctgcccctttcgccactcacggaccttgaggccagttgacggcccttctccccacgcctgtgtccccgcgttctgagaagtcctctgtcttcgtgtcactaggtccagaaagtcgcgccgggcagaggcgcaggcggggccggcagggccgaggaataagcgacaattctggtttttctcccctggccgtcgttcgccagcctccttcattttcctgagttcccgctgaagtatatactacctat

SEQ ID NO: 277408 - DNA, 42 bp, Homo sapiens
  chr22:49175463-49175505
  hypo
cccacattggcctgagtgaccgagtagctgcagggacccact

SEQ ID NO: 277409 - DNA, 201 bp, Homo sapiens
  chr22:49203055-49203256
  hypo
ccaggaaacaacggcgcttgtggaatcacaagtgggaaaataaagggctctgacgcaccgcattgtctggagagtgcctcagtggccgccaagaacagagcacacaggccttgaagccagacacacacccccccgcgccgtgctggcttatcctcacaggccgctttcacgtagcccggtgtggcccgggggtctgcctgg

SEQ ID NO: 277410 - DNA, 115 bp, Homo sapiens
  chr22:49216176-49216291
  hypo
tttaattctaattgcgccaactcacacctttttgagactttgcggtgatgtttgctttccttcaatctcagtaatttttcactagctccgtgttgataagcgtctgcatagttgc

SEQ ID NO: 277411 - DNA, 197 bp, Homo sapiens
  chr22:49231767-49231964
  hypo
caaagcccctaggagacagtcggcctcttgccagcccatcctctgcccagcacagcgtgttctcaaggttggagcaggctgcaggtgccacgccgaggcatcccaacggggattccaggctcctccagcctgcctgttgtcctgatcgctccctgcagccgctgctgcctgccagcgtggggggacctgtggggcaa

SEQ ID NO: 277412 - DNA, 189 bp, Homo sapiens
  chr22:49233007-49233196
  hypo
cacacatgcacacacgtgtcctctcacacacacactcacatgtgtccttacacgcacctgcacgcacacacatgtcctctcacacatgcacacacgtgtcctctcacaaatgcactcacacgtccttacacacacgcacatgcatgcacacacgtgtcctcacacaagtacacacgtgtcctcacacat

SEQ ID NO: 277413 - DNA, 68 bp, Homo sapiens
  chr22:49233427-49233495
  hypo
cacacacatgcacacgtgtcctcccatgcacacacgtgcgcacacacaggctacgaggtggggctgtc

SEQ ID NO: 277414 - DNA, 281 bp, Homo sapiens; identical to SEQ ID NO: 220962
  chr22:49277152-49277433
  hypo

SEQ ID NO: 277415 - DNA, 84 bp, Homo sapiens
  chr22:49294317-49294401
  hypo
gttagccttccacagtgcaccgtctcccctcgcgatgaagcctgttccttctgaggggctcccgttggaggacagcaaagggcc

SEQ ID NO: 277416 - DNA, 266 bp, Homo sapiens
  chr22:49295890-49296156
  hypo
tcctccacagaagacctttacgccgataatgctctcctttcccgatgaactcgcctctgcttccccgaaaagtgctcctccatgctggcacgaagcaagcgtccagttaataaagtgcgtcgtagggagacgcgttcctccaccagttctctctgctggccccgccgagccctctctgtgctatcgagagaaccacccggctgctgcccacaccggggagggcactggccccagaccagaggggcgtcacctgccctggaggacag

SEQ ID NO: 277417 - DNA, 282 bp, Homo sapiens
  chr22:49333182-49333464
  hypo
tcctagaatcctgccgggtggactgccacagctcccgacctgggtgagcagctctgagaggagccccgtcctgctgtgtgaccggagccgccctgtgggtgattgctgcaccctgcttcactcctgggaatttcctcttcttaccttgtcctctcatacacactcagagtcccgggactggaaagtcttcacacactcctcagtgcaaggttggaagccaagggttgctgatgtttaacgaatgcctctaagacacacctgcaggcccgtatgcatcgctgt

SEQ ID NO: 277418 - DNA, 43 bp, Homo sapiens
  chr22:49380597-49380640
  hypo
agtacccagcacactggccccgccttcccatcctgagtctcca

SEQ ID NO: 277419 - DNA, 88 bp, Homo sapiens
  chr22:49380670-49380758
  hypo
ggccggggcaggaggaccattgtggaggcacagttcgcagaggcaggaaacgtccccggcccagagcgtcccccagccatggggagag

SEQ ID NO: 277420 - DNA, 93 bp, Homo sapiens
  chr22:49387605-49387698
  hypo
aacggctcttctttctccacagccactccagcattcattatttttgtctttctgatcatctcggttccaatcgaggtgagatggtgcctcatg

SEQ ID NO: 277421 - DNA, 140 bp, Homo sapiens
  chr22:49389207-49389347
  hypo
cccagagggaagcagacactcggatgtggacgcgtgtgctgcagccctgtgtgcatgtgggtggaacacgcacaggtggacggatataggaaccaagtgacatcagcctgccttcatgtttccgtcgttctgttgattcc

SEQ ID NO: 277422 - DNA, 142 bp, Homo sapiens
  chr22:49404568-49404710
  hypo
tataagaatctagtgccacggctgatctgataggaggcggagctcgggcagtaatatttcctgccactcacctcccgcagtacggctggtaccgaccgtggcccagggattgggaacccccggtttgtaggatgcaggagaa

SEQ ID NO: 277423 - DNA, 31 bp, Homo sapiens
  chr22:49424884-49424915
  hypo
gcagacatcctcaccgcgggctcttgtggag

SEQ ID NO: 277424 - DNA, 94 bp, Homo sapiens
  chr22:49430807-49430901
  hypo
tgtgactcggacatcggggttgggggatgtgggtgatgttcacctgccgtggaagaacccggaggattagggtggcaggcggcagggccctgag

SEQ ID NO: 277425 - DNA, 275 bp, Homo sapiens
  chr22:49498249-49498524
  hypo
ccgggagataagcccgctaaccggcaccttagtgctccaggacgctgggctggcatgctgtccgtgtcggcaaatagtgccagcgcctgtgggcacggactcctcccacccgggactcctcccacccgggactcctcccacctgggattatggtcttggtcaccgtcatggttgagttatgttccctcaaattcaaatgttggagtaataacccccagcaccgcagaacgtgaccttattcaaagatagaatctttaccgaggaggccaagtaaa

SEQ ID NO: 277426 - DNA, 125 bp, Homo sapiens
  chr22:49504662-49504787
  hypo
gctggacatgctgtcgggatgcctgggtgggaacactgtgctcccagactcaggtcagcgtcagaggccggccaggagctggacgggagagccagtcagggcaacaccagcgtttcaggctttca

SEQ ID NO: 277427 - DNA, 51 bp, Homo sapiens
  chr22:49508031-49508082
  hypo
aggatggcgagtcgcgcttgcaaatgtttgctcacccggcacgtgtcacga

SEQ ID NO: 277428 - DNA, 51 bp, Homo sapiens
  chr22:49512003-49512054
  hypo
acaggaccaatgcctcaggccgctcctctcgggcctggttttattcataaa

SEQ ID NO: 277429 - DNA, 108 bp, Homo sapiens
  chr22:49535540-49535648
  hypo
ggtgggagtggtgacggccccagcaccggggagtcctgacacagggacctccaccctccacacggggctcagcccacagaggctgccgcaccccgaagctgcaccctg

SEQ ID NO: 277430 - DNA, 216 bp, Homo sapiens
  chr22:49538065-49538281
  hypo
acaatcaccatggatgagaacgacacacaccaatggtggctatggccagattacgcacagcacgaaggcgcaaaggcagcgcgtggaaccacatgggacagccaggcggatggaaaccaaagacggcgaagcacaggagggtttgcggtggtctccgggcttgtctccgggtctgtgagtgcaggaatgtcatacgcttggatacctccaattcta

SEQ ID NO: 277431 - DNA, 226 bp, Homo sapiens
  chr22:49546643-49546869
  hypo
agccgcagaagccaaggcagcgtcacgcgtggagaatgagctatggcttcgttaatcaggggagacagcgctgggaaccaggaggccggcgaggtcaccagaggaaggaggggctgcagccgccgtggggtgccagacacctgggccccacctcgccgccatctgccctcataaacccgggtctggtgggctcccagctctggccggcccattccaggccagacac

SEQ ID NO: 277432 - DNA, 71 bp, Homo sapiens
  chr22:49558735-49558806
  hypo
atcacaactctataaatatgcgacgtctgggaaaacggatggaaagaaacgcactggcatgtgccctgtgc

SEQ ID NO: 277433 - DNA, 212 bp, Homo sapiens
  chr22:49559994-49560206
  hypo
caggtgcatgtccagggccacgtgtgatcaccagacccctgtgtcccgtggtgcacacccctcttgcctcttggccacggggtccactctgtgaccagcgaggatacttgggaccttcttgctttgacgcaatgggccgagtgaccgggcggctgtgggaccccagtaagtaccacctgccatctcccctcgggcaggaaagatggcaccag

SEQ ID NO: 277434 - DNA, 142 bp, Homo sapiens
  chr22:49579810-49579952
  hypo
ttgctccacggcggcgcgactccacgctgtatgcgtggtacgaggcgagggtggtaaggcaggaagtgggcagaggctttgtgatgagttaaccggctgggcgttaccctatggagcgggagagccatggtgcatccaggca

SEQ ID NO: 277435 - DNA, 244 bp, Homo sapiens
  chr22:49580738-49580982
  hypo
tttataaatccccacagagccgctgtgcagaggtagagggccggtttcaggatgaggaagccctcttggaagcaccgtcctccgctaacagcctccaacctctgtccccagggagaggcgcgtccccagcgagtcgcatcagacacgtcccaccgtggacgtgtttgcccctagtcacctcatttctctgctcacagcgcacagtgctttcgttgcattcttcgttagaacacccaggggaatc

SEQ ID NO: 277436 - DNA, 193 bp, Homo sapiens
  chr22:49582855-49583048
  hypo
ttggaaagggcagccgtcacgctcactctggccatcatgtgatgatcacgatgactgctatgaatggcatcaccgctgcagtgtaatcatcatgatcacggctgccactgtcagatgccacctggccagcctaaagcagacgctgtcactgcagctgtgactatcagtgctgctactgcgactgcaactctgt

SEQ ID NO: 277437 - DNA, 179 bp, Homo sapiens
  chr22:49610931-49611110
  hypo
ctgacttggaaagagccacacgcgctgggactggaaggaacgcctcctttcctggatgcccgtgccgcggtgcccactccactcaccatccctccttgtcgtcttctggtcaccgtgtcttcggcagggcgtgagtacctcacctgcgggctgtggacgggtgctcttgtgtttctgcc

SEQ ID NO: 277438 - DNA, 77 bp, Homo sapiens
  chr22:49629162-49629239
  hypo
gaaatgcaaaatcagcaccacgctggcgtcagtgtgctgcgcagacagtgtgtgccgcagtcatcccaccctagacc

SEQ ID NO: 277439 - DNA, 488 bp, Homo sapiens
  chr22:49637421-49637909
  hypo
ctcgcgactccagctccttccgaggaggtcactgagctttgcacgatgccggctccttctcaggaggtcaccagagcttctcgtgactccagccccttcccaggaggtcactgagcttcacacgacgctagctctgtccaagtcggggtccctgtgcccctaggtttccggtcaccgggagagctgtctgtcgcgccataagctggaggtgcgcaggaggatagaaatagaaactcctcatccagccgggccagggcactgacagccacagcgatgtccacggtgtaatggtcacggactccgtccccaaattagcccattttttacaaagacgataatggggggcggttctctgtgaaatggagccctccatttcggccgctcccgcgtcaggcccaaaataggtgcctgctggtcatcacttctgcgatcatgctttcatctccactcaattacgtcgcctccgcgtacttctgggctgctggttt

SEQ ID NO: 277440 - DNA, 85 bp, Homo sapiens
  chr22:49678542-49678627
  hypo
ttctgtcctcactgtaactccggttctcactggtctggtcctcaagcaagaggcaagcgtcttcgagtccctgactgacccatgg

SEQ ID NO: 277441 - DNA, 296 bp, Homo sapiens
  chr22:49693559-49693855
  hypo
aaaccaacccaatcccagaacgccgaagacaccaggctccccggacgggcttccagggagccacttctagcttcacaacgtgaactgttttctcaacacatgacttcgcaagagtaaaagtccgtattctccctaaggcctcctgcgaacgctgtgtccaggccccgctgggggatccaggctctgagatgccccggccccatgccaggctgtggatggggagtgaccgtgcactcaccgtggtggcaacgcctgtatgcggcctgtagatgaacggggctcagcaggcattccag

SEQ ID NO: 277442 - DNA, 199 bp, Homo sapiens
  chr22:49698397-49698596
  hypo
cagcacacaggacacccatgcgtgtttatcatccggcacacgggagacccacgcgtgtttactgtcgggcacaggggagacccacgcgtgtttactgttcggcacacgagagacccacgcgtgtttaccgtttggcacagggagacccacgcgtgtttactgtccggcacaggggagacccacgcgtgtttactgtccg

SEQ ID NO: 277443 - DNA, 192 bp, Homo sapiens
  chr22:49698626-49698818
  hypo
cggcacaggggagacccacgtgtgtttactgtccggcacagggaagacccacgtgtgtttactgtccggcacacaggagacccacacggggcctgtttaccatccggcacacaggaggcccatgcatctttaccgtcaggcacacgggaaacccacgcgtgtttaccgtccggcacagggaagacccacatg

SEQ ID NO: 277444 - DNA, 147 bp, Homo sapiens
  chr22:49699808-49699955
  hypo
agcccatgtgtcctcctgcccgccaggcccaggctggccccaagaagggtcaacgctgccacggtgagtgtcctcccacggctttgtgccaggctgcggacggctgtctgtggagggcggggatgcggtgcaccctggggtacacag

SEQ ID NO: 277445 - DNA, 42 bp, Homo sapiens
  chr22:49721831-49721873
  hypo
gaagacaggtgggaagcaggcggccctcctgggcagaaaggc

SEQ ID NO: 277446 - DNA, 316 bp, Homo sapiens
  chr22:49729097-49729413
  hypo
aagtcgccagcggccgctctgtagcaataattcatcgcttgggtccagcgttagaagcaggtctcggctctggtgctcagaagggacagcgtgtgcgggaagctttgctgccctggacgcggcgccaccacccaaccccggcccctgcggtcccagagtatcagccacgacttggtgcctcctgcctgggtttctctgtgcactttcaggcatgttgaagtcagaccattcacagttttgccgcaggtcgacacggagtgccccgtggcttagcaggtgtgagctctctctggggctggcccgctggagacacagg

SEQ ID NO: 277447 - DNA, 222 bp, Homo sapiens; identical to SEQ ID NO: 220963
  chr22:49729772-49729994
  hypo

SEQ ID NO: 277448 - DNA, 41 bp, Homo sapiens; identical to SEQ ID NO: 220964
  chr22:49730114-49730155
  hypo

SEQ ID NO: 277449 - DNA, 166 bp, Homo sapiens
  chr22:49751421-49751587
  hypo
agccactgaacaggcgctccctcccgcagggaggaatggaaggaggaaaggatgacaagtcccaagcgggtccaaatcccagcgaggcagtttccatgagaatttcctctttggcttgaaagtctgcctgccgggcccactatggtggcaacgccacctccaaagc

SEQ ID NO: 277450 - DNA, 211 bp, Homo sapiens
  chr22:49773232-49773443
  hypo
gtgcaaagtcaggtcgaagcgaagaactctccccttattccctctactctccacaaagaaaacagagaatggccaacagctccaaccgtgtagagagctcaaaagacagtccttaaatgcagcctctgggccttgcaacaggaggttgacttcgccacgggagcttccagtggatgggacgggggtagatgttagtcggctctgggacttg

SEQ ID NO: 277451 - DNA, 328 bp, Homo sapiens
  chr22:49785182-49785510
  hypo
tctctgcctcactgtcctcacgcagccccagctccggcattgcactcgaggccacccggagccccatctcactctctctgcactctgccaggcactgcgagaggcatggctttcagcggcacccccgagagaggcctccctagccagggtttgcccgcggacgccgcccagccctccctccacggtgccctgcacactctaccgggaagcagcaggggctcatgagggcgtcacgccttgctcggctgtgagtcttgtccatgggggtgatctcaggacctgcgcctgatgcactcaggaaacactcgccaagacacacatgggccct

SEQ ID NO: 277452 - DNA, 138 bp, Homo sapiens
  chr22:49831760-49831898
  hypo
gggcagaaagcatgtccacacgggtccaggacactgggctcccatgtgggtcctagcgccactgaggacctccgtccgcacagagcgggaggctttcagggaagcgcctcagcgcccggctcaaatcaccctggacag

SEQ ID NO: 277453 - DNA, 79 bp, Homo sapiens
  chr22:49833907-49833986
  hypo
ctaagatagatgcattgaaatggcacgttggatttttctccggaccttcttctcgtgcgtacaacagttctcacttcat

SEQ ID NO: 277454 - DNA, 120 bp, Homo sapiens
  chr22:49834662-49834782
  hypo
tccccatgattgggcggaatcgtagagcacgtatgtcaacgtcgctgggtaacttccacaggttttccaccgtgctagtaccgtctccttctcccaccagcaccgcgtctgcgctccttc

SEQ ID NO: 277455 - DNA, 97 bp, Homo sapiens
  chr22:49835737-49835834
  hypo
catggcgctatgcccggcagcagagtcgtgggtgtaattgttgctgttgttggtgttggtgttgttttgagacagggttttgctctgtcacccgggc

SEQ ID NO: 277456 - DNA, 144 bp, Homo sapiens
  chr22:49852484-49852628
  hypo
tggacggaccaacccgggcgctgacatcactctgcatttgagggatgcaggtgcagcgtggggcacgggacgaccctggccagggcacctggtcagccctacactccctgaccccaggctgactgtccgcggtgggagagcact

SEQ ID NO: 277457 - DNA, 254 bp, Homo sapiens
  chr22:49855321-49855575
  hypo
ggaggaggcagcgacgcagaagcacggctatctgacaaactggggggacactgggccccaaagcagacattgccccgatacggatttggttccctttaatgactctccggaataaaataaaggtgtagactacggctcttcagaagaacgaggctcgtgtctctggggtggtgcctccaggtgggcggtgcgcaggagcgtgtggcggcggccgagacccagaggtgtttgtcggtgacatggccagagctgtc

SEQ ID NO: 277458 - DNA, 138 bp, Homo sapiens; identical to SEQ ID NO: 220965
  chr22:49857253-49857391
  hypo

SEQ ID NO: 277459 - DNA, 42 bp, Homo sapiens
  chr22:49858316-49858358
  hypo
ggaaatgggatcccacaatacggagccttggggcctggcttt

SEQ ID NO: 277460 - DNA, 333 bp, Homo sapiens
  chr22:49864171-49864504
  hypo
tgtgtgcacgtgctcgcctgcaaacctgccacgcgggagaggcttccaaacagcaggaaccccacaggccccaactgcggaaggaggacggagccagttcccctcgggcggtcatcattggtcttggtgacaagccagtgcagcaggtgtaaggaatgaacagacgtcaggggaaggcgggaattccaaacacctttcctctgacttcacccacgggaaccaaaggagagggaggtgcctggcgggatggtggaggccgagcccaggtcccaccccgtccatcacgggtgtccgcgccgtttcctgggctgctgtggctggatggctctgttg

SEQ ID NO: 277461 - DNA, 120 bp, Homo sapiens
  chr22:49880500-49880620
  hypo
caaaacaacaaacaaacaaacaaattctttattttctctctacatctgttgatatattgcatgatgttagattttttggtttctttttttttttttttttgcgatggagtctcgctgttt

SEQ ID NO: 277462 - DNA, 227 bp, Homo sapiens
  chr22:49901386-49901613
  hypo
tcaacaaatgggtgcgggtggagggggctttgctggtcacagccagcaccgcagacggatccacggtgacccttttggcaaccggccacgtagggccagatgggcggcacagggaggtgtgttgtgccgtttaactctccattccttacacatggagtctcatgatgttcgcttttgttggattcaaaatggaaatgacctgactttctggccgatgagaactggct

SEQ ID NO: 277463 - DNA, 775 bp, Homo sapiens
  chr22:49911018-49911793
  hypo
gagtaagggacaggaccagacgccatctgagggacaaagtccccgagccccgatgcctgggcgcagagctggagactcggcttcttcttcgacctccccggccacttcccaacaccacatcacctcaacgcaggtataaggcacgtcccgtcattgcccccgttttagagctgagaaacatgaggaccagagaatcaaggctgtctgagccagagggcgcctcgctggcccctaccccaaaacagcacccgccctgccctggtcattactgccccccaaccttaaccaccctccccactgccctacagaagacccttagaagggggctgactgatggaccatggtgaaggccagcctggcctccttcagccacagtgtgaagcgcagttcaccaaaactggaaactgccatgcatcccggtgtcatcaaacaccacagcaaaagagccaggtgaacgcacggaacatcaagccgcaaccctccacacctctctgtataaccttcgcggccactgcccccgtgcctgcagagcgggtttgcaggagacgtcatccgaatggataaatgtccgtcggagctggggatcatcctcccagagtttcagcagctcagagaaggccagcaactcaccgagccatgccacagcgtgcaagcacagcggcccggccctcctgcattctgtcatgcactgcgtgtcatcttattaaaggatccaacgcaggctcataaaatacttaatgaaaacatgccaccaggtgcacgtcctggaagagcc

SEQ ID NO: 277464 - DNA, 325 bp, Homo sapiens
  chr22:49943108-49943433
  hypo
gacagacaaggcctcgcataggcagaggtggcttcacagcagcgggcaagtgggggaccctgcctgatgcagagtcgggggcggcttcctgcagaccgggcttccttggcccattccccctctccctttttcaaatctcagaactccagagcggtgctctcctccaaaaagagggctgctccccttaaggcactcgctctgactttgccatcctccagctgacctgagtgagctcagcagccggagttcgtgtggctctgtcaccagccagcatgtctgaaatcactgcagagatgctgctgagggaacacggacagcgttctga

SEQ ID NO: 277465 - DNA, 124 bp, Homo sapiens
  chr22:49945296-49945420
  hypo
ccttcctctgctcacgtcaggttttcgggaggagaaggcagagctggcaggcttgggtgatcacagcaatgacagaggccagggatgggctgtggccacccagcgcctgcgagcagggtcaccg

SEQ ID NO: 277466 - DNA, 252 bp, Homo sapiens
  chr22:49945706-49945958
  hypo
ggccccgggatgcccgggaagagcacctgccatgcatcctgacagctggggctctcacagccacccagaggacaccagcttggagggcacatttgcaactctcgggggctcattccgtttcacataatttagtttacattcaaaatataaagtctccttttgtgtgtattaagggacagatctctgcttgcgctcacttggagtgaggacagaggccctgctgtgcccagccccttccgcccgagctcactg

SEQ ID NO: 277467 - DNA, 534 bp, Homo sapiens
  chr22:49948171-49948705
  hypo
ctgagacagcatcgcgagctgagggagaaactgacagacggcagttcaccaaaacccaaaaactggtcattctctggcctttaacaaaccaaagtatatttctccctctgaaataagaaacacaggacaattattaagttccaaaagtacgtttcattttggaggcatgttgttggtcccctttggaatcatgaacccctgtgagcgaaacacctcccaccattgattctgacagggtacggcgggcagttcccggcccaggtagaggcagacaggtgcagagccacagggccaccactgcagagtctggccttctctccagccccgggtgcacccacggttatcagggacccagcactgcctccctgcacgcacatggctctccaggccaccactgcagagtccggccttctctccagccccgggtgcacccacggtgatcagggacccggtgctgcctccctgcacccacccggctctccacagcagcaaacggggtacattagggtggacgggatgtggggccagggccct

SEQ ID NO: 277468 - DNA, 202 bp, Homo sapiens
  chr22:49958407-49958609
  hypo
acttcctagcaagcccccctcgccctgtcactgcccctacatgcgggccacacaccgctctcctttcttgtttcactcggggacccgagattcttaacgccaggctccgtcttcaccatggaagtgcacacggcgaggaagtgagagaagatggtggcactcggaggggctgggcaggcgcgatcctcccaggccctgtccc

SEQ ID NO: 277469 - DNA, 200 bp, Homo sapiens
  chr22:49964997-49965197
  hypo
caccgcgcctggctgaaagcagggtttttaaaaagcaggagggtggatggtgcagaccctgacaggaagggacttagaaacgcaaactgcaggccctggagtgtgcccgacgcgcaggcagcttgttttcacaggtgcaaaggttcacaatctgcctcccacgtaagcctaaccctgcgggcaagcgctgggctccactg

SEQ ID NO: 277470 - DNA, 155 bp, Homo sapiens
  chr22:49967872-49968027
  hypo
cgctccccagacgccggagcacccacggccagcgggtggacacggtgtccacatggtgcacactcttgcccttgagcctgtgggagggaagccaggaagatatggacggagcaaggggagcacgggagcctcggggcctgcggggggccaggcag

SEQ ID NO: 277471 - DNA, 100 bp, Homo sapiens
  chr22:49970563-49970663
  hypo
tgtcccatgggcagcgcagagctgtcctccttgctgagtgtccgccgggcctacagtgggacgatgtttcctcgcaggctgaccccgcactgccctggtc

SEQ ID NO: 277472 - DNA, 150 bp, Homo sapiens
  chr22:49971212-49971362
  hypo
tgaatgggtcccaacggctctgacggctccccacacccctgccctgtgggccatgctgccctctcctctctggctctgtgagtcacgcacggcctctgtgattccacgtgctgttctatgctgcgccggctcccacgtgcctcacctgac

SEQ ID NO: 277473 - DNA, 84 bp, Homo sapiens
  chr22:49971682-49971766
  hypo
caacacgaacctctcgagctgatttttgtaggggtgcaaggtatggatccaggttcttttttttgcctacggaattcagtgcca

SEQ ID NO: 277474 - DNA, 52 bp, Homo sapiens
  chr22:49979624-49979676
  hypo
gggccggggctgaccggtcatcagcgaaagcaccctccgtgctgtgagtccc

SEQ ID NO: 277475 - DNA, 279 bp, Homo sapiens
  chr22:49980097-49980376
  hypo
atgacgcaggctctcgtgtcagggcgcacagccatgtgatgactccacattcactcagtgctcagcacagagtcactgcgaggcggcgtgagtctgtgtgacatcagcgtgtttagtgcatgacatcagcatgtttagcacagagtcactgggagacagtgtgagtctgtgtgacatcagcgtgcttagtgtatgacatcagcgtgtttagtgcatgacatcagcgtgcttggcacagagtcactggaaggtggcatgagtctgcgtgacgtcagcatg

SEQ ID NO: 277476 - DNA, 154 bp, Homo sapiens
  chr22:49983004-49983158
  hypo
cagtggcagagccccggtttctgccgcaaacacctctcactgccctccacacaacacatagctccctcctcctcctcacagagtgcctcacacagggcctacccagcggaggaaagagagtctcagctgccccggagcccgttcctcaccaaga

SEQ ID NO: 277477 - DNA, 265 bp, Homo sapiens
  chr22:49983615-49983880
  hypo
cctcccagcagcctgaggcccgagcagggtctgtgatgagcagaggccgcagacggcagtgctggggccgggaattctccctgtgggctctgccctccggcgtgaccagtgcatgtgtctgtgctggaggtcggggcccttgagatgagacactgaatgctccctgctctgcccggctcccggcggcaggtggagcgtccagcgcacacagggtctgcacagccaggcgtttcttccccacctcgcatctctcctggggcagtgt

SEQ ID NO: 277478 - DNA, 42 bp, Homo sapiens; identical to SEQ ID NO: 220969
  chr22:50000856-50000898
  hypo

SEQ ID NO: 277479 - DNA, 201 bp, Homo sapiens
  chr22:50001629-50001830
  hypo
tgctgtacaggagacatgatcgtgattattgttaccatgattaatgtcgtgcgcaggcctctcctgggtgccggggattcagctgcgatgaacaggacaaagtccagatctcatgggaccggcatgggggtgatctcagggaggacaacagagaaaatggaagccaagaaccgggaacagggattccgacagatctgggtt

SEQ ID NO: 277480 - DNA, 705 bp, Homo sapiens
  chr22:50002541-50003246
  hypo
ggcgcaagctcccccgatgacacgggaagctggagacattctcgtgttcacggtcacagctctgctcctttgagaaataagcggcacgatgtttttctagtgggtttgcctttttctcagtgatggtaaaagtgctgtgtatgttaaggtgagtgactcaggaccaaggtgagtcttgactcctcttggctttgcgctgagagcacctgggagagtcaagggagcacacaggacagtccctgcttcggctccccaggaacacgcggccaagtgcacgcagccggtgtcctcgggagccggtggtggggctccctgaaggtcctagaaatccggcggcacagggacgtgcaggcggatgagctggagggagattctgcttttctcagttcctagtgagaagtcagagcccctctgaaagacagacagtcatctaggtcccatctcaggagaaagtggaaccgcccgggccgtgcctgctagaatcaagtgcagttttcacaagaccttgctggaaactgggaagatggaccccgcgcctttcctgggaagagaagagtgtgttttacacacgtgctcccgccaggggagagcagaggggaggcaagccaggcacaaagctggcacgtgggatgagtgaatcagacacagctgcatttgtgttctcggttcctccaaacacgagacgcttggaacagggtctctgag

SEQ ID NO: 277481 - DNA, 794 bp, Homo sapiens
  chr22:50008938-50009732
  hypo
agacaccatcttcatggacacggacatgacacgcgctctgggcagcctggctagagctctgcccacggcacgtcagcccctccacttccgtctgaaaggtgccggccgcgtgtgtcacgcgagaccagtcctgcacgtggatctggacggggcaactgcgcgaagggtcatgaatcccgccggccagggaggatcgtctcctgtgcagaatgaggtgcggtcagaacacggcagaagctgggagctcccacccggctgcccgagacacctcccctcaagattcaccaaacaccacgacgtgcaaagaagaaagtccacgcctccgcggaaaacactgcggctcggcaggtcaatccaaacctggaaacacctcggcgcggcctgtcagtctgaacccggaaacacctcgacgcggccggtcaatctgaatccccagaaaacaccgcggcgcggcaggtcagtccgaacccggaaacaccgcggcgcggcctgtcaatctgaacccggaaacaccgcagcgtggcctgtcagtctgaacccggaaacacctcgacgcggccggtcaatctgaatccccggaaaacactgcggcgcggcaggtcaatccaaacccgggacatcattgctaccagggcggaggagaatacacgcaaaatataccagggcggaggggaatacacggaaaatataccagggcggaggggaatacacggaaaatataccagggcggaggggaatacacgcaaaatataccagggcggaggggaatacacggaaaatataccagggcagag

SEQ ID NO: 277482 - DNA, 369 bp, Homo sapiens
  chr22:50010154-50010523
  hypo
acgggaaacagccccgggagcagaaggtcccagcagcggaattcccctccacttggaccaggcctgcgggagatccgggcactgacaggcggggacattttagaatcttttcaagaaaagataaagaaagaaacaagagtaacaggaggccagaagcaagggcatctactgcagacagcggtgccgcggggctggagctgaagctacccaaggagccccaggctcgggagcctccaggcacaggcgccgtcgggagcctccaggcacaggcagcgtcgggagccaccaggcagaggcagtgttgggagcctccaggcacaggcggcgtcgggagcctccaggcagagacagcgtcgggtggcagggagc

SEQ ID NO: 277483 - DNA, 187 bp, Homo sapiens
  chr22:50015946-50016133
  hypo
cccagctcagcccacgccggggaccaaaggccctgagaagtgaccgtgctggtaggcgtggtgtaaggctggacactgccggctgacctgctcccgggggcccaggagaccctgcactggccactgggaagagtgggcagcagcagcctccctggaagctggggtggccgggcggtgtgggcagggc

SEQ ID NO: 277484 - DNA, 249 bp, Homo sapiens
  chr22:50025072-50025321
  hypo
gtgtttcaggacacgcggggtgcaagtgtttcggggcatacgcgtgtgtttcagggcacaccgggtgcaggtgtttcggggcacacgtgtttcaggacacacggaatgcaggtatttcggggcacatgtgtgtgcttcagggcacaccgggtgcaggtgttttggggcacacgtgtatttcaggacacacagtgtgcaggtgttttggggcacacgcgtgtttcagggcacgccgggtgcaggtgtttc

SEQ ID NO: 277485 - DNA, 33 bp, Homo sapiens
  chr22:50047562-50047595
  hypo
tacaggtgtgagccaccacgcccggcccaacga

SEQ ID NO: 277486 - DNA, 677 bp, Homo sapiens
  chr22:50054165-50054842
  hypo
cggctgccgggtctcggggcccggtgggtccctcctcggtggcttgacccgtttgcctttgagcaatgactcggtgggcagcagagccccacccgtaaccagcctgcacagcgcagccccacaggaatctgttcaggcaaaggttctaattatcaagacatttttatttcaagcagagctcaatatttcaagttcattctgtgcctacgtttcagaaaaaaaatcttccagcaagaacgcaataaacaagactgagagcctcattaggagcctgtgagccccacatcaccagacgcgctgcagctccccgtgatgaccgctcctcctccgagccccgcacacggcgcgggttacatggaaaaggcaccgcagctccccgtgacgtcctctcctcctcggagccccgcacacggcgcgggttacatggaaaaggcactgcagctccccatgacgatcgctcctcctctgagcaccgcacacggcacgggttacatggaaaaggcactgagtgcggcccacaggagaggcggggatggaaccaggaccccaatgcataggctgggggacgcaccttggccacctcccgtggcgggatggttttcccaatcggagatcccagcagggcccatgctggcggctctgcctgtccctggcacggaccactcctcacctgtgga

SEQ ID NO: 277487 - DNA, 164 bp, Homo sapiens
  chr22:50056927-50057091
  hypo
cccaggaccatcacccaacacggtcaccacagggcagacaatgtccgttttcactttcaagatcagccggtagacaacgcagaaaggccacctgccgtcggtgtccatgacagctggcttcaccgtgaaagtgccagccgggcgttcagaggggaggcactcag

SEQ ID NO: 277488 - DNA, 195 bp, Homo sapiens
  chr22:50085872-50086067
  hypo
cgtaaaataaatagcgaccctattagatgatacccaaagaaaatgtatccaagagcccctattaatattaattagtgaatacataaatagataaatgggaaagaagagagaagtcttcgttatagaattccaaatcacccacatagaaggactgacggaaacggaaagtcggtgagagcacggagcaggaatggc

SEQ ID NO: 277489 - DNA, 79 bp, Homo sapiens
  chr22:50092133-50092212
  hypo
actgagagatgttgcggttgcacaattgcacgtgcgttcctctgagcggctggaatgttgggcgcgtgtggccccatga

SEQ ID NO: 277490 - DNA, 353 bp, Homo sapiens
  chr22:50107838-50108191
  hypo
catcagagaaatacaaactacgaagtatctctagaccacaccttttcgaatgcccagaactccgacacgggccatatcaagggctggtgggaatcggggacaccgagaggcagataccctgcttgccgctcccgcatttgaaggctggtgggaatcggggataccgagaggcagataccctgcttgccgctctagcactttggagaggagtttggtggtttctgcggaagtgagggggatgcgcctacaggactgagccatcccgtggccagcgatctgccgagaggggtgaacgccatgtgtctgtgtgaaaacacgcacatgttcacagcggctccccttgcaatagccaa

SEQ ID NO: 277491 - DNA, 95 bp, Homo sapiens
  chr22:50113602-50113697
  hypo
gcgacagagcgagactccatttcaaaaaaaaagaagaagaaatgtcaataaatgtgttcaatgtgtgtgtttaacattgtcggcttgaacacgaa

SEQ ID NO: 277492 - DNA, 50 bp, Homo sapiens
  chr22:50114361-50114411
  hypo
tacaaggtccttcccggcagaatttcgcttttgtgcgatgagaagttctt

SEQ ID NO: 277493 - DNA, 294 bp, Homo sapiens
  chr22:50119262-50119556
  hypo
tcactgggatgccccgtctccagctgagcaacagcactgtgtgtcccagacctgaacagcgagtggagacagtgccgctgtgccaccgcagggcacctcccgctgccttggccacccaggccctcctgggagggatccaaaccactgaccagaaataacacctgaaaaccggaacccgggtcctggggtcacacgcagccgaagggatgggctgggtgcacgaaggacgggcacggcagagctcggctgtgagggtgtcatctgggctcggagctcagccgccgtgtcacctga

SEQ ID NO: 277494 - DNA, 42 bp, Homo sapiens
  chr22:50131653-50131695
  hypo
aaattatgattagtaatgagcgcagaatttttcttgaagaaa

SEQ ID NO: 277495 - DNA, 131 bp, Homo sapiens
  chr22:50156812-50156943
  hypo
acagcccaagtgctcgtacgctgatgaatggacaagcaaactgtggaagccccatgcaacgcagtgtcgttcagccacggggagacgtgaagctctgacacctgatacagccaacgcgctgtaaaccattg

SEQ ID NO: 277496 - DNA, 128 bp, Homo sapiens; identical to SEQ ID NO: 220976
  chr22:50169707-50169835
  hypo

SEQ ID NO: 277497 - DNA, 356 bp, Homo sapiens
  chr22:50170615-50170971
  hypo
cagtcgagccctaagacgctaaccaggaggtgtggagagccatggaggcaggtccgggcgactcaccggctgcgatcctggccgccttggcgtagttcccattctcgatgcaggagatcagctcactgcggtcctccagcgtgtgccgtcgcacaagagccggtttgccccgcccacatttgggcgcattaaagcttcgggaggaagagcagagggagtcaggcgccccgcccctgccttcagcctcactcgggcttcgtcccgtgagctgtccgccaccaagctggccacgcatcctgcctgacacccccgcggccagacgggcctgtgggtgcgcaggtctggagggagtgaac

SEQ ID NO: 277498 - DNA, 772 bp, Homo sapiens
  chr22:50171291-50172063
  hypo
tgcgtggtgggaagcgcagggccgcggtgcccacctcgagtcgcagagcgggctgttgctggaggagatgctggactcggaggcacagcgtcgtcggggtgtggccttcctccccaggccgccgcccggctcctgctcgctcctcgcacccccaaagccgttggtgagacctggaacacaggcgggcaggccctgagctcagcacaaccagggcacactgaagcatgactcaacgacgttacacttggaacacatcttacaaagcacgtttcacagacaggtaagacagcatcttccttttcactcccaagttcccgagcatagtccttacagtaagcagacaccaaagttactcgttaaatgaaatcaacttaacaaactgcagtcggctccgatcgtagtagtttgctgagcaccatgaagatgctcctcttgacaagcccgggtctttagacaggctctgtgaaggcaaagaaaggatgccgtgagcctgccatgggggcagatgtgcaacctgtgagtgcaaacacgggggcggcctgtccacgtgggcaccggccgcgtttgaacggaaacttcaccaggccgaaggggccaccaaagacacaaaaacatgttcacaggagcagagctccagggaataggaaatcaggttttaaaaagaaaaaaccttggttcaaaagacaagtgttaacatgaagtcaaaaatgctgacgaaacactttaaaacacaaaatccggggccatcgccgtgtctgagtgtgtctggcct

SEQ ID NO: 277499 - DNA, 71 bp, Homo sapiens
  chr22:50176846-50176917
  hypo
tgcacaagatcccacgcacagatgccccaccccacgagcaggacttctcagttggccgcaggggcactcag

SEQ ID NO: 277500 - DNA, 238 bp, Homo sapiens
  chr22:50177125-50177363
  hypo
cagacacagcacaacgcgcctgggcatggccgtcacacccaaaccaccagtcactatgggacggctccgcacatgctcaggacagcctcagaatgctgtccactgtgtcgtcagctgcagcaggctcccagtcggtgccgggctctcctctgcgtccttcgtgactgtccagagggaaggctgaggtgccacgacatcccgccagctccaggcgtgcaccgggcgccagcaccattcc

SEQ ID NO: 277501 - DNA, 249 bp, Homo sapiens
  chr22:50177707-50177956
  hypo
ctgaagacacccccgcgctctcacgccccagcacgtgcacatggagactcgcaacaggggtctccgcaacggcagcgagtggacaaagacatccccacactctcaagccccagcacatgcacacagagactcgcagcaggggtctccgcaacggcggtgagtggacaaagacacccccgcgctctcacgccccagcacgtgcacagggagactcgcggcaggggtctccgcaacggcggcgagtagaca

SEQ ID NO: 277502 - DNA, 162 bp, Homo sapiens
  chr22:50187009-50187171
  hypo
ctccttctagataggcggatttcttctcctacatttatttcttagtcataaaaacatctttgctgcctggacctttccccagacattctttggcaacgatcacggctgctacctaccaactctgcagaggagctggccggggaccctcggggcagacaaggc

SEQ ID NO: 277503 - DNA, 380 bp, Homo sapiens
  chr22:50191341-50191721
  hypo
catgctagtggctcccggaccatgctgatagggagctggcaacacagagcaggacagagtctgctagaaagagcgtcttccacctcctccggacacggcgccagttcttaccgtcttcccaggagaaaggccgccgcggtgccgcagcaggccgctcaggcaggtgcatccccgaggcctcttccaagccgatgctgtccacctcgcgccgggcctgcctcagaacaacacctccctgatcgcgcagcctcaccgcggctctatagaacacggtgtccctggcattgtacttcatgcagttatctataatgagatcaaaatcctcctcaaactcatggaggtttttatacccttgagcttctaaccgtttcctcattgtg

SEQ ID NO: 277504 - DNA, 113 bp, Homo sapiens; identical to SEQ ID NO: 220983
  chr22:50192075-50192188
  hypo

SEQ ID NO: 277505 - DNA, 157 bp, Homo sapiens
  chr22:50209203-50209360
  hypo
aaaaaaaaactgtttccagatatagtaatgtccatttctgtagaggagaatccctcctgcctgtcagcctgcaccaggaagggctctgttgtgagctgccagctacaatctgcactaaaacccagaaaaccaacaaagtcacaggagggcaggaatg

SEQ ID NO: 277506 - DNA, 533 bp, Homo sapiens
  chr22:50209390-50209923
  hypo
ttcctcatacaggagagcaggcgctcctgcaggctgcgtccacccaggtgccctcccgagctcccaggcactggctggacctgccctgcagctcctccttccaatgtgtcgtcctggcgcttccttcccgagtgcccgccactccagacccgatgcaggtcaagcacagggagctgccacctgtggcctcatggcccctgccatgcctcccagtgccacccgcagcagccaactcatgcacccacactgcccgggaggcacccacacagggcctcccggtgccacccgcagcagccaactcatgcacccacaccgcccgggaggtacccacacagggctctccccactgggcactgagccagtgtctcctgcttcaatccatgccagatacaaacttttataaaaaattaacagccagaaacatggaggaaaaaaagacttaaaaacacaagccaaagggggccgcggccggtggctctaatccgtaaccctagcactttgggaggctgaggaccacttgggcccaggagttc

SEQ ID NO: 277507 - DNA, 162 bp, Homo sapiens
  chr22:50223386-50223548
  hypo
aacaaagcctcgaacgtaggcatgtcacagggatactcaggaaggccttcggagaggatcttctttagaattcagactcatcctacagaggaggggttgccaaaatactaagagaattgaaccgtaactcatacacagtgaaactagcgttccagtgagaca

SEQ ID NO: 277508 - DNA, 157 bp, Homo sapiens
  chr22:50234239-50234396
  hypo
tctggtgtttctcacgtgccgaaagaactatcagccacggattctatgtggagtgaaaatgtccttcgggaacaaagagaaataaaaaaaattcacagaccaaggcacatgaaaagaatttctcactagcagaactacccttaaagaacagctaaag

SEQ ID NO: 277509 - DNA, 174 bp, Homo sapiens
  chr22:50250093-50250267
  hypo
gaagggtctgggggcgatggcggaagccccaggagagcattgtccatgaggtgcagaggcagcctcacggcatcccagtgcgtacctcctgcccggcccaagcgcctgctgctgaagccgcctcccagctcccccgggttgtttcggaattcaggggacatgcagcctaaatga

SEQ ID NO: 277510 - DNA, 229 bp, Homo sapiens; identical to SEQ ID NO: 220988
  chr22:50250297-50250526
  hypo

SEQ ID NO: 277511 - DNA, 68 bp, Homo sapiens
  chr22:50282333-50282401
  hypo
gggttgccttggccgcagcctctgtgcacgctcttcctggtgtcctcttacccggtagctgtgcgctt

SEQ ID NO: 277512 - DNA, 237 bp, Homo sapiens
  chr22:50296995-50297232
  hypo
cagggtgggggggtgcggccggggccaccatggtctcccctgagagggggtgctgtcttaggtgccccaagaggccctcgggcagcaagcgtggggtgctgccaaaatacagctccccctgggtgggcaggacacacgtggcctcctggcagacaggtgcctgggtgagcccgctgctcctgattagtcatgaatggcacctggtctgggcgacagtcacccgcaggaagccctgag

SEQ ID NO: 277513 - DNA, 78 bp, Homo sapiens
  chr22:50305618-50305696
  hypo
gatcagcctcggctgcgggatcaccctcggccccgggatcagcctcggccacgggatcaccctcggccccgggatcag

SEQ ID NO: 277514 - DNA, 413 bp, Homo sapiens
  chr22:50316605-50317018
  hypo
ctcactctcacacaatgtgtcgccatcctcatggggcgcctgccccggttggcactgagtgtctaaggacagggcctggccatcgcctcatcccctcccctgccgcgtggggcctccgaggatggcatttgagatgattcctcctcaggggctgccctcctccctgcccttccccagccggccctggccacgggctgtgtcaggccatgatcggtccttccccgctccctggccgggctgtcctgggccgctcacagctgtgccgctctgttccagatgtggacgagtgtgcggccgagccgcctccctgcagcgctgcgcagttctgtaagaacgccaacggctcctacacgtgcgaaggtgggccaggcgggcgggtctgcactccggggcctgccgggtttcgttgctgc

SEQ ID NO: 277515 - DNA, 42 bp, Homo sapiens
  chr22:50340691-50340733
  hypo
gccactgtccacccaagccccgcaggcaggaacccttggtat

SEQ ID NO: 277516 - DNA, 121 bp, Homo sapiens
  chr22:50341662-50341783
  hypo
tgtcccatccctctggaacccgccctggtgaggggtgcaggggccctcagtggccaccttataggaccgggcaccgggcacttcatgaggctgtctgctcggccacagcagccctgctgat

SEQ ID NO: 277517 - DNA, 403 bp, Homo sapiens
  chr22:50343413-50343816
  hypo
ccaccaggacccaggttctccgagcagaggatcagatttccggcattgctgcccgggctccacgcatccgggcctcgctcacgggtctctctatacacgggtctccactatacagaaggccgatcagtggcccctgcccctggagcagagcccctcaaccggcagggacacaggcttcccactggaggggccctggggagaagtccttggctggagaggggggtgggccgtcagaaactccccaggcgggtccagcatgctggggggcagcacaggcccagggctgggaccctctgcagtgtgggtctcgcagtgtccccccgctggccagaggtgaggcctcaggtgtggcgggcacaggccatgagagccgcacctgcccgagggccctggctgttggact

SEQ ID NO: 277518 - DNA, 184 bp, Homo sapiens
  chr22:50344327-50344511
  hypo
aagcaagtaactagaaggaccgggcccagccgcctgctggagctgccgggggtccaggggcagccgccctgccaggcctactctacggcaacacggagcgtttgcagcagcttctcccaggccctgtgggccgagggctcaggagtccagggcagcgcaggacgggcacagctgggggcccctc

SEQ ID NO: 277519 - DNA, 326 bp, Homo sapiens
  chr22:50345917-50346243
  hypo
tgccaccggcagcccggcctcagcagagctgacacagaagagtgggttgcaggctgagctggtcctccggggcccaaaccaggcctggcacccacgaccctgaagagtgggaccccaaccaccccgacacctagtcggggcagggcagcagggacgggagggagctctgggccaccgaaggggccagggcgctggatggggaatttcctggaggtggaggagcccagcaagggtaaaagtgcagaattctttccattctttgcatttctctgagatgattctgcagagtgtgttgcctggaagacccgtggtgtctgtgtgtgtgt

SEQ ID NO: 277520 - DNA, 445 bp, Homo sapiens
  chr22:50346303-50346748
  hypo
gtgtgtggtgtgtacttgtgtgtggttgtgtgtgtgtgtgcacgcagcctgcccctggtgcctcatcccccccttccccctgggagcggccccgctgtgctggcagttcggcccccacaggtctgcactggtgaaccctcatggtccctcagggagcccgggagaggtgaggaggacctggatagggcccaggcccagatgcctgcaggggagaaagctccacacaaggggtttgtgaggccttgccccagccccaacgagattcaggtgcccagctgtgggatatggggacaggcaggtgacggcccggctctcaggctccccatctggacgatggatggacacgcgtaagcaagaccctgaggccctgtccctcagcttccccaggcagggccgaagtgccctcctcctgagggctgggaggccacagcgcccagtgggagga

SEQ ID NO: 277521 - DNA, 189 bp, Homo sapiens; identical to SEQ ID NO: 220992
  chr22:50433174-50433363
  hypo

SEQ ID NO: 277522 - DNA, 89 bp, Homo sapiens
  chr22:50466962-50467051
  hypo
tgggaatcagggaggcggcaacacctgcgtgccgtcataaagacccccaccatgccctcgtaaagacccccatcacaccgtcctgaaga

SEQ ID NO: 277523 - DNA, 49 bp, Homo sapiens
  chr22:50488452-50488501
  hypo
caccacactcaggccggcgccgactcctcctgcccgtgacagacgcaca

SEQ ID NO: 277524 - DNA, 48 bp, Homo sapiens
  chr22:50506925-50506973
  hypo
ccagaggctgtgaacagcagcggagacgtgaggctgcttatggcaatc

SEQ ID NO: 277525 - DNA, 31 bp, Homo sapiens
  chr22:50509793-50509824
  hypo
tacaggcatgagccaccgcacctggccctgg

SEQ ID NO: 277526 - DNA, 144 bp, Homo sapiens
  chr22:50511772-50511916
  hypo
gtgctgagaacctcgtggggtctgcgtccggaggcaggtgggtggtggctctgggtgggctacaggctgtgaggggatctggggtgtggaggggttgctctagactcactgttctgagggaacacacctgtaatcccagcactt

SEQ ID NO: 277527 - DNA, 64 bp, Homo sapiens
  chr22:50515962-50516026
  hypo
gcccgcctttctcacgccaccgcgcttcagcgtccaccggaccacctcacgggcaggctgcgca

SEQ ID NO: 277528 - DNA, 395 bp, Homo sapiens
  chr22:50520368-50520763
  hypo
gcagcagagtgggacgggtcacctgccccaaagggctttgttctaagggagcagagacccaggacagcacggggcggggcatccactttgtttttaagacatttcgggggcgctgctggggacagtcaccaacagtgtccctagagaaagggcaggggccagagacccagcaggcatgtggaagcgagaggaggggagagctcgggaccagctgaagcaggaggggcgtggggtccgcggcttgcgggccagaggggcatggggtccgcggcttgcgggccagaggggcatggggtgcgcggcttgcgggccagaggggcatggggtccatggcttgcgggccagagcccaggggtcagccagcatggtgctctagctgccgggacgctggggag

SEQ ID NO: 277529 - DNA, 197 bp, Homo sapiens
  chr22:50521454-50521651
  hypo
accagagcacgtgccggcgagcttgggcactggcagaggcgtggaggaagctgcttacagagcctgcagcacagcgcaagtaatccatctcagccgggaacacgttccccaggtacagcgaaaaccccgaggtcaccaggaggcagctctgcaagacagcgacagaatcccaggttacaacgcgccccgtccccagg

SEQ ID NO: 277530 - DNA, 66 bp, Homo sapiens
  chr22:50529039-50529105
  hypo
aagcccatctttctaaagcccgggatgcgcccggatgccctcaccgttcctttctcctgaggtgtt

SEQ ID NO: 277531 - DNA, 401 bp, Homo sapiens
  chr22:50529596-50529997
  hypo
tggagcacttgctccgtggatctcttcggtagaacacgcgctcagcggtagctggagctccagctcttggcagcgctcagatcctatgcctgtactgtaaccgtcgccccaggttcctcccgtggctgggaagctgcagtaaaggcacgttcaggactcaggaccgtggctgcagcagtggccagacggctgagggcgtgcgctgctcctgggccagacttgtctgcccagccccgaaccttttccagcaccgtgtttgttgagattctccagtcttccgaggctgctgctgatggtaataaaaagataatcgatagtactaataaaaccgtgcatgctaatgactcccagatgctgatataagtggccatttacatagcacttaacgcgtgtcagccacg

SEQ ID NO: 277532 - DNA, 198 bp, Homo sapiens
  chr22:50601380-50601578
  hypo
ggcaggtgggagagacgcaagaagcaggtgtggggtccacacttgagggagtgctcttgggcagagacgtggggagccagtgttgaggctgggcaggtgtcctcagctgggggacacctcagcaatgatctggcgtgtgcccagggtggcaggagaccaggcggggtcattctataaaggactcggggcacctgtttg

SEQ ID NO: 277533 - DNA, 131 bp, Homo sapiens
  chr22:50626942-50627073
  hypo
ctcctggcttgtagacgggcccccgcggcgtccttacccgggggagcaagagctgcgtggcgtctcttccaggagtactaaccccgtcatgggggctatgcactcatgacctcatccgaacctgatcacct

SEQ ID NO: 277534 - DNA, 117 bp, Homo sapiens
  chr22:50656907-50657024
  hypo
gggcctcacctgtgcgcttgaggtggaagcagacgtccttgagcgcccacatcatgagcttcagctgcagcaggaaggagaagacgccgctgtacttgctcacgcagccctcggtga

SEQ ID NO: 277535 - DNA, 248 bp, Homo sapiens
  chr22:50686572-50686820
  hypo
atctagggacagttcggagtcatagccactgcacaggagcccgaggtgggatcctgcagcctagcacccggccacactgaccttgctgctggaggctcttccagtgcggggcctgggcagcacgggcactctggatggactctagggcactgtgagggagacacaacagtcgtgacacctggtctcacaccccggccctgcccgccctacctcccctcgcacctctgacatggcgccattggccctga

SEQ ID NO: 277536 - DNA, 39 bp, Homo sapiens
  chr22:50695754-50695793
  hypo
catccacactggcctcggtgtcctcgcagccccaccttg

SEQ ID NO: 277537 - DNA, 196 bp, Homo sapiens
  chr22:50714229-50714425
  hypo
ttgatgatctgagggagggtcgcatcagagcacaccgggggaccgcccagcaccccacctgcccccgcccccgggggcctgaccctacctcgtcatagtacttctgcgtgtattggtagagctggtggagtgccacgagggtgttcaaggagtccgtgtgcgcctggggggtgacgggacagtcagggtggaaaag

SEQ ID NO: 277538 - DNA, 2093 bp, Homo sapiens
  chr22:50718698-50720791
  hypo
acactgtgaccagctgaaaccgctggacaggaagggctagagtccggctttgagtttgtggccggggacaccacccctagaccgccccccaccaccagcgctggctggcacctgccggctcctgggggcccaacaggccgctgtgccacccgccaccagccccagagcccctgcggccgccccgcccgtggccccgctcgtggccccgcccatgtgcacctgcgcagcatcagcttggggttcttggccaccacgtactgctccaggagctccaggaagagcgtgtgcatgatgtccgtgtagtactccagtttcccgtgcagcgccaccgtcagcagggacgcgaagtagaccttggcgcgggccgagaactcccgctggttctccagggtgtggatgaactgtaggggccggcggtcaaagcctgcccggcgccacctgtgtgccctcccgcccgcccgacgcctggctcacattgatgaggaaagacttgctgttcagcaggttggagaactggtagagggcctgctccaccaccggccgccgcggctcagggatgtccagcttgccggtgatcatcacgtccttgtcgccgtccttggagggcaggaagaagacgcggtcggtgtaggtcttgtagtccagcacggggatgccggcctcgtgcacgtcgttggtctggtcctccatctcgatcatcaggtctggggggaggctggcgtgagacgtccctggccacgtggggccctgacccccacgctacacacagcatccccgccccaggaggcgccccagcaccagcccccaagcggtccctacctgtgaattccttcttgcagcggtcccgcacgctctcctccaggccctccagctgggacttgatcttctcatactctcgttcggcctgctggctcttcctcctgcaaggcacagcgggcctcctaggttctgccggggctggccgctcagctgcccggatgaggaggtggatctacacgcctgcctgtgcagggcggcggatgaggccagaggggccgaggcgggagggccgagggctcagggtgttggcacagccggggggcgggctcaccagtagcagtagacagacaccgcgatgacgaccaccatgggcacgatgaccagcggcaagatgaggctgagcggcacgtcgctcacccgtgtgtcgtactccacgcggcccagcacccactcgcgagagccgaacttcacctgtgtggggggccgggttcagcgcggtcccgtgggggcaccccccgccagtccccgctcacgcacaatgaactcgggcaggttgtgtgtggtgtctcgtttctgccgccgcttgggcgggggctgcacctccgggggctcacagtacaggtcggtctccgtcagcgtcttcatggtgcagcgctcggcacccacgaaggcctcggcctcctgcagcgtcatcgccttgttcagattggtgccctggggaggcggcagtggtcggggtgaggaggagggaaccagggacaggtggaccagctctcagcccagacccgagcaggacccagacacccggggctgcaccgtcctcacccgggcgtggatgagcttgttgacctgcttcttgacgccacctgtgaagttctcaaaggtggggtcaggcacgtactcgaaggccccggcctctgttctgagcagggcacggtgcccgtccatctcgatcagcaccgtgaggttgtaggcctctggctcctcaggcacagccggggacaggaagacgaccttggtgtcattgtggaacacgtagtctgtacccaccacctgcaggcaagtcccagctgtcagcccccgggcgcagaccccgcccttcctgggcacgatcccatgggccggtgccagagctgagcccacgccaggactgaccgtcatgggctgcagggattcagcctcccgcggcggctgccaggactgcaggggctccgcgatgaccaccatggcaaacctctggatcaggctgaagccctgacccgtgacgttgatgctgcggccaccactgcggagggcagtgccttcgtgggctcggctggcaggggtggtccctg

SEQ ID NO: 277539 - DNA, 1272 bp, Homo sapiens
  chr22:50721216-50722488
  hypo
cacgggggaccccccgtaggagacctccagaagcatctggccccgtgtcgcctgggggccagtgacacactggagctgcgccccaaacttcgtcctgggggagggagggtgctggtctgcatcaacccctcccccgggaccagccccagcccgaccaggctggccccgccatcccctcagggccactcaggtctcagtaagtgcccccctccatacccagggccagggccaaccagactcagcagctggcggtgacacccacactttacacgggacgccgttgagggtcacccgcacgtcctcctgggagcccgtgtccaggtgggtgccgtggatggtcagtgtggtgccgcccgcctgcggtccctgctgcggctccacactgagaggcttgggctgctgaaagagccgcaggggcactcgggtgaggacggggcacaggacgccctcggtcctgggctggatggtaactgtcgtggggaggcggcgggcagagcccctcctcccggtcctcccgggttcggcaggtccccgaggccgggtgcttacttggaaggtgaactggacattgggaggcgaacggcccagtttcccgaagacgtccacctcgacaccccccgtgaaaggcgtctccgcagcctcgatcacacacacgatcctggcgggcgacaggcagtgtggcccaggcactccccgacccaccccacaccctgacaccctcaccccctcagcctccccacccacccagtcacccggaaccccagcgtgggtactgacccagctgacagggcccagaccagggccgtccactcaccgggtggacacggagtaacgttccggctgaaaggagcagttccggccggccacagagatcctctggatgtcccctgcttggacgcccaaattggaccccaggatggtgatgcggatgcccccacccagggggcccgtctcaggctggatctgaaaccacagagccgggtgagcagggaggggctcatgccagggacgagggaaggtgtaggccaggcttcgaggggctcaccctggtgatgacgggcggcgggcactcggaggtggtgttgcacagggcctcatacacgcacctgctctggcccccgcaccacgcacacctgtagtcggggttagcggcccggcacaggctgcagtcgctgcggccaaaggagcagttgtagagggtcactgcggggagagctgccgtcagtggtcaccccgtgcctgcccgcccccgacctgctccccactgcgccc

SEQ ID NO: 277540 - DNA, 621 bp, Homo sapiens
  chr22:50724162-50724783
  hypo
ccggccggcacccctccctccgcacctgagcctgcctgtcaccagccggcacccctccctccgcaccttcacggtgtccaggttcttgccctggaagttcacatctgtctcgtggttcatggggatcaccagggggctgggtcccaggaactggggacagctgtcctcctgggagagtaaggctggtcaggtgctgcctgggcacagcggagcagccatgccctgaacagtcccctgaggccccgaggcccctcaccatgtgggcacggacgatgccgtcctcagggttgggcgaagcctcccggcactcgtggtagcgcaggtcccactggcaggtccagcggttgctcacgcaggagatgcacctgcatccagaggggatcgtgagcagggctggggtggacgggcagggtggggtcgatgggcacaagacactcacggcaggttctcctccaggctcatggcctggcggcagtcgtagaaggggtactggtaggacgtgaggaagatgttgcctcgtctaaggaggagctggatggtcacggccacgtggtctgcagacagcagagggggaggtgtcaaggtggcggccgcagggccgagggccaggctgggcctccc

SEQ ID NO: 277541 - DNA, 76 bp, Homo sapiens; identical to SEQ ID NO: 221000
  chr22:50853285-50853361
  hypo

SEQ ID NO: 277542 - DNA, 221 bp, Homo sapiens
  chr22:50858128-50858349
  hypo
ggcgatgcatttgtcgatgtgcgtggaacaggtgtggttggcaggttttccccaaggactgttccgacaagtccccacagctcccgtgtgtgtttgtgtgtgtgtcgcagggtttccactctgatgcatggttacatatacatgtgtttatctcccatgcagactggccctcacagggcaggggtgtgacactcaccgctgtctcccgtgccctgtgcacc

SEQ ID NO: 277543 - DNA, 125 bp, Homo sapiens; identical to SEQ ID NO: 221001
  chr22:50864103-50864228
  hypo

SEQ ID NO: 277544 - DNA, 149 bp, Homo sapiens; identical to SEQ ID NO: 221002
  chr22:50873266-50873415
  hypo

SEQ ID NO: 277545 - DNA, 205 bp, Homo sapiens
  chr22:50873755-50873960
  hypo
gagacagtccctcccggggtagttggtgactccggagctggcactcagaagccgttagcgccaccgggctccttgcagctcagggagccctgcctggctaggctgtcctggctgtgtgctctgcactcaggtgattggagagtctcattctcactcaggtgtgagatttcgtagcacaagtctcaggggagcaggttgcagcctg

SEQ ID NO: 277546 - DNA, 145 bp, Homo sapiens
  chr22:50874140-50874285
  hypo
aggtcaggcctgccggctgccatcacaaataataaaagcagggcaggaggagcttccccacatcctggagggcaaagtagatgggtggaggtggaggccagggacagctccccagggcaggggcagtttaaggaggcgaggggca

SEQ ID NO: 277547 - DNA, 72 bp, Homo sapiens; identical to SEQ ID NO: 221004
  chr22:50874675-50874747
  hypo

SEQ ID NO: 277548 - DNA, 465 bp, Homo sapiens
  chr22:50877969-50878434
  hypo
tccttgaggggctgacgggcactgcctgggcctccctcctggagcagccccatcttcctgtcaacctctgaggggctcccggggcaggggcgctgcctcccctttgcctgcagcaccccaggcctgcccacgcctgaccactgtgtctctcccccagcaggcgccatgtggacggcagtgtttgatgagccagcgaactcaacgcccacagccccaggagtggtgagggacgtgggttccagtgtgtgggcagctggcacctcagctccagaggagaaaggctgggccaagttcactgacttccaacctttctgctggtaacaaatgcgctggcaggagggggctgtgccaggaagtgcctgtcagggccaggaggcacctgtcccccaggactgatcctgtcctcgtccttgtatgcagctccgagtcagggcccaggtgcagctctccggtggacacagaatg

SEQ ID NO: 277549 - DNA, 115 bp, Homo sapiens
  chr22:50882626-50882741
  hypo
ggaagacagatgccccgccagaaggagctgccttaaatggcccagtgtgatgctgctgccgcccggccacggcccaccctggtcaggctgcctccttaatcgagaaaactacctg

SEQ ID NO: 277550 - DNA, 197 bp, Homo sapiens; identical to SEQ ID NO: 221005
  chr22:50884059-50884256
  hypo

SEQ ID NO: 277551 - DNA, 550 bp, Homo sapiens
  chr22:50885391-50885941
  hypo
ataagttagggccggccgggcggggcggggcggggacgggggctgtacacacaagtgctgggggctcggggcctcaatactgtcgagggccggggctgtaaacatggccggggcggccctgcccacccctagtggtcggtaacgaccggaagcagagcagccgggcagggctgggaggctcaggcgtccgacaggcagctctggatccggtccacccactgctgggccgagggcacgtcctgggcacagaagttgtaaacgcgacgcgttgtcttcacctggggaagggcgggttactgactccgcagcccccacaccgcagagcccctcccctctcccaagccccggccaaggctcacgtcaaagaaggccttctcgtccacagtcttaggggcacccatagtgggcgtgccaggtgccacagcctccacctccgccaagtcgatgacacccttgcactctgtgtccacacggtggtcgtagtagcgcagctggaggaggccacagagtcagcggagccccctcccccgtgagtcccccccaccacctg

SEQ ID NO: 277552 - DNA, 808 bp, Homo sapiens
  chr22:50894558-50895366
  hypo
aagcaaacctagacccgtccacttggctctacccaaggggagggcccagcaccaaggcgggcagagggacggggcagtgcagagacctggatcagccactctgagtcctccagtgagcgcaggaaggaggctgggctgggctcagcagcggggcagcctgggacacatgctttcagcagcttcttgaagctagccttcacctgccgtgcctcgaatacctcaatgggcaccagctcccactgctgcagggggtctgaccgcacaccctgaaaagaatccggacaagtcccgtgagacacatgaggccccaagccccctgccgagcccccaccctcaccccccaccccccgcaccccagtcaccttgagctgggctttgtccccaaggatatagagggctgctcgctgcggacgcaggaagcccgggtcgggagggcccccgttggcctggggtggggccagcgcgtctctgccagctagccgggagcccacatcggtgccaaggccactgctgcgtccactggtccggacactgccccacttacctgtgaaggagatgccaggtaagcacccaaagggggccagggcaccacttacctggggctggctgggcccggcctccagggagggggctgagctcccagggcaggggtggttggcaggaccccagcagggccgtgcgagaggagggctggaacacacagattctgagacgtggggtggcagccagtgttagtttctagggcaggactcacgggtcagggaggtaaggactggggctcgggagacgggtcgttagtgtcaggtgt

SEQ ID NO: 277553 - DNA, 158 bp, Homo sapiens
  chr22:50897897-50898055
  hypo
cctggagaaggtgcgttctgggccttgaagaggccgacgacacctttgccatgcaggcctccagagcgcagcagcaccgccttggaccgcccgctgcgccagcagaccacggggaagcggttctggcggtagcagcgggacacgcgctgcagggcgtt

SEQ ID NO: 277554 - DNA, 1249 bp, Homo sapiens
  chr22:50899050-50900299
  hypo
tgtccggcgggtaccgcagcttatgcagctgcttacggaagagctcggcgctgtcagaccccacctcctcgtcaaaggccattttcagcagctgtgtcagtaaaagcagcccttaggggtgtgggtggccccccagcccctcccccaactctgacactgccaggctccccttcccctcgcagccatgacagagagagaagcaggccccaggcaaaggcctgtatctgtgtcacacgaaggcaagcgcttgtgtaaactcgaaatctcagtggctgtgagctgaggcctgggtttgcaaggcacacccaagacacggacttgagggccggcgccccaaggaaaggacaaggacccaaagaccgcacatcaaacagtggacatcaactcaagagccacagtgagggccccagacatgcaagcgtaacaacagggccactgctggagactggcctaaaaatggttcatacaagaaagaccggtttgcaggagaaagaccagggcgggggatgagagccccacccgcgcaccgcgccccacctggaatgtgcaggagcgcagctggagcccgtcctgcaggagctggtccacaggggtctggacgctgatgcgcttctccttggtcagcgcagccaccgggaaggagcggaccaccacctgctccccaacttaggacaggccaggcagagtcagaagcaaggaaggtaagggggggggggtcccagaatctcagggtaccacagttatggggaatcccaagtgggtggggaaggagcagacaaaggcccgtttcccacgggcacccagaacccccgagaaaagggagagggaggcagggaaagcccatccatcccaaagacctgggggagagggggcgacagggccagagagtctgcaggctcacccagggggtccgtgggcatccccgtgaagatgacccggtacgtggtgaggaagacggcgccctcagctgggagcaatgctggtcccccagcactgccccccgcgccctcctcacgcccatccggcagcaggtagacgcgcaggccgtccagcacacactcctcacccggcagcaggcgcggccgcagcagcttgggctgctcgaaaacaagagcaggagctcaggatgcagcccgggccttgggcccccgcagccccaacggcccccgcaaaccttctggatgggcggcagcctccggctctcccgctgcacggcctccagggtctcgatgtgcatctggacaatgtc

SEQ ID NO: 277555 - DNA, 137 bp, Homo sapiens
  chr22:50918772-50918909
  hypo
caccagtgttgattcggctgatgtggctggctcagaggcaggtgtccccctccttccccactgttccctgtgcgtccctccgaagctgcacgctccatcgaagaggatggaggaccgggcttcgagtagctgcgctc

SEQ ID NO: 277556 - DNA, 494 bp, Homo sapiens
  chr22:50921117-50921611
  hypo
tgggtcagcctctccgggatggtggccgccaacactcgggcccccgaagacactcgggcccccgcaggacccaagcccagctcctgcgagtgggctgtgtgctgggcacctgccaggtgcagaatctcagccaccgcctgtggcaactcatgggaccggccggccggcaggactcagctcctgtggaccccagcagcccccacagctatggctgaggtggggccgggccacacccctgcccatcccagccagggtgctgtgcccccgtccagagctgcagctgagccccatctgaagcccagtccctcggagctgcagacagcaggtcctgcagcaacaatacctgcacggctttgcacacgtaaacctaggctggtctacacgcagtgctggtacgtcaaggagcctaaacaccctgaaattgtgaccccctgggggacagctgccagacacagctggcggcagcaccagatgctaagcgcttcagagaggag

SEQ ID NO: 277557 - DNA, 476 bp, Homo sapiens
  chr22:50922303-50922779
  hypo
cttccctggggggacgggggactcacatgtgcctgccactggagcctctcaaccgtccagcagaacacggggttcagaaagggctccttctgctatttagcgaacactgagcatttaatttacaaatgtttgctagggtcaccctctcggccatcccacgagggtcgccatgatcaccccaactctagaggccgcagcagagctcaggacattcccccacagagcttgcccctcagttcctacctccaagggggagggtcctggaagcgcccacccaggcgccgcccctgtgcttgctccccgagctcagggattgccgagtccacgtaactgacctgtactccacgaggccctgtgggaacggtccaggctggtcctgccctgtggaggcctccgtgcactgagagatgtactaggattgcagcaaaggtggtcagggtgatgggccgcacagcgaggcagtcaaggccagctcc

SEQ ID NO: 277558 - DNA, 95 bp, Homo sapiens
  chr22:50925263-50925358
  hypo
agcctggctgaggacacactcgccagcctgtgctttgccacctgagcgccgctccctctcaggatgaaggtgacggtggtgagtacccagacccc

SEQ ID NO: 277559 - DNA, 111 bp, Homo sapiens
  chr22:50927880-50927991
  hypo
tggggggaggggcaacgcagcccgtccaccaggcccggtcctgcagccccaagtgagccgctgggtggccttgcccgcaggctttctacatgatccggttccactccttct

SEQ ID NO: 277560 - DNA, 210 bp, Homo sapiens
  chr22:50938934-50939144
  hypo
cacacaaaagcttgcatatccaatgttcacagcagcactattcacataggaaaggcggaagccacgcaagcgtctatcgatatacgaatgaataaggacagggaaaacgtggcccctccgtacactggactgactcagccctaaaggaacacagcgctcatacgtgctatgacgtgggtgtggccttgaaaacaccgtgctgagtgaaag

SEQ ID NO: 277561 - DNA, 1016 bp, Homo sapiens
  chr22:50942719-50943735
  hypo
cttacccctgcaccccgggctccacaccccacccggtgcccagccttacccctgctccccaggctgggagaaccagtacttgtagcgctgggctcggacgtaggtgggcggctgcttgtggaagggatacctggccacttggctctggacaaggcggatcactgcagcgagaggcatcagcgtggcccccacagtacccgccctgcccctcccctccccaccccgctccaccccagcccactccacaccccccaagcccgctccgcacctggctccttgccctgcagcaggcgcaagaccaggcttgtgaaccacgggctgtgcgtgtgtgggcccagggctgcaaaccacatctgccagtccaggcgtggctggtggggcaccacaaccgggggcggccggctcaggttcccaggcttgtacatgaactcgatctcctgccaggcaggccgaggtcagctgggcccgctgacctgggccccaccaccctgcccgccctgggagggctcaccgtccagtggtggccgtcgtaactgccctccagcaccacctcaggccgtccaccaagcccagtcatgcggcggaagaggccgtaggagttggccagctgtaggtgctccacggcaccaaacaggcggtgggccccggtccagaggcgcccgtgggtcccgggctccacgtaggagtacggcacctggagacaggtgggaggttctcagggctgccctgcccccagcccatcccccagccctgcagcgctacccaccaggctaatcaggaacaaggccacggtcgcagtgcccacaagggacagttggactacagcactgagcttccgtagccagccccgcacctgggtccacctgtgggcaaggacccaaggtcgtcaggccggccctgcacacctgtgccccctccctgcttcctgggccatgtacctccacagggcactcagcagctcccagaccagggaggccacacccagccacacagtgggcagcgtcagtgtcttcagc

SEQ ID NO: 277562 - DNA, 698 bp, Homo sapiens
  chr22:50944142-50944840
  hypo
agccaggtgctggtcgtccagcagcgcagtggtaagcaccagcgtcatcaggttgaagaagttgtagttgccggtgatgataatcaggacctgcagcagcacctgggggcggcccgctctcagtgctcccggagactgacgcctggccccgtggcaggcacccacctccaccctgcagggtgcatccctctgctacaaggccttcccaacagcggttgccagctgtccccgggagccacgctgtccccaacagggcacgctgagcagcgctgaaggccgagccctgtctgcctctctctgacagctgcggccctcacccacctgcgagtagaaagcagccaagcgcaggcgtcgaatgggggcgaagaacaggggcggcacagcgatctcaattaggaaggtggccaccacgctgagcttgtgcagccagaccggcaggtggtgtgcgaaccaggcggcgggcgtgggcaggcactgggtctcgtagtggtaggtgagggctgcaggcgagggcaggagtcagggctggccgagcccccagactaccccaggtccagaccgggcccctcaccagtgagcccccaccacgcagggcagcggctggtcagcttgaccacgcctgaggcgaacatgaggcggaacagcagccatcgcaccagccagaaggggaggtcttcgtggggcagggcccctgcctg

SEQ ID NO: 277563 - DNA, 237 bp, Homo sapiens
  chr22:50954809-50955046
  hypo
tgccctggaagaagcgagtgcagactgggccttggattccccctgtctttgtgttgtttcttgcagctggatcagatctgcatttcttttgacgaaggcaagaccacaatgaacttcattgaggcagcgttgttgatccagggctctgcctgcgtctacagtaagaaggtgggccctgcttgacgctggtcttggcattttggtggccagtgggaccacagtcggctctccttctgg

SEQ ID NO: 277564 - DNA, 251 bp, Homo sapiens
  chr22:50961988-50962239
  hypo
cacacagattaaacgcagcccgtttaatgatggggcccagactgcagtggctcaagacaggacactgcggaaagccgccatgtgccgccgcacactgtctgagatctgctcagccgatctgctccggccgtagtaatccgtgaagaggccgtcagggttgagcaggtagatggcaatggagtggtccacgatgtagtcctggtcctcatccttggggcctgcattgtagtacacgcggtaactgtgactag

SEQ ID NO: 277565 - DNA, 95 bp, Homo sapiens
  chr22:51010439-51010534
  hypo
ttggaatgtcccactgcagccgtgtaggaggtgcgagcgcagggttcggtttgcccaggcagtgcccggtctccgtgtagcccaggtggaagctg

SEQ ID NO: 277566 - DNA, 78 bp, Homo sapiens; identical to SEQ ID NO: 221019
  chr22:51023316-51023394
  hypo

SEQ ID NO: 277567 - DNA, 390 bp, Homo sapiens
  chr22:51144194-51144584
  hypo
gagccagccggcaccgtgacccccgccagcacccttgatcgtctcctgaggccctgattctgggggttcccagggcccctgaggccctgaccgcccgcccccccccccccgcactccctgagctccttgagccatgaagaagtttgcgtccagccgtaacctgaacaagatcctggcacagtgcgactcatcctcgcgggagtacgaggagatccaggcggtggagcgcaagtggcacctgcacctggccacgccgcgccgcctgctgctggacaggaggtccaaggcctccctcttctttgcagccccaccgccccccaagagggcccccagcaccacactgaccctgcgctccaagtccatgacagctgagctcgaggaacttggtga

SEQ ID NO: 277568 - DNA, 269 bp, Homo sapiens; identical to SEQ ID NO: 221021
  chr22:51149171-51149440
  hypo

SEQ ID NO: 277569 - DNA, 256 bp, Homo sapiens
  chr22:51160332-51160588
  hypo
gaggaggctgacacacgcagctccagcgacccccacctggagaccacaagcaccatctccacggtgtccagcatgtccaccttgagctcggagagcggggaactcactgacacccacacctccttcgctgacggacacacttttctactcgagaagccaccagtgcctcccaagcccaagctcaagtccccgctggggaaggggccggtgaccttcagggacccgctgctgaagcagtcctcggacagcgagctca

SEQ ID NO: 277570 - DNA, 198 bp, Homo sapiens; identical to SEQ ID NO: 221023
  chr22:51171376-51171574
  hypo

SEQ ID NO: 277571 - DNA, 246 bp, Homo sapiens
  chrX:2931093-2931339
  hypo
tgtctgcctacaacctgaaccgtgccttcacgtggcttggtgggtcaggtggtcttcccaccaatgaaacgacttttgccaagctgctgcagcaccgtggctaccgcacgggactcataggtatggcgccggaactctgcccgtggaaacgtgatcctgcagcctctctgtcatcgtgtctaaggtgtttccggggatgttggctttgtgcgcgccagtttgaccgacttctctttgagataagac

SEQ ID NO: 277572 - DNA, 148 bp, Homo sapiens
  chrX:3609054-3609202
  hypo
gagacggtagagaccgagcacagttaggagatgaccattataattataattattaaggtgatcaccagctcagtcggactagggtctagaaagtctgagccccgtacagagggatcaatcaccttttaagcagtttgtggcgggagtt

SEQ ID NO: 277573 - DNA, 60 bp, Homo sapiens
  chrX:3609232-3609292
  hypo
gagaacaaaggcagttaattactcttttgcatttgttacaccgtacgtcttacattcttg

SEQ ID NO: 277574 - DNA, 44 bp, Homo sapiens
  chrX:3746572-3746616
  hypo
tcaccaagcaggagcgggcccctccctcacgcggagccgctggc

SEQ ID NO: 277575 - DNA, 38 bp, Homo sapiens
  chrX:4606593-4606631
  hypo
atagcatttttttttttagacggcttctcactctgttg

SEQ ID NO: 277576 - DNA, 37 bp, Homo sapiens
  chrX:4606871-4606908
  hypo
gtgagccactgtgcccggctgtgagcagaatgatttt

SEQ ID NO: 277577 - DNA, 42 bp, Homo sapiens
  chrX:4637572-4637614
  hypo
tattttggctgctcaacttccgcttcatatcttgcttcttgc

SEQ ID NO: 277578 - DNA, 120 bp, Homo sapiens
  chrX:4643432-4643552
  hypo
ccatcgcggtgagtgttacagttcctaaaggtggcgcgtcctgagttcattcctcaagtccggagttgttcgttcctcaagtccggagttgttcatccctcccaggggggttcgtggtct

SEQ ID NO: 277579 - DNA, 139 bp, Homo sapiens
  chrX:6105440-6105579
  hypo
gaggcggacgcatgcgcacgtacacgcacaggcacacgccagaaggcacgcacacgccaggaggcacgcacacatttccgcacccgatgccctacgcatcaccgacgtaatgtcccgcgtggagccccacagggaggaa

SEQ ID NO: 277580 - DNA, 36 bp, Homo sapiens
  chrX:6617024-6617060
  hypo
tgagccaccgcgcccggcctgaaaatatttttacat

SEQ ID NO: 277581 - DNA, 259 bp, Homo sapiens
  chrX:8769255-8769514
  hypo
tgcctccctaccgcgagcgcttcacctgcgcttcacaccctggttgcgagagggccgcatgctcgacttcctgcctccccaccgcgagcgcttcacctgagggacccctgatgccgcttcctcacagaacctgcaggcactggcaccacgacgctctcttagaaaaatgggtcctcagttctcgcgagagcagctgccctggctatccacgctcctctctgattggtcagctaagtgcgcatgcgcatgcgggtgaagg

SEQ ID NO: 277582 - DNA, 156 bp, Homo sapiens
  chrX:9214925-9215081
  hypo
gagagtgcttagctcccctttgctcatggcattgttgaattatggtccctaattccagcgggacaaaccctaccgtactccaggctcaagtgattcgaatcaaagataaataaaaaggagtgtatagagagcagagcatgacggcagaggtgtcag

SEQ ID NO: 277583 - DNA, 33 bp, Homo sapiens
  chrX:9289523-9289556
  hypo
aaggaaagtggggcctggcacggtggctcacgc

SEQ ID NO: 277584 - DNA, 42 bp, Homo sapiens
  chrX:9656568-9656610
  hypo
tgtaacacatgattattgcccgtgataaacaaaagtgtttca

SEQ ID NO: 277585 - DNA, 458 bp, Homo sapiens
  chrX:9863402-9863860
  hypo
gcaagcagcacagctctgggcgggatgctggccttctgacacagcccttggagccctcgagagtcttcccccacccacggtgggccagagcccacgccatcacctacctcagcctgagggtcctccggatgcccgcgagacaggacggtgttacccgctggacaaaggggccgagggctgctccgcgggagcccaggagcctcccagggccagccgtgcagaaaaagccagccagaggctggcagccagcatcacgtgggcagatggggagagcagcaggatctgcccgcaggagacgcccctgttgcactccctgacccaggaggggaagcgccggcctgagagcagtccagaggacagcgccaccagaccgccaccgttcgacgcccacgtgggcaagcccacccgaagaagcgaccgctttgccaccaccctgcggaatgagatccagatgcata

SEQ ID NO: 277586 - DNA, 42 bp, Homo sapiens
  chrX:9874884-9874926
  hypo
tcagagattgacaaagtttgcggaagatgagatgataaatat

SEQ ID NO: 277587 - DNA, 715 bp, Homo sapiens; identical to SEQ ID NO: 221028
  chrX:10085163-10085878
  hypo

SEQ ID NO: 277588 - DNA, 180 bp, Homo sapiens
  chrX:10092559-10092739
  hypo
ggagattcacagctgagagccgccacttcctggagctgggggctccggcaggcaaagtgtggctctcggggacagttgcgcccgtgtctgccaggagttggttctgctcactgcagcacaggtagcggactccctccctcaccgtcaaggaagtaatccgctggttggcaggacaacaat

SEQ ID NO: 277589 - DNA, 71 bp, Homo sapiens
  chrX:10102566-10102637
  hypo
tgttcggagtggcacgattgtccgttcccagacattctcgcctggagcacgaagccagtatgtttgcagag

SEQ ID NO: 277590 - DNA, 115 bp, Homo sapiens; identical to SEQ ID NO: 221029
  chrX:11783710-11783825
  hypo

SEQ ID NO: 277591 - DNA, 42 bp, Homo sapiens; identical to SEQ ID NO: 221030
  chrX:13062333-13062375
  hypo

SEQ ID NO: 277592 - DNA, 92 bp, Homo sapiens
  chrX:15766033-15766125
  hypo
agctctttctcttgcgagaggagagcagctctctctcttgcaagagaggcgtccaaaaatgggacaagtggcggactgcagcagattttata

SEQ ID NO: 277593 - DNA, 32 bp, Homo sapiens
  chrX:15806008-15806040
  hypo
ggaggttgcagtgagccgagatttcttagaag

SEQ ID NO: 277594 - DNA, 36 bp, Homo sapiens; identical to SEQ ID NO: 221044
  chrX:16736864-16736900
  hypo

SEQ ID NO: 277595 - DNA, 92 bp, Homo sapiens; identical to SEQ ID NO: 221045
  chrX:18239018-18239110
  hypo

SEQ ID NO: 277596 - DNA, 37 bp, Homo sapiens
  chrX:18516222-18516259
  hypo
agccttccaaaatgccgggctgccatatgtcttttct

SEQ ID NO: 277597 - DNA, 31 bp, Homo sapiens; identical to SEQ ID NO: 221046
  chrX:19530839-19530870
  hypo

SEQ ID NO: 277598 - DNA, 221 bp, Homo sapiens; identical to SEQ ID NO: 221047
  chrX:20135284-20135505
  hypo

SEQ ID NO: 277599 - DNA, 94 bp, Homo sapiens
  chrX:20160884-20160978
  hypo
tgctgggattacaggcgtcagccaccgtgcccagccggttagctcataacgcagtcctttcactcgcccagccgggttgggagcctgatgggaa

SEQ ID NO: 277600 - DNA, 32 bp, Homo sapiens
  chrX:24062614-24062646
  hypo
agtgctgcgattacaggcgtgagtcaccaagc

SEQ ID NO: 277601 - DNA, 33 bp, Homo sapiens
  chrX:24069674-24069707
  hypo
ccaagcccggccggatttttttatttagataaa

SEQ ID NO: 277602 - DNA, 33 bp, Homo sapiens
  chrX:24128931-24128964
  hypo
gggtgagccaccgaacctggccccattcctttt

SEQ ID NO: 277603 - DNA, 42 bp, Homo sapiens
  chrX:33133914-33133956
  hypo
tgcgcccggccaaaagaaaacgtttctatgaacacagtatta

SEQ ID NO: 277604 - DNA, 298 bp, Homo sapiens
  chrX:34149208-34149506
  hypo
acttcagtcttgggaggctccgggctgagatgggacactccagtcttggaaggctccgcgtggagactggacccccgacgagtcttgggaggcgctaggcggagacgggacactccagtctcggaaggctccgagcggagactggacccccgacgagtcttggaatgctctaggcggagatgggactctccagtctccggaggctccgggcggagactggacaccggagtcttgggaggctcctggcggagatgggacagtggagtctcgaaaggccgaggacagaatttcccacaag

SEQ ID NO: 277605 - DNA, 218 bp, Homo sapiens
  chrX:39699844-39700062
  hypo
ggagcctctctgttcggccatccccagagccatcattgagccttcccctcgacagagatccctgccaaggaagtcggccagggaggtgccagcgctcagtccagacttcacatttccctcattctttctttaattggatttttggtcctgctgggcaaaataagctttccactggcaaaacactcttgcctcttcggaacgcgcggtggtgcccggcg

SEQ ID NO: 277606 - DNA, 184 bp, Homo sapiens
  chrX:40247665-40247849
  hypo
gtggtcatgagacagtagatcgccgcacccaccctccggaaaatatcctgtatttagcaagcttttatggcaaaatgtgtagctggtcacacctcagactttcttgtgagacttgtgactactgggttatatacgcatctttatgggatgttatctatgctacggaaacaccttggtatgcagg

SEQ ID NO: 277607 - DNA, 44 bp, Homo sapiens
  chrX:40631233-40631277
  hypo
actttaaaagcaccagggaccggccgggcgtggtggctcacgct

SEQ ID NO: 277608 - DNA, 43 bp, Homo sapiens; identical to SEQ ID NO: 221067
  chrX:40631517-40631560
  hypo

SEQ ID NO: 277609 - DNA, 461 bp, Homo sapiens
  chrX:41331600-41332061
  hypo
gaagttggccacatccatgtcggtggctccaaagtgggtggccacacgcacaccctcgtgcaatgtgaagctcacctgatgactcaccatggccagcaggccgcggaggtaacgatcccgaagggcggctcgggcccgctgcttctgggattccaaggattcttgagctatggaacactcctggatttcaagaacctctgactacaggggggctctgcgtccatcaggggcaaagccacggctgagaccatcagggcctcggggcagccggagcacaggcacaggaaaggtcactggagcctgcattgtcttggcgaggtccgtggctactgtgcgcgcccccacttccgccggcaccccgcagtagaggccagggcaggccccgagccgcggagcctgggttccgcctgcgccaccgccaccaacccacgtgtcacgggcaaatttatttatttatttat

SEQ ID NO: 277610 - DNA, 104 bp, Homo sapiens
  chrX:44224968-44225072
  hypo
gccatttaaagtgtataattcaatgggtttttaattttttctctttaatcaacaaataaaactgtatatatctatagtgtacaagatgacgttctgcaatatgt

SEQ ID NO: 277611 - DNA, 98 bp, Homo sapiens
  chrX:44729941-44730039
  hypo
ctgctattacatagtaatagcgggaagaaaagtgttgaggtgtggagagtgggtagccttttttttctgagacggagtctcgctctgtcacccaggct

SEQ ID NO: 277612 - DNA, 43 bp, Homo sapiens
  chrX:44751499-44751542
  hypo
ataaaagcttgctgggatttcgaggccgggtacggtggctcac

SEQ ID NO: 277613 - DNA, 38 bp, Homo sapiens
  chrX:44754637-44754675
  hypo
acagaccatgagccaccgctctgggccaacttttattt

SEQ ID NO: 277614 - DNA, 36 bp, Homo sapiens; identical to SEQ ID NO: 221070
  chrX:44760627-44760663
  hypo

SEQ ID NO: 277615 - DNA, 42 bp, Homo sapiens
  chrX:44799977-44800019
  hypo
ttattaatacaacatgtactcggcaaggtacggtgactcacg

SEQ ID NO: 277616 - DNA, 99 bp, Homo sapiens
  chrX:44865332-44865431
  hypo
gtctgtgtacagtcatcagtgtggtatgtgagaatcctttaagctaggttactggccagtcccccccagccctgcgcccccccccgccgccatgttgcc

SEQ ID NO: 277617 - DNA, 36 bp, Homo sapiens
  chrX:44909558-44909594
  hypo
tgggcaacaagggcgacactccgtctcaaaaaaaca

SEQ ID NO: 277618 - DNA, 171 bp, Homo sapiens
  chrX:44922874-44923045
  hypo
gtagcacatcaagaacgctgggaagtacagacactattttgataggcaataatcatataacaggaagtggaagtaatggaaacgtgccttacctgcagcgaaacgcactcactctacctcataaccgcacaaacctgaccagcagcgcagaggagccgtggaaaaaccaac

SEQ ID NO: 277619 - DNA, 36 bp, Homo sapiens
  chrX:47181621-47181657
  hypo
gcagtggtcggcttctgcagtcggcttgggcggatc

SEQ ID NO: 277620 - DNA, 147 bp, Homo sapiens
  chrX:55115418-55115565
  hypo
tgttgttgcgcaggcgccttgctgcccgtcttgtgtccgcacagaggtctgcaaggagagagagtgtcttcattctttccgccatcttgattctttctcactgaccaagactcagccggtaggtctgcagaacggtgttactgggaa

SEQ ID NO: 277621 - DNA, 34 bp, Homo sapiens
  chrX:57609886-57609920
  hypo
gattacaggcgcgagccaccgcgcccagccaaga

SEQ ID NO: 277622 - DNA, 82 bp, Homo sapiens
  chrX:57705240-57705322
  hypo
aggatgtctctgtccagggacgggcggatgttgaactcctgcaccccgagcctcgccaagtcctctccacggaacactgaca

SEQ ID NO: 277623 - DNA, 698 bp, Homo sapiens
  chrX:64771578-64772276
  hypo
gtccagcttctccctcaggtcgcaggctgccggccagtcgggctggtaggtcacgagctgcacgcggcacaccagggcgcccagagcctcgcagtcctcaacgtcgcacaggtaccgtgcagccagcacgttgcccttggcctcctcatagagcagccgcaggacctcctcgtcggggatctggagctcccgcccctttgggaagaacacgttccttcggaactgcaggaaaggctcatccatggccacgtcgtcgtccggggcactggtgaagcgcagcagcagctccggccactggcgtcccagcttgtagggctggttcttgggtttcagctgcacctccagcagaggggagaccagccagagcgcgaagacatccagggcgatgtccggaagcttcaggacctcgcggacggcgcagtgcagctcatgggcacggagcgagggcaggttctccacagccaggggcaccaccgtgtcatctgccaggtataccagcacgtcagccgctcgggctcccacggaggacacgctgcttcggtgggaccgctcagtggggccgggctgcccgacactgccttccgtcccgtccatctcacagggtcgcagagcccgccacctgagaggcaaggctcctgcccggaatcctgcccctccaccaagcccacggaatcttgctctgtcacccaggctggagt

SEQ ID NO: 277624 - DNA, 197 bp, Homo sapiens
  chrX:65007842-65008039
  hypo
gttctgccacaaaccgctgtcatttgcttcagcctgagtttctgctggggccctggtggggcccaggagctctcaggcctgtggagtctggagcagaggctggctccgggctctccccgccttggggtctgcccctcaaccccttctcagtcaccaagggtgaagttggcagttgtgagcaccgccgttccaattgc

SEQ ID NO: 277625 - DNA, 33 bp, Homo sapiens
  chrX:70442913-70442946
  hypo
tgcaggctgggtgtccggcgctgggacacaagt

SEQ ID NO: 277626 - DNA, 39 bp, Homo sapiens
  chrX:70532323-70532362
  hypo
agtagaaaattaaagactctcggccgggcgcggtggctc

SEQ ID NO: 277627 - DNA, 317 bp, Homo sapiens
  chrX:70797825-70798142
  hypo
cgcgccttcgctccagttctcgtgcccccgcccctccccccgcgccctttcccagtggttgcaataacggacttagaggtctggacaattcaagtaaggaacaaggctcgcttatccaagttctcgcaggataaaagtttgttatgaacgatttcacatggtttctctttatcagaaagttgttagggacttttaatcgcagaattggcctcgggtgcccacgctctagtattgaaatggcggttttgggacaaataagcaacatccgtgggagtggaaagcgacagacctgatcccggaagcgttacagctaggcg

SEQ ID NO: 277628 - DNA, 76 bp, Homo sapiens; identical to SEQ ID NO: 221074
  chrX:71485135-71485211
  hypo

SEQ ID NO: 277629 - DNA, 38 bp, Homo sapiens
  chrX:102232746-102232784
  hypo
ctgctgaatgctgccgttgcagacccaccattgacttt

SEQ ID NO: 277630 - DNA, 43 bp, Homo sapiens
  chrX:134059956-134059999
  hypo
gcacctggggctcctgcacagtccaagccgccccctgctccgt

SEQ ID NO: 277631 - DNA, 58 bp, Homo sapiens
  chrX:150560243-150560301
  hypo
ctgctgggtgcaaggcgctcagtctgcagccagctctaggtcccgcccctttgcgttg

SEQ ID NO: 277632 - DNA, 48 bp, Homo sapiens
  chrX:150560734-150560782
  hypo
ttgggggttggtaactggagcgctgccgcccctcatgggcaggagatc

SEQ ID NO: 277633 - DNA, 183 bp, Homo sapiens
  chrX:150571593-150571776
  hypo
ctggaggacagcaagctggtcgcttcccgtgacggaagctctgattccagcaaaagagggcgcgctgatccacccatggtgcctgctgcgttcccagctctggtgtctggtgctggtggacacggttgccgcatgggttgggcactggtgccgctgtccgccgtggcttccctgggtaaaagc

SEQ ID NO: 277634 - DNA, 393 bp, Homo sapiens
  chrX:151306512-151306905
  hypo
cctcatttcccagcagggcccgggccttccctctgctcccctgaagccgcattcttggtaccaatatccccttccctacgtcagcctcagatgccgacgtcagaatttgcgttcctggtcgccatgaccagggcttcccagggccgacatcaggggcagagccctccctgagcgtcccgacattgatgctggcagaacctaggcgcggctcccgccgaaccagccgggccctggtcacaccaagctctgactcccagagtcccctgcggcttaagcggcgggagagagtgggggcgggggtggggggggggtgacagcccagcctgagaagtctgccctcaggtggtccagagctggcagcagaggcagcgctgtattatttagggctttcta

SEQ ID NO: 277635 - DNA, 153 bp, Homo sapiens
  chrX:151306965-151307118
  hypo
tgggcccgctctcttcagccgatctcaagcctgtccctcagaacgagaacctcgcttctctctgatccccgaggcgtaagttagtggcgtcacatccggtccccggggcttccctgggttgacagcaggggcggagtggattctgccggaact

SEQ ID NO: 277636 - DNA, 40 bp, Homo sapiens; identical to SEQ ID NO: 221133
  chrY:5077817-5077857
  hypo

SEQ ID NO: 277637 - DNA, 61 bp, Homo sapiens
  chrY:6790937-6790998
  hypo
agaacgcgcgcaggccgagaccgcgcgcagccccggctcccgcccacgcttttacctccac

SEQ ID NO: 277638 - DNA, 79 bp, Homo sapiens; identical to SEQ ID NO: 221134
  chrY:7525418-7525497
  hypo

SEQ ID NO: 277639 - DNA, 168 bp, Homo sapiens
  chrY:8147742-8147910
  hypo
gcttcatcctgaggacgctgaggatgctgtactcccagtggcattccaaaggacctcttgtcctatgccctgggcacaccagaggctagccaccgtggtagcccatccgatgacctgtgtgcactgcctttctggcgcagaggctctcgcactcgcagcaccggccgc

SEQ ID NO: 277640 - DNA, 103 bp, Homo sapiens
  chrY:14488010-14488113
  hypo
gaatcttgcagcaccgcgactatgcaactggcctcataagtgtggatatgtgggagccttatattatatggtggttgagaagattcatgataaaaaagatccc

SEQ ID NO: 277641 - DNA, 92 bp, Homo sapiens
  chrY:14513075-14513167
  hypo
ggtctaaggggtacacgtgccggtttgtcactggggtatattctatggtagtgaggtatggggtatgcatgaaccccccacccacgtactca

SEQ ID NO: 277642 - DNA, 92 bp, Homo sapiens
  chrY:14513347-14513439
  hypo
caacatatacaagttgaacactggttcagtctggaaaggcaggacaaaaaaagaaaaaaagcaaaggcggggagactcgaagtggggagggg

SEQ ID NO: 277643 - DNA, 93 bp, Homo sapiens
  chrY:14532158-14532251
  hypo
gacctgcgcccaggcgcagtgggtggaaataaatcctcgtcacgaacccgcagaacagaggcgccgtctttgggaagccgcgtggatttccag

SEQ ID NO: 277644 - DNA, 449 bp, Homo sapiens
  chrY:14776354-14776803
  hypo
gtctaaaactataccgttaaactttaaaaatatacaccataaacttctacatttttcttagtttgctgctttaatcactgccattttcgtctctgcaaatgcgcaattgtttaaaagtgtaaggatttgtttttcaattagaaaactcattgatatgcttttaactttctcgcttcacatgcttttaacttctcgcttcaaactttattcttacagtttgggaagaaagaaaacctaaagtatttgccgttggtgattcaagggtgagttgggagtattttttatttcactgacttgaaaataagattgtgggattttaattatttcttgttgccgttttctgttaacggtgattgcgtgaatgtttactcttgtcaatcttgtcttactgttacaatatttctttttgtcggttggctttagtaatatatatgactgtgggtccgggt

SEQ ID NO: 277645 - DNA, 148 bp, Homo sapiens; identical to SEQ ID NO: 221135
  chrY:14777103-14777251
  hypo

SEQ ID NO: 277646 - DNA, 135 bp, Homo sapiens; identical to SEQ ID NO: 221136
  chrY:15015981-15016116
  hypo

SEQ ID NO: 277647 - DNA, 180 bp, Homo sapiens; identical to SEQ ID NO: 221137
  chrY:15446038-15446218
  hypo

SEQ ID NO: 277648 - DNA, 45 bp, Homo sapiens
  chrY:16001309-16001354
  hypo
agcagtgagacaatcgcctttcgccacgcagtgagtactgtaaga

SEQ ID NO: 277649 - DNA, 45 bp, Homo sapiens
  chrY:16001474-16001519
  hypo
ctttctgggaaagggctctctaatgacccccggactgttcggcgt

SEQ ID NO: 277650 - DNA, 479 bp, Homo sapiens
  chrY:21204856-21205335
  hypo
gccccagggttgggcgtgtttgcgtctccgggtgcacagagctatcacttctcactccctcctcactgggaagtccctcccattgtctagcctcagtacctcttgatactctcacagcgccccgctgccatccacagcgcctcccagcccgcggctctgggacgctaccctcgggaccccagctgcactcacctaggtcgggccggcacttgcccttgtccttttgcagctacagctcggcgcgtaaatcaccgacatcctcgcagcctccactggaacaatagtttcccttgttgaggctgctaccctggaagcgaggagaggcggggacgaaggaggagccgagtgtccatcttgcgcatctggcctcccgcatctaggcacatgtttaagatgcttacacagcaggtgccatgctaactgctggcagaaggaatcccgccttcttgcatgcaggcactcgccgggcttgggaaaga

SEQ ID NO: 277651 - DNA, 338 bp, Homo sapiens
  chrY:21208477-21208815
  hypo
gtccatgggactgggcgccttggagcagggggcggcgctcgttggggaggctcaggccgcgctggagcggggagtggggggaactcaggcatggcgggttgcaggtgtggagccctgccctggggtaggcaactaaggcctggcgataaatcaagcgcagcgcggatgggccagcgctgctggggtagccggcgcacactccgcagttgctggcctgggtgctaagctcctcactgcccggggctggcagggccagccgctcccagtgcgggccctccaagcccaagtccactcggaactctagctcgccggcaagcgccgcgcgcagcccgggttcc

SEQ ID NO: 277652 - DNA, 152 bp, Homo sapiens; identical to SEQ ID NO: 221140
  chrY:21226202-21226354
  hypo

SEQ ID NO: 277653 - DNA, 82 bp, Homo sapiens
  chrY:21713517-21713599
  hypo
agcggagatggcgccactgcactccagcgtgggcgacagagagaccactgttgttgccaagagtggacggcttaatgcctgg

SEQ ID NO: 277654 - DNA, 218 bp, Homo sapiens
  chrY:22914872-22915090
  hypo
gttcagtccggtcccgagggaagcgcctctgcttcccttttctctgtgcttcaagtgttcagaagcccaatccagccggagggtggtgcgccatcactcaggcaccgatctagttacaactcgactgccctatgtcctcacctgggcactgagcaggtcttaacccacagatggagcacacacttacctaggcagccaagcagcggcagcacccagga

SEQ ID NO: 277655 - DNA, 268 bp, Homo sapiens
  chrY:22918437-22918705
  hypo
acgccagagagactcgtgaggttgtcaaaggtctgggagttttgcggggtttgttctggagtctggcaggaagtaatatttgctcaaaactgggcgtgaaatagcctggactgtcctttctcctccgatccggtattacccgttagcagttgttacagctgaagataaagacattttactgttaactgagacgagtttctctgaaaaagtttggtgtctttttcaggcccggggccccaagaagcacttgaagcgtgttgcagcgccg

SEQ ID NO: 277656 - DNA, 55 bp, Homo sapiens; identical to SEQ ID NO: 221141
  chrY:23568831-23568886
  hypo

SEQ ID NO: 277657 - DNA, 103 bp, Homo sapiens
  AC133920.2_81912-122260:1986-2089
  hypo
tgtgagccaaggcgcccggcctcatttcagagtttgctttcgtatgtgccatataaagatgttcatcatgtgctccgataccgtagcatggaaggcagcagta

SEQ ID NO: 277658 - DNA, 166 bp, Homo sapiens
  AC153808.1_1-20788:1301-1467
  hypo
taccagtccttggaccgcatctctccccagtcatgggccagggatggggggacaggatcagacctgcattctcactgcattgatctgcttcacaatgagcgtctgatccaagaagtgagcctgtccgctgtgaccgtgagatgggcactaacgcacttcctccagc

SEQ ID NO: 277659 - DNA, 258 bp, Homo sapiens; identical to SEQ ID NO: 221142
  AC153808.1_1-20788:20324-20582
  hypo

SEQ ID NO: 277660 - DNA, 120 bp, Homo sapiens
  AC240459.2_22426-31906:3389-3509
  hypo
gccaccgcacccagccgcggatttcttaattatatttttgaattgttccttgctagtgtataaaaacacaactggaccaggcacggtgactcatgtctatcatcagcactttgggaggcc

SEQ ID NO: 277661 - DNA, 180 bp, Homo sapiens
  AEKP01114215.1_1-7461:1444-1624
  hypo
ctagcctggcccatccccatcgcacctagggagcctcccggagtgcgcacagcccactgtcacggctaggctgccacacacctctcagccagtccggtgtcactgccggcgtgactgttttgtggaccccattggactgtgcggtcccaggactcccacgccatgggtgctgcctggtgc

SEQ ID NO: 277662 - DNA, 31 bp, Homo sapiens
  AEKP01114218.1_1-13684:9403-9434
  hypo
atgcgcgcgcgcacacacacacacacacaac

SEQ ID NO: 277663 - DNA, 42 bp, Homo sapiens
  AEKP01114218.1_1-13684:9682-9724
  hypo
tcaccagagccccctcaagtcgtgtaatgcattggatgtccc

SEQ ID NO: 277664 - DNA, 33 bp, Homo sapiens
  AEKP01114218.1_1-13684:12132-12165
  hypo
ttttgagatggagtctctgtcgctgaggctgga

SEQ ID NO: 277665 - DNA, 246 bp, Homo sapiens; identical to SEQ ID NO: 221143
  AEKP01149809.1_1-6354:1325-1571
  hypo

SEQ ID NO: 277666 - DNA, 170 bp, Homo sapiens
  AEKP01153556.1_1-5252:372-542
  hypo
atcacaatcaccatcagcaccgtcatcaccgtcatcaccattatctccaccactgttgctgtgaacgcatactgcactattatcacctgaggtacagtgacaacgttgtgtgatgctaaaatgtgagcttttctatctgccgatgattcggcctttgtccctctctcctt

SEQ ID NO: 277667 - DNA, 74 bp, Homo sapiens
  AEKP01160137.1_1408-4031:1582-1656
  hypo
cacaccacacaggtacgcacacaccacacatacagcacacacgcacaccacacacaccacgcacacaaaacaca

SEQ ID NO: 277668 - DNA, 116 bp, Homo sapiens; identical to SEQ ID NO: 221144
  AEKP01166227.1_44013-111583:41310-41426
  hypo

SEQ ID NO: 277669 - DNA, 166 bp, Homo sapiens
  AEKP01166227.1_44013-111583:53194-53360
  hypo
gaggcccaggtgcagcgagcccctctgcaccctagagatgggtgagtgtgttgtacacacatgtgtgcgtgcagatgtgtgtgcactctttttaaacagtgtgcccacagtgtggctgcggtcaaggagggagtttaaagtgtaaccccaacgtgccatcttgaac

SEQ ID NO: 277670 - DNA, 82 bp, Homo sapiens; identical to SEQ ID NO: 221145
  AEKP01172922.1_98-3151:2030-2112
  hypo

SEQ ID NO: 277671 - DNA, 151 bp, Homo sapiens
  AEKP01184864.1_3582-5885:476-627
  hypo
ggacagtctgtctaccgtacgtatacatatacacgtaactatatgctgtgcaggtttttctagctaaggagtcatgggctgtcccagagagccgaagtgtggaggaggccattccatctaggtttgtgtaggtgcacgctgtgatgtttgc

SEQ ID NO: 277672 - DNA, 58 bp, Homo sapiens
  AEKP01188815.1_1-4777:3487-3545
  hypo
ccaagggctgggaggggacccgtaaccggggctggccgggcaccctgcagctccccca

SEQ ID NO: 277673 - DNA, 35 bp, Homo sapiens
  AEKP01209288.1_3835-9918:5050-5085
  hypo
tggcggttccagtcccgtcacgtttgcaggtgagt

SEQ ID NO: 277674 - DNA, 120 bp, Homo sapiens
  AEKP01212943.1_1-3701:1910-2030
  hypo
tctagctcactttgccggctccctggctagacctgctctcattgcgcaccacggctgacttgcaaggagcccgcttgactctctctgccatagtccgtctgtgaaattccggctgaggct

SEQ ID NO: 277675 - DNA, 93 bp, Homo sapiens
  AEKP01213516.1_1-2586:271-364
  hypo
ggaccccagtgtacagatttcgtttcagaatgatgggtcacgtcagctgaggcagcaccggtgggaatccgaccctggcccgggaggcgcggc

SEQ ID NO: 277676 - DNA, 80 bp, Homo sapiens; identical to SEQ ID NO: 221146
  AEKP01221093.1_87-1602:655-735
  hypo

SEQ ID NO: 277677 - DNA, 120 bp, Homo sapiens; identical to SEQ ID NO: 221147
  AEKP01221093.1_87-1602:855-975
  hypo

SEQ ID NO: 277678 - DNA, 43 bp, Homo sapiens
  AEKP01225640.1_1-1497:731-774
  hypo
tcgacgccctgggacccttccggggttgggcgggctgccccac

SEQ ID NO: 277679 - DNA, 74 bp, Homo sapiens
  AL162252.17_162460-176678:8567-8641
  hypo
gcctgcgattccgggacataccgcgccagcccaggagaacccggaagcccgcagcgcctgtttctctgtgtgat

SEQ ID NO: 277680 - DNA, 112 bp, Homo sapiens
  FP565324.3_2001-29640:15327-15439
  hypo
gtgtggccacccctccgcctgcccagggccgctgtgtggccgccgctcccgcctgcccagggccgctgtgtggctgccgctcccgcctgcccagggccgctgtgtggccgcc

SEQ ID NO: 277681 - DNA, 253 bp, Homo sapiens
  GL000194.1:58620-58873
  hypo
tctcgtgcccctgcagctcccgctctgactggttgcagttggcgaaggcctggcggtagcgagcatagcagttctggaaccacacctccagccagcggtggccaggccggaggacgtgtaggcgcccgtgtttctggccacgtcatactctttgcagggcagctcgtagggtggcactgtctgtggggccagctctggtaggagcacatccgtctgcaccatggtgtctgccgcccaccagggccaggggagt

SEQ ID NO: 277682 - DNA, 32 bp, Homo sapiens; identical to SEQ ID NO: 221148
  GL000195.1:80192-80224
  hypo

SEQ ID NO: 277683 - DNA, 120 bp, Homo sapiens
  GL000225.1:79485-79605
  hypo
gagggaagcctcattccccacgtggcggtgagggcaacggcgacccacgagggagcagggtgacacccattgggggccgctttgttaaggaagcctgcctgcgcggacgccctgccagcc

SEQ ID NO: 277684 - DNA, 62 bp, Homo sapiens
  GL383535.1:198019-198081
  hypo
gcgaggtgagggtggcgcccagctcctccacggtcagcgtgcccgcccggtatctgctcagc

SEQ ID NO: 277685 - DNA, 314 bp, Homo sapiens
  NW_001838014.1_249000-295694:3953-4267
  hypo
ttctagaatgaacaaggctgcgtgtggatcccacagacagacacccttgggtggccccgaggacgcgggagaaagtcccccttcccagaccggtctcgatctcatgggatcaagttacctggccctaaatccgactgctggagccagagccagagccgtgcggagacacggagccggccgaagccactcagggttggagccgcctcgccacacccaggaccctgggcgctacattgagggtggctgggtgcaggggtgatggcggcggttcctagttggcagccaggagacacgtactcactccagctccagca

SEQ ID NO: 277686 - DNA, 291 bp, Homo sapiens
  NW_001838014.1_249000-295694:7052-7343
  hypo
aatgtccttcaaatgcagcccgctccgtcccacacgccactcccagaaatgtatcctcgggaagtgctccgagaggtgcacaaacaggcactcgaacaacggcgatgagctcactctccacgacggatcgccagggacgatctaaatatccactcatgctcccgcacgcacgaggttccccagcgctctgggtctcaggccgccggagaggagtatttaatgcgacaccagcgccgctcgtgcgtgctgtgaagagcagccgttaaaagcggttatgcaaatctgtgtttg

SEQ ID NO: 277687 - DNA, 240 bp, Homo sapiens
  NW_001838056.1_145425-224902:38581-38821
  hypo
cgctcgcgtctcccgcatgcgcattggttgggccgactggcgctccgctactggctgtcaggctgagtcacctttaaataatgccgccgccacgcagcggcagcgaggctcctgctgcagccgaggcggcagctggatcccgggtccagtttgggtcggcgtgggaaaggggccgctggtgtcctgtcaaagggcgaaacacccaggagtcctctcctcaggacctccttgagccgactt

SEQ ID NO: 277688 - DNA, 212 bp, Homo sapiens; identical to SEQ ID NO: 221152
  NW_001838286.2_1380778-1470498:80826-81038
  hypo

SEQ ID NO: 277689 - DNA, 1231 bp, Homo sapiens
  NW_001838286.2_1380778-1470498:81098-82329
  hypo
tggcggggcaaaaagccacggcggcaagggcaaaaagttgtggcttcgggggcaaaaaaccatagcagcggggcaaaaagcagtggtggcggcggggccagaaaaaccacaaaatcccgcggcgatggggggaaaagctgcaggggcaaaaagccgcagcagcagggggaaaaaagccgtaaaaagcagcagcggcgggggggcaaaaaccgtggcggcaaaaagcctcagcggcaggagcaaaaagccatggcggcaggggcaaaaaccgcagtggaaagaagactcagtggcaggagcaaaaacgatggctgtggggggcaaaaagccatgactgcaaaaactgcggagtgtgagcccaaaaagccatggcggtggggataaaaagccacagctgcaaaaagcagcggtggtggggataaaaagccgtggcggcaaaaacccgcagcagcacaggcaaaaagccgtggcagcaggggcaaaaagccacggtggcaggggcaaaaagccgcggcggtgagggcagaaagctgtggcttcgggggcaaataaacacggcggccaaaagccgtagtggcagggcaaaaagctgcagcagtgggggcaaaaagcagcgggagcgggtgcaaaaacccacaaaaacccatggcaacgggaggaaaaagccatggtggcaaaaagccacagtggcggggggtaaaaagccatggcggtgagggggcaaaaagccacaaaaagcagcgtcggcggggacaaaaaccacggcggcaaaaagcctcagtggcaggagcaaaaagccatggcggcggaggcaaaaagccgtggcagcaaaaacccgtggtggcaaaaacccgtggtggcaggggcaaaaagccgtggctttggaggcaaagagccgtggctgtaaaaagccatagtggcgggagcaaaaagccacaaaaagccacggtggcgggggcaaaagccacggcgccgagggcaaaaagccgtggcttcgggggcaaagagccgcagtggcaaaaagctgcaaaaagccaaggtgacggggcaaaatgccacggcggcggggttaagaagccacggcggcggggcaaaaagccgtggcgggagaaacccgcagcagcgagggcaaaaatccatggcagcagtgacgaaaagccacagcagcggtggcagaaagccgtgaggcgggggaaaaatccgcagcagcggggtcaaaatggcactgcag

SEQ ID NO: 277690 - DNA, 97 bp, Homo sapiens; identical to SEQ ID NO: 221155
  NW_001838987.1_19978397-19979692:120-217
  hypo

SEQ ID NO: 277691 - DNA, 142 bp, Homo sapiens; identical to SEQ ID NO: 221156
  NW_001838993.2_42143-59442:15877-16019
  hypo

SEQ ID NO: 277692 - DNA, 113 bp, Homo sapiens
  NW_001838998.1_673882-674972:67-180
  hypo
attctgttgctatgactttccgggccctgcggggaagggtgggacaggcaagtgaggaggaggcagtggtagcattccgggtagcaacagccttaaagaaacaggatggggcc

SEQ ID NO: 277693 - DNA, 198 bp, Homo sapiens
  NW_001839317.1_1572-22707:16430-16628
  hypo
tgacatcaatgtggtgcaagcgtttgagatgctggccagtagggctctgtcgagggtgagtggctgtggcggcaggacctgctgagaccgcccctggattggggagggtctcgggagcttccagagaagaacatcttgggtgtgggcagggatgtgggtgggacaggattgctcatcgtctcagttaattagttatgg

SEQ ID NO: 277694 - DNA, 88 bp, Homo sapiens
  NW_001839407.1_18933-24809:4220-4308
  hypo
ctcacccccaccccaccccccgccgcaggccttgacaccctgggacccttcagtggtggtgcgggctgtccgagggctcaccgccatt

SEQ ID NO: 277695 - DNA, 207 bp, Homo sapiens
  NW_001839407.1_18933-24809:5028-5235
  hypo
aggggcttcccgcaccccacatgccctgcgctcctgaggctctcccactggggtcttttgtgagccacggagcgagggccatccctgtgttccagaacagcctacccgcactggcagaggggatctcccaacctgccatggcacgcggggttttgcctacgcctccccggctccttcggaaggggcggtctcccaccctcaggctcc

SEQ ID NO: 277696 - DNA, 256 bp, Homo sapiens
  NW_001839407.1_42766-49957:1426-1682
  hypo
acacagggactggggacaggcgggagggagccggggacagagggaggaaggcacagaggaaaagcggtcttcggcctcggggaggaacgggacccccgccctccggtaaaatggtaagcttccggcgcgggctgagggctcggcccacagccgccacgtcggccggcggggcactcattctccccgattccttggcccagggaatgggcggtttcctcagagacaaaagaccgggactcgggttgccgtcgggttt

SEQ ID NO: 277697 - DNA, 180 bp, Homo sapiens
  NW_001839407.1_50257-55859:1427-1607
  hypo
ccaccccggctcctccagaaggggcgctctcccaccctcaggaatcttgttgacctccgcaactgggcaaaagccaggaggaccgggacccacagcgcgtcggtctgcagggcccttgtgcgggacagcatgggcccgctcaagcggagcaacagggtcaaagtgtgcttgtgccaccca

SEQ ID NO: 277698 - DNA, 120 bp, Homo sapiens
  NW_001839407.1_50257-55859:1667-1787
  hypo
gcgaaccccaagccgggcagctgcacctcgccagcccacgccactggaggactccgcgcgacaggggcagatgcaaggcaacccggcgacctccgaggcgctcaaggagccggggcgctc

SEQ ID NO: 277699 - DNA, 120 bp, Homo sapiens
  NW_001839407.1_56047-63507:6752-6872
  hypo
gaatcgaagggccaggcaccggggacaggctggcaaggtgcctgcgctggctggcggcctgtgcaacgtggcccccgttgggtgtcaccctgccccctcgtgggtcgccttcgcccacac

SEQ ID NO: 277700 - DNA, 120 bp, Homo sapiens
  NW_001839407.1_56047-63507:6992-7112
  hypo
cgcgccggcagaggggatcttccaacctgcctgggcatgcggggattttgcctacgccgctacggctctttcggaaggggtggtctcccaccctcaggctcctcggtggcgtccacacct

SEQ ID NO: 277701 - DNA, 44 bp, Homo sapiens
  NW_001839407.1_56047-63507:7172-7216
  hypo
ggacagcctgggcccactcaagcggggacacagggccaagttgt

SEQ ID NO: 277702 - DNA, 120 bp, Homo sapiens
  NW_001839595.1_33916-36793:2251-2371
  hypo
gtgtccttgcgccacctgcgtcccaggggagtccatcatggggttgtggccggtgtccgcaggtcgccggggcggcgtgggaaccccaagccagggcatccccacctcgccagcccatgc

SEQ ID NO: 277703 - DNA, 120 bp, Homo sapiens
  NW_001839595.1_74059-77718:791-911
  hypo
tctcccacagtgggctttcgtgagccagggtgcgagggacaccccttgctccagtccagccaggctgcgccgggagaggggatctcccaacttgtcccggcatgtggggatttttcctaa

SEQ ID NO: 277704 - DNA, 300 bp, Homo sapiens
  NW_001839603.1_36678-41438:2680-2980
  hypo
ctagatgtctgtgttccgctgccaggcgctccacggtggcagttgggaggttgcaggtgcacgggtgggccgacgacggtggcgtagagttgcagagtaggcgagccgccggaggggtgtcaggcctggacgttgcacgggctcagtctttctcgggacgggtgtctccacctagcccaggcgaggacgcattttccgggggtggtgggtaggggtggggcgggggtggtatggcgccggtggggaggcggaaaggcatgagaagtctgcccgggctgctcctacagctgaggcggatgc

SEQ ID NO: 277705 - DNA, 38 bp, Homo sapiens
  NW_001839609.1_1-3470:1114-1152
  hypo
aaagaaactcttttggacaccgagccaaagcgaggcac

SEQ ID NO: 277706 - DNA, 33 bp, Homo sapiens
  NW_001839613.1_2341-3640:87-120
  hypo
catgaaggggtggagcctgccggcctacgggcc

SEQ ID NO: 277707 - DNA, 144 bp, Homo sapiens; identical to SEQ ID NO: 221157
  NW_001839646.1_1-5206:1404-1548
  hypo

SEQ ID NO: 277708 - DNA, 300 bp, Homo sapiens; identical to SEQ ID NO: 221158
  NW_001839646.1_1-5206:2128-2428
  hypo

SEQ ID NO: 277709 - DNA, 120 bp, Homo sapiens
  NW_001839647.1_1-2990:356-476
  hypo
tcggatggcaccatacccgccgaagactagggacggtgacggcgaaggagactcgttaggaccccgggccaatgcgaggccctgcatgcctgctttgagaggaacctgtacccgggcatc

SEQ ID NO: 277710 - DNA, 120 bp, Homo sapiens
  NW_001839651.1_32960-37353:877-997
  hypo
gcccgtgtccatccgtgaaattccggccgcggctccccgcgacggccttcccgacaccttcagagggcaccctgtgtgtggtagcccggggacggtgacggcgaaggagactcgtttgga

SEQ ID NO: 277711 - DNA, 95 bp, Homo sapiens
  NW_001839668.1_21493-58548:14916-15011
  hypo
ccaccacagctttttgcccccgccgctgcggccccttgccccctaagtggtttcctgcccccgccgcagcagctttttatcaccccagccgcttt

SEQ ID NO: 277712 - DNA, 312 bp, Homo sapiens
  NW_001839668.1_21493-58548:15041-15353
  hypo
gctgccgagggcttttgcgccttcatgtccccgccgtcgtgtctttatgccacccctgctttttaccccctccgccgtggctttttgcggcttttggcaccggacatcgcggctttttgaggctttttgcccccgccgccgcggctttttgctgccgtggcattttgctgccgtcgcaccgctttccccctccgtgcctttttgcccccgccgccgcatgtttttgccgctgtggcttcttaccccgccaccgtggctttttgcccctgccatcccgggtttctgcccccgatgttgtggctttttacggct

SEQ ID NO: 277713 - DNA, 376 bp, Homo sapiens
  NW_001839668.1_21493-58548:15413-15789
  hypo
gcagctttttgtcgccgcagctgtttgcctcggccgccatggcttgttgcccccctcactgtggcttgttgcccccatcgccccggctttttccgccaccgccccgggtttttgaacccaccgtagcggctttttgtgcccaccgccgcacctttttgtggcttttcgcccccgctgccacggctttttgcccccatcaccgtggctttttccacgactccgcggctttttgccgacacggctttttactcccaccaccacaggtttttgccgctgtggctttttcacctcaccatcgcgggtttttgcctccaccgccgtggctttttgcccccactgctgcgggtctgagggcgggatcagcagactcagctgc

SEQ ID NO: 277714 - DNA, 144 bp, Homo sapiens; identical to SEQ ID NO: 221159
  NW_001839689.1_34352-41752:1478-1622
  hypo

SEQ ID NO: 277715 - DNA, 120 bp, Homo sapiens; identical to SEQ ID NO: 221160
  NW_001839689.1_34352-41752:1982-2102
  hypo

SEQ ID NO: 277716 - DNA, 120 bp, Homo sapiens
  NW_001839689.1_69962-76288:4519-4639
  hypo
cgatccccgtccctgggattccactgggagggtgctgtacaaaggtgtcgggagagccatcgcggtaggcccggccagaatttcacggacagacacgggcagagagaggtcggcaggctc

SEQ ID NO: 277717 - DNA, 224 bp, Homo sapiens
  NW_001839792.1_1-3553:1228-1452
  hypo
tggggcctgggttcccatgtcgccagcgtggagtgggaaccccaagccggggcacctccacctcgccagcccgcacccccagagacctacgcgcggcaggagcagatgcaaggcatgccggcgccctcccagtcgctacaggatccggggcgcttgtctgcagtcccctccggcctgctgttggatgagatgctggcaagccccgagtttctgcagcaggcgca

SEQ ID NO: 277718 - DNA, 120 bp, Homo sapiens
  NW_001839859.1_35699-41775:4706-4826
  hypo
caggatgggagatcccctcttccggcgcggccaagctgggctggagcacggggatggcactcactccgtggctcacacaagccccttgtgggagagccccaggcacgcagggcacgtggg

SEQ ID NO: 277719 - DNA, 120 bp, Homo sapiens; identical to SEQ ID NO: 221161
  NW_001839864.1_130-4387:2039-2159
  hypo

SEQ ID NO: 277720 - DNA, 33 bp, Homo sapiens
  NW_001840146.1_14915-50612:25838-25871
  hypo
aaaagggcccgcggggctgggctggctgttaga

SEQ ID NO: 277721 - DNA, 78 bp, Homo sapiens
  NW_001840273.1_1-3087:648-726
  hypo
gagcaacacagggactgggacgggtgcgagggagccgaggacagagggaggaaggcacagaggaaaagcggtgttctg

SEQ ID NO: 277722 - DNA, 229 bp, Homo sapiens
  NW_001840273.1_1-3087:786-1015
  hypo
agggctcgtgccacagccacagcgtcggtcggtggggaactcatttgccccgattccgtggcccagggaatgggcggtttcctcagagacaaaagaccgggactcgggttgccgtcgggttttcaccagcatggttcacagaccacaggtccccaggctgaatcccacaatggggcgcgaggatgacagccccgaccacggaggagccacactcgggacgagggaggct

SEQ ID NO: 277723 - DNA, 208 bp, Homo sapiens
  NW_001840306.1_6328-82586:33362-33570
  hypo
agagaggccaaggcatgagtcgcaacgaaaccccagacaacatcctccgttttcacaagagcggtgcctcccctggtcaccactgcgacccctgcttccagctggcacgagccacacacactgctcatttttctcagcgcctgattgtctgtctcacacttctgccccggccacccccgcaccgcacgcagactgaataaaatatgcc

SEQ ID NO: 277724 - DNA, 98 bp, Homo sapiens
  NW_001840669.1_1-3203:1830-1928
  hypo
cccgcgcgtgcacagtaggccgcccaccatctggtacctggcccggacctgggatcctcggaatgctcaggaaagaatggcagttctccgctgtgtgg

SEQ ID NO: 277725 - DNA, 35 bp, Homo sapiens
  NW_001840754.1_117-3691:2527-2562
  hypo
ggagggtgccatccgaaagtgtagggagggccatc

SEQ ID NO: 277726 - DNA, 120 bp, Homo sapiens
  NW_001840841.1_1-4205:1666-1786
  hypo
cgtccgtgaaattccagccgggactccctgagttggccctcccgacaccttcggacaggaccctacccgcagaagcccgggaacggggaaggtgaaggagacttgtttggacgctgagcc

SEQ ID NO: 277727 - DNA, 103 bp, Homo sapiens; identical to SEQ ID NO: 221163
  NW_001840841.1_1-4205:2206-2309
  hypo

SEQ ID NO: 277728 - DNA, 105 bp, Homo sapiens
  NW_001840841.1_32027-40624:2466-2571
  hypo
catgccagctgtagcagcatcggcaggaatctcagccctggccctggagccatggcccgcaagaaggcaggagaaagcggactaccttcaccagatcccagaccg

SEQ ID NO: 277729 - DNA, 61 bp, Homo sapiens; identical to SEQ ID NO: 221164
  NW_001840859.1_1-2890:1537-1598
  hypo

SEQ ID NO: 277730 - DNA, 137 bp, Homo sapiens
  NW_001840859.1_78656-82292:1905-2042
  hypo
gggacaggctggcagggcacccacgaaggcaggcagcctgtgcaatgcggccaccggcgagtgtcaccctgatccctcttgggtggccttcgcccacatcggcgcatggggaacgcgctgtgggggtgggaaggagt

SEQ ID NO: 277731 - DNA, 406 bp, Homo sapiens
  NW_001840867.1_34087-92528:38237-38643
  hypo
agggccaccacagcctaagccggtgagccacgcggggagagaggatctgcgggtggggtgggcggcacagacaggcaaggccagggaccacgagcgcaagggcacccgggagcccacagaggggtggctcggggagaaacctcaggcatggctgggccaccaggaaaacacggccatgggatcccaccaccacagacactagggaggtcccgcggcgccccggctgggatgccggatggcccttggcacccaacaagacccgcctctcgagccctggttcccgccatcgggaccccgaagcgacctcagccacaaacccaacaccagggtcacgttgctcgtttcttgtccatcctccaacctggtcaagctccgggagaccggcgtaccccccacttgggatgct

SEQ ID NO: 277732 - DNA, 120 bp, Homo sapiens; identical to SEQ ID NO: 221165
  NW_001841051.1_73730-82666:506-626
  hypo

SEQ ID NO: 277733 - DNA, 120 bp, Homo sapiens; identical to SEQ ID NO: 221166
  NW_001841051.1_73730-82666:746-866
  hypo

SEQ ID NO: 277734 - DNA, 120 bp, Homo sapiens
  NW_001841109.1_139-6923:1788-1908
  hypo
ctccaggggcacgggccggggacatgtagctgccccatcttgtggttcccacgccatcccggcgacctgcgtaccccggccccagccgccccacggactcccctgtgacgcgggtggcgc

SEQ ID NO: 277735 - DNA, 58 bp, Homo sapiens
  NW_001841138.1_67124-102688:28426-28484
  hypo
cacgacacaacaccccgtgacgggctcatcactcccgacccttcgagcccacctgcca

SEQ ID NO: 277736 - DNA, 120 bp, Homo sapiens; identical to SEQ ID NO: 221167
  NW_001841145.1_129149-174453:6133-6253
  hypo

SEQ ID NO: 277737 - DNA, 84 bp, Homo sapiens
  NW_001841145.1_177495-186900:958-1042
  hypo
gggaaaagctggccagagagacgggccaatcggtgtccaggattcagatttggtttcagaatcgaagggccaggcaccaggaac

SEQ ID NO: 277738 - DNA, 180 bp, Homo sapiens
  NW_001841145.1_177495-186900:6333-6513
  hypo
tcgcccaccacccacagaaaatccgtcctcccctcggctgggtggagaccccctttccgcgaaacacggtccgcacagcgtacaggcctgacaaccctccagcggctcgcctgctctgtgcctccctgccaccgtcgcccacccgcccatacccctgcatcctcccagctgccaccatgg

SEQ ID NO: 277739 - DNA, 180 bp, Homo sapiens
  NW_001841145.1_40791-55171:240-420
  hypo
tccgcggggagaatgccgtccgacggtgtcgggagggcgatcgcggtgtgacccagccggaatttcacggacggacacgggcagagagaagccgtccggctcccgtgcacatcagccggcctgtgccctgtggcagcggcagccaggtggcctgcccggagagccagccagcggctcttt

SEQ ID NO: 277740 - DNA, 120 bp, Homo sapiens; identical to SEQ ID NO: 221168
  NW_001841145.1_63352-67863:4022-4142
  hypo

SEQ ID NO: 277741 - DNA, 120 bp, Homo sapiens; identical to SEQ ID NO: 221169
  NW_001841145.1_63352-67863:4202-4322
  hypo

SEQ ID NO: 277742 - DNA, 120 bp, Homo sapiens
  NW_001841145.1_82-8803:5706-5826
  hypo
atgcccgggtacagattccgctcaaagcaggctcccagggcctcactttgtctcggagaccaaacgtgtctccttcaccatccccgtccccggacttccgcggagagtgtggcgtccgaa

SEQ ID NO: 277743 - DNA, 141 bp, Homo sapiens; identical to SEQ ID NO: 221170
  NW_001841145.1_90215-97412:6817-6958
  hypo

SEQ ID NO: 277744 - DNA, 555 bp, Homo sapiens
  NW_001841157.1_1611084-1612812:898-1453
  hypo
cccttggaagctcctgtagtcgatgagtggtttttctttacgggtgttttccaaaatggctaattcctggaacagatgaagccccgaactgctcagaacagcgcgcagacctcttgcctctctactccccaaacctgccggtggttcctcagtaatcccctgagcacccgcagctcccgggttccctgctgcgcccgcctggagcccaaattccatgtaaggcagggtcgccctcgtgtcccgctgtggctccggtgtccttcccccgtcagattcctacttagaggccctggggggacggagtcatatcgggggacaaacggcggctcaaggtgccttctccggggagattgtctcaagggcaggaggaggcctccccgggcaggtgtggacgggggccccgggcagaagcgtctctcacggtggcccttgtgtccccgcagccgagtggcaggtggcggaggccacagcgctggtgcacacgctggactgctggtccgtggtgcagacaatggtcgtgtccaccaaaacgccggacaggaagctcatctttgg

SEQ ID NO: 277745 - DNA, 265 bp, Homo sapiens
  NW_001841507.1_62-5931:3856-4121
  hypo
gtctgtgaaccatgtgggtgaaaacctgacggcaacccgagtccaggtctttgtctccgaggaaaccgcccattccctgcgccacggaatcggggcgaatgagtgccccgccggcccacgcagcggctgtgggctgagccctcaccaggcgccggacacttacaattttcccggagggcgggggtcccgttcctcccggaggccgaagaccgctttccctctctgccttcctccctgtatccccgactccctccctcctgccccc

SEQ ID NO: 277746 - DNA, 165 bp, Homo sapiens
  NW_001841533.1_1-11450:7730-7895
  hypo
ggctgctggggctctagtgctggcgcggggcaaagcagagccttcctgccccgttgtccacggcgggtccttgtcggaacaagtgacgattgtgtaggcattgtatgaaaaatggcccgcggggctgggccggctgttcaccccggtcagccctggtggctctgg

SEQ ID NO: 277747 - DNA, 120 bp, Homo sapiens; identical to SEQ ID NO: 221171
  NW_001842224.1_80-3146:1734-1854
  hypo

SEQ ID NO: 277748 - DNA, 178 bp, Homo sapiens
  NW_001842432.1_1-179261:39824-40002
  hypo
acaacgcgcccagagcgtagggtcccactcacctgggagcgggggcacgtccctcccagtaggcgatggagttaagtttgtttccttatttattttacttaaaactggtagaatgttactattatatgaaatacccatgactctgtcagtaaatttgagcaaacgtttattagttttt

SEQ ID NO: 277749 - DNA, 321 bp, Homo sapiens
  NW_001842432.1_1-179261:102976-103297
  hypo
ccagttttggagaagcacctcgttcctgatggaggccgtgggcctctttgtcctcgcttaccaggcagcagctccagccattctcagccccaccggtgggtgccgccttccatcaggccaaagactttccgaaactgcccttcttggggccgggaggccgcatcctaggcctccctggggcctgcggcgctggcagcagctccatgttgaggtcacctacagccggcaccacggcacgctggaggtccctgagccgggggttgggaggccaatccatcggtgcagtgccgggtgcaggccgcagtctcaaaagtgcttgga

SEQ ID NO: 277750 - DNA, 35 bp, Homo sapiens; identical to SEQ ID NO: 227544
  chr1:155164120-155164155
  hypo

SEQ ID NO: 277751 - DNA, 507 bp, Homo sapiens; identical to SEQ ID NO: 197878
  chr1:184355381-184355888
  hypo

SEQ ID NO: 277752 - DNA, 60 bp, Homo sapiens; identical to SEQ ID NO: 227838
  chr1:205425841-205425901
  hypo

SEQ ID NO: 277753 - DNA, 120 bp, Homo sapiens; identical to SEQ ID NO: 197999
  chr1:228646026-228646146
  hypo

SEQ ID NO: 277754 - DNA, 42 bp, Homo sapiens; identical to SEQ ID NO: 228038
  chr1:241520844-241520886
  hypo

SEQ ID NO: 277755 - DNA, 120 bp, Homo sapiens; identical to SEQ ID NO: 198435
  chr2:132795464-132795584
  hypo

SEQ ID NO: 277756 - DNA, 38 bp, Homo sapiens; identical to SEQ ID NO: 228698
  chr2:132795966-132796004
  hypo

SEQ ID NO: 277757 - DNA, 60 bp, Homo sapiens; identical to SEQ ID NO: 229708
  chr3:120627258-120627318
  hypo

SEQ ID NO: 277758 - DNA, 108 bp, Homo sapiens; identical to SEQ ID NO: 229803
  chr3:134093757-134093865
  hypo

SEQ ID NO: 277759 - DNA, 79 bp, Homo sapiens; identical to SEQ ID NO: 230001
  chr3:179367505-179367584
  hypo

SEQ ID NO: 277760 - DNA, 173 bp, Homo sapiens; identical to SEQ ID NO: 230699
  chr4:142054586-142054759
  hypo

SEQ ID NO: 277761 - DNA, 60 bp, Homo sapiens; identical to SEQ ID NO: 230747
  chr4:154710654-154710714
  hypo

SEQ ID NO: 277762 - DNA, 1221 bp, Homo sapiens; identical to SEQ ID NO: 231238
  chr5:88179188-88180409
  hypo

SEQ ID NO: 277763 - DNA, 202 bp, Homo sapiens; identical to SEQ ID NO: 231499
  chr5:145718089-145718291
  hypo

SEQ ID NO: 277764 - DNA, 206 bp, Homo sapiens; identical to SEQ ID NO: 231981
  chr6:27806305-27806511
  hypo

SEQ ID NO: 277765 - DNA, 633 bp, Homo sapiens; identical to SEQ ID NO: 232051
  chr6:40555283-40555916
  hypo

SEQ ID NO: 277766 - DNA, 43 bp, Homo sapiens; identical to SEQ ID NO: 232110
  chr6:45390376-45390419
  hypo

SEQ ID NO: 277767 - DNA, 237 bp, Homo sapiens; identical to SEQ ID NO: 232111
  chr6:45390539-45390776
  hypo

SEQ ID NO: 277768 - DNA, 219 bp, Homo sapiens; identical to SEQ ID NO: 232287
  chr6:99963448-99963667
  hypo

SEQ ID NO: 277769 - DNA, 232 bp, Homo sapiens; identical to SEQ ID NO: 232894
  chr7:42277590-42277822
  hypo

SEQ ID NO: 277770 - DNA, 36 bp, Homo sapiens; identical to SEQ ID NO: 232942
  chr7:63767574-63767610
  hypo

SEQ ID NO: 277771 - DNA, 60 bp, Homo sapiens; identical to SEQ ID NO: 232954
  chr7:64974421-64974481
  hypo

SEQ ID NO: 277772 - DNA, 986 bp, Homo sapiens; identical to SEQ ID NO: 233001
  chr7:87256907-87257893
  hypo

SEQ ID NO: 277773 - DNA, 60 bp, Homo sapiens; identical to SEQ ID NO: 233719
  chr8:68864140-68864200
  hypo

SEQ ID NO: 277774 - DNA, 50 bp, Homo sapiens; identical to SEQ ID NO: 234051
  chr9:14322293-14322343
  hypo

SEQ ID NO: 277775 - DNA, 1001 bp, Homo sapiens; identical to SEQ ID NO: 234246
  chr9:95569780-95570781
  hypo

SEQ ID NO: 277776 - DNA, 144 bp, Homo sapiens; identical to SEQ ID NO: 234284
  chr9:99984008-99984152
  hypo

SEQ ID NO: 277777 - DNA, 148 bp, Homo sapiens; identical to SEQ ID NO: 236112
  chr12:5541744-5541892
  hypo

SEQ ID NO: 277778 - DNA, 60 bp, Homo sapiens; identical to SEQ ID NO: 236192
  chr12:24715380-24715440
  hypo

SEQ ID NO: 277779 - DNA, 70 bp, Homo sapiens; identical to SEQ ID NO: 236872
  chr13:22243944-22244014
  hypo

SEQ ID NO: 277780 - DNA, 554 bp, Homo sapiens; identical to SEQ ID NO: 237170
  chr13:108518709-108519263
  hypo

SEQ ID NO: 277781 - DNA, 42 bp, Homo sapiens; identical to SEQ ID NO: 237239
  chr14:21150633-21150675
  hypo

SEQ ID NO: 277782 - DNA, 189 bp, Homo sapiens; identical to SEQ ID NO: 237313
  chr14:29236482-29236671
  hypo

SEQ ID NO: 277783 - DNA, 31 bp, Homo sapiens; identical to SEQ ID NO: 237553
  chr14:70654356-70654387
  hypo

SEQ ID NO: 277784 - DNA, 148 bp, Homo sapiens; identical to SEQ ID NO: 237856
  chr15:40225953-40226101
  hypo

SEQ ID NO: 277785 - DNA, 39 bp, Homo sapiens; identical to SEQ ID NO: 238174
  chr15:83953986-83954025
  hypo

SEQ ID NO: 277786 - DNA, 123 bp, Homo sapiens; identical to SEQ ID NO: 238260
  chr15:98971414-98971537
  hypo

SEQ ID NO: 277787 - DNA, 32 bp, Homo sapiens; identical to SEQ ID NO: 238340
  chr16:3200663-3200695
  hypo

SEQ ID NO: 277788 - DNA, 54 bp, Homo sapiens; identical to SEQ ID NO: 238524
  chr16:47177806-47177860
  hypo

SEQ ID NO: 277789 - DNA, 42 bp, Homo sapiens; identical to SEQ ID NO: 238830
  chr17:4938972-4939014
  hypo

SEQ ID NO: 277790 - DNA, 324 bp, Homo sapiens; identical to SEQ ID NO: 239617
  chr18:7116447-7116771
  hypo

SEQ ID NO: 277791 - DNA, 96 bp, Homo sapiens; identical to SEQ ID NO: 239655
  chr18:15198164-15198260
  hypo

SEQ ID NO: 277792 - DNA, 191 bp, Homo sapiens; identical to SEQ ID NO: 239742
  chr18:43914668-43914859
  hypo

SEQ ID NO: 277793 - DNA, 680 bp, Homo sapiens; identical to SEQ ID NO: 240132
  chr19:12203013-12203693
  hypo

SEQ ID NO: 277794 - DNA, 60 bp, Homo sapiens; identical to SEQ ID NO: 240164
  chr19:13106112-13106172
  hypo

SEQ ID NO: 277795 - DNA, 106 bp, Homo sapiens; identical to SEQ ID NO: 240901
  chr19:58666851-58666957
  hypo

SEQ ID NO: 277796 - DNA, 64 bp, Homo sapiens; identical to SEQ ID NO: 197231
  chr1:859736-859800
  hyper

SEQ ID NO: 277797 - DNA, 187 bp, Homo sapiens; identical to SEQ ID NO: 197232
  chr1:877475-877662
  hyper

SEQ ID NO: 277798 - DNA, 299 bp, Homo sapiens; identical to SEQ ID NO: 226564
  chr1:901741-902040
  hyper

SEQ ID NO: 277799 - DNA, 898 bp, Homo sapiens; identical to SEQ ID NO: 221173
  chr1:935362-936260
  hyper

SEQ ID NO: 277800 - DNA, 392 bp, Homo sapiens; identical to SEQ ID NO: 197235
  chr1:955508-955900
  hyper

SEQ ID NO: 277801 - DNA, 256 bp, Homo sapiens
  chr1:975561-975817
  hyper
cgcgggaaggggctcccccggctccatggggtgaatcggtgaggggctccggtgccgatgtggaaggagctcctgagcagaactggggcctggactgcttgtgcccgagttggtttcgaggcgtctctgcttttcgctggaggcccacgaggtgggtgggaagtgggtgctcgcccgtcgcagaaacagagtcgggtgccgcctgcggcagacgcccctctccgcgcctgcaggtgcggggtgggggagaaaggtc

SEQ ID NO: 277802 - DNA, 35 bp, Homo sapiens
  chr1:975907-975942
  hyper
ccgtgtccgtggtggacccccgatgcggcgcgggg

SEQ ID NO: 277803 - DNA, 51 bp, Homo sapiens; identical to SEQ ID NO: 226566
  chr1:976153-976204
  hyper

SEQ ID NO: 277804 - DNA, 61 bp, Homo sapiens; identical to SEQ ID NO: 221176
  chr1:994999-995060
  hyper

SEQ ID NO: 277805 - DNA, 154 bp, Homo sapiens; identical to SEQ ID NO: 197236
  chr1:999585-999739
  hyper

SEQ ID NO: 277806 - DNA, 112 bp, Homo sapiens; identical to SEQ ID NO: 226568
  chr1:1004072-1004184
  hyper

SEQ ID NO: 277807 - DNA, 79 bp, Homo sapiens; identical to SEQ ID NO: 197237
  chr1:1014973-1015052
  hyper

SEQ ID NO: 277808 - DNA, 130 bp, Homo sapiens; identical to SEQ ID NO: 221177
  chr1:1052182-1052312
  hyper

SEQ ID NO: 277809 - DNA, 156 bp, Homo sapiens; identical to SEQ ID NO: 197238
  chr1:1072536-1072692
  hyper

SEQ ID NO: 277810 - DNA, 192 bp, Homo sapiens
  chr1:1181914-1182106
  hyper
ctcgcgggaggacgcgctggcggtggcgttggggggatctgcgcgctggccaggctgctgcgtcctctgtgcctcccgccgggccccgacgcccccgaggagcacgagctgcggcccgaggaggaccacgaccgcggcccaggcccagcgccgcatggctccgtcccgaggcggctcagcgcggcgagtctc

SEQ ID NO: 277811 - DNA, 55 bp, Homo sapiens
  chr1:1182227-1182282
  hyper
cgacggcgctcaggtccccccggggtcccgctccagcccccgctcccagcccccg

SEQ ID NO: 277812 - DNA, 268 bp, Homo sapiens; identical to SEQ ID NO: 226571
  chr1:1334561-1334829
  hyper

SEQ ID NO: 277813 - DNA, 71 bp, Homo sapiens; identical to SEQ ID NO: 197239
  chr1:1510423-1510494
  hyper

SEQ ID NO: 277814 - DNA, 54 bp, Homo sapiens; identical to SEQ ID NO: 34876
  chr1:1510559-1510613
  hyper

SEQ ID NO: 277815 - DNA, 170 bp, Homo sapiens
  chr1:1534831-1535001
  hyper
cgtcatggccaccacgatgtcctgcatgccggccggctcggcggtgaactccacgcactcggccggctcgggggtctctggcgcggcggcggcgggcccagcgcgcagcggcagcggctgcaggcacaggcggtagaggacgctgtcgtgcacgtcgggcagcaggtagt

SEQ ID NO: 277816 - DNA, 76 bp, Homo sapiens; identical to SEQ ID NO: 197241
  chr1:1535610-1535686
  hyper

SEQ ID NO: 277817 - DNA, 136 bp, Homo sapiens; identical to SEQ ID NO: 197242
  chr1:1550765-1550901
  hyper

SEQ ID NO: 277818 - DNA, 58 bp, Homo sapiens
  chr1:1566482-1566540
  hyper
cgccagctgcttggcgctgaccccgttggccgggctgccgtcaccctgggcccgacgc

SEQ ID NO: 277819 - DNA, 95 bp, Homo sapiens
  chr1:1566979-1567074
  hyper
cacgcaccccctccccgcctccccctccaccgccccatactcactgccacgtccccatccggccatcccctcccagctctcggggacactgtcag

SEQ ID NO: 277820 - DNA, 468 bp, Homo sapiens
  chr1:1713537-1714005
  hyper
cacagagaggccaagtaacttgctcaaggtcacccagcgaggaaagggagctggggggtgggggtaggggacagggcgaggccagagagtagtgggaggggccgaggcggcctttcccgggagcgctcggttcccggccggcccttctattggccccagtcactcaggctcccaggtccggctcgggggggagcggggggccgcgccaggccgctgaagtgtccccgtttcgcgtgggcagagcgcgcctccccacgcatcctgctgagggccagcctctgctaggtgcgtgacacggaggggacagaacggaaaccttgtcctgctcaagtgtggacgtgcgtgccacgtgctagagtaaaattgaggtggggaacctccatccctgggacatggagcacaggggcgaccccgcgccgcttggtcaaaggaggtccgaggccctgcaggaacagcccacagccggag

SEQ ID NO: 277821 - DNA, 233 bp, Homo sapiens; identical to SEQ ID NO: 102334
  chr1:1714067-1714300
  hyper

SEQ ID NO: 277822 - DNA, 238 bp, Homo sapiens
  chr1:1737718-1737956
  hyper
tccagaggaagagaccgtgacaggtggcacgtgactcagcttctatctcacctgcgcaacttcactactaacaaacagagcttgccgctgctgccttccctatcctgtattacgtgatttaacaaaatgaatccagagcttaaaaccctgtttcctgggttggtttttcaaggaagggaatcctccagtccctaccttgttggtggtgtagctgtcccagatgataagtttaccatcc

SEQ ID NO: 277823 - DNA, 44 bp, Homo sapiens; identical to SEQ ID NO: 197244
  chr1:1747214-1747258
  hyper

SEQ ID NO: 277824 - DNA, 143 bp, Homo sapiens; identical to SEQ ID NO: 197245
  chr1:1850719-1850862
  hyper

SEQ ID NO: 277825 - DNA, 222 bp, Homo sapiens; identical to SEQ ID NO: 102341
  chr1:1850928-1851150
  hyper

SEQ ID NO: 277826 - DNA, 41 bp, Homo sapiens; identical to SEQ ID NO: 197246
  chr1:1935024-1935065
  hyper

SEQ ID NO: 277827 - DNA, 82 bp, Homo sapiens; identical to SEQ ID NO: 226582
  chr1:1976105-1976187
  hyper

SEQ ID NO: 277828 - DNA, 647 bp, Homo sapiens; identical to SEQ ID NO: 197247
  chr1:1981169-1981816
  hyper

SEQ ID NO: 277829 - DNA, 494 bp, Homo sapiens
  chr1:1981817-1982311
  hyper
gattggccgctggctccacctcggtccgccatgttcggacaccgccccccgcccccgccggacggtcccgccccgcgcgccccccgctcccgccccgcgcgccgccggagttccgcggagttgaccgggtcggcgccgtcggtcctgagcgctgccttccgcgttccgccgcggccccacctggagcccccgccccgcgccatggccggagctcccggggcgcagcgctgacggcggcggggggagcgcgccatgcccagcaggaccggccccaagatggaagggagcggcggccgcgtccgcctcaaggcgcattacggggggtgagcggcggagagggcggggagcggcgcgggtgaggcagggagggcggggagggctcagccgtcggggctcctgcgcgagagggagagagggaaggggcggcgaggtcgctgcgggcccggggctgtcgcgggaggtcctcggtccccgcccgtgagcgtcacccgcgg

SEQ ID NO: 277830 - DNA, 197 bp, Homo sapiens
  chr1:1982427-1982624
  hyper
cggggacgttccggccgcaaacctgtaaggactgaaagttttcatcaagttgtgaaaactcctggcgggtttcttaaaatcagcgtttcctaaacgttctccacgtttacccggtcgggggtctcgctttagccaaaatccggagacccggggcgcgggcgctgtggctccaatgcagcccccggcagggctcgggg

SEQ ID NO: 277831 - DNA, 66 bp, Homo sapiens; identical to SEQ ID NO: 226583
  chr1:2078513-2078579
  hyper

SEQ ID NO: 277832 - DNA, 114 bp, Homo sapiens
  chr1:2135930-2136044
  hyper
ggggcgtgacttggcgatcccggtggctccgggcgtcagcttggacctcagacgcccctcacagctcacagccctgtggcctgctctgagggccccgcccgccgccgagccccc

SEQ ID NO: 277833 - DNA, 251 bp, Homo sapiens
  chr1:2136088-2136339
  hyper
ccactgcccctgaccccactgcccagcgccttcaggactagcggatgatggacttgtgctaaactggctacgacccctccggagcagggtcctgggtaaatcagcagtgagctgcaggctcagccagccgccgcctttggtttcctcccgccgccggctcaccccacctcagacccgagctagctctccagcctggttcctctgccggaccctcctcccgggcacctcccacgccccgccctcaagccccg

SEQ ID NO: 277834 - DNA, 49 bp, Homo sapiens
  chr1:2137068-2137117
  hyper
tttcaaggtggacgccacatgcaagccacgagcgcgtcgccgcacggtg

SEQ ID NO: 277835 - DNA, 154 bp, Homo sapiens; identical to SEQ ID NO: 226586
  chr1:2158901-2159055
  hyper

SEQ ID NO: 277836 - DNA, 109 bp, Homo sapiens; identical to SEQ ID NO: 197250
  chr1:2165786-2165895
  hyper

SEQ ID NO: 277837 - DNA, 171 bp, Homo sapiens; identical to SEQ ID NO: 197251
  chr1:2165999-2166170
  hyper

SEQ ID NO: 277838 - DNA, 223 bp, Homo sapiens; identical to SEQ ID NO: 226588
  chr1:2345880-2346103
  hyper

SEQ ID NO: 277839 - DNA, 373 bp, Homo sapiens; identical to SEQ ID NO: 197252
  chr1:2457940-2458313
  hyper

SEQ ID NO: 277840 - DNA, 208 bp, Homo sapiens; identical to SEQ ID NO: 197253
  chr1:2460598-2460806
  hyper

SEQ ID NO: 277841 - DNA, 413 bp, Homo sapiens; identical to SEQ ID NO: 197254
  chr1:2460898-2461311
  hyper

SEQ ID NO: 277842 - DNA, 457 bp, Homo sapiens; identical to SEQ ID NO: 197255
  chr1:2461988-2462445
  hyper

SEQ ID NO: 277843 - DNA, 71 bp, Homo sapiens; identical to SEQ ID NO: 197256
  chr1:2477791-2477862
  hyper

SEQ ID NO: 277844 - DNA, 116 bp, Homo sapiens; identical to SEQ ID NO: 197257
  chr1:2517411-2517527
  hyper

SEQ ID NO: 277845 - DNA, 399 bp, Homo sapiens
  chr1:2559942-2560341
  hyper
ctacgcacctgccccgggggtgagcattgctccccgatgtgtgcgcgctgcccggtctcagagggaccagggctgtgcctgcggaggggctggcaggggcggctggaaggtgaccaggtctacgggtgcctgggagcccctgaaccaagaggggagatcaagggaggggccggcgtgggggcggggggagtgttcccgggacagccgggggcggggggagtgttcccgggacagcccgaggttccagcgagcagccctggccacgcctttgtctccgtgggaccccagactggccccttcccgccgtggtcccgtgacctgacccggccttgagcggggcgggggcggcaggaccctcaggtctctccgcaggatggcagcgggggagtgaggcagcca

SEQ ID NO: 277846 - DNA, 778 bp, Homo sapiens; identical to SEQ ID NO: 226598
  chr1:2574028-2574806
  hyper

SEQ ID NO: 277847 - DNA, 427 bp, Homo sapiens; identical to SEQ ID NO: 226600
  chr1:2780349-2780776
  hyper

SEQ ID NO: 277848 - DNA, 316 bp, Homo sapiens; identical to SEQ ID NO: 197259
  chr1:2984307-2984623
  hyper

SEQ ID NO: 277849 - DNA, 570 bp, Homo sapiens
  chr1:2985452-2986022
  hyper
ccttttaaagtgtccggggtgcgggccccgggcgggagcgccgaacacggaatgttttcttaaagggccagttccgagctgcgctgaaaagggggggggggagaggggggagagataagtgagacgaagaccgagaaggccgaggagagccccccaatcccgcgccgaggcggcggcggcggcggcggcggcgcgacgatgaggatgatgaatacattgcaaagtttttttggccccggcgaggggtgtcagattgagtgctctgtgcgcatgtgcgaaggtgtccaaactgacaatgctggggagatgaagatagtgtgtggctgcttctggactcaaggaggaggagagagattccgcgagccgacaccatgcgatccaaggcgagggcgaggaagctagccaaaagtaagtctcccgcgctcggccgcgccgcgccgccggggcccgggccgccgggccggggcgcccgggccaggggtgcgcgtcggggcgcggccggcgcgcctgcggctccgggcccccggctcggccgcgcggcccggggggctgctccgcctcccgcgctcc

SEQ ID NO: 277850 - DNA, 39 bp, Homo sapiens
  chr1:2986307-2986346
  hyper
gtcaaatcatattccgggcttttgaaatagtgggcgcta

SEQ ID NO: 277851 - DNA, 56 bp, Homo sapiens; identical to SEQ ID NO: 34924
  chr1:2987628-2987684
  hyper

SEQ ID NO: 277852 - DNA, 207 bp, Homo sapiens
  chr1:3087394-3087601
  hyper
atcccagcagccagggctgtcgggagcccatggccttctctgtctgcagcagccacggtggaggcaggccaccggggaaacgtgtgtttcagctcccagagctcgggctgatggcgccagcccaaacgaggctgtcctccccagcccgtcttggctagagagcccacacagcctcgctgcagtccctaagggaaggctgggataggg

SEQ ID NO: 277853 - DNA, 219 bp, Homo sapiens
  chr1:3087723-3087942
  hyper
ttacttgcggcgtgacttgctctggcctgtgcacggcagccacaggcccagttggtaggaactaaagagataaataagtctataaatagtttggtggcggtcggctgttacggcgcttgctcagcatttaaccccttgttcctcctcctcgctgtccgggcagagccagggaaagggaagcagagaacagaaatctccgagtgtgttttcttttctgaa

SEQ ID NO: 277854 - DNA, 56 bp, Homo sapiens; identical to SEQ ID NO: 197260
  chr1:3325182-3325238
  hyper

SEQ ID NO: 277855 - DNA, 341 bp, Homo sapiens; identical to SEQ ID NO: 221196
  chr1:3370921-3371262
  hyper

SEQ ID NO: 277856 - DNA, 38 bp, Homo sapiens; identical to SEQ ID NO: 226609
  chr1:3371631-3371669
  hyper

SEQ ID NO: 277857 - DNA, 523 bp, Homo sapiens; identical to SEQ ID NO: 197262
  chr1:3447461-3447984
  hyper

SEQ ID NO: 277858 - DNA, 35 bp, Homo sapiens; identical to SEQ ID NO: 197263
  chr1:3448359-3448394
  hyper

SEQ ID NO: 277859 - DNA, 100 bp, Homo sapiens
  chr1:3527613-3527713
  hyper
aagcctcggagctcggtccaccacgggcctccagaggccccggggtccctggacgaccggccgagccctcccagctcctgctactcacatgccgggctgc

SEQ ID NO: 277860 - DNA, 139 bp, Homo sapiens; identical to SEQ ID NO: 102392
  chr1:3528466-3528605
  hyper

SEQ ID NO: 277861 - DNA, 48 bp, Homo sapiens; identical to SEQ ID NO: 197265
  chr1:3540867-3540915
  hyper

SEQ ID NO: 277862 - DNA, 280 bp, Homo sapiens; identical to SEQ ID NO: 226616
  chr1:3541173-3541453
  hyper

SEQ ID NO: 277863 - DNA, 97 bp, Homo sapiens; identical to SEQ ID NO: 226617
  chr1:3566687-3566784
  hyper

SEQ ID NO: 277864 - DNA, 181 bp, Homo sapiens; identical to SEQ ID NO: 197267
  chr1:3663335-3663516
  hyper

SEQ ID NO: 277865 - DNA, 116 bp, Homo sapiens; identical to SEQ ID NO: 197268
  chr1:3663983-3664099
  hyper

SEQ ID NO: 277866 - DNA, 173 bp, Homo sapiens; identical to SEQ ID NO: 226621
  chr1:3712496-3712669
  hyper

SEQ ID NO: 277867 - DNA, 144 bp, Homo sapiens; identical to SEQ ID NO: 197269
  chr1:3713029-3713173
  hyper

SEQ ID NO: 277868 - DNA, 179 bp, Homo sapiens; identical to SEQ ID NO: 226623
  chr1:3773152-3773331
  hyper

SEQ ID NO: 277869 - DNA, 159 bp, Homo sapiens; identical to SEQ ID NO: 226624
  chr1:3773814-3773973
  hyper

SEQ ID NO: 277870 - DNA, 191 bp, Homo sapiens; identical to SEQ ID NO: 226625
  chr1:3816433-3816624
  hyper

SEQ ID NO: 277871 - DNA, 225 bp, Homo sapiens; identical to SEQ ID NO: 226626
  chr1:3816828-3817053
  hyper

SEQ ID NO: 277872 - DNA, 304 bp, Homo sapiens
  chr1:3817790-3818094
  hyper
ggaggccagggtccggcgtcgggctgggggccggttttcgtcccccgttacgtgcaaggcgggaaatgacccctccgccgtcccgttactctccggggccaacgtggactcgcaggggccacgccttttccaatggccacgcccctagcaggcctgggtggacccgcagcggccacgcctcctccaatggccgcgccctatcaggtctggatggacacacggcggccacgcctcctccagcaaacacgcccctagcaggcctgggctgctgtgatgcgtcctctttggccgccgctgagggagg

SEQ ID NO: 277873 - DNA, 357 bp, Homo sapiens
  chr1:5772043-5772400
  hyper
atcagataaataccgcactgtcccccaccggggaaggcaccgtcacagctcccgcacagccggtcaccgcaccgtcccccgccggggaaggcaccgtgtcacagctcccgcacagccggtcaccgcaccatcccccgccggggaagggactgtcacagctcctgcacagccggtcaccgcactgtcccccgccggggaaggcaccgtcacagctcccgcacagccggtcaccgcactgtcctccgccaggaaaggcaccatcacagctcctgcacagctggtcaccgcactgtcctccgccggggaaggcaccgtgtcacagctcccgcacagccggtccccgcactgtcctccacc

SEQ ID NO: 277874 - DNA, 137 bp, Homo sapiens; identical to SEQ ID NO: 226631
  chr1:5907431-5907568
  hyper

SEQ ID NO: 277875 - DNA, 144 bp, Homo sapiens; identical to SEQ ID NO: 197272
  chr1:6052048-6052192
  hyper

SEQ ID NO: 277876 - DNA, 924 bp, Homo sapiens; identical to SEQ ID NO: 221205
  chr1:6052412-6053336
  hyper

SEQ ID NO: 277877 - DNA, 111 bp, Homo sapiens
  chr1:6053655-6053766
  hyper
ccttcccaccccgccaaccagccgcatcctggtgtccctcctcctggcatttgtcctgggggctcttacagggactgtgctttgcccgcagcatcccggggtgctccaggt

SEQ ID NO: 277878 - DNA, 55 bp, Homo sapiens; identical to SEQ ID NO: 197273
  chr1:6086204-6086259
  hyper

SEQ ID NO: 277879 - DNA, 109 bp, Homo sapiens; identical to SEQ ID NO: 197274
  chr1:6086291-6086400
  hyper

SEQ ID NO: 277880 - DNA, 83 bp, Homo sapiens; identical to SEQ ID NO: 197275
  chr1:6137223-6137306
  hyper

SEQ ID NO: 277881 - DNA, 179 bp, Homo sapiens
  chr1:6208937-6209116
  hyper
accgtttgggatctcgggcagcggcgggttgaggcaatgcaggtggtaggaggaggggcaggcgtcgcagcagagcagctcgcccccgtccttgcacacgcggcagaactccatgtggtcgtcctcctcctcctcgcagccgccctcctcctcttcatcgtcgtcgtccttcggctccc

SEQ ID NO: 277882 - DNA, 210 bp, Homo sapiens
  chr1:6240062-6240272
  hyper
ggtgcccactgggccccgcatgcccggcgcggggaggaggggaggtgggcgccccccctcccgccgggcgcggtgccagccttaacccgtgcgctgccggaccggcgcgcgcggcgggcgaggcggcctcggcgagaagatggcggccgcctgcccccccacccccccaaacctccacccccccgtctcgacccccctttctctcggccg

SEQ ID NO: 277883 - DNA, 223 bp, Homo sapiens
  chr1:6240708-6240931
  hyper
ccccaagggcgcggaggcagggtcttcagggcagcgcgcggcccgctcccccactcggttcacaggcgccgggacccaccccgctcccggctccggcctcggcacgttcctaaccccctctccaaagaggattagaagaaaaatgtgttccacacttggggaaaagacgctctggagactgtgggtctgatttacagcagaaaaatccgcgcaggcgggctcc

SEQ ID NO: 277884 - DNA, 294 bp, Homo sapiens
  chr1:6241264-6241558
  hyper
cccagaaggcccgtgaagggagggccccctctcactgcctcgcaggggcactgggggaacccacctgagacacgcaggatcggcagcagtttcccttcttcccgttcaattttattgccagcaaaccccaaacaaaagaccctctgcattcatccctgggcaaggagaggtcggtccagccttctggaaccaaagactggggtgttgggaacccctccatctcccagatccgctttaactacgctgtagatagagaagccgggtcagcccagtgctggccgcctgcaaggggaa

SEQ ID NO: 277885 - DNA, 222 bp, Homo sapiens; identical to SEQ ID NO: 226637
  chr1:6259131-6259353
  hyper

SEQ ID NO: 277886 - DNA, 216 bp, Homo sapiens; identical to SEQ ID NO: 197276
  chr1:6265333-6265549
  hyper

SEQ ID NO: 277887 - DNA, 695 bp, Homo sapiens; identical to SEQ ID NO: 197277
  chr1:6265789-6266484
  hyper

SEQ ID NO: 277888 - DNA, 72 bp, Homo sapiens; identical to SEQ ID NO: 197278
  chr1:6266713-6266785
  hyper

SEQ ID NO: 277889 - DNA, 161 bp, Homo sapiens; identical to SEQ ID NO: 197279
  chr1:6296163-6296324
  hyper

SEQ ID NO: 277890 - DNA, 54 bp, Homo sapiens
  chr1:6302010-6302064
  hyper
tgcttaagaaacactaagctatccacgtgagcgtccccccgcccccggcccgat

SEQ ID NO: 277891 - DNA, 215 bp, Homo sapiens; identical to SEQ ID NO: 197280
  chr1:6321178-6321393
  hyper

SEQ ID NO: 277892 - DNA, 236 bp, Homo sapiens; identical to SEQ ID NO: 226644
  chr1:6453981-6454217
  hyper

SEQ ID NO: 277893 - DNA, 255 bp, Homo sapiens; identical to SEQ ID NO: 226645
  chr1:6474514-6474769
  hyper

SEQ ID NO: 277894 - DNA, 232 bp, Homo sapiens
  chr1:6479023-6479255
  hyper
ggggcgggggcagacgggccactggaatccccagcgcgcccgccgtccagggtggcgctggccgctctccgccacaggtgctccagcaggcgcgcgctcacggcgggctccaggacacggcaggcgggcagcacgcgggccaggcgcgccacacaggcgctgtagccctcgcggtagctgtcgcaaggcactgcgggcggagagccgcgtgaggcgcggggtagggtgccgg

SEQ ID NO: 277895 - DNA, 478 bp, Homo sapiens
  chr1:6479314-6479792
  hyper
ggccatgaggacgcaggcagctcctgcaggaagcgcacggtcatttccaggacgtctgccttctctagcttcgagcagttggagttctgcgcccggccacgaggaagagcgacagagaaccaccaagacagaactttggccggctaccgtgcgcaccctcgctctagtcgggagctgggtgtggggcgcgccgtggcctgctgggggtccgctccgacgcgcccaccccacccaggctccgcctcgggcgccgcgcggaaccccctggtgggttcctcccgcaggagcaccccgtccccctgcccccgctccgcgccccaggaccctctgccctccgcccgggcgcgctcacctcccggcccagcagcggcaggatgagccccttaagctggctcaggctctggttgatgcgcgcgcgccggcgcttctccagcagcggcttcaggctctgcggacgggcggcgcggtggttagacgg

SEQ ID NO: 277896 - DNA, 218 bp, Homo sapiens; identical to SEQ ID NO: 197282
  chr1:6479998-6480216
  hyper

SEQ ID NO: 277897 - DNA, 110 bp, Homo sapiens; identical to SEQ ID NO: 226648
  chr1:6483912-6484022
  hyper

SEQ ID NO: 277898 - DNA, 329 bp, Homo sapiens
  chr1:6484602-6484931
  hyper
gtctgtgcctggacggctctccaattcgaacccagttttgctgccctctggggtctcaactgttacgtgaggcaaattaggagagaagcccctgggcaccttgccccagtcgcacgagtgtccccgcgtcgcggcgggggcgggcggggaactcgggcggaggctgcggggcggggcggggcggggtgggggcgggcccgagtcttaagccggcgtccgcgggctccggccccagagcgcggcggagcggagcgccaggcagcgcggagcggaggccaggcccacagccgctccgcctcccggcccgcagatccccgacggccgcaccg

SEQ ID NO: 277899 - DNA, 73 bp, Homo sapiens; identical to SEQ ID NO: 197283
  chr1:6507053-6507126
  hyper

SEQ ID NO: 277900 - DNA, 138 bp, Homo sapiens; identical to SEQ ID NO: 102452
  chr1:6526181-6526319
  hyper

SEQ ID NO: 277901 - DNA, 108 bp, Homo sapiens; identical to SEQ ID NO: 197284
  chr1:6545271-6545379
  hyper

SEQ ID NO: 277902 - DNA, 246 bp, Homo sapiens; identical to SEQ ID NO: 197285
  chr1:6545639-6545885
  hyper

SEQ ID NO: 277903 - DNA, 236 bp, Homo sapiens; identical to SEQ ID NO: 197286
  chr1:6545931-6546167
  hyper

SEQ ID NO: 277904 - DNA, 379 bp, Homo sapiens; identical to SEQ ID NO: 226657
  chr1:6546475-6546854
  hyper

SEQ ID NO: 277905 - DNA, 217 bp, Homo sapiens; identical to SEQ ID NO: 226658
  chr1:6614573-6614790
  hyper

SEQ ID NO: 277906 - DNA, 194 bp, Homo sapiens; identical to SEQ ID NO: 221214
  chr1:6659237-6659431
  hyper

SEQ ID NO: 277907 - DNA, 163 bp, Homo sapiens; identical to SEQ ID NO: 197288
  chr1:6663518-6663681
  hyper

SEQ ID NO: 277908 - DNA, 470 bp, Homo sapiens
  chr1:6675268-6675738
  hyper
ggcccgaggccgtcgccgccctccacttggcattcgggtttttgacccacttctgctggttccccgccgaaagaaaagttcttcgcgggagttggaggcccgggtggcggcccgcggttcccgtggctgggcaggctcgccagtgcggggagcgcggtcaacgcgggccttcgcctccgctccgtgggcggccctggggtccaagggggtgggagaggagaaggtttgcttgaaccaggttgagaaaataattttctaagggcaccgactttctcgaaagaaaacccgcgggccgcacgcctgctcctcgcggcgggaggggcggcccgagacccctgccccccatttccccaccggctctcccccagcagagtggcggccgggtaacagcacctcgggaaggatgggggtgggtcggacaaggcactgaaaggaacctcagggaacgtgccgggcgaataaacagcaat

SEQ ID NO: 277909 - DNA, 222 bp, Homo sapiens; identical to SEQ ID NO: 226661
  chr1:6845233-6845455
  hyper

SEQ ID NO: 277910 - DNA, 178 bp, Homo sapiens; identical to SEQ ID NO: 226662
  chr1:7022452-7022630
  hyper

SEQ ID NO: 277911 - DNA, 34 bp, Homo sapiens
  chr1:7764522-7764556
  hyper
gcccggctctcgcgcggggacgcccgggccgcgc

SEQ ID NO: 277912 - DNA, 42 bp, Homo sapiens
  chr1:7764737-7764779
  hyper
gccgcgccccgccattggtccgggcggcgcactcgggcagtg

SEQ ID NO: 277913 - DNA, 197 bp, Homo sapiens
  chr1:7764990-7765187
  hyper
cgtgcggtcgagggcggcggccggcgggggcgcgcgcggggcgggggcggggccggggcgtggggacacgcgtgctcgcgggccgggggcgtggtgcgcggccacgcgtgtttctggcgcgagtgtgcggggccaggccgggagggcgtgcgcggaccgggcgtgtttacgcgcggcagggaggggccacgagggtg

SEQ ID NO: 277914 - DNA, 133 bp, Homo sapiens; identical to SEQ ID NO: 197289
  chr1:7831038-7831171
  hyper

SEQ ID NO: 277915 - DNA, 123 bp, Homo sapiens; identical to SEQ ID NO: 197290
  chr1:7843509-7843632
  hyper

SEQ ID NO: 277916 - DNA, 40 bp, Homo sapiens; identical to SEQ ID NO: 197291
  chr1:7843653-7843693
  hyper

SEQ ID NO: 277917 - DNA, 188 bp, Homo sapiens; identical to SEQ ID NO: 197292
  chr1:7844213-7844401
  hyper

SEQ ID NO: 277918 - DNA, 266 bp, Homo sapiens; identical to SEQ ID NO: 226666
  chr1:8014151-8014417
  hyper

SEQ ID NO: 277919 - DNA, 390 bp, Homo sapiens; identical to SEQ ID NO: 226667
  chr1:8021446-8021836
  hyper

SEQ ID NO: 277920 - DNA, 130 bp, Homo sapiens; identical to SEQ ID NO: 197293
  chr1:8085555-8085685
  hyper

SEQ ID NO: 277921 - DNA, 377 bp, Homo sapiens
  chr1:8085715-8086092
  hyper
acaaataaaaaaaaaatcaaacaagcccccaggcccgaagacgctcatccccgccgggcaaccccgcgagcgcaggctgcgggacgaggaccttcatgctcgccgctcccgaacccccgtccgctcctgcggtcccggtgctgcggggacgtatcccgggcgctcgggtgcatggccccggccagccgaggggccgcgcgacgaccacagccggcgtggagaaggcggcgggcgccggcacttcgcggcgtccccaggcccgggctgcgccgccggggagggtcccgctctccacacctcaatggggagaagcccgcgagcgaccggccggcctctccctccatcccagagactccgcgtcgcggcgaccctccccg

SEQ ID NO: 277922 - DNA, 399 bp, Homo sapiens
  chr1:8086401-8086800
  hyper
cataggccgccgggccgtgaggtcgccgcgtcccgccccgcctcctcccgcagccaatcagggcgcgcgccgcttaaaggggcgatgccgtggccgaggcgttgcgccgggcccaccgtggcgtatcgcggcgctgcagggagccggctttgtctcccggagaggcgtctccgggctgaccgcggccgcagctccgctcctctgcctgagccgtgcggcagccctgggagcctctcaacgccgagctttcctcagaagcccgcggcgacccgggcctcggccgctgttcctgcccgaactgagggcacatcgcgcttcgcgcgggatttcccataaattcaggctccgggcaagattgtgtgttttttcctctccgcgggccgccgctggccgtgtggg

SEQ ID NO: 277923 - DNA, 136 bp, Homo sapiens; identical to SEQ ID NO: 226671
  chr1:8484296-8484432
  hyper

SEQ ID NO: 277924 - DNA, 69 bp, Homo sapiens
  chr1:8762992-8763061
  hyper
atctttctagggtcggctggaacactccgtgcacccaccccgagccccccgcccgcacttgtccaactt

SEQ ID NO: 277925 - DNA, 81 bp, Homo sapiens; identical to SEQ ID NO: 226672
  chr1:8878159-8878240
  hyper

SEQ ID NO: 277926 - DNA, 255 bp, Homo sapiens; identical to SEQ ID NO: 197297
  chr1:9188651-9188906
  hyper

SEQ ID NO: 277927 - DNA, 279 bp, Homo sapiens; identical to SEQ ID NO: 35016
  chr1:9188943-9189222
  hyper

SEQ ID NO: 277928 - DNA, 125 bp, Homo sapiens; identical to SEQ ID NO: 226674
  chr1:9241459-9241584
  hyper

SEQ ID NO: 277929 - DNA, 189 bp, Homo sapiens; identical to SEQ ID NO: 197299
  chr1:9352965-9353154
  hyper

SEQ ID NO: 277930 - DNA, 68 bp, Homo sapiens; identical to SEQ ID NO: 197300
  chr1:9353809-9353877
  hyper

SEQ ID NO: 277931 - DNA, 165 bp, Homo sapiens; identical to SEQ ID NO: 197301
  chr1:9489050-9489215
  hyper

SEQ ID NO: 277932 - DNA, 47 bp, Homo sapiens; identical to SEQ ID NO: 226675
  chr1:9599387-9599434
  hyper

SEQ ID NO: 277933 - DNA, 116 bp, Homo sapiens; identical to SEQ ID NO: 197302
  chr1:9600331-9600447
  hyper

SEQ ID NO: 277934 - DNA, 189 bp, Homo sapiens; identical to SEQ ID NO: 226677
  chr1:9689875-9690064
  hyper

SEQ ID NO: 277935 - DNA, 435 bp, Homo sapiens
  chr1:9711639-9712074
  hyper
ggagtgtgggcggcgggggaaggcgaggccctggaggacctgttgtttttcctgttgcaagtgaaaaggaaacaaagtgggaagtggagtgtgcgggttggcggcaggcggggcgccccggcgcgccccgcctccctccctcgaggctcactcgcgcccagcgcagtcgctccgagcggccgcgagcagagccgcccagccctgccagctgcgccgggacggtaagcgatcgccgctggctgcgtcaggggaggtgggaagaggaccgcggccaggggctttgggagctgcggctgcgctcgggggcgcggggctggctggcgggcgtctctccggcacacacagcccgtgcgccctggccctgggcgcctccccgagtctagcgagccgggtcctgggagccccgggggccgggctgctgggacctgggcgggg

SEQ ID NO: 277936 - DNA, 154 bp, Homo sapiens; identical to SEQ ID NO: 197304
  chr1:9747557-9747711
  hyper

SEQ ID NO: 277937 - DNA, 151 bp, Homo sapiens; identical to SEQ ID NO: 197305
  chr1:9749327-9749478
  hyper

SEQ ID NO: 277938 - DNA, 55 bp, Homo sapiens; identical to SEQ ID NO: 226681
  chr1:9970619-9970674
  hyper

SEQ ID NO: 277939 - DNA, 255 bp, Homo sapiens; identical to SEQ ID NO: 226682
  chr1:10002705-10002960
  hyper

SEQ ID NO: 277940 - DNA, 141 bp, Homo sapiens; identical to SEQ ID NO: 226683
  chr1:10003446-10003587
  hyper

SEQ ID NO: 277941 - DNA, 271 bp, Homo sapiens
  chr1:10057109-10057380
  hyper
gggggaagctgccgcgcggtgggcagagccaggagcaccgggctgaggcggccgggagcgcagcggcttctaggggtgagtgggacccacgcggccccacctgctcctcccgcgcgcggccccacccccctgccccgccccgcctggtttataggtcccggcccgagcctccggccgcccgccgggtttgtcccgcgatccccgaccatgcccgccgacctcagcggtacttggaccctgctcagcagcgacaacttcgagggctacatgc

SEQ ID NO: 277942 - DNA, 492 bp, Homo sapiens
  chr1:10057622-10058114
  hyper
ctgtccccacggccgtctctccacgccctctgttcccccggccgtcggtcccccacccgtccgtccctgagtgcccgcgtccagccccacgtccgtctctacccgcacgcggcacacctgcggagactgcagactcggggtccggccggggaggggggtccggccggggagggggcgcccgggaccgaagcctctgcccggccaccctccccgcagccgccttccgtgcaggccccggggccccgggcgcgctcccgcagcgaagtcccagcagcctcggcgcacccggagcgggtcggggatgcagaatcctggagccagcggacgacccttcaggtccgggcacccgcgggagtgcagagcctggttcggcccggggcgtgccccgaccgccgcctcccacgagggctgggtgcccgcggcgttcttgctcccgggggccccgcgctgtgcttcccgccctcatcgcggtgccaacggtgcgcggactct

SEQ ID NO: 277943 - DNA, 258 bp, Homo sapiens; identical to SEQ ID NO: 226685
  chr1:10092996-10093254
  hyper

SEQ ID NO: 277944 - DNA, 175 bp, Homo sapiens; identical to SEQ ID NO: 197307
  chr1:10271266-10271441
  hyper

SEQ ID NO: 277945 - DNA, 78 bp, Homo sapiens; identical to SEQ ID NO: 226686
  chr1:10458989-10459067
  hyper

SEQ ID NO: 277946 - DNA, 348 bp, Homo sapiens; identical to SEQ ID NO: 226687
  chr1:10532553-10532901
  hyper

SEQ ID NO: 277947 - DNA, 227 bp, Homo sapiens; identical to SEQ ID NO: 226688
  chr1:10535373-10535600
  hyper

SEQ ID NO: 277948 - DNA, 502 bp, Homo sapiens; identical to SEQ ID NO: 197309
  chr1:10853673-10854175
  hyper

SEQ ID NO: 277949 - DNA, 139 bp, Homo sapiens
  chr1:10854235-10854374
  hyper
gtgtgtgtgtgtgtgtgtgtgcgcgcgcgcgcgcgtcgtgggttgggcggggggacaccaagattatccggcgatctgttttccagtcccctcgtgcgctctcaccgcgcgcctgtaccagctcggagacgtcctaaat

SEQ ID NO: 277950 - DNA, 1216 bp, Homo sapiens; identical to SEQ ID NO: 197311
  chr1:10854661-10855877
  hyper

SEQ ID NO: 277951 - DNA, 612 bp, Homo sapiens; identical to SEQ ID NO: 197312
  chr1:10856315-10856927
  hyper

SEQ ID NO: 277952 - DNA, 316 bp, Homo sapiens; identical to SEQ ID NO: 226694
  chr1:11072441-11072757
  hyper

SEQ ID NO: 277953 - DNA, 137 bp, Homo sapiens; identical to SEQ ID NO: 226695
  chr1:11119506-11119643
  hyper

SEQ ID NO: 277954 - DNA, 116 bp, Homo sapiens; identical to SEQ ID NO: 197313
  chr1:11120532-11120648
  hyper

SEQ ID NO: 277955 - DNA, 353 bp, Homo sapiens; identical to SEQ ID NO: 226697
  chr1:11159755-11160108
  hyper

SEQ ID NO: 277956 - DNA, 397 bp, Homo sapiens; identical to SEQ ID NO: 226698
  chr1:11322517-11322914
  hyper

SEQ ID NO: 277957 - DNA, 52 bp, Homo sapiens; identical to SEQ ID NO: 197314
  chr1:11538821-11538873
  hyper

SEQ ID NO: 277958 - DNA, 58 bp, Homo sapiens; identical to SEQ ID NO: 226700
  chr1:11618432-11618490
  hyper

SEQ ID NO: 277959 - DNA, 35 bp, Homo sapiens; identical to SEQ ID NO: 197315
  chr1:11624042-11624077
  hyper

SEQ ID NO: 277960 - DNA, 258 bp, Homo sapiens; identical to SEQ ID NO: 226702
  chr1:11710537-11710795
  hyper

SEQ ID NO: 277961 - DNA, 79 bp, Homo sapiens; identical to SEQ ID NO: 197316
  chr1:11715183-11715262
  hyper

SEQ ID NO: 277962 - DNA, 115 bp, Homo sapiens; identical to SEQ ID NO: 197317
  chr1:11740565-11740680
  hyper

SEQ ID NO: 277963 - DNA, 37 bp, Homo sapiens; identical to SEQ ID NO: 197318
  chr1:11751778-11751815
  hyper

SEQ ID NO: 277964 - DNA, 154 bp, Homo sapiens; identical to SEQ ID NO: 226706
  chr1:11796158-11796312
  hyper

SEQ ID NO: 277965 - DNA, 325 bp, Homo sapiens; identical to SEQ ID NO: 226707
  chr1:11865775-11866100
  hyper

SEQ ID NO: 277966 - DNA, 178 bp, Homo sapiens; identical to SEQ ID NO: 197319
  chr1:11866366-11866544
  hyper

SEQ ID NO: 277967 - DNA, 231 bp, Homo sapiens; identical to SEQ ID NO: 226709
  chr1:11994683-11994914
  hyper

SEQ ID NO: 277968 - DNA, 234 bp, Homo sapiens; identical to SEQ ID NO: 226710
  chr1:12040194-12040428
  hyper

SEQ ID NO: 277969 - DNA, 132 bp, Homo sapiens; identical to SEQ ID NO: 102580
  chr1:12079273-12079405
  hyper

SEQ ID NO: 277970 - DNA, 66 bp, Homo sapiens; identical to SEQ ID NO: 197322
  chr1:12123950-12124016
  hyper

SEQ ID NO: 277971 - DNA, 518 bp, Homo sapiens; identical to SEQ ID NO: 197323
  chr1:12226890-12227408
  hyper

SEQ ID NO: 277972 - DNA, 206 bp, Homo sapiens; identical to SEQ ID NO: 197324
  chr1:12227438-12227644
  hyper

SEQ ID NO: 277973 - DNA, 1778 bp, Homo sapiens; identical to SEQ ID NO: 226713
  chr1:12676998-12678776
  hyper

SEQ ID NO: 277974 - DNA, 304 bp, Homo sapiens; identical to SEQ ID NO: 197327
  chr1:12679083-12679387
  hyper

SEQ ID NO: 277975 - DNA, 264 bp, Homo sapiens; identical to SEQ ID NO: 197328
  chr1:13840257-13840521
  hyper

SEQ ID NO: 277976 - DNA, 108 bp, Homo sapiens; identical to SEQ ID NO: 197329
  chr1:13910927-13911035
  hyper

SEQ ID NO: 277977 - DNA, 161 bp, Homo sapiens; identical to SEQ ID NO: 197330
  chr1:14075414-14075575
  hyper

SEQ ID NO: 277978 - DNA, 31 bp, Homo sapiens; identical to SEQ ID NO: 226720
  chr1:14076277-14076308
  hyper

SEQ ID NO: 277979 - DNA, 184 bp, Homo sapiens; identical to SEQ ID NO: 197331
  chr1:14926204-14926388
  hyper

SEQ ID NO: 277980 - DNA, 507 bp, Homo sapiens; identical to SEQ ID NO: 197332
  chr1:15250613-15251120
  hyper

SEQ ID NO: 277981 - DNA, 225 bp, Homo sapiens; identical to SEQ ID NO: 197333
  chr1:15251274-15251499
  hyper

SEQ ID NO: 277982 - DNA, 94 bp, Homo sapiens; identical to SEQ ID NO: 197334
  chr1:15251580-15251674
  hyper

SEQ ID NO: 277983 - DNA, 810 bp, Homo sapiens; identical to SEQ ID NO: 197335
  chr1:15478882-15479692
  hyper

SEQ ID NO: 277984 - DNA, 333 bp, Homo sapiens
  chr1:15479777-15480110
  hyper
tgcctcggcgtctgcgcctggtgtgggaggaaagcgggtctcccagctccacttaaacccctaaaacctgggacttctagcttgagacattccccgaccaccacccgtcacacacacgcgcgtgcgcgcacacacgcatgcacaccgattctctgggccctagggaggaggggggatcagggctctattttctcccgaccccctcttatccaactcggctggcaagggttggggagaacttaggcccagcccccggcacacgctcagcgcgctccagcggcatacgctggggagtgggtgcccgcctcgctcagctgcgatccctcgcctcgg

SEQ ID NO: 277985 - DNA, 367 bp, Homo sapiens; identical to SEQ ID NO: 197338
  chr1:15480226-15480593
  hyper

SEQ ID NO: 277986 - DNA, 48 bp, Homo sapiens; identical to SEQ ID NO: 197339
  chr1:15480892-15480940
  hyper

SEQ ID NO: 277987 - DNA, 199 bp, Homo sapiens
  chr1:15481065-15481264
  hyper
cagcacccagcaagcactcagcggtaagttacgttaccgggcctaggggagagcagagtacaaatcagatctcaaatcagcgcacaaacgggaggcgcttggcccggcgcgcctggtctgcattacaggataatggtctctttcccaaccagcggtgggggcgagagacctggcccctcccccacggtttccccaggga

SEQ ID NO: 277988 - DNA, 238 bp, Homo sapiens
  chr1:15573761-15573999
  hyper
ggtgccgggtgcgagctggagactccgcgggagcgcggccgggaggcttcgccccggagctggcccgacgcctcccgagctggcagggctctcggcggaggtcggagcgtgggcttcctcctcccgccaggtgagtgcggcgcgggaaggggtggcgggccgagaccggggaccggaaggggcggcccagcgaggactagccctggcaggaggaggggtggctccccggccccatcct

SEQ ID NO: 277989 - DNA, 74 bp, Homo sapiens
  chr1:15574029-15574103
  hyper
ccccagtagctaccccaacaccagcccctcctttccagatgcaggccccaccccgcccgcggaggaagcccccg

SEQ ID NO: 277990 - DNA, 290 bp, Homo sapiens; identical to SEQ ID NO: 226727
  chr1:15735866-15736156
  hyper

SEQ ID NO: 277991 - DNA, 70 bp, Homo sapiens; identical to SEQ ID NO: 226728
  chr1:15736985-15737055
  hyper

SEQ ID NO: 277992 - DNA, 302 bp, Homo sapiens; identical to SEQ ID NO: 226729
  chr1:15852991-15853293
  hyper

SEQ ID NO: 277993 - DNA, 151 bp, Homo sapiens
  chr1:15905373-15905524
  hyper
agggatccaaggtcgtggaagagccccggatgccaatctgcaccacacgcttacagtccaggagaccctcatccacacaccggcggaagggcgccccgtggtagagcttctctcctagggccttgtcggtcgtgtccgtgtgcgcatccac

SEQ ID NO: 277994 - DNA, 75 bp, Homo sapiens
  chr1:15928914-15928989
  hyper
aacaaaaaaactctatgatattccaatgatagattcacctaagatgcatttctcatatctctgttaaacaatgca

SEQ ID NO: 277995 - DNA, 208 bp, Homo sapiens
  chr1:15929019-15929227
  hyper
atgtctgaaaacaaagggcactgaaacctgtttgttcactttagttcacaggctgattagaaaagtaagtaaaatccaatccaaatataaattaaatacacgtgaaataccaaaccctctagtaaacagcgagctacatacaagtcccagacactccacgaccgtttctagattgaaaatcctaggccaggcgcagtggctcacacct

SEQ ID NO: 277996 - DNA, 163 bp, Homo sapiens; identical to SEQ ID NO: 226730
  chr1:16011276-16011439
  hyper

SEQ ID NO: 277997 - DNA, 133 bp, Homo sapiens; identical to SEQ ID NO: 197341
  chr1:16085155-16085288
  hyper

SEQ ID NO: 277998 - DNA, 45 bp, Homo sapiens; identical to SEQ ID NO: 226732
  chr1:16174336-16174381
  hyper

SEQ ID NO: 277999 - DNA, 216 bp, Homo sapiens; identical to SEQ ID NO: 226733
  chr1:16175858-16176074
  hyper

SEQ ID NO: 278000 - DNA, 233 bp, Homo sapiens; identical to SEQ ID NO: 226734
  chr1:16302447-16302680
  hyper

SEQ ID NO: 278001 - DNA, 212 bp, Homo sapiens; identical to SEQ ID NO: 226735
  chr1:16399670-16399882
  hyper

SEQ ID NO: 278002 - DNA, 1218 bp, Homo sapiens
  chr1:16481258-16482476
  hyper
aaaaaaaaaaaaaaaaagaaggaaacttctcaccggcccaagtttcctcccggcttcccccttgtggagcctgcggaaacctcgctctgcccaggcaggaggggaagccttgccctcactgttggaaattgaagctggcctgggctgggtggacaggaaggtcttcggccagggcaggagcccccatcctcgccctgaccctagcggagggacaacacccccaccacgcacccgctgcgccatgagcaaagtctgcggcccctcactcggcgcggctccgggaacactggggcgggggtgggtgattcagtcccccacccccgggtgtcctgactccctggtggccctgggctgacagctccacaccttgggaggccgcacccccacctgccgcatttcctcgttctgagtcacccttgctcagaacgcttgactttgggacttcctgtccgcactcgcggcccctaacctgccccgggagcccgggagtgcggcttgggaaggagggaaaggagtgtgtgagcagggattggcccgaacctatctccacgctctcccccgggactggaggtgaaggggggcgtggagaaaatctcagggaacaggggcttcgacagggggctcccgcccgcccgagccccctccccaaaatgcgaggcctgcacagtatgccttctccgcaaaacctcggcaagcgggttagtgaattcaggtcactaagaagctgagcccgcggaaagctgcccaaacacccccttctctaggggactccccacgccccccgccgggacgcgttcccgaagtcgccgcctggactgcaaccgcgtggcctgcgccgcgtcctcttctccgcagcctccgaggcccgtgcgaccaagctgaaaccgcttattctccggagcccctatgaccccgggtgggggccagggctcgcctcgatcgcagcccgtgcgccctccggactccagttcgccgggactgggcgacaccaggtaggttccaaagttgcgcgcgtcaaggagcgccgggctctagggggcactggggcccgggggccaggggtccagacgccgcgcgcactcaccttccttgccctgcgccgccgcggccgcggccagcgcacagccccacagcagggcgaagcaggcgcgggctgcctggagctccatgccgcgcttctcgctctcggtccgatccccccgagcccggctcccgcac

SEQ ID NO: 278003 - DNA, 251 bp, Homo sapiens; identical to SEQ ID NO: 197343
  chr1:16482544-16482795
  hyper

SEQ ID NO: 278004 - DNA, 68 bp, Homo sapiens; identical to SEQ ID NO: 197344
  chr1:16514366-16514434
  hyper

SEQ ID NO: 278005 - DNA, 40 bp, Homo sapiens
  chr1:16542925-16542965
  hyper
tggtcattatgttgcgggtggggccggggtccgcctgcct

SEQ ID NO: 278006 - DNA, 127 bp, Homo sapiens; identical to SEQ ID NO: 221244
  chr1:16558626-16558753
  hyper

SEQ ID NO: 278007 - DNA, 304 bp, Homo sapiens; identical to SEQ ID NO: 226740
  chr1:16563566-16563870
  hyper

SEQ ID NO: 278008 - DNA, 63 bp, Homo sapiens; identical to SEQ ID NO: 226741
  chr1:16679106-16679169
  hyper

SEQ ID NO: 278009 - DNA, 145 bp, Homo sapiens; identical to SEQ ID NO: 226742
  chr1:16693549-16693694
  hyper

SEQ ID NO: 278010 - DNA, 43 bp, Homo sapiens; identical to SEQ ID NO: 226743
  chr1:16766996-16767039
  hyper

SEQ ID NO: 278011 - DNA, 543 bp, Homo sapiens
  chr1:17445314-17445857
  hyper
cctgccccagtccccggcaagtctccgcggaagctccgctgaactgggagtgggaagcaggagaggggctgggttgaggtgggtccgaggggaagtgaggtgcggaggggaagtgaaaggggagaggacggcagggaagctgaaggggtgtgaggtcccccgggaggagaactggagagggccagacggagggttacgggtgaaagggagggtctgtgagggagctggggctgaggctgtgttagggggtctgggagagtctcagggtttctggaaggtggacacaaggttcgggggttgtcaggtttctggatgagattcttaggatttctgggctcgggggctcgggatgagggacaactcgggctggacaaaggctgtccacgtccccgagtctgagcgcgtctcaggatttctgggctcgagatctcggcccgggcatcacggtgggccggctcacctgtagacatcggtccagaggtaggtgcccagcacgtacaccgcctccacgcggctcccgtactgcagccgcacggtccgctc

SEQ ID NO: 278012 - DNA, 165 bp, Homo sapiens; identical to SEQ ID NO: 197346
  chr1:17445943-17446108
  hyper

SEQ ID NO: 278013 - DNA, 208 bp, Homo sapiens; identical to SEQ ID NO: 197347
  chr1:17591036-17591244
  hyper

SEQ ID NO: 278014 - DNA, 322 bp, Homo sapiens; identical to SEQ ID NO: 226746
  chr1:17766205-17766527
  hyper

SEQ ID NO: 278015 - DNA, 731 bp, Homo sapiens; identical to SEQ ID NO: 197348
  chr1:17865970-17866701
  hyper

SEQ ID NO: 278016 - DNA, 217 bp, Homo sapiens
  chr1:18434092-18434309
  hyper
ccctgcaataaatcggcttagcggacgagagccgaacagcccagaaaggattaaagaaaagtctgtataatacgcggagagcgcggcgaggggagggcaaggagggcgggggggcggggagagggggagggacggagggagggcgagaggaggggggtgctcgcgccgccgggagaggcgagcgcgaggcagagagcgcgattcggctccaaactcc

SEQ ID NO: 278017 - DNA, 34 bp, Homo sapiens; identical to SEQ ID NO: 197350
  chr1:18434816-18434850
  hyper

SEQ ID NO: 278018 - DNA, 308 bp, Homo sapiens; identical to SEQ ID NO: 197351
  chr1:18435565-18435873
  hyper

SEQ ID NO: 278019 - DNA, 182 bp, Homo sapiens
  chr1:18957613-18957795
  hyper
ctccgcagtctccgggctcggaaactttggccccgagcgccagagcgccagagcgcgagagcgcggcgctcgccactctgaggctggcggcctcgattccggccgcgttcccccggcccccctccgccgcggggcctggtctccgggttctgccaggcgcatcagcccgcacaacttctggc

SEQ ID NO: 278020 - DNA, 400 bp, Homo sapiens
  chr1:18958429-18958829
  hyper
gggctgaaattctggtagatttggactcctagtaaatatcaggtcctggtgaatttcagctctttccactatttccagacacttcttccctgacagtttctcggctctcctggctcgctggctgccagctttctactcttgttttgaattattttttccacccccgggattggtcttccagtcctttatttcgaaccacctaccatgggtgatactttatatgcctcaactaccacggctatccatttcttccgaagccacagtcaaacactcctgcttttccgcctggaaacaaactaattggaaataataattagtaatgattttccccctaaaactttttactcgggcttccgcactctggaaatctcccgggagagaacctctaaacggcgaggtt

SEQ ID NO: 278021 - DNA, 57 bp, Homo sapiens
  chr1:18960804-18960861
  hyper
ccgcttggccaaggccgggtcaatcagctgggaggggtcttcatcaatgggcgaccc

SEQ ID NO: 278022 - DNA, 306 bp, Homo sapiens
  chr1:18963947-18964253
  hyper
catgggaacccgcagactgatggctttggaaaaagtggcgagtgccctggaacctgaaagcttgcaaaaagccagtgttgtttcagtctcccttcagaggtttctcccagcacccctctcctcacgacccaagcactcctagcccaggtctctctccagttctcagaagaccctcccaaccttgaagatgaacttcacagacaaagccggcttactaagacaactcccatctacgcccagcccccacaggcgtggtccgaggaggaaggatgggtggccgggcagccccgtgtgacagcggcctgg

SEQ ID NO: 278023 - DNA, 138 bp, Homo sapiens; identical to SEQ ID NO: 226760
  chr1:18965006-18965144
  hyper

SEQ ID NO: 278024 - DNA, 338 bp, Homo sapiens
  chr1:18966697-18967035
  hyper
agcccggagtgtcggttttagacacttgtaaaaggaggtgggaaacaatttaatttggcagcagcgatagctgctaatgcggttttcggtcgtttgctacactggaggaagctgttttgattgtgtgtacaaggacctgccaaatttaattaggctccgggggagcgagtgaataggggaaggggggcacggctcccctcagcccacaccattttttcggcttcacacctggaagggacattgtttacgggatcttcgaaaaccaggaaggggcgggggcggagagggacaggagccttggaagcgggggcgagggaggggacgaggatagtccattt

SEQ ID NO: 278025 - DNA, 753 bp, Homo sapiens
  chr1:18967250-18968003
  hyper
ccggctttaggcagcgctcggcggtggatatccagtgcgaccagagggagagagggagggggcgctggaggggcgcgccgggccgggggctgggggggatggggcgagcggagaggggcgtgcggagctgggaacgtcccggcggagggggctcccggcggagggggctcccggcgaggggccgagcccacactgggctgacaaggctccccttttcttccctccatccccccaaccgaagaagagagagggggaggcgggagcagagactaacgagaaacaacaatgaggagataactattacaaaggcaaacactggcgctcgcgcgctcgcagccccagaacccgcggtaaataaacaaagtctgcaaactgtttgctagataaactcgtgcctaaattgagtgtgacgagcaaggagagaagagacagaaggagataaggttggagggggatgaatgagcataatctaatagaagacatttagaaaacaaactttaaacaagggagaacaggcgagcggagggcaattatccgccccagagagcgggggaagccgtcggaggtctgggaaggggtggaagggaggggactgggagctgcggaagagctgagtgttggggggtgcctttgggactccgtggggagccaagaggggctccccagggcgcgcaagaaaagaggctcggttcccggattgagtgaggttcccgtgctcagccggtcttggaacgcaggcacgtctgaaccggg

SEQ ID NO: 278026 - DNA, 310 bp, Homo sapiens
  chr1:18968132-18968442
  hyper
gatatttaccagtttgaaataagcctggctaagaagaagagagaagagagacattgaaaagacgaggctgggggaagacttcaaacgaattcatcatttggaatggtggaggggagatttaccagacagtattgggaagttatttagatattaataacacattttcctgaggcgcgaccacagcagccatctgcgctgctctcggagctatttggctgggtaaaatatgggcgtctcaaatgttgggaagagataacgcaatcaggctaaccctggtcctgagactgcatcgcagcgttaaacccggatt

SEQ ID NO: 278027 - DNA, 65 bp, Homo sapiens; identical to SEQ ID NO: 226765
  chr1:18969252-18969317
  hyper

SEQ ID NO: 278028 - DNA, 90 bp, Homo sapiens; identical to SEQ ID NO: 197357
  chr1:18971626-18971716
  hyper

SEQ ID NO: 278029 - DNA, 34 bp, Homo sapiens; identical to SEQ ID NO: 197358
  chr1:18972083-18972117
  hyper

SEQ ID NO: 278030 - DNA, 31 bp, Homo sapiens; identical to SEQ ID NO: 197359
  chr1:18972422-18972453
  hyper

SEQ ID NO: 278031 - DNA, 49 bp, Homo sapiens
  chr1:18972901-18972950
  hyper
ggtcttttccgtctcggcggtacctgagcctcagtttccctatctgatt

SEQ ID NO: 278032 - DNA, 284 bp, Homo sapiens
  chr1:18973113-18973397
  hyper
gtccccgctcgcgcctcaatggccactttagaaatacaaacaactttagaaataaagtaaccaaacccccgaaagcggctttgaagaggcgaatgcctggtggcgctttactatggtgtgggccgaggccccggcctaatcccgctttcatttccaccgacggccgcgggggaagcgctcccggcctcccggcccctcaggaggctgattaggccacaaagagcccccattatcccgagaagaaaaccggggggcggcgcggggcggcgcggcgcggggggagc

SEQ ID NO: 278033 - DNA, 32 bp, Homo sapiens
  chr1:18978535-18978567
  hyper
cccatcaaggctcaccggccccctggcaggag

SEQ ID NO: 278034 - DNA, 209 bp, Homo sapiens
  chr1:19043143-19043352
  hyper
aatacctccagcctgggtcctctctccacccactccattctctcaaaccctcatttccctctttgcctgcctcctcccatagctggcctcgcctctacccattctcttccccctaatctctctcattctcctctcctctctcattccgcacccaacaaacacctcttccccctccatcttcagcccctgcgcgccccccttgcccttgc

SEQ ID NO: 278035 - DNA, 223 bp, Homo sapiens; identical to SEQ ID NO: 226772
  chr1:19229114-19229337
  hyper

SEQ ID NO: 278036 - DNA, 224 bp, Homo sapiens; identical to SEQ ID NO: 226773
  chr1:19229565-19229789
  hyper

SEQ ID NO: 278037 - DNA, 307 bp, Homo sapiens; identical to SEQ ID NO: 226774
  chr1:19283562-19283869
  hyper

SEQ ID NO: 278038 - DNA, 114 bp, Homo sapiens; identical to SEQ ID NO: 226775
  chr1:19536946-19537060
  hyper

SEQ ID NO: 278039 - DNA, 125 bp, Homo sapiens; identical to SEQ ID NO: 226776
  chr1:19577871-19577996
  hyper

SEQ ID NO: 278040 - DNA, 222 bp, Homo sapiens; identical to SEQ ID NO: 226777
  chr1:19578598-19578820
  hyper

SEQ ID NO: 278041 - DNA, 74 bp, Homo sapiens
  chr1:19600653-19600727
  hyper
tttagggactggctcgggccgcgcccaccggtggtggagcggagggcgcggccaaaggtgcccaacgccgccca

SEQ ID NO: 278042 - DNA, 325 bp, Homo sapiens; identical to SEQ ID NO: 197362
  chr1:19639187-19639512
  hyper

SEQ ID NO: 278043 - DNA, 241 bp, Homo sapiens; identical to SEQ ID NO: 226779
  chr1:19812417-19812658
  hyper

SEQ ID NO: 278044 - DNA, 284 bp, Homo sapiens; identical to SEQ ID NO: 221254
  chr1:19991372-19991656
  hyper

SEQ ID NO: 278045 - DNA, 167 bp, Homo sapiens; identical to SEQ ID NO: 197363
  chr1:20002971-20003138
  hyper

SEQ ID NO: 278046 - DNA, 215 bp, Homo sapiens; identical to SEQ ID NO: 197364
  chr1:20512799-20513014
  hyper

SEQ ID NO: 278047 - DNA, 34 bp, Homo sapiens; identical to SEQ ID NO: 35179
  chr1:20692995-20693029
  hyper

SEQ ID NO: 278048 - DNA, 270 bp, Homo sapiens; identical to SEQ ID NO: 197366
  chr1:20810324-20810594
  hyper

SEQ ID NO: 278049 - DNA, 259 bp, Homo sapiens; identical to SEQ ID NO: 197367
  chr1:20810930-20811189
  hyper

SEQ ID NO: 278050 - DNA, 67 bp, Homo sapiens; identical to SEQ ID NO: 197368
  chr1:20811219-20811286
  hyper

SEQ ID NO: 278051 - DNA, 557 bp, Homo sapiens
  chr1:20811755-20812312
  hyper
cccggcgccgaagaagttgttggtgtcctgcaggcggcaggagaagatctggcccacgtcgccgccgtcgccgtaggggctcagcttctcgtcgccgtagggcagcacctccgacatggtcgcgtccgggggctccgccgcggcgcctcctccgcccgcgtccccgcccgcggcggacagggtcagcggcgctggggccgggggcggccggccggggacggcccgcgggctgctgcggcggtggcgccggcgagaggccgggggacgccgctagggcaagagcgcggcactcgcgcgagcggcccggagagcgcccgcggctgcgctgcgctgcgctccggctccgcgcgcgagtggctgctgctccgccagaggcgagcaggactcacatcctcggcgcgctggggctctgggcgggggccgggccgggcggggccgcgagccgggagggaggagacgtccctgcgagcccggagggcgcgggaccgaggagggcgcaccccgggagccgggcgggccggtcctgcggcgagtgcgggcggcggcgccggttcggg

SEQ ID NO: 278052 - DNA, 140 bp, Homo sapiens; identical to SEQ ID NO: 197371
  chr1:20812696-20812836
  hyper

SEQ ID NO: 278053 - DNA, 147 bp, Homo sapiens
  chr1:20813050-20813197
  hyper
gcggggcaaagatcggagggctccagggcgacccgcggacatagcctcccccgccatctgcaaaccggggagcccttcctccccaccacacttgctccccaattcagaccctgagggcccagccactggggcctcacactctcctcc

SEQ ID NO: 278054 - DNA, 173 bp, Homo sapiens; identical to SEQ ID NO: 35188
  chr1:20813270-20813443
  hyper

SEQ ID NO: 278055 - DNA, 178 bp, Homo sapiens; identical to SEQ ID NO: 197374
  chr1:20878727-20878905
  hyper

SEQ ID NO: 278056 - DNA, 77 bp, Homo sapiens; identical to SEQ ID NO: 197375
  chr1:20880637-20880714
  hyper

SEQ ID NO: 278057 - DNA, 300 bp, Homo sapiens
  chr1:20915863-20916163
  hyper
ggcagtggcaagagcgcggctctgtcccttcttcccccagtctccgctggaatgttcctaccctgccgactgccccagaccgcgctcaaatgtggcttaaatccagggtctttcaatgcttagaggactgggatgaggaaggaagttggatgggaggcaggaaggggaggccataaatcaaaaacatcaacagtcctggggtgcaggcagggagagcgttcgtgctttcccagcctcggatatgtctggcaccttactgaggcttccacaacactaagtccacacctcctgcccactgac

SEQ ID NO: 278058 - DNA, 147 bp, Homo sapiens
  chr1:20916256-20916403
  hyper
cctgggctggaggttccccaaagccctgctctcttccttccacccactgtgctcagtgctggccagggtggtgacgtgtttgtcgggggtggtcggtggagaatcttggaggagaaaagccagctgggctttcggagtccagcagtg

SEQ ID NO: 278059 - DNA, 92 bp, Homo sapiens; identical to SEQ ID NO: 197376
  chr1:20959849-20959941
  hyper

SEQ ID NO: 278060 - DNA, 408 bp, Homo sapiens; identical to SEQ ID NO: 197377
  chr1:20987844-20988252
  hyper

SEQ ID NO: 278061 - DNA, 179 bp, Homo sapiens; identical to SEQ ID NO: 226795
  chr1:21044550-21044729
  hyper

SEQ ID NO: 278062 - DNA, 56 bp, Homo sapiens
  chr1:21058207-21058263
  hyper
gaggcccctgaggggcgggcgcgggggtgcgaagcgctccagagtgggctgccggt

SEQ ID NO: 278063 - DNA, 218 bp, Homo sapiens
  chr1:21058417-21058635
  hyper
cctcactcccgagaccctcccgcgcccgtgtcagcgtaccaagccccccgcccctgcccggctcccggcgctcgctcaccgcctctcgagtccggtcccggccgctccggcccgcgacccccgcgtctcccgccgccgcagccccgcgcctgggtgcccgcttcccgccgcccccgaccccggtccccgcgcccccacacgtggccgcgggaaccgac

SEQ ID NO: 278064 - DNA, 573 bp, Homo sapiens
  chr1:21058776-21059349
  hyper
gaggggctcgcccggagctcagaaggcacctcctcccgggctgggggcgctgaatcccccgcgcctcactcacgggtccctcctcctggagggcctctgcccctcccctctctggctggctcctccgcgtcatccgagccgcggctaccgcaccgcctcctccgggaagccttccacgaccaccactcacgcttcattctctgcagagcccttgtgactccgttgctcgcctgtcatccctctcctcttactcgaggacaagtgacactggaccggagtgtctccgttcccagtgtgaaggatcgagcctggctcggaggaggcgctcagggtggttcgggcccggcccttgtgagtggagggtcgttgcgcatcctcctcctcactttcttcctgccgggacgttctcagccgggaactgacagatcctgcttagcccggggcccagcactgagaaatctgggaaggaacgttgctcaccgcacatgggccgtggccccatccttcgggccctttaggtggggaatcgggctagcagctccagccacggcactgggacggggagcgctatcg

SEQ ID NO: 278065 - DNA, 265 bp, Homo sapiens; identical to SEQ ID NO: 226798
  chr1:21503350-21503615
  hyper

SEQ ID NO: 278066 - DNA, 370 bp, Homo sapiens; identical to SEQ ID NO: 197378
  chr1:21563147-21563517
  hyper

SEQ ID NO: 278067 - DNA, 94 bp, Homo sapiens; identical to SEQ ID NO: 226799
  chr1:21672239-21672333
  hyper

SEQ ID NO: 278068 - DNA, 99 bp, Homo sapiens
  chr1:21835634-21835733
  hyper
ggctgggctggggcagcccggaggcagagagaccgagagtgcggggcgggcgagggacgccagggccgcgtcaccccagcccgttcctagctccgctcc

SEQ ID NO: 278069 - DNA, 150 bp, Homo sapiens
  chr1:21835765-21835915
  hyper
cggcccgcggggcgcggggctcgggccgggggcggggccggggccgggctggggaggggttggggccgggggcgggggagggggcgggctgcccgggcctcactcgggccccgcggccgcctttataaggcggcgggggtggtggcccgg

SEQ ID NO: 278070 - DNA, 50 bp, Homo sapiens; identical to SEQ ID NO: 197380
  chr1:22263555-22263605
  hyper

SEQ ID NO: 278071 - DNA, 101 bp, Homo sapiens; identical to SEQ ID NO: 226804
  chr1:22350998-22351099
  hyper

SEQ ID NO: 278072 - DNA, 220 bp, Homo sapiens; identical to SEQ ID NO: 226805
  chr1:22351399-22351619
  hyper

SEQ ID NO: 278073 - DNA, 45 bp, Homo sapiens; identical to SEQ ID NO: 226806
  chr1:22469043-22469088
  hyper

SEQ ID NO: 278074 - DNA, 168 bp, Homo sapiens; identical to SEQ ID NO: 226807
  chr1:22746912-22747080
  hyper

SEQ ID NO: 278075 - DNA, 575 bp, Homo sapiens
  chr1:23036966-23037541
  hyper
cagccgcgccagacgctctccggctttgcagcattcaataaaaattgagaaacatttgggctgaaatcgctgctttatctggaggagccacagcgccgggagagaccactgctgcgcggggggagcccggggtctcagtggcccgggcacgcggggtcgccgcgctccagcgcccgcgctgcccccgggtgaccctacgggcgcggtgtggggacccgggctcgcggcggcgcgcggccgccgggggccgggacgcgcgcggggggcggtggcctggcgaggctccccccgcgcccgcggctcaggtgggccgtgcccagcgctggcggagcccgggtccccgttctgcccgggctggatggctcattctgctggctgcgcggtggcggcggctgtgtgtgcgccgcgccttgccgccccccctggccccccgagcccggggcgcgcgctcccgcccgggccgtccgggccccgcggcgccgcggcccgaggccccgggaagcgcagccatggctctgcggaggctgggggccgcgctgctgctgctgccgctgctcgccgccgtggaaggtgag

SEQ ID NO: 278076 - DNA, 582 bp, Homo sapiens
  chr1:23037595-23038177
  hyper
cgccggcgcccacctccgctccgcggcccgcaaagtttgcccgggggccggcgccgggcgcaggtggccgcggggaggtgtgtccggccgcgccgggaggagcgggccccgcgggcgcccggggagcggcgggcgctgattgactgtgccaggaggaggcgaagggaccatcttgccgaggctttgtagccagcccggcgagcgccgcccagggctgggggctgcccacgcgcgctcgccgcccccggctcgggcagccgcctcgcgccggcctggtcttgctccgcacagggtggaggggcgcgggcccggccgtggcggggggcggggggggcgccggcgctcggtcggggctggaaagtttggcagggagcagagggagggaggcaccgcggccggccggggtgggggctcccggcccgcgcccccgagatggggcccggcgccccggagagcagggactggcagagtggaagggagcgcgccagcccccgcgtcggtgcctgcccatcgcccgcggcgtacaatggggtcccctccccgagaggactgcgcgggggatgggtctgtgggcatctctcc

SEQ ID NO: 278077 - DNA, 108 bp, Homo sapiens; identical to SEQ ID NO: 197382
  chr1:23038250-23038358
  hyper

SEQ ID NO: 278078 - DNA, 48 bp, Homo sapiens
  chr1:23280132-23280180
  hyper
cggcgtgcccgtctcgttggcgaagtaggcgcccgggcaggccagcag

SEQ ID NO: 278079 - DNA, 169 bp, Homo sapiens; identical to SEQ ID NO: 102782
  chr1:23280211-23280380
  hyper

SEQ ID NO: 278080 - DNA, 135 bp, Homo sapiens; identical to SEQ ID NO: 197383
  chr1:23345695-23345830
  hyper

SEQ ID NO: 278081 - DNA, 181 bp, Homo sapiens; identical to SEQ ID NO: 197384
  chr1:23346189-23346370
  hyper

SEQ ID NO: 278082 - DNA, 167 bp, Homo sapiens; identical to SEQ ID NO: 197385
  chr1:23495361-23495528
  hyper

SEQ ID NO: 278083 - DNA, 149 bp, Homo sapiens
  chr1:23543645-23543794
  hyper
tggcgcgcgcccgtccgagggcacagagaggcgggacgccccgggcccccgaggccccaggaggggcgccgctcccggcctcagttccccgcggacggccgctggggccaggctgcagacgcggccccgagagcttacccgctgcccgg

SEQ ID NO: 278084 - DNA, 52 bp, Homo sapiens; identical to SEQ ID NO: 35231
  chr1:23543840-23543892
  hyper

SEQ ID NO: 278085 - DNA, 145 bp, Homo sapiens; identical to SEQ ID NO: 226815
  chr1:23670873-23671018
  hyper

SEQ ID NO: 278086 - DNA, 257 bp, Homo sapiens; identical to SEQ ID NO: 226816
  chr1:23694766-23695023
  hyper

SEQ ID NO: 278087 - DNA, 212 bp, Homo sapiens; identical to SEQ ID NO: 226817
  chr1:23695333-23695545
  hyper

SEQ ID NO: 278088 - DNA, 233 bp, Homo sapiens; identical to SEQ ID NO: 226818
  chr1:23696195-23696428
  hyper

SEQ ID NO: 278089 - DNA, 50 bp, Homo sapiens; identical to SEQ ID NO: 197387
  chr1:23749161-23749211
  hyper

SEQ ID NO: 278090 - DNA, 62 bp, Homo sapiens; identical to SEQ ID NO: 226820
  chr1:23857274-23857336
  hyper

SEQ ID NO: 278091 - DNA, 197 bp, Homo sapiens; identical to SEQ ID NO: 197388
  chr1:23857853-23858050
  hyper

SEQ ID NO: 278092 - DNA, 77 bp, Homo sapiens; identical to SEQ ID NO: 197389
  chr1:23884855-23884932
  hyper

SEQ ID NO: 278093 - DNA, 66 bp, Homo sapiens; identical to SEQ ID NO: 197390
  chr1:23885004-23885070
  hyper

SEQ ID NO: 278094 - DNA, 473 bp, Homo sapiens
  chr1:23885100-23885573
  hyper
ttggaattgacactagctgggagggggctgccgaagacagctccctatacaacatggaacagaaagacttgtatttagtcggacccatgtctactttgccagaccctcggccactgcgggagggcagggcccaggcgcatttaaggcttaaatgcacatcacatggaaactgactctgccattcatttgatgcaaccatgggcaagtcacttgtccctctctggcctcagtttccctaaaccgagtgagtggcaatttttcaaaacgtctgccaactccaggacttgccgtttaaacctccctctccaagagaggagatactcacctggaggtgtcaggacacggccgagtcagtggcaaaagctccttttgtcgttggagatgacaagttccggagtgagctcggctgtctgattagaggaaaagagggaagagttacgcgaggcaatcgggagctccgagggtcccgcagc

SEQ ID NO: 278095 - DNA, 70 bp, Homo sapiens; identical to SEQ ID NO: 226823
  chr1:23889004-23889074
  hyper

SEQ ID NO: 278096 - DNA, 82 bp, Homo sapiens; identical to SEQ ID NO: 226824
  chr1:24018073-24018155
  hyper

SEQ ID NO: 278097 - DNA, 203 bp, Homo sapiens; identical to SEQ ID NO: 226825
  chr1:24069635-24069838
  hyper

SEQ ID NO: 278098 - DNA, 95 bp, Homo sapiens; identical to SEQ ID NO: 226826
  chr1:24117384-24117479
  hyper

SEQ ID NO: 278099 - DNA, 380 bp, Homo sapiens; identical to SEQ ID NO: 197392
  chr1:24126329-24126709
  hyper

SEQ ID NO: 278100 - DNA, 238 bp, Homo sapiens; identical to SEQ ID NO: 226829
  chr1:24194293-24194531
  hyper

SEQ ID NO: 278101 - DNA, 268 bp, Homo sapiens
  chr1:24229167-24229435
  hyper
gtgcacgtcggccacgagctcgttgttgaacatgagcgcgttcctctcgcgcagcgtgggggaccgcgccatttggggctctccgggtggttgttgccaagtgtgggctgcgcgggcgcgggcgcgggggcgcggtgcaggctgcgctgcccggccttcctgcccacggcggcgccggcgttgctgtgggctaggaccgcggccgcggcgctggcggggacgtagagctccgccgccatcctcgagggcggggcgtcgggggcagcct

SEQ ID NO: 278102 - DNA, 206 bp, Homo sapiens; identical to SEQ ID NO: 226830
  chr1:24477069-24477275
  hyper

SEQ ID NO: 278103 - DNA, 228 bp, Homo sapiens; identical to SEQ ID NO: 226831
  chr1:24513459-24513687
  hyper

SEQ ID NO: 278104 - DNA, 490 bp, Homo sapiens; identical to SEQ ID NO: 197394
  chr1:24648342-24648832
  hyper

SEQ ID NO: 278105 - DNA, 58 bp, Homo sapiens; identical to SEQ ID NO: 226833
  chr1:24739844-24739902
  hyper

SEQ ID NO: 278106 - DNA, 260 bp, Homo sapiens; identical to SEQ ID NO: 226834
  chr1:24742004-24742264
  hyper

SEQ ID NO: 278107 - DNA, 809 bp, Homo sapiens
  chr1:24882101-24882910
  hyper
tacagctggaatctcgacagcctggggaggaaggagcctttgatcctacagcggcaagagttcttgacacttgccggctgccaagcctgtttcctcccggtctaacgttctgtggttgtctgaatctccagctgcccctcaaaaccttcaatcagattagcgccgtgctcctttaaagaccctactcaaagtgcctggagctcacctgggtgtgtttgtgaggccctttccctctctttaccccgcggaggagtccgacctggaagcctcctgctggacttctctactggactgagtgcccgggagtgccagagccagtcccaaaaaggacccaggagcggggacaccacggggaggcgccgccactccagtgtgcgggaccctggcacccccggcgcgttctccggcctccccaggatcacctgcacggggcggggccgggggcgggacgccccgggcgggggcgggatcccagggtggcagcgccgggcggcggcggggaccctggctgggagcgcggcggtgccggcgggaggccgagcggggctcgacagagcaggtaggaggcgcctggtcgccggggttgcccggggctgcggggagcgaggagcggtccggcccaggtgcggtggcttcctgtccacctgccggccgcgctgggcgaaggagggcccgggggtggggacgaggggtccccagtctcacccccacatctgttggaggaagtgcctggggtctgcgcgggagggcgttggtccggggtggtgggagggaggctgatcatctccagtgggtcttggagacgaggt

SEQ ID NO: 278108 - DNA, 94 bp, Homo sapiens; identical to SEQ ID NO: 226836
  chr1:24969452-24969546
  hyper

SEQ ID NO: 278109 - DNA, 172 bp, Homo sapiens; identical to SEQ ID NO: 226837
  chr1:24969956-24970128
  hyper

SEQ ID NO: 278110 - DNA, 338 bp, Homo sapiens; identical to SEQ ID NO: 226838
  chr1:25071297-25071635
  hyper

SEQ ID NO: 278111 - DNA, 334 bp, Homo sapiens; identical to SEQ ID NO: 197395
  chr1:25255277-25255611
  hyper

SEQ ID NO: 278112 - DNA, 100 bp, Homo sapiens
  chr1:25258918-25259018
  hyper
ccctgccagccgcggaggtgcgggcccggccgggctacagatgcgcgccagctgcggccccgggtgcaggcgcggcgaccgcccccgaggagctgccctt

SEQ ID NO: 278113 - DNA, 267 bp, Homo sapiens; identical to SEQ ID NO: 226841
  chr1:25559010-25559277
  hyper

SEQ ID NO: 278114 - DNA, 247 bp, Homo sapiens; identical to SEQ ID NO: 226842
  chr1:25757172-25757419
  hyper

SEQ ID NO: 278115 - DNA, 383 bp, Homo sapiens; identical to SEQ ID NO: 226843
  chr1:25869923-25870306
  hyper

SEQ ID NO: 278116 - DNA, 168 bp, Homo sapiens; identical to SEQ ID NO: 197396
  chr1:25870618-25870786
  hyper

SEQ ID NO: 278117 - DNA, 51 bp, Homo sapiens; identical to SEQ ID NO: 226844
  chr1:26147238-26147289
  hyper

SEQ ID NO: 278118 - DNA, 288 bp, Homo sapiens; identical to SEQ ID NO: 226845
  chr1:26185983-26186271
  hyper

SEQ ID NO: 278119 - DNA, 162 bp, Homo sapiens; identical to SEQ ID NO: 226846
  chr1:26202123-26202285
  hyper

SEQ ID NO: 278120 - DNA, 194 bp, Homo sapiens; identical to SEQ ID NO: 197397
  chr1:26232692-26232886
  hyper

SEQ ID NO: 278121 - DNA, 72 bp, Homo sapiens; identical to SEQ ID NO: 197398
  chr1:26248952-26249024
  hyper

SEQ ID NO: 278122 - DNA, 209 bp, Homo sapiens; identical to SEQ ID NO: 197399
  chr1:26249626-26249835
  hyper

SEQ ID NO: 278123 - DNA, 404 bp, Homo sapiens; identical to SEQ ID NO: 226849
  chr1:26324434-26324838
  hyper

SEQ ID NO: 278124 - DNA, 391 bp, Homo sapiens
  chr1:26372144-26372535
  hyper
atctgggctgcgccccaagggagagacggtccttgggccacagcccattatcttcgttccctcacctcaccccacccctcctgcatggtcccagctcaagccgcagccaaaaccaaccactgctaggatggcaaatgcggaggtgcgtcggctgccgccaaaattcccgcccgtccccaggctctcgccttaccggattgccggcctggcgtccaacagatgctgcttctccttggcctccatgcagtcccgcgccgagtcccggcagccgcgcagccgccccgccgagtgcgccctgaaagttgcgcgcgggactccgggtggcgctcacccacctgccccgagggccccgcgaggtgcgctcactccggcccggctcctgcggcccctg

SEQ ID NO: 278125 - DNA, 423 bp, Homo sapiens
  chr1:26372565-26372988
  hyper
tccggctctggctccgcgtgccaagcgctcccgtgtctcgggtcagccgctgcgccccgcggccgccggctttatccggccctcgccaacccgtgtgaagctgccgtcggcgcgtcgtgtgcaaaagcccgcggggaagggggggcggtcgccggctgcaaaaggcccggctgtggccccgcacacctgtgcctgcgcccatggggcccgcggagcccacctgccggccgcgagaagtttgccagccttcgcccggcgcggcgccgggtgttgctgagtgaggacggggtgacgcctgcgccccctctcccgcgcggggtgcgccgcctcgccgccgaaaagttctcgactttagtttgtagaaatccgctttggtggtcccgacggcaggaatgtggctccttgcctcggaagagggtctcc

SEQ ID NO: 278126 - DNA, 48 bp, Homo sapiens
  chr1:26373101-26373149
  hyper
gctaggagggtcctggggtggggtgggctgcgccgccctcaggctggg

SEQ ID NO: 278127 - DNA, 91 bp, Homo sapiens; identical to SEQ ID NO: 197400
  chr1:26560289-26560380
  hyper

SEQ ID NO: 278128 - DNA, 216 bp, Homo sapiens; identical to SEQ ID NO: 226853
  chr1:26633064-26633280
  hyper

SEQ ID NO: 278129 - DNA, 841 bp, Homo sapiens; identical to SEQ ID NO: 197401
  chr1:26662518-26663359
  hyper

SEQ ID NO: 278130 - DNA, 308 bp, Homo sapiens; identical to SEQ ID NO: 197402
  chr1:26735283-26735591
  hyper

SEQ ID NO: 278131 - DNA, 41 bp, Homo sapiens
  chr1:26735987-26736028
  hyper
agggccagggccgtgcactgagccccgggccattgtccatc

SEQ ID NO: 278132 - DNA, 79 bp, Homo sapiens
  chr1:26737102-26737181
  hyper
aggtgtcagagaccggagttgtgggggagggccggagctggagccggagggaaagggaggggaaaggagagggagggga

SEQ ID NO: 278133 - DNA, 413 bp, Homo sapiens; identical to SEQ ID NO: 226858
  chr1:26758410-26758823
  hyper

SEQ ID NO: 278134 - DNA, 253 bp, Homo sapiens; identical to SEQ ID NO: 226859
  chr1:26798709-26798962
  hyper

SEQ ID NO: 278135 - DNA, 106 bp, Homo sapiens; identical to SEQ ID NO: 197405
  chr1:26855980-26856086
  hyper

SEQ ID NO: 278136 - DNA, 152 bp, Homo sapiens; identical to SEQ ID NO: 226860
  chr1:26947306-26947458
  hyper

SEQ ID NO: 278137 - DNA, 78 bp, Homo sapiens; identical to SEQ ID NO: 197406
  chr1:27113546-27113624
  hyper

SEQ ID NO: 278138 - DNA, 537 bp, Homo sapiens; identical to SEQ ID NO: 197407
  chr1:27113714-27114251
  hyper

SEQ ID NO: 278139 - DNA, 99 bp, Homo sapiens; identical to SEQ ID NO: 226862
  chr1:27114661-27114760
  hyper

SEQ ID NO: 278140 - DNA, 57 bp, Homo sapiens; identical to SEQ ID NO: 226863
  chr1:27226966-27227023
  hyper

SEQ ID NO: 278141 - DNA, 143 bp, Homo sapiens; identical to SEQ ID NO: 226864
  chr1:27247998-27248141
  hyper

SEQ ID NO: 278142 - DNA, 125 bp, Homo sapiens; identical to SEQ ID NO: 197408
  chr1:27286497-27286622
  hyper

SEQ ID NO: 278143 - DNA, 33 bp, Homo sapiens; identical to SEQ ID NO: 197409
  chr1:27320114-27320147
  hyper

SEQ ID NO: 278144 - DNA, 120 bp, Homo sapiens; identical to SEQ ID NO: 226866
  chr1:27321040-27321160
  hyper

SEQ ID NO: 278145 - DNA, 313 bp, Homo sapiens
  chr1:27332673-27332986
  hyper
gcagtgtcaccaggcaggcgtaacggcgggctgcatctgccccaccgaagtgggcctccaggtagcgctctagggtgcgccgctgctccaccaggtctggaaagtcgatgaagaagcgggagcacatgtagcgctgcagggcgcgcacatcggtgctgggccggggccggaagccccgcaccaggaggtggcagtacttgaggaggccaccacctcggatctcctcgggactgcgcgtggcgatgacacggtgccgcaggtgctccagggcctcggtgaagtccccgtacaggctttcgcctgtgaccgttgg

SEQ ID NO: 278146 - DNA, 164 bp, Homo sapiens; identical to SEQ ID NO: 226867
  chr1:27560696-27560860
  hyper

SEQ ID NO: 278147 - DNA, 372 bp, Homo sapiens
  chr1:27718844-27719216
  hyper
cactcttccaccacgttccctgcagcctctctgagacttcaaggctctcgcaccggcgcctctgaaacccccggcccgcagagggcgccgcgtcaaggacagcgcgggcagactcgggagggggcggggccgcagccacggtcgctttttatgaatgggggagcgggcggtgcgaggccttattactatgccgcgcaacgcgcgctgcgccccagcgcgccgcgcccattggctgatcggaccgctgacgtcaccgaaccggtggccgggggcggggcggggtgactcacgccgcttctcccgcggccgcgggggcttctcggggtccacgcacgccctgcgccgccaggacccgagcggagcctccccgcg

SEQ ID NO: 278148 - DNA, 81 bp, Homo sapiens; identical to SEQ ID NO: 197411
  chr1:27816286-27816367
  hyper

SEQ ID NO: 278149 - DNA, 129 bp, Homo sapiens; identical to SEQ ID NO: 197412
  chr1:27816423-27816552
  hyper

SEQ ID NO: 278150 - DNA, 261 bp, Homo sapiens; identical to SEQ ID NO: 102924
  chr1:27816581-27816842
  hyper

SEQ ID NO: 278151 - DNA, 705 bp, Homo sapiens; identical to SEQ ID NO: 221279
  chr1:27901986-27902691
  hyper

SEQ ID NO: 278152 - DNA, 95 bp, Homo sapiens; identical to SEQ ID NO: 197415
  chr1:27928761-27928856
  hyper

SEQ ID NO: 278153 - DNA, 279 bp, Homo sapiens
  chr1:27929078-27929357
  hyper
cgccctcaagcagcgagcagagattcagcaattcaccccagctccctgcctagggggctgacagctgtcactcagcaccccaccccctggggaagagggggccgattcaatcagagccccagaggaaacgcattgataggcgattatttatttatttatgcaaaagtgagccgactttgttcgccaggtaaccgggcacgcggcccaacccctccagccctagccgcccccaaatccctcctccgccccacaccccctccgggtcattaggtccccgcc

SEQ ID NO: 278154 - DNA, 49 bp, Homo sapiens; identical to SEQ ID NO: 197417
  chr1:27960572-27960621
  hyper

SEQ ID NO: 278155 - DNA, 184 bp, Homo sapiens
  chr1:27961554-27961738
  hyper
ccacccgacgctgtcgcttacctggagcccaattctgcccggccccggggtgagccagccggggctccagcagccgcgagtgccggcgtgcggggagaactggggtgctgcccgcctctgaccgccgcccctgctgggcagggaggaggaagccgcctcggacttctcttattgcagtcacggc

SEQ ID NO: 278156 - DNA, 86 bp, Homo sapiens; identical to SEQ ID NO: 102936
  chr1:27961831-27961917
  hyper

SEQ ID NO: 278157 - DNA, 183 bp, Homo sapiens; identical to SEQ ID NO: 197418
  chr1:27986361-27986544
  hyper

SEQ ID NO: 278158 - DNA, 49 bp, Homo sapiens; identical to SEQ ID NO: 226875
  chr1:28099536-28099585
  hyper

SEQ ID NO: 278159 - DNA, 97 bp, Homo sapiens; identical to SEQ ID NO: 226876
  chr1:28157658-28157755
  hyper

SEQ ID NO: 278160 - DNA, 147 bp, Homo sapiens
  chr1:28198912-28199059
  hyper
gtactgcagggggcggggggcggggcttcggcggggcggggctgcagggctcccgcgggctggcggggcggcttcggcgtgcggggcggggcatcggcggggcggggctgcagggctcccggggaccgcccgcccgcccctcagtct

SEQ ID NO: 278161 - DNA, 296 bp, Homo sapiens; identical to SEQ ID NO: 226878
  chr1:28241265-28241561
  hyper

SEQ ID NO: 278162 - DNA, 183 bp, Homo sapiens; identical to SEQ ID NO: 226879
  chr1:28261538-28261721
  hyper

SEQ ID NO: 278163 - DNA, 766 bp, Homo sapiens; identical to SEQ ID NO: 226880
  chr1:28286170-28286936
  hyper

SEQ ID NO: 278164 - DNA, 143 bp, Homo sapiens; identical to SEQ ID NO: 197421
  chr1:28414990-28415133
  hyper

SEQ ID NO: 278165 - DNA, 242 bp, Homo sapiens; identical to SEQ ID NO: 226882
  chr1:28562656-28562898
  hyper

SEQ ID NO: 278166 - DNA, 216 bp, Homo sapiens
  chr1:28586719-28586935
  hyper
tcctcggctccctcggactcctggccaatgagggagaagccttctggaggctctccgagctttgggctcctgagcgtcttcaagtccaggcaaatcccggccggagcggccagaccactcctcctccccgcccccttccgcggagtcccttcctcttcgcgggggccggcgggcagaggacccttcctggggtgcctcccggctcctgtcccccag

SEQ ID NO: 278167 - DNA, 280 bp, Homo sapiens; identical to SEQ ID NO: 102957
  chr1:28586972-28587252
  hyper

SEQ ID NO: 278168 - DNA, 273 bp, Homo sapiens; identical to SEQ ID NO: 226884
  chr1:28833050-28833323
  hyper

SEQ ID NO: 278169 - DNA, 130 bp, Homo sapiens; identical to SEQ ID NO: 226885
  chr1:28844465-28844595
  hyper

SEQ ID NO: 278170 - DNA, 164 bp, Homo sapiens; identical to SEQ ID NO: 226886
  chr1:28879232-28879396
  hyper

SEQ ID NO: 278171 - DNA, 340 bp, Homo sapiens
  chr1:28879651-28879991
  hyper
gagtgagggcagccgtccggggtctgaagacaaggaagcatctcggtttcgcgagagaggaaggatctgagtgggaggggacttgggatcccagaaaggggagacgtgtgacgggggttctttttggtgacacagaagcgggttccagcatctaagtgaagaggctgagtccgtgaggctaggggtcctggggccccacctgggttcgtgggagggaaaggtggtgctttggggacatagaatgggagcaatccaaggactgaggcgcgctgttctgggaccggaggagtggggtttctaggtccaaggggaggctccctaaagcggggcaagcttgaac

SEQ ID NO: 278172 - DNA, 397 bp, Homo sapiens; identical to SEQ ID NO: 226888
  chr1:28908623-28909020
  hyper

SEQ ID NO: 278173 - DNA, 80 bp, Homo sapiens
  chr1:28919321-28919401
  hyper
ggcaactcccgagaggccaactcagaggtcaggcggagggcgaggtccctgccctgggtcccgcccggtccactggggcc

SEQ ID NO: 278174 - DNA, 356 bp, Homo sapiens; identical to SEQ ID NO: 226889
  chr1:28969540-28969896
  hyper

SEQ ID NO: 278175 - DNA, 300 bp, Homo sapiens; identical to SEQ ID NO: 226890
  chr1:28974716-28975016
  hyper

SEQ ID NO: 278176 - DNA, 237 bp, Homo sapiens; identical to SEQ ID NO: 226891
  chr1:28994973-28995210
  hyper

SEQ ID NO: 278177 - DNA, 283 bp, Homo sapiens
  chr1:29062800-29063083
  hyper
gattctccttcctgcaatgctaaggggtgaatctcttttgcgggagactggattctttcggtgtgtgttttgctctctgggtactctttctgtagtcggctaacagaggatgaccaagcccctcgcgggggcgggggcgggtcactcccggacagggcccccatgaagtttccctggggactgtgtgactccctaggggtcgggttacctcccagatgggggtggggtatcacttgcagctggaaggcaggttcattttaaggtctcgcgggcttcggaggcc

SEQ ID NO: 278178 - DNA, 47 bp, Homo sapiens; identical to SEQ ID NO: 226892
  chr1:29063453-29063500
  hyper

SEQ ID NO: 278179 - DNA, 173 bp, Homo sapiens; identical to SEQ ID NO: 226893
  chr1:29213652-29213825
  hyper

SEQ ID NO: 278180 - DNA, 328 bp, Homo sapiens; identical to SEQ ID NO: 226894
  chr1:29241582-29241910
  hyper

SEQ ID NO: 278181 - DNA, 244 bp, Homo sapiens
  chr1:29448271-29448515
  hyper
caagcgagagacgcggccctcggggctcctccgcacctccccgcattcttcggggctcccggccgtcatctcgccgtcgtctgggcgctctgcggagagaagatgggaggcaaggactggaccgacgggcctctagcttcagggcgccaggttcggggcgcaaatccgggagggaagctccggccgcccagcccaggccgcttggagatccctggcggccacccccggattttcccgggcggcg

SEQ ID NO: 278182 - DNA, 467 bp, Homo sapiens
  chr1:29448910-29449377
  hyper
cctctccctgcccgccccctccttccagacctcctccgcccgcagcgaagctgcagcaggagcgacttgagctagacaccgggaagaccgctcggatcaagaccagccaggcagaggaggagaggcggcgccgacttcgcccaagatttccatcaagtccacgcatgagaggcctctccctcccccagcggtcgtgctggggccacggcagcaggcgggggtgccggtgccgggcgctgggccccgccggacggatgccctcccggctcccccgtcggcccgggcaaggctgttcccaggttgcgacgtttccaattcgggctcctccggatgaatcatccccctttcccgccgcctggcctcctttcccgcctcctccgcccgaggcctccgtggcccgtggcccggtcagagcagcaccgcccctgcgcctcgggatccgggccgcacagcttaagccctcccga

SEQ ID NO: 278183 - DNA, 425 bp, Homo sapiens; identical to SEQ ID NO: 226898
  chr1:29557216-29557641
  hyper

SEQ ID NO: 278184 - DNA, 32 bp, Homo sapiens; identical to SEQ ID NO: 226899
  chr1:29563130-29563162
  hyper

SEQ ID NO: 278185 - DNA, 143 bp, Homo sapiens
  chr1:29564623-29564766
  hyper
ctgctgtgtggtcgcgttctccgggtgtgtttcggagtctggtgtctttggtgtgcgtgcgcgtgtgtgtgtgcgcgcagctgaatgtatgtatacggagcctgtgtttgtgtgtccgtgtgctcgtcggagtgtggacggtg

SEQ ID NO: 278186 - DNA, 335 bp, Homo sapiens
  chr1:29564802-29565137
  hyper
accctgaggcctgggatcctagaccgcggccccttcccgcggagtttcggggccctgctccgggtgacctcccccgccctcgccaccggcggggctgctccgcgggctccgggtagccgggagacgcccggggcgggatccgagccgagacacgtgctggagcggagccgcttcctcacggtcgccagccgcagacaactgacctccccggcatcgcgttcgcggccctgctgctggctccggtgtctcgggccggaactcctgtggctccagcgttcgcgccggccactggccagcgcttgggcctcgccctgcagctccggggccatagggca

SEQ ID NO: 278187 - DNA, 168 bp, Homo sapiens; identical to SEQ ID NO: 197426
  chr1:29585832-29586000
  hyper

SEQ ID NO: 278188 - DNA, 173 bp, Homo sapiens
  chr1:30559180-30559353
  hyper
ctttaataacagaatcccttccctttcacggcctgctccgggggccgctggcctgaggatgcagcgatctctgctgtcctgggagggcggggtcccacgggggttctacaccctcttacacatggggagggggggctcagccagggcagtgaggggagaatcgcttagggtgg

SEQ ID NO: 278189 - DNA, 58 bp, Homo sapiens; identical to SEQ ID NO: 226904
  chr1:30559447-30559505
  hyper

SEQ ID NO: 278190 - DNA, 81 bp, Homo sapiens; identical to SEQ ID NO: 197427
  chr1:31157913-31157994
  hyper

SEQ ID NO: 278191 - DNA, 235 bp, Homo sapiens
  chr1:31158226-31158461
  hyper
gtcacccacagcccccgacaccgccccctcccccggccctgggcttccagtccctgacagtccctgggacgccgccccacaacgcccgccctctctggaccctaggacggccccgggcacctgcatatgatgtgtggccacgcccccgccacagctaattggaccggggtggacacctgaacccagtcggaccaatcaactcctgggttgccccgagacccggaccgggccctgt

SEQ ID NO: 278192 - DNA, 620 bp, Homo sapiens
  chr1:31191732-31192352
  hyper
gctggcccgggcccgcgcagacacgtcctgcacgctgtcctggggcctcccgtctgtcaccacgatgaccacctgcgacacgcggggcggtgtgacaccgggctcccggaagcccacgggactgtccaggagaggaggctgaggcccggagaggcgggaggactgccgggtcgcacagccaggcggcacccgggggaagaggacccggctggccgaagaggagacccgtttcctctgactgagagacgtggctggggggctttccatctgcttcgcctccctcgggcaggcagctctgagatgcccggagggatgtgatgccccatcgccaaattggggtctctaaggtcagggccatgccttcccctcagactgaggcggctgagggcagggtcctcaggctgatggctgtgggagtcgtgccacgcccctcgtgcccccgggaggcccggccggggctgggtggggggatccggtggttccacatggtgcagttctgcgctttggccaccagatggcagccgaagctaagggatggggctgccgtctcccgtcttgctgtccttgtcccggtaagaccggggaccctggaccagggaaccgacggagggccactccca

SEQ ID NO: 278193 - DNA, 152 bp, Homo sapiens; identical to SEQ ID NO: 226908
  chr1:31380839-31380991
  hyper

SEQ ID NO: 278194 - DNA, 43 bp, Homo sapiens
  chr1:31538418-31538461
  hyper
gggtccggagcagcgtttggggccggtggggtgcggatactca

SEQ ID NO: 278195 - DNA, 165 bp, Homo sapiens; identical to SEQ ID NO: 103003
  chr1:31538499-31538664
  hyper

SEQ ID NO: 278196 - DNA, 35 bp, Homo sapiens; identical to SEQ ID NO: 226910
  chr1:31538917-31538952
  hyper

SEQ ID NO: 278197 - DNA, 155 bp, Homo sapiens; identical to SEQ ID NO: 197429
  chr1:31769777-31769932
  hyper

SEQ ID NO: 278198 - DNA, 229 bp, Homo sapiens; identical to SEQ ID NO: 226912
  chr1:32083723-32083952
  hyper

SEQ ID NO: 278199 - DNA, 128 bp, Homo sapiens; identical to SEQ ID NO: 197431
  chr1:32110847-32110975
  hyper

SEQ ID NO: 278200 - DNA, 261 bp, Homo sapiens; identical to SEQ ID NO: 197432
  chr1:32180427-32180688
  hyper

SEQ ID NO: 278201 - DNA, 37 bp, Homo sapiens; identical to SEQ ID NO: 197433
  chr1:32181494-32181531
  hyper

SEQ ID NO: 278202 - DNA, 43 bp, Homo sapiens
  chr1:32226158-32226201
  hyper
cccaggatgactcccattcacgctgggtggcgggggaggggcg

SEQ ID NO: 278203 - DNA, 147 bp, Homo sapiens
  chr1:32226391-32226538
  hyper
ggtcctcaggagccgctctcctagagctctgtcgccctgggggacgcacaccctccatcctgcctccggagctggggactgggccgaggggagggagcgaccccctctgtgcagtcctcccgctccgactgccagagagggtcgctc

SEQ ID NO: 278204 - DNA, 129 bp, Homo sapiens
  chr1:32410105-32410234
  hyper
cggagggggcagggcgctggctccagctgtttgcatgaatcccccgcccctggcctctctgcctgtgcaggaagccctggtgtcgtaccccgagccgctgcagttcgcactctgcggcctcctcaggca

SEQ ID NO: 278205 - DNA, 73 bp, Homo sapiens; identical to SEQ ID NO: 226918
  chr1:32480181-32480254
  hyper

SEQ ID NO: 278206 - DNA, 66 bp, Homo sapiens; identical to SEQ ID NO: 226919
  chr1:32573589-32573655
  hyper

SEQ ID NO: 278207 - DNA, 174 bp, Homo sapiens; identical to SEQ ID NO: 197435
  chr1:32574075-32574249
  hyper

SEQ ID NO: 278208 - DNA, 143 bp, Homo sapiens
  chr1:32666250-32666393
  hyper
agagggcggagggcggagggaacttgcaccgaagcatcactcgagaccccaaacctccaggtcagtagccccctgagggagtgagggcgggggcggaatgacgcgggtctgacgctctgtcttcgagcgcggctgcggagctg

SEQ ID NO: 278209 - DNA, 71 bp, Homo sapiens; identical to SEQ ID NO: 226921
  chr1:32671079-32671150
  hyper

SEQ ID NO: 278210 - DNA, 413 bp, Homo sapiens; identical to SEQ ID NO: 226922
  chr1:32687709-32688122
  hyper

SEQ ID NO: 278211 - DNA, 299 bp, Homo sapiens; identical to SEQ ID NO: 197437
  chr1:32757388-32757687
  hyper

SEQ ID NO: 278212 - DNA, 164 bp, Homo sapiens; identical to SEQ ID NO: 226924
  chr1:32758019-32758183
  hyper

SEQ ID NO: 278213 - DNA, 184 bp, Homo sapiens; identical to SEQ ID NO: 35401
  chr1:32827549-32827733
  hyper

SEQ ID NO: 278214 - DNA, 101 bp, Homo sapiens; identical to SEQ ID NO: 197438
  chr1:32852880-32852981
  hyper

SEQ ID NO: 278215 - DNA, 299 bp, Homo sapiens
  chr1:32930159-32930458
  hyper
agaaaccgcgggtatgcaataaaaacctgttgaatcgattaaaccatttcccttatttccagatttttgcggaaagcgccagtaggtgaaatatgtgcggactgatgagtcaaagctcttattccctggactgcattaatacccacgacgtgcttttcgctctccagacaaagagaccggtacttggcaggtccctcaagtgggactcaaaagaccgaaccgagctgcagcctttcgctagcactggtcctcgccccttttggcatcttggtacttgtagttttgtccactctatcttt

SEQ ID NO: 278216 - DNA, 61 bp, Homo sapiens; identical to SEQ ID NO: 197440
  chr1:32930558-32930619
  hyper

SEQ ID NO: 278217 - DNA, 167 bp, Homo sapiens; identical to SEQ ID NO: 197441
  chr1:32931027-32931194
  hyper

SEQ ID NO: 278218 - DNA, 36 bp, Homo sapiens; identical to SEQ ID NO: 197442
  chr1:33005606-33005642
  hyper

SEQ ID NO: 278219 - DNA, 203 bp, Homo sapiens; identical to SEQ ID NO: 197443
  chr1:33116489-33116692
  hyper

SEQ ID NO: 278220 - DNA, 223 bp, Homo sapiens; identical to SEQ ID NO: 226928
  chr1:33168524-33168747
  hyper

SEQ ID NO: 278221 - DNA, 326 bp, Homo sapiens
  chr1:33207544-33207870
  hyper
ccccgcctgccatggcggcccgcgcgccccccgccgcacctgcggccgaggagccggggaacccgggcggccccccgcgcaggaagaagtcccgctccggcgcgtccggcctccgccgcgccttcagctggctgcggggcaagcggcgcaagaagaaggcggcgggggccgagggcgccgaaccggccgccccccgggccaagaaggcggaggacaaggccaagagggccaagggcaaaggccgaggtaaggcggtcggcacctgggctgagcgcgggggggcgtcgagggtgcggccgagggggctctgccgggggtccgcgcgc

SEQ ID NO: 278222 - DNA, 193 bp, Homo sapiens; identical to SEQ ID NO: 197445
  chr1:33219374-33219567
  hyper

SEQ ID NO: 278223 - DNA, 309 bp, Homo sapiens; identical to SEQ ID NO: 197446
  chr1:33219596-33219905
  hyper

SEQ ID NO: 278224 - DNA, 254 bp, Homo sapiens; identical to SEQ ID NO: 226931
  chr1:33282729-33282983
  hyper

SEQ ID NO: 278225 - DNA, 126 bp, Homo sapiens; identical to SEQ ID NO: 197448
  chr1:33283881-33284007
  hyper

SEQ ID NO: 278226 - DNA, 164 bp, Homo sapiens
  chr1:33359063-33359227
  hyper
atcttgcgggtgggggctcgggcaggctcctctcactccccgcctcccctcccgcccccaggccatttacaagatggtttcgtccgtgatgaagatgccggaggacgagtcgaccccggaaaagaggactgagaaaatcttccgccaaatggacacaaacaacg

SEQ ID NO: 278227 - DNA, 422 bp, Homo sapiens; identical to SEQ ID NO: 226934
  chr1:33430300-33430722
  hyper

SEQ ID NO: 278228 - DNA, 31 bp, Homo sapiens
  chr1:33438469-33438500
  hyper
tgcgtttcacactgcggaacgagcacggctc

SEQ ID NO: 278229 - DNA, 72 bp, Homo sapiens
  chr1:33438921-33438993
  hyper
gcagtcctcccagccgttcccaccgcctttgccactcatccggcggcagccgtcctcggaccactgcccctg

SEQ ID NO: 278230 - DNA, 272 bp, Homo sapiens; identical to SEQ ID NO: 226936
  chr1:33502498-33502770
  hyper

SEQ ID NO: 278231 - DNA, 649 bp, Homo sapiens; identical to SEQ ID NO: 226937
  chr1:33592695-33593344
  hyper

SEQ ID NO: 278232 - DNA, 498 bp, Homo sapiens; identical to SEQ ID NO: 197450
  chr1:33721208-33721706
  hyper

SEQ ID NO: 278233 - DNA, 105 bp, Homo sapiens
  chr1:33772615-33772720
  hyper
gaacaccgccgcgtggttatagaagtcgccctggccccacgccatcgcggcggccgaatgcgcgtcgcgttcgaagggcagcagccacgacggccagtggtagtg

SEQ ID NO: 278234 - DNA, 98 bp, Homo sapiens
  chr1:33772745-33772843
  hyper
tcggccagcgcctcgggcccaaaagtgccgctgaagtgctggtccacgtccatgcagaacatgaagtgcgcctcgcggcccggcagcccgcccagcgc

SEQ ID NO: 278235 - DNA, 48 bp, Homo sapiens
  chr1:33772856-33772904
  hyper
cgcatgcgcgccatcgacacgtcttgccagcgccgctcgcgcgccacg

SEQ ID NO: 278236 - DNA, 92 bp, Homo sapiens; identical to SEQ ID NO: 103072
  chr1:33772986-33773078
  hyper

SEQ ID NO: 278237 - DNA, 638 bp, Homo sapiens
  chr1:33896186-33896824
  hyper
ggtccccggagaaagcgagtcactgacgggaccttggcccgttcccgttccggttcccgttcccggcaagcctcggccccaggctctccgcagccctcctcgctgcgcgttcccggcccgggggcgccgcgctctgccggtcgccggccgggactgcgggctcccagcgcgggccccacgccgcggaccaggggtcaggccgcctgccgcccgcctgtccgtgcccatggcaatgccccgccccgcgcggcccgtcccggccgagcgctccggcccgaccgtgacagctgggtgcccaaagggttaagccggcagcgcggcggccggtgtcccccgcgcgctgcccgtcagccgcgagctggccccagcgcgcacgcgcccgcccgttacctgcggtcgcctccgcgctcctcctccacctggccgctctctcccgggggccgcccctcagcccgccccctcggctcggcgccgcgcaccctgctggctgctcggacgctgcccgcggaggaggggcgagggcgctattaccatatattagcataccagcgcgcgtcacgtggccgctccagccaatggtcaccctagaagggcggggattgggcggaacacgccttagtgctgctcccagcctgaac

SEQ ID NO: 278238 - DNA, 422 bp, Homo sapiens; identical to SEQ ID NO: 197452
  chr1:33937919-33938341
  hyper

SEQ ID NO: 278239 - DNA, 224 bp, Homo sapiens; identical to SEQ ID NO: 197453
  chr1:34629913-34630137
  hyper

SEQ ID NO: 278240 - DNA, 352 bp, Homo sapiens
  chr1:35247173-35247525
  hyper
gccaccagcccctccggaggctggcccgggagcgcctggcagcgtcgggtctaggagccggctccctcctgctccctcctccgcgccgcccggggtgtgcccgccgtctgtgtgcaccactgctgagcccagctccggcgccctcgcctctgctgtgggccccggggacgcggggtcaggccaccgcgttggccaggccgctgcaggtaagtgctggacggggcggggcgaggctgggcgggaccctcaggggcgccaagcgctcctggcgaccccctgcggcagggctggggcttgagcctgccagtgcgctgggatggggcgcgaagcgggggtgcggggagcccgccac

SEQ ID NO: 278241 - DNA, 84 bp, Homo sapiens; identical to SEQ ID NO: 221303
  chr1:35260186-35260270
  hyper

SEQ ID NO: 278242 - DNA, 252 bp, Homo sapiens
  chr1:35394790-35395042
  hyper
cccgcggccctgaccgggagcgtgggtccgcggtccgcgtggtcccctgcccgcccctcgggtcgggcccgcgggcagccaggccggggcaggagcgggggcagctgaggaggcccagcccctcccccctcccggggccgggagccgagcgccggagcccggggcgtgggcggcgccggggccgcagccgggccgtgcctggggggcgctgcagagggagccgcgagcgcggccccgtccccactcctcccc

SEQ ID NO: 278243 - DNA, 124 bp, Homo sapiens
  chr1:35396131-35396255
  hyper
ggggagggggccacggtggggaagccgcagggggaggggctgaagacgtgggggaaggggtggctccggattccggctttccagggtaggtgtgaggaaacactgcctccggcgctgaaagttg

SEQ ID NO: 278244 - DNA, 181 bp, Homo sapiens; identical to SEQ ID NO: 226953
  chr1:35497271-35497452
  hyper

SEQ ID NO: 278245 - DNA, 236 bp, Homo sapiens; identical to SEQ ID NO: 197457
  chr1:35544793-35545029
  hyper

SEQ ID NO: 278246 - DNA, 83 bp, Homo sapiens; identical to SEQ ID NO: 226955
  chr1:36023211-36023294
  hyper

SEQ ID NO: 278247 - DNA, 156 bp, Homo sapiens
  chr1:36173085-36173241
  hyper
gcccctgctggagacggaggttggggagccccgagagtgggtgagaactgaggcctcggggtggaggatatcccaggagtgtggaaggaagcggtcccacgacagcccagggagacatcaaggtctagggagcggccctcaccctgagagctgtca

SEQ ID NO: 278248 - DNA, 414 bp, Homo sapiens
  chr1:36173282-36173696
  hyper
cacacccacaaacccagtcccaccaccaggttcccaccccaacaccctacccgcagcagccctctcctccgtgctcccaccccgccctgcagacccgggttaatcctcccctccctgctttgtgcgccctcgcgcctgaggccaaagccctgggcggcgcgggcgctcccggcagctgaggtggcggggcgggggccgcgggggaggagacacaaaagggggaggggcccaggctgcagctgccccgtacccgcggggacaaagggcctgctggcgggccggccccagccgttttcatgcttgttgggattaggggcagtaaagggcgctcgggactgtgcggatcaacagtctgtgcggggcggcgcgtgggggcgggcttggccccgcccgcccctgctttgtgcgcagccc

SEQ ID NO: 278249 - DNA, 85 bp, Homo sapiens; identical to SEQ ID NO: 197459
  chr1:36235729-36235814
  hyper

SEQ ID NO: 278250 - DNA, 173 bp, Homo sapiens; identical to SEQ ID NO: 197460
  chr1:36615012-36615185
  hyper

SEQ ID NO: 278251 - DNA, 77 bp, Homo sapiens; identical to SEQ ID NO: 226959
  chr1:36690054-36690131
  hyper

SEQ ID NO: 278252 - DNA, 40 bp, Homo sapiens; identical to SEQ ID NO: 226960
  chr1:36789376-36789416
  hyper

SEQ ID NO: 278253 - DNA, 173 bp, Homo sapiens; identical to SEQ ID NO: 197461
  chr1:36863407-36863580
  hyper

SEQ ID NO: 278254 - DNA, 230 bp, Homo sapiens; identical to SEQ ID NO: 35461
  chr1:36916114-36916344
  hyper

SEQ ID NO: 278255 - DNA, 866 bp, Homo sapiens; identical to SEQ ID NO: 197462
  chr1:36931643-36932509
  hyper

SEQ ID NO: 278256 - DNA, 218 bp, Homo sapiens; identical to SEQ ID NO: 197463
  chr1:36933230-36933448
  hyper

SEQ ID NO: 278257 - DNA, 321 bp, Homo sapiens
  chr1:36936920-36937241
  hyper
tacaggcgtgagccactgcgcccggccaataggactagatttaacccaggcagtctagcctttgaattgatgcgcttgacctctgtgctcttctggctgccagccccctttacctctgctttctgagaagaccaccggagtgggacgagaggtcccggctgagttataggccacaagggccacctcctgggcttctgaaggcaggtggaaggtgcagctgagctctgtggtgttgcagaggggcaggatggccccagcctggcctgagggtctccaagaaaccacataaccttggatccgtccgctgtcttcctccagggg

SEQ ID NO: 278258 - DNA, 77 bp, Homo sapiens; identical to SEQ ID NO: 197465
  chr1:36937669-36937746
  hyper

SEQ ID NO: 278259 - DNA, 40 bp, Homo sapiens
  chr1:37501032-37501072
  hyper
ataataattttttttcaagtggcgctgggtgtgagggaag

SEQ ID NO: 278260 - DNA, 77 bp, Homo sapiens
  chr1:37501102-37501179
  hyper
aggctgcgaattactcagttaggcgagtttaatgacctttttgacagagacaaagcggtgccgatacagtagataaa

SEQ ID NO: 278261 - DNA, 167 bp, Homo sapiens
  chr1:37501688-37501855
  hyper
tggaaaatgttgcccgagggatcggagggaaggacacgcagaccaaagctagggaagcagcagctgccacctcttgataaaaagtaagggctccagtgggcgccagtaaggaggaagtgcaggagagggcagcagagggcgcggcctcccggatatagctgggggag

SEQ ID NO: 278262 - DNA, 98 bp, Homo sapiens
  chr1:37501885-37501983
  hyper
atcgcctgcctatcagcttccgcaacaggtttggttgccccaaggaaccaaaaggcctagctgttctctaaggaagaaaatttcggtgcgctgataga

SEQ ID NO: 278263 - DNA, 77 bp, Homo sapiens; identical to SEQ ID NO: 197466
  chr1:37721195-37721272
  hyper

SEQ ID NO: 278264 - DNA, 395 bp, Homo sapiens
  chr1:37940474-37940869
  hyper
gcgggtctcgggccgggacagcctcggcgtcaccagctcccggcagccaaccaaagttttccagcaacttttctccccacgggtcaccccagaaacttgccctccccggctccgggagtccggccatgggccttgcgctgcctgggcctgagctctgagtgccggacgggtgggcgaaagtggtggcctcagtggggaagccttgggccccgcaacgcacttccagccccaggattccatctgagagccccgtccctgccttctgggtcccctgggttggcgtgggggttcgaggctttacagctggggtagttccagtcttagttcagactaagttccgatcttcgagccaccagctaacagctggatgaccttgagcacgtttttaatgtctg

SEQ ID NO: 278265 - DNA, 157 bp, Homo sapiens
  chr1:37980346-37980503
  hyper
tgttgggctgaggcgggcggcggcggcgcgaggttgggggcggtccctgcgccgccagggggcgcccccccgctctgcgcctgcgcgcgcggcttccggagacgcgtgcagcgccgtgccgagcttcgctaaggccggggctctcgaaggtccttct

SEQ ID NO: 278266 - DNA, 105 bp, Homo sapiens; identical to SEQ ID NO: 197468
  chr1:38019907-38020012
  hyper

SEQ ID NO: 278267 - DNA, 135 bp, Homo sapiens; identical to SEQ ID NO: 197469
  chr1:38061487-38061622
  hyper

SEQ ID NO: 278268 - DNA, 167 bp, Homo sapiens
  chr1:38100075-38100242
  hyper
cctgtcctgatcgccgaccggagagcgatcagactccccttcctttctgtctccccccacgcacccagctagaaccagccccgacgggagggcccgccgcgccccagctcccggggaagggggcgctggggagaaggatggggcagctacgaggggactcaccttcg

SEQ ID NO: 278269 - DNA, 221 bp, Homo sapiens; identical to SEQ ID NO: 197470
  chr1:38100272-38100493
  hyper

SEQ ID NO: 278270 - DNA, 58 bp, Homo sapiens; identical to SEQ ID NO: 347
  chr1:38100533-38100591
  hyper

SEQ ID NO: 278271 - DNA, 256 bp, Homo sapiens; identical to SEQ ID NO: 226973
  chr1:38157954-38158210
  hyper

SEQ ID NO: 278272 - DNA, 68 bp, Homo sapiens; identical to SEQ ID NO: 197473
  chr1:38230859-38230927
  hyper

SEQ ID NO: 278273 - DNA, 71 bp, Homo sapiens; identical to SEQ ID NO: 226976
  chr1:38273328-38273399
  hyper

SEQ ID NO: 278274 - DNA, 420 bp, Homo sapiens
  chr1:38512644-38513064
  hyper
cgctcccggggtcccgcgcgccggccgtgctgattggccgctggggcttcattcacggcccccctaccgtccgcgtacacactcacgccccgggggcgcggccgccacgtggggagtggcgcgggggtggccctgggaccgcaccccctctcgtcctggctgtgtgggccccgctttcccccagcgctggagactccgagcccggccggtcccacattccacgcgagctgaattcccgcccgcatcccgcccgggcagcagggattgccggctccgggaggcgctcgggctccgagaagcggctcagccccgcgcccctccctcctcagtaccgctgccggcggaccaggattcccgcgggtcctggcggctgcgagcgcgaggcggcgcggattcgcggctcggttccggcgcgactgc

SEQ ID NO: 278275 - DNA, 90 bp, Homo sapiens
  chr1:38513154-38513244
  hyper
ttcctctagtcccagcgtcacaactccgccgacctcctctgccctgagagcgcgtccggtgcgggcggagtcggacggactctggcttca

SEQ ID NO: 278276 - DNA, 98 bp, Homo sapiens; identical to SEQ ID NO: 221316
  chr1:38580185-38580283
  hyper

SEQ ID NO: 278277 - DNA, 60 bp, Homo sapiens
  chr1:39043984-39044044
  hyper
gagatggaaggagccgaagggaccagagagagcgtggacgggaggaagacagacacgaag

SEQ ID NO: 278278 - DNA, 75 bp, Homo sapiens
  chr1:39044466-39044541
  hyper
gagcaaaagacagatcagcagaagcaaggcaggtggggcgggagcgggagcgtggacatccggcacgaagtcaga

SEQ ID NO: 278279 - DNA, 367 bp, Homo sapiens
  chr1:39284066-39284433
  hyper
ggtccgcggctgcgcggcggggttcccagacccgggacttaggcgcaagcttcagagcgagctgtgtgaccctgggcacgcccagccctctttgatcaaccgtcctttctcggtaaaaccgagaggatacaactcctctgctcggggtcgtcgggaaacgcaggaccgagggacggcgccccctccttcccgagaccacccgccccatccactccgcaccgcactcccgtccagggaagtcttaaggaacccagtccccctagacgagaggtggaaggaggcgctggggaaatcctgcaaagcaggaatccgcactgaacagcaggatccttttccaggaattgtaaacccagaattgtaaataaaa

SEQ ID NO: 278280 - DNA, 205 bp, Homo sapiens; identical to SEQ ID NO: 197474
  chr1:39338990-39339195
  hyper

SEQ ID NO: 278281 - DNA, 127 bp, Homo sapiens; identical to SEQ ID NO: 226983
  chr1:39492081-39492208
  hyper

SEQ ID NO: 278282 - DNA, 95 bp, Homo sapiens; identical to SEQ ID NO: 226984
  chr1:39864297-39864392
  hyper

SEQ ID NO: 278283 - DNA, 42 bp, Homo sapiens; identical to SEQ ID NO: 197475
  chr1:39874199-39874241
  hyper

SEQ ID NO: 278284 - DNA, 491 bp, Homo sapiens
  chr1:39874757-39875248
  hyper
gagctagcgagctagcgggtcgcgctgcgcgggggaggaggactcgccccccgcccgaccctagcggagccttttgttcccagccagaagtttgcatgccgggaccgtgacagctgcgggcggggaggacggcggggccgcggggccagcggcgtggtggagaatagaggcggctgcttgtcatgcagcccacggcgtggcggctgcgggccggggactggcggcggcgggcgaggcggcgcccacagcactcgggactcagctgccggagggacaaactaacttcctgagcgcgggacctgaggctggcgcggccgggagccacctgcagcctgcggtgaggcgaccctggccctcggggcgcgcggcatggcgcggggaagcgggccgtgctgagcgagcccctccgacagacccgcggccgctgctgctgcccgcccgcccgcctgcctttccgaaggcctggcgcggggctccgctcgccttgtttt

SEQ ID NO: 278285 - DNA, 716 bp, Homo sapiens
  chr1:39956620-39957336
  hyper
gcccagctggaggcaggaggcggagcctcctccgcaaagctggatcagtaccggggacgcagggcgcacagctagggctggcgggggcggcccgactggggcgctgcctgggctcacgcgggagccaggtgggggacgcagggagaagcagccgagcaggtgccgagaaggaggcgcccgcagaagcgcatgcaggggccacggggaaggcgccaggaggcggtgaggggccgcggtggccggaacccgggccggctgctgcgggcagaggaacaggccccacccgcggggcttggctggcaccgcccggctctccagacggggctacggccgcgtgtcgggcccggtggcgaccacggcacaccacggcgaggcagccgggtggcaccactggcgggaccgggacggcgccgcggccttaggatctctgcgccgaggcccgcggcgggagccacgacggccctgaccacgctgacgcccaggctgcgggctcctcgcccggaccaaccgccagccacgccgaggtcgcacctcggggtcgccccacccgcaacacctgccgccgcccggggctcctagcgggcgcggcctccgcgcccaggccccgcccccgcgcccccattggtcagtcccgggggtgggcgggcggcacagacggctgagccggggcaaggactcgcgggaatcgcgccgcccgggtcgctgccggagctcgc

SEQ ID NO: 278286 - DNA, 45 bp, Homo sapiens; identical to SEQ ID NO: 226990
  chr1:40042402-40042447
  hyper

SEQ ID NO: 278287 - DNA, 182 bp, Homo sapiens
  chr1:40149563-40149745
  hyper
cgaagcgctggcctcgggaacagcagcgcccgcgcggccccgcacctcgatgatctccagcatctccaggcgcgtgatgcgcccgtcgccgtccaggtcgtacatctcaaaggcccagttgagcttctgctcgaagctgccgcgggaggtgaccgacagggcgcagatgaactcccggaagt

SEQ ID NO: 278288 - DNA, 183 bp, Homo sapiens; identical to SEQ ID NO: 226992
  chr1:40157111-40157294
  hyper

SEQ ID NO: 278289 - DNA, 146 bp, Homo sapiens
  chr1:40158183-40158329
  hyper
cttctaaggatctgtcgaaagtcggggcggacggctggggattggcctaatcggagcgcggacgctgaagagcagcggtgagaggcggggcttctgtccgcgcggcgaaggtagaggtgggctgggcggggcgatggaggatgggg

SEQ ID NO: 278290 - DNA, 344 bp, Homo sapiens
  chr1:40254463-40254807
  hyper
cgcggtccgagcagcgcaggggcgatgggcgagctcctgcagccacccgcttggtgcggttcccgcgagtccctgccctgccctgcccagcggtccgcgtcgcccgcccccaccccgggactgaccaatgggggggcgggggcggggcctgggagcgggggccacgcctgcgagggggcccggggctgcggccggtgtcgcgggtggggagaccccgaggtgctacctgggcgtggcgggtgggcaggcggcccgggcgaggggctcgcagcctgggcgtcagcgtggtcatggccgtcgtggcttccgccgcgggcctcggcgcagagatcctagggccgcgg

SEQ ID NO: 278291 - DNA, 121 bp, Homo sapiens
  chr1:40254922-40255043
  hyper
cgcccccacctggctcccgcgtgagcctgggcagcgccccaggcaggccgcccccgccagccctcgctgcgcggcgtgcgccccctgcgcccccagtactgatccagcttcgcgggggaga

SEQ ID NO: 278292 - DNA, 35 bp, Homo sapiens
  chr1:40255068-40255103
  hyper
cgggccaggagctctggggcccttctggagcaccc

SEQ ID NO: 278293 - DNA, 81 bp, Homo sapiens
  chr1:40255104-40255185
  hyper
ggagccacctgtgcacttctcagtcgccacggccccggtgcaggcctggcaggagaaggatccccgcggaaatgcctctac

SEQ ID NO: 278294 - DNA, 280 bp, Homo sapiens
  chr1:40367951-40368231
  hyper
tccttgcccactccgagctggggaattagggctactccccgccccaccctgcgcgcctactttccccggcgcaccccgctgggttcaggtgcgcccgagccgccgcgaggggtagggggagggaaacgcgccacctggcggccctcagccctgaacttgggctggtcccggcgtccgtctggtcacccgtcggcccgtttcttgagctcagtggcccaagcctggatggcatcgaagcgaagattccgggatttagagcccgaaacgtaaccttcctgag

SEQ ID NO: 278295 - DNA, 31 bp, Homo sapiens; identical to SEQ ID NO: 221329
  chr1:40420568-40420599
  hyper

SEQ ID NO: 278296 - DNA, 122 bp, Homo sapiens; identical to SEQ ID NO: 221330
  chr1:40420932-40421054
  hyper

SEQ ID NO: 278297 - DNA, 53 bp, Homo sapiens; identical to SEQ ID NO: 226996
  chr1:40723946-40723999
  hyper

SEQ ID NO: 278298 - DNA, 112 bp, Homo sapiens; identical to SEQ ID NO: 197478
  chr1:40781096-40781208
  hyper

SEQ ID NO: 278299 - DNA, 363 bp, Homo sapiens
  chr1:40782311-40782674
  hyper
ctctgccctacccgcgcgcccgcagcccccggcggccctcggaagggagacgtgggtaggcgggcagggccgagaggccgcctcggggcgacagcggcgtctggttggagccggcgccccctgggaggcggcgggggcggaggctgcgcagcgggtgaatgagcaccattgtatgccccgccacctgggctccccgggctgccaggaccgggcgccagctcctgccccacgctgcctgtcccgggccgggccgcgcgtctggggacgggtcccgtttgactctccggctcagccacctccattcacggtgccgcgatgggcaccatgtatgcacccaccgaggggacctgcccgcggcgctgt

SEQ ID NO: 278300 - DNA, 49 bp, Homo sapiens
  chr1:40782908-40782957
  hyper
gcacgcaccgacggcagagtctcccggcgctcctccagcgctggctgtt

SEQ ID NO: 278301 - DNA, 46 bp, Homo sapiens; identical to SEQ ID NO: 226999
  chr1:41131456-41131502
  hyper

SEQ ID NO: 278302 - DNA, 241 bp, Homo sapiens; identical to SEQ ID NO: 197480
  chr1:41268046-41268287
  hyper

SEQ ID NO: 278303 - DNA, 36 bp, Homo sapiens
  chr1:41326954-41326990
  hyper
agggggagaggacacgatccaagaaccagagtccga

SEQ ID NO: 278304 - DNA, 434 bp, Homo sapiens
  chr1:41327080-41327514
  hyper
ctggagggacgccagggtcccagtccggtgccgggccctgcgcacacagccgccgcctccaccctcgcggagggcgcgcgcggggcccagtcgctgggtgcagggtccggcgggcagtcgggccctttctcctctccggcacgccgggcgggcgccggccgccctcagcagctcacggagccggcgggcggcgcggaccccaagtccgagaagcagtcgaactcgctctggcccaggaagagctcgggcagctcgcgcacgcggtgcagcccgagctccagctccagcgacgtcagcgcctcctcgtcgatgagttcggcgtccatgccgcccagggcgtgcgcgggcggcggcggggctgcggcgcttggcgccggctgcgggcccggggggcctcccggagcgttggggggcgcggccgcgcggccggggta

SEQ ID NO: 278305 - DNA, 239 bp, Homo sapiens; identical to SEQ ID NO: 197481
  chr1:41328054-41328293
  hyper

SEQ ID NO: 278306 - DNA, 146 bp, Homo sapiens
  chr1:41444974-41445120
  hyper
ccgtcttggaggccagggtggcgctgccgccgtccctcgcccggaggcagagatgcgctggcgcatcaccgccaggagcccacagtgaaagaccatcggatggaaggcgacgcccagaactccaggagaccgctgtgggaggacgc

SEQ ID NO: 278307 - DNA, 35 bp, Homo sapiens; identical to SEQ ID NO: 197482
  chr1:41446124-41446159
  hyper

SEQ ID NO: 278308 - DNA, 475 bp, Homo sapiens; identical to SEQ ID NO: 197483
  chr1:41832018-41832493
  hyper

SEQ ID NO: 278309 - DNA, 295 bp, Homo sapiens; identical to SEQ ID NO: 197484
  chr1:41848318-41848613
  hyper

SEQ ID NO: 278310 - DNA, 167 bp, Homo sapiens; identical to SEQ ID NO: 197485
  chr1:41848643-41848810
  hyper

SEQ ID NO: 278311 - DNA, 37 bp, Homo sapiens; identical to SEQ ID NO: 197486
  chr1:41848840-41848877
  hyper

SEQ ID NO: 278312 - DNA, 306 bp, Homo sapiens; identical to SEQ ID NO: 197487
  chr1:41848976-41849282
  hyper

SEQ ID NO: 278313 - DNA, 494 bp, Homo sapiens; identical to SEQ ID NO: 197488
  chr1:41981667-41982161
  hyper

SEQ ID NO: 278314 - DNA, 163 bp, Homo sapiens; identical to SEQ ID NO: 227009
  chr1:42127233-42127396
  hyper

SEQ ID NO: 278315 - DNA, 35 bp, Homo sapiens
  chr1:42128197-42128232
  hyper
cactgctggccaccccgggatgccttcgcggccgg

SEQ ID NO: 278316 - DNA, 48 bp, Homo sapiens; identical to SEQ ID NO: 227011
  chr1:42800266-42800314
  hyper

SEQ ID NO: 278317 - DNA, 456 bp, Homo sapiens; identical to SEQ ID NO: 197489
  chr1:42928782-42929238
  hyper

SEQ ID NO: 278318 - DNA, 111 bp, Homo sapiens; identical to SEQ ID NO: 227013
  chr1:43147843-43147954
  hyper

SEQ ID NO: 278319 - DNA, 472 bp, Homo sapiens; identical to SEQ ID NO: 103258
  chr1:43232901-43233373
  hyper

SEQ ID NO: 278320 - DNA, 79 bp, Homo sapiens; identical to SEQ ID NO: 227015
  chr1:43282586-43282665
  hyper

SEQ ID NO: 278321 - DNA, 910 bp, Homo sapiens; identical to SEQ ID NO: 197491
  chr1:43389629-43390539
  hyper

SEQ ID NO: 278322 - DNA, 62 bp, Homo sapiens; identical to SEQ ID NO: 227017
  chr1:43424613-43424675
  hyper

SEQ ID NO: 278323 - DNA, 124 bp, Homo sapiens
  chr1:43613349-43613473
  hyper
ttctagtaaccagccgggcctgaggagctggggcaagtgagtacagtgccagaatagggcggggcgcgaaataagatcccgaccggcgggcgcggggcggggcgatgcaggcagggtaaggggc

SEQ ID NO: 278324 - DNA, 531 bp, Homo sapiens; identical to SEQ ID NO: 227019
  chr1:43637578-43638109
  hyper

SEQ ID NO: 278325 - DNA, 43 bp, Homo sapiens; identical to SEQ ID NO: 197492
  chr1:43803509-43803552
  hyper

SEQ ID NO: 278326 - DNA, 208 bp, Homo sapiens; identical to SEQ ID NO: 197493
  chr1:43805020-43805228
  hyper

SEQ ID NO: 278327 - DNA, 67 bp, Homo sapiens; identical to SEQ ID NO: 197494
  chr1:43814927-43814994
  hyper

SEQ ID NO: 278328 - DNA, 268 bp, Homo sapiens; identical to SEQ ID NO: 197495
  chr1:43818177-43818445
  hyper

SEQ ID NO: 278329 - DNA, 154 bp, Homo sapiens; identical to SEQ ID NO: 197496
  chr1:43832812-43832966
  hyper

SEQ ID NO: 278330 - DNA, 45 bp, Homo sapiens; identical to SEQ ID NO: 227021
  chr1:43834166-43834211
  hyper

SEQ ID NO: 278331 - DNA, 211 bp, Homo sapiens; identical to SEQ ID NO: 227022
  chr1:43855424-43855635
  hyper

SEQ ID NO: 278332 - DNA, 287 bp, Homo sapiens; identical to SEQ ID NO: 197497
  chr1:43919241-43919528
  hyper

SEQ ID NO: 278333 - DNA, 119 bp, Homo sapiens; identical to SEQ ID NO: 391
  chr1:43919541-43919660
  hyper

SEQ ID NO: 278334 - DNA, 34 bp, Homo sapiens; identical to SEQ ID NO: 227024
  chr1:43996430-43996464
  hyper

SEQ ID NO: 278335 - DNA, 217 bp, Homo sapiens; identical to SEQ ID NO: 227025
  chr1:43997371-43997588
  hyper

SEQ ID NO: 278336 - DNA, 345 bp, Homo sapiens; identical to SEQ ID NO: 227026
  chr1:44015775-44016120
  hyper

SEQ ID NO: 278337 - DNA, 355 bp, Homo sapiens; identical to SEQ ID NO: 227027
  chr1:44115473-44115828
  hyper

SEQ ID NO: 278338 - DNA, 112 bp, Homo sapiens
  chr1:44402260-44402372
  hyper
ctcagcctggccagcctactgggcgccggggccctgcgaccgcccccgggctcccggcccgtcagccagccctgctgccgacccacgcgctacgaagcggtctccttcatgg

SEQ ID NO: 278339 - DNA, 58 bp, Homo sapiens; identical to SEQ ID NO: 227028
  chr1:44411960-44412018
  hyper

SEQ ID NO: 278340 - DNA, 270 bp, Homo sapiens; identical to SEQ ID NO: 227029
  chr1:44412317-44412587
  hyper

SEQ ID NO: 278341 - DNA, 98 bp, Homo sapiens; identical to SEQ ID NO: 227030
  chr1:44435544-44435642
  hyper

SEQ ID NO: 278342 - DNA, 197 bp, Homo sapiens; identical to SEQ ID NO: 227031
  chr1:44441185-44441382
  hyper

SEQ ID NO: 278343 - DNA, 120 bp, Homo sapiens; identical to SEQ ID NO: 197500
  chr1:44444589-44444709
  hyper

SEQ ID NO: 278344 - DNA, 44 bp, Homo sapiens; identical to SEQ ID NO: 227032
  chr1:44445510-44445554
  hyper

SEQ ID NO: 278345 - DNA, 224 bp, Homo sapiens; identical to SEQ ID NO: 227033
  chr1:44457110-44457334
  hyper

SEQ ID NO: 278346 - DNA, 93 bp, Homo sapiens
  chr1:44870925-44871018
  hyper
cattcactgattagatccagcgctgagaggcagcactgctccttctctcacgccaactgagtctcttgatctgtacatgcaatcccaggcagc

SEQ ID NO: 278347 - DNA, 60 bp, Homo sapiens
  chr1:44871044-44871104
  hyper
gcctactgctgctgctgctgctgccgctgccgccgccgccgccgccgctgcctccgccgg

SEQ ID NO: 278348 - DNA, 431 bp, Homo sapiens
  chr1:44871190-44871621
  hyper
tttccacggcaagtatggagatcagaaaggggtgtggacgtgtgtgcgtacccaagaggggtgggtgcgagggcggccggcttgttcaggaacctggctaactttccgggtccgtttcctagggattcgggcggttccctctggacgggggcagggactgggactcggactggcgcgtcttggatcatcgcgacggagcctctcggcatcggcgccctgcgcgctccgtgcgctgcctcgctcaaactttccgtcttgagttttccttaatgtgttttatttggggagggggggaggtgcaagggggagggaccagacgcgggaattggacaagttgggagggtgagggcactgcaagggaagggagcaggacttcttttctccgtctcttaataagccccattcccactttgttcgggtcgatatcgaga

SEQ ID NO: 278349 - DNA, 260 bp, Homo sapiens
  chr1:44872033-44872293
  hyper
agagtagcccgacacgtgggatctcccgggattttcggggtcgggaccccctctcccagcggttctactgagcaaggcgggaggacgatcgtggagacgagggctacttgactactctacttgtagttttatttttatcttagacctgccttaaactgagtaacaatttctcttctgacttaagaacaaaacttttcagtgagcacgccggtcgctgcggtcctgcggccactgccgccgcgcttgtcagcccgggccga

SEQ ID NO: 278350 - DNA, 178 bp, Homo sapiens; identical to SEQ ID NO: 103310
  chr1:44874565-44874743
  hyper

SEQ ID NO: 278351 - DNA, 42 bp, Homo sapiens; identical to SEQ ID NO: 197503
  chr1:45097400-45097442
  hyper

SEQ ID NO: 278352 - DNA, 86 bp, Homo sapiens; identical to SEQ ID NO: 197504
  chr1:45097718-45097804
  hyper

SEQ ID NO: 278353 - DNA, 40 bp, Homo sapiens; identical to SEQ ID NO: 197505
  chr1:45098109-45098149
  hyper

SEQ ID NO: 278354 - DNA, 114 bp, Homo sapiens; identical to SEQ ID NO: 403
  chr1:45098213-45098327
  hyper

SEQ ID NO: 278355 - DNA, 80 bp, Homo sapiens; identical to SEQ ID NO: 197507
  chr1:45139911-45139991
  hyper

SEQ ID NO: 278356 - DNA, 118 bp, Homo sapiens; identical to SEQ ID NO: 227042
  chr1:45140252-45140370
  hyper

SEQ ID NO: 278357 - DNA, 331 bp, Homo sapiens; identical to SEQ ID NO: 227044
  chr1:45284955-45285286
  hyper

SEQ ID NO: 278358 - DNA, 811 bp, Homo sapiens; identical to SEQ ID NO: 227045
  chr1:45285406-45286217
  hyper

SEQ ID NO: 278359 - DNA, 227 bp, Homo sapiens; identical to SEQ ID NO: 227046
  chr1:45477622-45477849
  hyper

SEQ ID NO: 278360 - DNA, 35 bp, Homo sapiens; identical to SEQ ID NO: 227047
  chr1:45671645-45671680
  hyper

SEQ ID NO: 278361 - DNA, 129 bp, Homo sapiens
  chr1:45792559-45792688
  hyper
ggttctcacaaccagcagctcggctcactgagacccggtggtccagacgctgctcctggctggggtggcgctgcagggagaaccgcgagctctcaggggtcggcgggtgacttctttccggaagaaagc

SEQ ID NO: 278362 - DNA, 164 bp, Homo sapiens
  chr1:45792689-45792853
  hyper
aggaacgcgctctgcggggtgagccggactccccaactccggacgatcagcccaggactgagagccccgaagtccccaaccacaagtaagcggccccagaaggacaagtctaggtcgccgtccagagcgccatggccgcgcccgcccttcgtttgtgccacatc

SEQ ID NO: 278363 - DNA, 166 bp, Homo sapiens; identical to SEQ ID NO: 227049
  chr1:45805831-45805997
  hyper

SEQ ID NO: 278364 - DNA, 426 bp, Homo sapiens; identical to SEQ ID NO: 227050
  chr1:45956918-45957344
  hyper

SEQ ID NO: 278365 - DNA, 147 bp, Homo sapiens; identical to SEQ ID NO: 227051
  chr1:45965665-45965812
  hyper

SEQ ID NO: 278366 - DNA, 977 bp, Homo sapiens; identical to SEQ ID NO: 227052
  chr1:45986970-45987947
  hyper

SEQ ID NO: 278367 - DNA, 95 bp, Homo sapiens; identical to SEQ ID NO: 227053
  chr1:46152354-46152449
  hyper

SEQ ID NO: 278368 - DNA, 185 bp, Homo sapiens; identical to SEQ ID NO: 227054
  chr1:46153751-46153936
  hyper

SEQ ID NO: 278369 - DNA, 216 bp, Homo sapiens; identical to SEQ ID NO: 227055
  chr1:46216408-46216624
  hyper

SEQ ID NO: 278370 - DNA, 32 bp, Homo sapiens; identical to SEQ ID NO: 227056
  chr1:46269380-46269412
  hyper

SEQ ID NO: 278371 - DNA, 105 bp, Homo sapiens; identical to SEQ ID NO: 227057
  chr1:46598366-46598471
  hyper

SEQ ID NO: 278372 - DNA, 129 bp, Homo sapiens; identical to SEQ ID NO: 227059
  chr1:46712818-46712947
  hyper

SEQ ID NO: 278373 - DNA, 1885 bp, Homo sapiens; identical to SEQ ID NO: 227060
  chr1:46767964-46769849
  hyper

SEQ ID NO: 278374 - DNA, 31 bp, Homo sapiens; identical to SEQ ID NO: 227061
  chr1:46806341-46806372
  hyper

SEQ ID NO: 278375 - DNA, 85 bp, Homo sapiens
  chr1:46859840-46859925
  hyper
ggggcgatgccaggcgggccgcctctgatagcctctaggctctggcgcgcttccccgcccctcccgcgcaggcgggcgtgggatc

SEQ ID NO: 278376 - DNA, 354 bp, Homo sapiens
  chr1:46859976-46860330
  hyper
gcggcttcaactgtcgcggtaggcagcagcaggctgaagggatcatggtgcagtacgagctgtgggccgcgctgcctggcgcctccggggtcgccctggcctgctgcttcgtggcggcggccgtggccctgcgctggtccgggcgccggacggcgcggggcgcggtggtccgggcgcgacagaggcagcgagcgggcctggagaacatggacagggcggcgcagcgcttccggctccaggtgactgccggagcgtagtgggatgggcgcggcctgagggtactcgcagcggcactttcagccgccggacccgccgagggacaggggatggggcgggcagagcagatgtgtaact

SEQ ID NO: 278377 - DNA, 363 bp, Homo sapiens; identical to SEQ ID NO: 227063
  chr1:46908436-46908799
  hyper

SEQ ID NO: 278378 - DNA, 327 bp, Homo sapiens
  chr1:46932180-46932507
  hyper
ccgccccgccccgccctcctcgggccccgctccttcccaggcgcccccgcgccgccggcgctttgaagtcccaatccggcaaatagagtcaatcaattatgaagggaacaatctggcggcccctcggggagcggcggccgagcgatcccgggggattaggccgcaaatcgcgctgagcctccctaagtgacagcgagagaatcgcgcgcggcggcgacggcggcggcgggagcgggagggagcgcggccgctaacccgattatgcagatccgcggggggcgcggattaggcctcgggggcggcttcgccctaagcggctctcggatt

SEQ ID NO: 278379 - DNA, 208 bp, Homo sapiens; identical to SEQ ID NO: 197509
  chr1:46954656-46954864
  hyper

SEQ ID NO: 278380 - DNA, 391 bp, Homo sapiens
  chr1:46954904-46955295
  hyper
catccaggtgctagacaggtgagcggctgctaggagcgcaaaccagcgcacccgcggggtgtgtgggcggcgagttcagagtactggctgtggcgctgcatggtggcgcgggggtggcagtgttgttgcaggtggtgtggaactgatgggaagaggtatgtgtgcgcgcgtgtgtgtgcgcacaaccttgaagggacagtggggacgggagtccgtcggggctcccccaggtcacctctacggactccagctgccaagcgtcggggtgggaccggcgagggggaggtttctcaagacctttcaacaccccagggatcggcctgcggcttccgcggacccaagagaggcagagatccctggaccgggagccagagctcgaggagcagagatt

SEQ ID NO: 278381 - DNA, 265 bp, Homo sapiens
  chr1:46955976-46956241
  hyper
aacgcttcggatccgtcacggttttgcctcatttggaagatattacttcgcccctgaaaaaaaaaatacaaaaaaggtttggatattaagcggagacaaatccttctcagtttggaagggggcggcgcggggagggaggtggccggcgtaatgcggaccagatgcggcctggggagttgcggagccctgggcgggggctggggagggggcgcggccggcagcccagttcccagcctgcggagcgcagaggccgcccacgccctcc

SEQ ID NO: 278382 - DNA, 269 bp, Homo sapiens
  chr1:46957171-46957440
  hyper
agggctttattgacttgatggaccttggaggaaaggggctgtctgtaccgcaagggttgtgtgctccacagccgaggaaattgtgcaagttcctacctggctgtggcgatggcagggcgaccagagtcctttcccctctctagtgctagggattctgtgcgctgcaggcgggtcagctctgtccaacccctttctagaaagttctatggtctgttagttttaggtgggtgtagtgggggttgttttcaatttttcggggatttgtgttt

SEQ ID NO: 278383 - DNA, 72 bp, Homo sapiens; identical to SEQ ID NO: 197513
  chr1:46957804-46957876
  hyper

SEQ ID NO: 278384 - DNA, 80 bp, Homo sapiens
  chr1:46958670-46958750
  hyper
ctctctccaggcctcgaagttactcctcctcctccggccagtcccagttcctcaaggagccagtcttcacctcccccacc

SEQ ID NO: 278385 - DNA, 61 bp, Homo sapiens; identical to SEQ ID NO: 103376
  chr1:46958809-46958870
  hyper

SEQ ID NO: 278386 - DNA, 94 bp, Homo sapiens; identical to SEQ ID NO: 227070
  chr1:46998612-46998706
  hyper

SEQ ID NO: 278387 - DNA, 168 bp, Homo sapiens; identical to SEQ ID NO: 227073
  chr1:47069639-47069807
  hyper

SEQ ID NO: 278388 - DNA, 31 bp, Homo sapiens; identical to SEQ ID NO: 197514
  chr1:47070162-47070193
  hyper

SEQ ID NO: 278389 - DNA, 198 bp, Homo sapiens; identical to SEQ ID NO: 197515
  chr1:47078538-47078736
  hyper

SEQ ID NO: 278390 - DNA, 45 bp, Homo sapiens; identical to SEQ ID NO: 197516
  chr1:47078782-47078827
  hyper

SEQ ID NO: 278391 - DNA, 148 bp, Homo sapiens; identical to SEQ ID NO: 227075
  chr1:47691969-47692117
  hyper

SEQ ID NO: 278392 - DNA, 449 bp, Homo sapiens
  chr1:47903680-47904129
  hyper
cctgcctcagtcccccgccccctccccgcccgcgcgcaaaacgcactcgccccagaggcagcgcggccgagcccgagccgctgccggagcggagccggagagtggcggcggcggcggcagcggcaccatgaccctgggcagctgctgctgcgagatcatgtcctccgagagctccccggccgcgctgtccgaggccgacgcagacatagacgtggtgggcggcggcagcggcgggggggagctcccagctcgctccgggccccgcgccccccgggacgtgctcccccacggccacgagcctcccgcggaggaagccgaggcagacttagccgaggacgaggaggagtctggtggctgctcggacggcgagccccgcgctctggcgtcccggggggcggcggccgcagcggggagcccggggccaggcgccgcggcggcccgcggcgcag

SEQ ID NO: 278393 - DNA, 597 bp, Homo sapiens; identical to SEQ ID NO: 227084
  chr1:47973696-47974293
  hyper

SEQ ID NO: 278394 - DNA, 163 bp, Homo sapiens
  chr1:48173821-48173984
  hyper
gctgtcatttggaacgtatttgcagacacatggcttgtttttaagttaatgctttttaattcactgtttcccagttgtcgttttttattgcaaaggcggattctgcccgtgtgtgttcctttgcgggggcgggggatgggggtagcttcgcgggcaaagatcc

SEQ ID NO: 278395 - DNA, 635 bp, Homo sapiens
  chr1:48174046-48174681
  hyper
gggaaacggggaagcaggtcagagaggaagagagagacaggccggaagagactgtgcccaggagcctggacaagggatgccgtgcccagcagcctggacaagggatgccgtgcccaggagcctggacaagggatgccgtgcccaggagcctggacaagggatgccgtgcccaggagcctggacaagggatgccgtgcccaggagcctggacaagggatgccgtgcccaggagcctggacaagggatgccgtgcccagggaggggaaggccaggggccgctctagcggcgaggggcggagggtgtgctgagaaacccggctccggggacctaggctgacgcccccatctccgcctaaggcccctggggctgagcttgcttccccctggctctctggttcctttccgagtggaggagggtgaactggcccttgggagagggctggagggacgcggcgggaacgggctgagtacgcagcacccgggtcggcaagggctggggttctgagatcagagagaaaagaggacctgggagtcggaggcgatctccctggccccagccgaccctctgagctctagcgagcctgaatccggctctgggggtggcgccccccgcctgctgcggctcccggggccag

SEQ ID NO: 278396 - DNA, 578 bp, Homo sapiens; identical to SEQ ID NO: 227087
  chr1:48175232-48175810
  hyper

SEQ ID NO: 278397 - DNA, 317 bp, Homo sapiens; identical to SEQ ID NO: 227088
  chr1:48176216-48176533
  hyper

SEQ ID NO: 278398 - DNA, 179 bp, Homo sapiens; identical to SEQ ID NO: 197521
  chr1:48190695-48190874
  hyper

SEQ ID NO: 278399 - DNA, 62 bp, Homo sapiens; identical to SEQ ID NO: 197522
  chr1:48191178-48191240
  hyper

SEQ ID NO: 278400 - DNA, 675 bp, Homo sapiens
  chr1:48462497-48463172
  hyper
ggcggcgcccctcagcggggcggggagcccccagttgggcacggagtttcctctggagcacggggctccagccgcaggatgctgggcgccctctggggcgtggctgactgtccctgtcggacctgggggtttctctggggccgggctccgtctgttggaagagggagaccctctagggctgggcccctcccccgggcgctcaacctcgctggccgagcccccgggtgctgagggcgtgttggggtccgggggcgcgcggggtcccggagctgcgtcgcggtccaggggcgcgcggggttcctggggcagaaccgagaacccggggtgcgcaagggtcccggggttatgctgggcacccggggcacgcaagggtcccaggggtgcgcggcgctccaggaggcgcgcagtgggacaagtgcggcggaaggcgcggcaggggtggggggcggctctggggcgaccggctgcccccgagcccggctcagaggggcggcgggcggccgcgcggccgctgcccgggctccgccatgctgctccgcggccgggagggagggagagaggagggcgggagagcggcgcggagccgggccgggctgggggctggggccgctggggcgggggaggggaggacctggcgcggggggcgggggggcgaggggccggggccgcgccggg

SEQ ID NO: 278401 - DNA, 59 bp, Homo sapiens; identical to SEQ ID NO: 197523
  chr1:48463406-48463465
  hyper

SEQ ID NO: 278402 - DNA, 141 bp, Homo sapiens; identical to SEQ ID NO: 227091
  chr1:48559546-48559687
  hyper

SEQ ID NO: 278403 - DNA, 862 bp, Homo sapiens; identical to SEQ ID NO: 227092
  chr1:48937290-48938152
  hyper

SEQ ID NO: 278404 - DNA, 123 bp, Homo sapiens
  chr1:49242176-49242299
  hyper
agcagtggctccccccggtcccctccgcccgggcccccggcccctcccggggtcccagcccccgcccgggtcccaccgtccctccccgcccgcttgctcacctgccagcgccaggatctgggc

SEQ ID NO: 278405 - DNA, 108 bp, Homo sapiens
  chr1:49243013-49243121
  hyper
ggcaatcttgattgaatctcaaagtgtaaacttggaagccagcagaagtttggagtgttttaaatgtagccaccctacccgcgcccccagccccgcaccctccccgcg

SEQ ID NO: 278406 - DNA, 111 bp, Homo sapiens
  chr1:50489672-50489783
  hyper
ccccgcggcgcgagcccgggcctgagctgggacttgggccccggggcgctgctcctccgcaaccgatccaccgcatcctggcaactgagcaggctccgccacccctagagc

SEQ ID NO: 278407 - DNA, 99 bp, Homo sapiens; identical to SEQ ID NO: 227097
  chr1:50717512-50717611
  hyper

SEQ ID NO: 278408 - DNA, 135 bp, Homo sapiens; identical to SEQ ID NO: 197529
  chr1:50893877-50894012
  hyper

SEQ ID NO: 278409 - DNA, 81 bp, Homo sapiens; identical to SEQ ID NO: 227107
  chr1:50896802-50896883
  hyper

SEQ ID NO: 278410 - DNA, 62 bp, Homo sapiens; identical to SEQ ID NO: 197530
  chr1:51425638-51425700
  hyper

SEQ ID NO: 278411 - DNA, 70 bp, Homo sapiens; identical to SEQ ID NO: 227109
  chr1:51426055-51426125
  hyper

SEQ ID NO: 278412 - DNA, 144 bp, Homo sapiens; identical to SEQ ID NO: 227110
  chr1:51434359-51434503
  hyper

SEQ ID NO: 278413 - DNA, 171 bp, Homo sapiens; identical to SEQ ID NO: 197531
  chr1:51442806-51442977
  hyper

SEQ ID NO: 278414 - DNA, 138 bp, Homo sapiens; identical to SEQ ID NO: 227112
  chr1:51985092-51985230
  hyper

SEQ ID NO: 278415 - DNA, 203 bp, Homo sapiens; identical to SEQ ID NO: 197532
  chr1:52081941-52082144
  hyper

SEQ ID NO: 278416 - DNA, 261 bp, Homo sapiens; identical to SEQ ID NO: 227113
  chr1:52082578-52082839
  hyper

SEQ ID NO: 278417 - DNA, 34 bp, Homo sapiens; identical to SEQ ID NO: 197533
  chr1:52194844-52194878
  hyper

SEQ ID NO: 278418 - DNA, 322 bp, Homo sapiens; identical to SEQ ID NO: 197534
  chr1:52194968-52195290
  hyper

SEQ ID NO: 278419 - DNA, 792 bp, Homo sapiens; identical to SEQ ID NO: 35696
  chr1:52195348-52196140
  hyper

SEQ ID NO: 278420 - DNA, 247 bp, Homo sapiens; identical to SEQ ID NO: 227116
  chr1:52344233-52344480
  hyper

SEQ ID NO: 278421 - DNA, 192 bp, Homo sapiens; identical to SEQ ID NO: 227117
  chr1:52521176-52521368
  hyper

SEQ ID NO: 278422 - DNA, 180 bp, Homo sapiens; identical to SEQ ID NO: 221355
  chr1:52608469-52608649
  hyper

SEQ ID NO: 278423 - DNA, 161 bp, Homo sapiens; identical to SEQ ID NO: 227118
  chr1:52832014-52832175
  hyper

SEQ ID NO: 278424 - DNA, 968 bp, Homo sapiens; identical to SEQ ID NO: 227119
  chr1:53017722-53018690
  hyper

SEQ ID NO: 278425 - DNA, 166 bp, Homo sapiens
  chr1:53019302-53019468
  hyper
tgggggtggcgggcgccccagtgctgccccagtctggttcctagtctctgccgaggcccccgagctggaagccgagcccgagggccgcctcggcgcctcgctcccaaggctgctccccctggggaggaaggccggcctggaatgggtaccctctggcctggcactc

SEQ ID NO: 278426 - DNA, 150 bp, Homo sapiens
  chr1:53168677-53168827
  hyper
cccaaagggttacacgttggtaaaggagccgccccgtgagagagaccggaccaatcacgtttgctgtgaggtcactttggaggcctgagattggtgctcgtgtctaaacggacccgatctttctgagtggctggtgcagctgagggaggt

SEQ ID NO: 278427 - DNA, 306 bp, Homo sapiens; identical to SEQ ID NO: 227124
  chr1:53387231-53387537
  hyper

SEQ ID NO: 278428 - DNA, 211 bp, Homo sapiens
  chr1:53527606-53527817
  hyper
ccgggtgggggttcggggggcgtggtgcggcggccggggctgagaggggtcggtgcggcggctctgcctccccgggaagtgggaaccggccaagtcccgagcggggaggggcaggctttctcctgcccgcgcctggggggaccctacgcctgtgtccgaaggaggccggcgtccagcagatgctcccggggcgggtggggagtgggggaag

SEQ ID NO: 278429 - DNA, 209 bp, Homo sapiens; identical to SEQ ID NO: 227126
  chr1:53662229-53662438
  hyper

SEQ ID NO: 278430 - DNA, 53 bp, Homo sapiens; identical to SEQ ID NO: 227127
  chr1:53662694-53662747
  hyper

SEQ ID NO: 278431 - DNA, 55 bp, Homo sapiens; identical to SEQ ID NO: 197539
  chr1:53686483-53686538
  hyper

SEQ ID NO: 278432 - DNA, 620 bp, Homo sapiens
  chr1:54204704-54205324
  hyper
gccgggacgccagcctcggatctcgggccccgcacacgcccctccctcggccgcgggccgcgccccctctcacctcgcagcggcagctgcagatcgctgggcgcccggctcggcgcgcctccactggcgcagcagcccccgcagccgccgcagccgccgccgccgccgccgcgtcctgcggggcggttccccgggggacgggggcgggcccgcgtctgcccaacagccgctccagccactggctggccgcggccgcccggctcaggccaatcgcggcgcgagggcggggcatccccccctgggggtctgggcggggcccgacgcggggctgagcagagggtttgacaggcggcggccggctggatccccgcgctgcccgctgttctcagacggccgagccgggcaggacggcggggcggcgccgcggcgagagaggctgggctcgggggtcggcggagtgcgctgggcgtgaggagtgccgggctgaacccggctccctgcccgcctctccactagccccgggcaggatcctcccttctcccggtcggttttcccctccgtcagatgggaacgacgctgtctgctaacgcgaagcggacagatgcgaaagtgcttgaaaa

SEQ ID NO: 278433 - DNA, 438 bp, Homo sapiens; identical to SEQ ID NO: 227131
  chr1:54303838-54304276
  hyper

SEQ ID NO: 278434 - DNA, 174 bp, Homo sapiens; identical to SEQ ID NO: 227132
  chr1:54355496-54355670
  hyper

SEQ ID NO: 278435 - DNA, 293 bp, Homo sapiens; identical to SEQ ID NO: 103517
  chr1:54665659-54665952
  hyper

SEQ ID NO: 278436 - DNA, 148 bp, Homo sapiens; identical to SEQ ID NO: 197541
  chr1:54965082-54965230
  hyper

SEQ ID NO: 278437 - DNA, 53 bp, Homo sapiens; identical to SEQ ID NO: 227135
  chr1:55230330-55230383
  hyper

SEQ ID NO: 278438 - DNA, 458 bp, Homo sapiens; identical to SEQ ID NO: 227136
  chr1:55266563-55267021
  hyper

SEQ ID NO: 278439 - DNA, 236 bp, Homo sapiens; identical to SEQ ID NO: 197543
  chr1:55352448-55352684
  hyper

SEQ ID NO: 278440 - DNA, 193 bp, Homo sapiens; identical to SEQ ID NO: 197544
  chr1:55353149-55353342
  hyper

SEQ ID NO: 278441 - DNA, 237 bp, Homo sapiens
  chr1:55446120-55446357
  hyper
cgccctggagcgctcgcgggggcgtgacggcccccaggacccaaggttccgatccgcgccaaggcgttccggtcagcagcagccccgcggctcctcgggccccgccgcgctggcaagccccagtccccgccagcccaatcgtgctggcgctttaaggacgggcggggcgggctgggcgacagcgctggacacctggagctgcccgaggacgcggaggagaggtggggcgggcgtcac

SEQ ID NO: 278442 - DNA, 192 bp, Homo sapiens
  chr1:55446422-55446614
  hyper
cccgcggggagcgcgcagccctcggggcgggcgccggggtgaggcctggctcggtccctgcgcaccgggtgcgggcggcggagagggcgcggctggtgagccctgggagggcccaggagccagacctcggttttgcgggctggggagcagggctcgggggcagcggccaggcccctccgcccctaacacccg

SEQ ID NO: 278443 - DNA, 485 bp, Homo sapiens
  chr1:55462188-55462673
  hyper
cctgcctcggggtgtcatgggagcccgctcgcaaggatcccgaaagctggggttagcgcgccctctgctggacgatgaaagactccgcgcgctctgctccccagtcccccaggtggcccgggggaggtgaagtaaggcgggagggcggggggactacaggagaggagggggagctgctgcacccgaacatttccagcgcaccctacacacatgtccttacttaatccctagcccgactctgtggaagagcttaggtgagacccattttccagagttcctacctgtttcctacttgctactgaatttcttactcgtagttaccttattttttttttttttttttaagaggagaagcgactcagagagaaaaggggcgaagaaggctgggccgtgtagaggaaagaaaaggcgcgagagaagaagactgcccgggtgaccgcgaggcctctgaggaatggctgaagagcagatccatctacatgggg

SEQ ID NO: 278444 - DNA, 354 bp, Homo sapiens; identical to SEQ ID NO: 197546
  chr1:55505162-55505516
  hyper

SEQ ID NO: 278445 - DNA, 50 bp, Homo sapiens
  chr1:55505559-55505609
  hyper
tgctgctgctgctgctcctgggtcccgcgggcgcccgtgcgcaggaggac

SEQ ID NO: 278446 - DNA, 331 bp, Homo sapiens; identical to SEQ ID NO: 221363
  chr1:56943370-56943701
  hyper

SEQ ID NO: 278447 - DNA, 747 bp, Homo sapiens; identical to SEQ ID NO: 221364
  chr1:57044295-57045042
  hyper

SEQ ID NO: 278448 - DNA, 134 bp, Homo sapiens
  chr1:57110514-57110648
  hyper
cttttacagcccctcgctcccgacatgcgaggcccgtctcttcttccagtttgacttccaagtctttccattccctaggatcgggccccagtctcaccccctattttcacccccttcggttttcctcagaaagg

SEQ ID NO: 278449 - DNA, 168 bp, Homo sapiens
  chr1:57110714-57110882
  hyper
cggaccccgcgcatctggcgcagcccctcccgcactcccgcccagcgccccgcgtccccggcccccgctgtcgctgcttcgggttccgccgcaggagcctctcactcccgggagcgggcgcctcgcgctccctccctcggccccgccccgcccgccgctcgcccgttg

SEQ ID NO: 278450 - DNA, 230 bp, Homo sapiens; identical to SEQ ID NO: 197549
  chr1:57888067-57888297
  hyper

SEQ ID NO: 278451 - DNA, 192 bp, Homo sapiens; identical to SEQ ID NO: 227144
  chr1:58714602-58714794
  hyper

SEQ ID NO: 278452 - DNA, 426 bp, Homo sapiens; identical to SEQ ID NO: 227148
  chr1:59012378-59012804
  hyper

SEQ ID NO: 278453 - DNA, 435 bp, Homo sapiens; identical to SEQ ID NO: 197550
  chr1:59042557-59042992
  hyper

SEQ ID NO: 278454 - DNA, 196 bp, Homo sapiens; identical to SEQ ID NO: 227150
  chr1:59247411-59247607
  hyper

SEQ ID NO: 278455 - DNA, 101 bp, Homo sapiens; identical to SEQ ID NO: 197551
  chr1:59249797-59249898
  hyper

SEQ ID NO: 278456 - DNA, 453 bp, Homo sapiens; identical to SEQ ID NO: 227152
  chr1:59281467-59281920
  hyper

SEQ ID NO: 278457 - DNA, 121 bp, Homo sapiens; identical to SEQ ID NO: 197553
  chr1:59369443-59369564
  hyper

SEQ ID NO: 278458 - DNA, 190 bp, Homo sapiens
  chr1:59369778-59369968
  hyper
agcaggctttatgcggctgtcgggctcggggcgaggagccggctccaccctcccagtctgggcccatcctccggcctcggccagccccttccctccctctctttggcgttcgcgttccctcggcctagcagacctcttagaatgtttgttttccttctgagaaagagcggagggacgtggccaagaccaa

SEQ ID NO: 278459 - DNA, 62 bp, Homo sapiens
  chr1:59612306-59612368
  hyper
ggagaaacttcagagcggcaggtgccttcgtttcccgttacctgctgagtctagtcccttcc

SEQ ID NO: 278460 - DNA, 190 bp, Homo sapiens; identical to SEQ ID NO: 197554
  chr1:59762030-59762220
  hyper

SEQ ID NO: 278461 - DNA, 31 bp, Homo sapiens; identical to SEQ ID NO: 227154
  chr1:59762509-59762540
  hyper

SEQ ID NO: 278462 - DNA, 219 bp, Homo sapiens
  chr1:60280122-60280341
  hyper
cgcctgagcccagccggtgccctgctgcccctctgcctcttcggccactggggctgagcttcagccttaccaatccccgccgcgcacgcgcgctcgcttcccgcgcgcaacctcccacccccgccctcactgcacctgccaggtcataaacctcttcccacccactctcactctctacccaaggctcaggcttgtctcacgttgattggccagagccca

SEQ ID NO: 278463 - DNA, 279 bp, Homo sapiens; identical to SEQ ID NO: 35762
  chr1:60280812-60281091
  hyper

SEQ ID NO: 278464 - DNA, 230 bp, Homo sapiens; identical to SEQ ID NO: 103568
  chr1:60539399-60539629
  hyper

SEQ ID NO: 278465 - DNA, 82 bp, Homo sapiens; identical to SEQ ID NO: 227157
  chr1:60747090-60747172
  hyper

SEQ ID NO: 278466 - DNA, 133 bp, Homo sapiens
  chr1:61508554-61508687
  hyper
ggccactcctcctcctcacccggacggctgcaaggaaccctcattctgtgcaaagccagggcgcaatcctgtgcagtaaacctcccctcgcgaagagggaagcggggttcgctgttgcaccccaggccgagcg

SEQ ID NO: 278467 - DNA, 215 bp, Homo sapiens
  chr1:61508954-61509169
  hyper
cgatcagaaagtccggctcccctggccccagacagtggctcccgggggaaccagcgtggagggtgaggagggacctggccttcgaaggcaggaaggacagaacccccaagccacgacggcagcggggcgcggggacggccgggctccagccacagaggcccgaactcggcccgcactgcccggcggcaggccgcgaaggagccccgggtagtggg

SEQ ID NO: 278468 - DNA, 40 bp, Homo sapiens; identical to SEQ ID NO: 197558
  chr1:61516034-61516074
  hyper

SEQ ID NO: 278469 - DNA, 280 bp, Homo sapiens; identical to SEQ ID NO: 197559
  chr1:61519704-61519984
  hyper

SEQ ID NO: 278470 - DNA, 359 bp, Homo sapiens; identical to SEQ ID NO: 197560
  chr1:61547845-61548204
  hyper

SEQ ID NO: 278471 - DNA, 771 bp, Homo sapiens
  chr1:61548437-61549208
  hyper
cacgcataccccagcgcccggcagttatgtattctccgctctgtctcacccaggtaagccgcggcgtggatgcggagggcttgggggccggggcgccgggggcagggctggggctgggtggggggcaccggggccgtcgctccggccgggcccagggcgtgcgtctcggtgtgtgtctgtgtctgcgcgtgtttctgtgtgtgtgcgcgcgtgtgcccgcgggtggggggggggatcccgcttaaagaaagtaactttgtttccatgcgggtgcattcctcttgcacggccatttgtgtgggcacatggctaatggcgccctcttattaatgcgttaattaatatcggggcgacggactgcggaacagcagtgttttcggacaccccgcacgtgtttcggcggggttgcagtccatgacacgcagaaatctggctcagcgtttctgctgccgggagcagggattccgtagtgccgcagcgcccggggagggggccgccgacggagcccaccgctcaccccgcacgctcgggccggctgcagtcctcgggtgcggggagacctcgggtgcctgcgcccaacggcccgctccccgcagcctgcgctgccgcagccccccgccgtcttcccgaactcttacttttgtttattgtttgtcagccttcggggtccggccgcggaaaggacgcgggctcccgtcccggccccggcccggacagcgcccctcggacgcgggcaggctgcggctagccctcggctgagcggggctacgt

SEQ ID NO: 278472 - DNA, 267 bp, Homo sapiens
  chr1:61549310-61549577
  hyper
cccacgttgtgcagggcgccgaacgccggaggccgcgggccgcgggccgggtagcgccgggcagagttgggctcctagccgggagccggagcggcggcccgggccggacacggctccccccgccgccgccgccgccaccaccaccaccgccaccgcgcgactccggccgctccgcgcgcaggacgggggcaacttttcccctccgactcaactcagagcatggggctcttgcgccccaccgcctctcctttccgtgcccccctgtcc

SEQ ID NO: 278473 - DNA, 223 bp, Homo sapiens; identical to SEQ ID NO: 227160
  chr1:62190978-62191201
  hyper

SEQ ID NO: 278474 - DNA, 109 bp, Homo sapiens; identical to SEQ ID NO: 197563
  chr1:62207660-62207769
  hyper

SEQ ID NO: 278475 - DNA, 420 bp, Homo sapiens; identical to SEQ ID NO: 197564
  chr1:62207842-62208262
  hyper

SEQ ID NO: 278476 - DNA, 519 bp, Homo sapiens; identical to SEQ ID NO: 510
  chr1:62208291-62208810
  hyper

SEQ ID NO: 278477 - DNA, 210 bp, Homo sapiens
  chr1:62784145-62784355
  hyper
caaagcgccctcggcggcgtctagagcactcggagctgccccattgcctccgcccaaggtcgcggcccaaagggagccctggaaagttcagccaggggccgaggagtgccagggttggcactacggggagacttttgcgacaggagagagactaagagctcgattccaggtagcagtgggagcccgcggcaaagaacgcccagtcccgca

SEQ ID NO: 278478 - DNA, 224 bp, Homo sapiens
  chr1:62784646-62784870
  hyper
tgggcgaggcgggtggcagaggcaagaggagagtggtcgagcgccggggccaacactcgggtcgcgcagggcgggtgttgaacaccccagcagacgcactgcgggggactggggtcgcagagtcccttaccttggcgagctgcggaagtcctgcgcgaggcggcccgcggtgcacggggccggggcagctaggcgcacaccccggcttcggagcgcacgcaacc

SEQ ID NO: 278479 - DNA, 99 bp, Homo sapiens; identical to SEQ ID NO: 197566
  chr1:63791878-63791977
  hyper

SEQ ID NO: 278480 - DNA, 163 bp, Homo sapiens; identical to SEQ ID NO: 197567
  chr1:63792016-63792179
  hyper

SEQ ID NO: 278481 - DNA, 71 bp, Homo sapiens; identical to SEQ ID NO: 523
  chr1:63792231-63792302
  hyper

SEQ ID NO: 278482 - DNA, 266 bp, Homo sapiens; identical to SEQ ID NO: 197569
  chr1:63793072-63793338
  hyper

SEQ ID NO: 278483 - DNA, 200 bp, Homo sapiens; identical to SEQ ID NO: 227175
  chr1:63989066-63989266
  hyper

SEQ ID NO: 278484 - DNA, 574 bp, Homo sapiens
  chr1:64239452-64240026
  hyper
tgtcaagtagcctcgaaggtccccggcgctcggttcggtggcgagtttgaggagtgtgggggaggggaggggagggagcgtgcccgagacgcgggagccgcgaccgctttctgcgaagtcggggagggtgcgggcgttgagaggctgcagcagagggcgctgggtcgccagcctgggccgcgtctcccattggtcggggctggggcgctgggctggagagttggtggaaagtgacaagttgagcgagagagggagcgtggagagctggagcagccgccaccgccgccgccgagggagccccgggacggcagcccctgggcgcagggtgcgctgttctcggagtccgacccagggcgactcacgcccactggtgcgacccggacagcctgggactgacccgccggcccaggcgaggctgcagccagagggctgggaagggatcgcgctcgcggcatccagaggcggccaggcggaggcgagggagcaggttagagggacaaagagctttgcagacgtccccggcgtcctgcgagcgccagcggccgggacgaggcggccgggagcccgggaagag

SEQ ID NO: 278485 - DNA, 214 bp, Homo sapiens
  chr1:64240783-64240997
  hyper
cactttgtgcaaaatgtgctgtcagaggcggcctgcggctccaaagtgctttgggtgtgcacgcgcgcgcgcgcgcgtgtgtgtgtgcgtgttacaaacaagagggggaaaagccatctaatgcatatttgattttggtaatctctaaagacaatcgcaacagttagagaaagacttcaccgcaagccggagcgtcttagttcgctgcgggaag

SEQ ID NO: 278486 - DNA, 970 bp, Homo sapiens
  chr1:64936233-64937203
  hyper
tggtggccgcccgcgctcccgcgctgtagccgggcgccccctaagtttgggagccttcgccaccgcggcgcggagcagagcctgcaacagaggaagaaacttttgcggggtgcgccgcgcttttgcggggggcacctcccgcggcccgcttccccgcgcccggagcccgtcggcggggagtggggggaggcagcatggcccgccagccggaggaagaggagacggccgtggcccgggcgcggcggccgcccctctggctgctctgcctggtcgcgtgctggctcctgggcgccggggccgaagccgacttctccatcctggacgaggcgcaagtgctggcgagccagatgcggaggctggcggccgaggagctgggggtcgtcaccatgcaggtaagtggcccccgagctggccagacatcccgcctttctcctttgctcaaactcccatcccactcccggtacaagtcccctggactgtgtgcatcggctccttgcatacatagagcccggcttcccgtcggacccctctgtcctctgcacagaccccctgacaatacaccaactcttcttccatgcattcgtctacccctgcccttctctggagaatcccctgccctctgcacggaacccacttgaccctgcacagcccccctcttctgagtaccagcgccttcatctcgtcaaggattctccagtttcctcgcacgtcttctctaatttgcacacatttcccatgtaggcttgttttcaccctgccacgcctgcaaactccccctttgtgtccccatcccagagcagccagccccgtctggctcggacgattttccgaagtccccaccccacccccttgaccgcgtcctcgcgtcctcgcgtcctccctaccgaggcgcaccaatgggcgccgggagggaaggcgccgcagagtacgcagctgccccggggacacctaggtcccggcggagagcggc

SEQ ID NO: 278487 - DNA, 419 bp, Homo sapiens; identical to SEQ ID NO: 35809
  chr1:65210939-65211358
  hyper

SEQ ID NO: 278488 - DNA, 321 bp, Homo sapiens; identical to SEQ ID NO: 227179
  chr1:65431033-65431354
  hyper

SEQ ID NO: 278489 - DNA, 60 bp, Homo sapiens; identical to SEQ ID NO: 197573
  chr1:65468242-65468302
  hyper

SEQ ID NO: 278490 - DNA, 155 bp, Homo sapiens; identical to SEQ ID NO: 197574
  chr1:65468660-65468815
  hyper

SEQ ID NO: 278491 - DNA, 180 bp, Homo sapiens
  chr1:65468816-65468996
  hyper
cgtgactcggcgggagcccaaaagtttcccaggtttcctcagcctagaaaagcgtgggtgggtgtcccggcctggctccaggcgccctttaagttgtatttcttcgggtaactgggttgccctttaaaatgtggagattgtcctttagaaagaaagaaaatctcacgagctcgctggccc

SEQ ID NO: 278492 - DNA, 42 bp, Homo sapiens; identical to SEQ ID NO: 227181
  chr1:65532728-65532770
  hyper

SEQ ID NO: 278493 - DNA, 50 bp, Homo sapiens; identical to SEQ ID NO: 227182
  chr1:65533816-65533866
  hyper

SEQ ID NO: 278494 - DNA, 153 bp, Homo sapiens; identical to SEQ ID NO: 197576
  chr1:65534604-65534757
  hyper

SEQ ID NO: 278495 - DNA, 38 bp, Homo sapiens; identical to SEQ ID NO: 197577
  chr1:65614491-65614529
  hyper

SEQ ID NO: 278496 - DNA, 295 bp, Homo sapiens; identical to SEQ ID NO: 197578
  chr1:65614752-65615047
  hyper

SEQ ID NO: 278497 - DNA, 39 bp, Homo sapiens; identical to SEQ ID NO: 197579
  chr1:65720329-65720368
  hyper

SEQ ID NO: 278498 - DNA, 87 bp, Homo sapiens
  chr1:65731850-65731937
  hyper
ggcttggccttctccagtcctcgggagtcagccaccgtctctggcttgttataggattcccacctcgtggtgggcaatgatatatac

SEQ ID NO: 278499 - DNA, 393 bp, Homo sapiens
  chr1:65774903-65775296
  hyper
cctcccaacccacgtcgtagtagtcccctcccccgaccaccccgccccgtttcccttcaacccccctcctcacgaacctcccctcccttcctacctccctttccttccctccccgcgggccagcggctttggcgctgccctgctgcgcggcggggcgacgcggcgacacctataggattgcttccgggcactcctcagccaggaggtgctggcctggggcccggagctcggcagggccgggcggctccgcggcgttggcccagaggacgcgcgcccccgcccggccgcgtctccttccctccctccctcctcccggcgccccgagccgagctcagcccagggcggcggcttcgcctcgcccggcgaagcttctctccggtggccgctccttct

SEQ ID NO: 278500 - DNA, 461 bp, Homo sapiens
  chr1:65775326-65775787
  hyper
ttaatttttttttttttttaattccttcttcagccctttccaccttccatctcccttttcgcttcccaggttgattattttctcttttctccgggcttgcccatgagcctcctcgggagctaccggaaaaagaccagcaacgatggttatgaatctttgcagctggtggacagtaacggggacttaagtgcgggaagcggcggggttggcggcaagcagagagtgaacgccggggcagcggcgcggagtcccgcccgacagcctccggaccgcgccagcaccatggacagctcaggtagcgctgcccgaggggagtgcagcgctgagccccgcgcggcctccggagcctcccagtcgcccggcccgaggcccccccgtggtcccccagccccggtttgcgagagagccgggctggaggcgaaggcttctaataccacctgggtgtcgagtctctaatttct

SEQ ID NO: 278501 - DNA, 81 bp, Homo sapiens; identical to SEQ ID NO: 197581
  chr1:66258064-66258145
  hyper

SEQ ID NO: 278502 - DNA, 230 bp, Homo sapiens; identical to SEQ ID NO: 197582
  chr1:66258847-66259077
  hyper

SEQ ID NO: 278503 - DNA, 703 bp, Homo sapiens; identical to SEQ ID NO: 227191
  chr1:66797585-66798288
  hyper

SEQ ID NO: 278504 - DNA, 60 bp, Homo sapiens; identical to SEQ ID NO: 197583
  chr1:66999412-66999472
  hyper

SEQ ID NO: 278505 - DNA, 50 bp, Homo sapiens; identical to SEQ ID NO: 197584
  chr1:66999673-66999723
  hyper

SEQ ID NO: 278506 - DNA, 349 bp, Homo sapiens
  chr1:67390718-67391067
  hyper
gggcttcttcaggcggtggcggcagcagcgaaggtggcggcggcagcagcggcagcggctgtaagtgcagcctccacaagccatctctccccttctattccagtttgggatgaggggctcctgaggtgtcctcagtcccctttctctccttcccctcccccacggcagtgtaccgcccggaagacccttaacttccggggaggggctgccgcagaacgcgcctggcttgctctccgccggctgccaaaggcgcatgcgcagcttcctccctctggccatcgactgcctcccagcgccgcctttttgccttcgcggtggtggcgccgcgctgggaatccgctgcggagtg

SEQ ID NO: 278507 - DNA, 166 bp, Homo sapiens; identical to SEQ ID NO: 227195
  chr1:67395533-67395699
  hyper

SEQ ID NO: 278508 - DNA, 37 bp, Homo sapiens
  chr1:67773095-67773132
  hyper
tcaacaaagtgccacgtctctatggctgtgaacgctg

SEQ ID NO: 278509 - DNA, 61 bp, Homo sapiens
  chr1:67773780-67773841
  hyper
tatatatatatgtatatatatatttttaaagtcttccaatacgatccgaaatggcttctct

SEQ ID NO: 278510 - DNA, 138 bp, Homo sapiens; identical to SEQ ID NO: 197585
  chr1:68001181-68001319
  hyper

SEQ ID NO: 278511 - DNA, 135 bp, Homo sapiens; identical to SEQ ID NO: 227198
  chr1:68150809-68150944
  hyper

SEQ ID NO: 278512 - DNA, 115 bp, Homo sapiens; identical to SEQ ID NO: 197586
  chr1:68297572-68297687
  hyper

SEQ ID NO: 278513 - DNA, 606 bp, Homo sapiens; identical to SEQ ID NO: 197587
  chr1:68297773-68298379
  hyper

SEQ ID NO: 278514 - DNA, 712 bp, Homo sapiens; identical to SEQ ID NO: 197588
  chr1:68298601-68299313
  hyper

SEQ ID NO: 278515 - DNA, 175 bp, Homo sapiens; identical to SEQ ID NO: 197589
  chr1:68696600-68696775
  hyper

SEQ ID NO: 278516 - DNA, 574 bp, Homo sapiens
  chr1:68697037-68697611
  hyper
ggagctgagggcgctctcctaagcgccaaaagaggacggggacattcacagtcaccggctctcggggctctaagtagtgggggaagggatattcacgagtgggcaggaggccaaaagcaacacctttcggatacgcttttcccctccgacctctccaacttcccgcggcgctggtcaaggactccctcccaccccaccccatcccacccaacctcccggccgacaattcggacctgtccacggcagagcgtggggtggagtgcggcgggaaagcagagggcgcgaaggtcgggaccccaaattgcaaaccctcagcccctagcaaagacgaccaaatgcatttacaaccgtgcaagtatctcagccttgtaacagagctccgggtttgcgccgggcacagttccccgactcttctgttgttcctaataaagtcgattacgttgccctcccggagctgattggaagggaaccgagaggaaaagggggggaacgcgggaaaaagcgggggggggggggggcgagcaatcaactttgtaacccagcgcttcctcgcgcgatccgtcgccatgcttaa

SEQ ID NO: 278517 - DNA, 427 bp, Homo sapiens; identical to SEQ ID NO: 197591
  chr1:68698086-68698513
  hyper

SEQ ID NO: 278518 - DNA, 145 bp, Homo sapiens
  chr1:70032826-70032971
  hyper
ccagggcagcagccgcaaccccagaatgaggagaggacttaagagcaggcacaaggttcgctgccatgactgatgtgaagcgacctgacgcacaagcggagacttttctccttggcagccaacaacctgcagcaggcaaggcggg

SEQ ID NO: 278519 - DNA, 231 bp, Homo sapiens; identical to SEQ ID NO: 197592
  chr1:70033272-70033503
  hyper

SEQ ID NO: 278520 - DNA, 174 bp, Homo sapiens
  chr1:70034574-70034748
  hyper
ggcaagagaccttaaagggttacatactgcgaaaaggaaaggtaaatgttgggcgctggtgctgggaccattggttccgctgaaattaggtttagctcctcgttattatcttgggtatctccagtcagcttttttcccagaggtgtctgagggatgaagcgcgtgtttgatcgt

SEQ ID NO: 278521 - DNA, 58 bp, Homo sapiens; identical to SEQ ID NO: 197594
  chr1:70035030-70035088
  hyper

SEQ ID NO: 278522 - DNA, 106 bp, Homo sapiens; identical to SEQ ID NO: 197595
  chr1:70035537-70035643
  hyper

SEQ ID NO: 278523 - DNA, 672 bp, Homo sapiens; identical to SEQ ID NO: 227204
  chr1:70671105-70671777
  hyper

SEQ ID NO: 278524 - DNA, 325 bp, Homo sapiens; identical to SEQ ID NO: 227205
  chr1:70820330-70820655
  hyper

SEQ ID NO: 278525 - DNA, 131 bp, Homo sapiens
  chr1:71512731-71512862
  hyper
cagcgcgggtggcacgcgtcttcatgtggctcgcataccagtgcggcgccctgatggccagcgcccgctcgacggccatggcgctggcgatgaacaacgaggagagcccgaaaacagtcatggtcagcccg

SEQ ID NO: 278526 - DNA, 117 bp, Homo sapiens
  chr1:71513747-71513864
  hyper
aagtagcactggacttgcggaccccaggcaaactgccgaggcgcacctgagcgctcgtcctcctgcttcttcaaccacaaacgctcctacagggacgggatccttctcctgaagtcc

SEQ ID NO: 278527 - DNA, 44 bp, Homo sapiens
  chr1:72747787-72747831
  hyper
gtgctttagcatcacgagtccagcttgctacctgccccagcata

SEQ ID NO: 278528 - DNA, 383 bp, Homo sapiens; identical to SEQ ID NO: 197597
  chr1:72748267-72748650
  hyper

SEQ ID NO: 278529 - DNA, 612 bp, Homo sapiens; identical to SEQ ID NO: 197598
  chr1:72749029-72749641
  hyper

SEQ ID NO: 278530 - DNA, 108 bp, Homo sapiens
  chr1:72750578-72750686
  hyper
ggaaataattgtgaaatgacagactctcactaatatcgatgccaaatacctaagtaacactgtcatcttgttaactgcatttttctatcttgcgtggcacgctgatgg

SEQ ID NO: 278531 - DNA, 57 bp, Homo sapiens; identical to SEQ ID NO: 227208
  chr1:74663885-74663942
  hyper

SEQ ID NO: 278532 - DNA, 42 bp, Homo sapiens; identical to SEQ ID NO: 227209
  chr1:75594039-75594081
  hyper

SEQ ID NO: 278533 - DNA, 55 bp, Homo sapiens; identical to SEQ ID NO: 227210
  chr1:75595516-75595571
  hyper

SEQ ID NO: 278534 - DNA, 138 bp, Homo sapiens
  chr1:75597687-75597825
  hyper
ttggaatcaattggcgtttgggctaaaaaccctcattactaagaccaaacaaacaaacaaaaactcttttgatttttagcgcacccctgtaaagtaggaagataacttttccgttgccccagccgaggatgagcgtgg

SEQ ID NO: 278535 - DNA, 67 bp, Homo sapiens
  chr1:75598806-75598873
  hyper
aacgagatctcccagagaggaccggcagggggatggctaatattaacttgtgcgcagctgcgcgaaa

SEQ ID NO: 278536 - DNA, 68 bp, Homo sapiens
  chr1:75603159-75603227
  hyper
aatgtgtgacacatcctggtctggacgcgccggatgtgtgtggatgcgctggagtcagccactggctt

SEQ ID NO: 278537 - DNA, 146 bp, Homo sapiens
  chr1:76080132-76080278
  hyper
ttaaggatcatgattttaaacgctttccagtaagtgctttgagtactccggagcaattaaaaagcaagctgacgcgccaagataaagttgtgtccccctagtgacctctagagcggagctaagctcccacaagccagacttgggag

SEQ ID NO: 278538 - DNA, 141 bp, Homo sapiens
  chr1:76081201-76081342
  hyper
gctaggagcccagtcgcttctctccccactgcccagaggctaggaggtgcaacagatagatacccaagctcgccgagtagcaaaggggtggggtgagagaggagtctccaggtttccccaggttgcaaaaggggcacaaac

SEQ ID NO: 278539 - DNA, 211 bp, Homo sapiens
  chr1:76081826-76082037
  hyper
cggcggcggctgctgtgctgctcctgctgctggagggggcagcgctgggtcccctgagcgcccgcccagcgctgacctcccccttctccacaccctccctcccccacgcccccacccccggtgtcccgtctgagccgccagcccccatccaaccggctaccgcgccgtcatccagcagcctctactggaaagacaacggtggcggcggcgg

SEQ ID NO: 278540 - DNA, 258 bp, Homo sapiens; identical to SEQ ID NO: 227219
  chr1:76082673-76082931
  hyper

SEQ ID NO: 278541 - DNA, 239 bp, Homo sapiens; identical to SEQ ID NO: 227220
  chr1:76251752-76251991
  hyper

SEQ ID NO: 278542 - DNA, 154 bp, Homo sapiens; identical to SEQ ID NO: 197601
  chr1:76540052-76540206
  hyper

SEQ ID NO: 278543 - DNA, 200 bp, Homo sapiens; identical to SEQ ID NO: 197602
  chr1:76540250-76540450
  hyper

SEQ ID NO: 278544 - DNA, 235 bp, Homo sapiens
  chr1:76540666-76540901
  hyper
gttgtcttttcctggcattgattttctttttgttcctttggcaaatgcatatggagggagattctgaaacatgcagctggcacagcttcttttcccaccattcctgcctcctgctcgcgcctgcattgaaggagctgcagactgttggctccaggggagagcagggctgtgtgccgaataatggggatggtagggagaggaggggtgttcccgcgggtcccgcggctctgtggag

SEQ ID NO: 278545 - DNA, 184 bp, Homo sapiens; identical to SEQ ID NO: 197604
  chr1:77333579-77333763
  hyper

SEQ ID NO: 278546 - DNA, 79 bp, Homo sapiens; identical to SEQ ID NO: 227223
  chr1:77684951-77685030
  hyper

SEQ ID NO: 278547 - DNA, 109 bp, Homo sapiens; identical to SEQ ID NO: 227225
  chr1:78148510-78148619
  hyper

SEQ ID NO: 278548 - DNA, 213 bp, Homo sapiens; identical to SEQ ID NO: 227227
  chr1:78224923-78225136
  hyper

SEQ ID NO: 278549 - DNA, 229 bp, Homo sapiens; identical to SEQ ID NO: 227228
  chr1:78225422-78225651
  hyper

SEQ ID NO: 278550 - DNA, 219 bp, Homo sapiens; identical to SEQ ID NO: 227229
  chr1:78245317-78245536
  hyper

SEQ ID NO: 278551 - DNA, 84 bp, Homo sapiens; identical to SEQ ID NO: 197605
  chr1:78444895-78444979
  hyper

SEQ ID NO: 278552 - DNA, 236 bp, Homo sapiens; identical to SEQ ID NO: 197606
  chr1:78956556-78956792
  hyper

SEQ ID NO: 278553 - DNA, 86 bp, Homo sapiens; identical to SEQ ID NO: 227233
  chr1:81880257-81880343
  hyper

SEQ ID NO: 278554 - DNA, 216 bp, Homo sapiens
  chr1:82265931-82266147
  hyper
ttagctggctctacgtaactacaaagaaaaaaatcatcgcaatttaaaaaaatgtaactttcattaacgagcgcgccggaaatctcaggtatcaaagacgcattaaccctggagcgtcccccgcgcgccgcagccggacggaggcagccgcggcgaacagacgttctttctcctccatgcagttacacaaaaggagggctacggaaactaaaagtt

SEQ ID NO: 278555 - DNA, 237 bp, Homo sapiens
  chr1:82266182-82266419
  hyper
aaacctggagacggggtgggtgaaagacgcatcccgggcgcctctccgaagtccaggccgggagcaagctcctgggcctagaggggagggggccccgagccgctggtcatccccctgcgctcagcctcggagcgccgcgcttcgcggcgctctcccaaatactcttcacccactccagaaataaaataaatgtttttaaagtgcatgtgtgtggacaggatggagagcgcgcgccgg

SEQ ID NO: 278556 - DNA, 326 bp, Homo sapiens
  chr1:82266440-82266766
  hyper
cgcgcagtgagtggagtttgggggtgggctaggggttagcggttgaatgggtgtgttaatggggggagctggaggcagagctcggggacctgggggtagggggagcgcgaaccgactgggaggggagagaaggggaggggcgcgagctggcgcaggccgcctccggggcgcgttccacggccgtgcgcgcgcgtccctcgccgccaccgccgcccggacagccctgcggccgccccgccggcggagccggggccggcctggtcctcgggcggctgcttggccaccgccaccgccgtccgaagggctcgagcccgtaagtatcccct

SEQ ID NO: 278557 - DNA, 295 bp, Homo sapiens
  chr1:82266855-82267150
  hyper
gattatctgctccacgttttgtacttagctgcctgtaatcttcttttgagtttgcccgagccccttgctggaaaactcaggagggagagatttgtcctttgacgctgtacacgctagtatgtttatatgattagcccaactggcggggagggcggatttgggggaaggaggaggaggaggctggaggtgactccagttcagacctcgcggagagtctgtgtcaggacttcgcattcccccgtctctctctctctccctctcgctccctctcactctctctccgctcacacacacg

SEQ ID NO: 278558 - DNA, 431 bp, Homo sapiens
  chr1:82267185-82267616
  hyper
gaattccttgggattgttggggggcatctcccctccgctgctgtgtgtggcgtggctcttcccggctactccttgcttccccgagcccgagtctgcgccgccagccttccttggggcagcggccaccgctcagccccggccgggagatccgaaatgtgaggaggggtcgccgccgcctcccgccccaggccgcagggtcggcgcgagggatgctattccggccgggcgctcggggggctgaggggcttcgcctgacaaactgagttggcctcgcgcccccggcgccctcccgcccgtcgcttcgaagggactcccaagtctgcgcacctctgtcaggcttttgcttccaccacccctttcgctctgattcccgatttttttttcctaagggagcgtgcggtctgggggtgtgtgcgtgtgtgtgaaagacc

SEQ ID NO: 278559 - DNA, 149 bp, Homo sapiens
  chr1:82267739-82267888
  hyper
cgccgtgtccggccggggagctgcggcgctgcctcccgcgcggactcggcggccgaggacccgctcgcggccggcctcggccctctccggccggggtagccgctgccctccgcgcctgtccccgcgcggcccccacgccagacggccct

SEQ ID NO: 278560 - DNA, 194 bp, Homo sapiens
  chr1:82268379-82268573
  hyper
ccaccccagcgtcccgcccgctttgccctccggtcccgcactgtaagtggagcggggaggctgagcggctggagcgagttcgggggaagtggacggtgggggagggcttggacgagtttttgagggttgctgttccttctcgtcagtggttaggtggtgtggggaggcgaggatgacagtaaagcgcagccaga

SEQ ID NO: 278561 - DNA, 74 bp, Homo sapiens
  chr1:82268960-82269034
  hyper
ccatggaagcgccccagcagtgtggaggtgcgcctgcgagacttctgcgcttgggacccgtaaagtttgttcct

SEQ ID NO: 278562 - DNA, 33 bp, Homo sapiens; identical to SEQ ID NO: 197608
  chr1:82269508-82269541
  hyper

SEQ ID NO: 278563 - DNA, 115 bp, Homo sapiens
  chr1:84158381-84158496
  hyper
gggtgagcagtgcccgtggtaagtgagctcctgcaagttcctgtcacagacctgtcccttccacctcctacccttaaggcagttcctgcagctctcacagctgtgcccacacttt

SEQ ID NO: 278564 - DNA, 34 bp, Homo sapiens
  chr1:84158526-84158560
  hyper
aattgctttagcggctcagcgtggtccctgtcgg

SEQ ID NO: 278565 - DNA, 69 bp, Homo sapiens
  chr1:84326247-84326316
  hyper
acaactgtcactcccaggcccggccactcgccgtctcagcgccccctcgcggcccttctctacccacct

SEQ ID NO: 278566 - DNA, 388 bp, Homo sapiens; identical to SEQ ID NO: 103726
  chr1:84326357-84326745
  hyper

SEQ ID NO: 278567 - DNA, 179 bp, Homo sapiens
  chr1:84464234-84464413
  hyper
ggaggcttataccacgatgtgggaaaacgacggaattacagaataaaccagcagggagcctcctcgttcacccaacccgaccccgcccgcccgagtctcccatctggagcctaaaaactgagctgagatcacagcaactgaccccgtcccctccgccctctccctcccccattctgccc

SEQ ID NO: 278568 - DNA, 503 bp, Homo sapiens
  chr1:84464878-84465381
  hyper
ggggtgcacgacgtgccgagaggcgcgggcgccgggggcggcgacggttgggaggaacaaaggactcggggaatcctctgccccctcggagtcaggaggtcctggggacaggagggatcaacggaggggccgctgcctcttctgggggtttactgaagacactgctcgagctttcccgggccacacacaccccccccccgtttgccttggtcccgctcggggctcctttagaacgcggcaaacagaggacttagcaacgcgagcgcctgggcggcgcccctcctcagagatgcgagaggcgctggcctgagcgcctccggccacctccttctacctccgggccctaggcgcccgatccacctgcctatctgaccacagacatcttcccacaaaacagtggagctttttgaatctttgaagagagtcttcagatcttttatctaagcatctttgtgaagcaaagaataaacgggtatctgaggccagctcgaaagttaggaaat

SEQ ID NO: 278569 - DNA, 233 bp, Homo sapiens; identical to SEQ ID NO: 197609
  chr1:84543141-84543374
  hyper

SEQ ID NO: 278570 - DNA, 809 bp, Homo sapiens; identical to SEQ ID NO: 197610
  chr1:84543409-84544218
  hyper

SEQ ID NO: 278571 - DNA, 194 bp, Homo sapiens; identical to SEQ ID NO: 227240
  chr1:84972303-84972497
  hyper

SEQ ID NO: 278572 - DNA, 56 bp, Homo sapiens; identical to SEQ ID NO: 197611
  chr1:85040191-85040247
  hyper

SEQ ID NO: 278573 - DNA, 34 bp, Homo sapiens
  chr1:85358277-85358311
  hyper
tgttatatccctaggcttcacgagagaaccccag

SEQ ID NO: 278574 - DNA, 201 bp, Homo sapiens; identical to SEQ ID NO: 197612
  chr1:85358969-85359170
  hyper

SEQ ID NO: 278575 - DNA, 813 bp, Homo sapiens
  chr1:85462469-85463282
  hyper
actcctcacctgacggttaacctgaaaacacctgatcctctctccggaatccttgcctggggaaaacgataaggctgccgggccatgcctcctccttcaaaactttccagggctctcgggattcggaacaggaaacaccgttcacggccgactcatttcgccctcgccgtaacgcgtccgccgaagttggagccctgcaaagcggggttcccttctcttaccctttctgccggccgcgtggtgcgcgcagaccccggcccgagagcaggcgccgcagtcgtggagtgcggcgggcagttctcgggcggctgaaaggcggctctgtgtgcaccctgcaggatgcggcgcgtggccaggcgctcccgccccgcccccaaggggctgccccgccccgccccgccccgccgcctcctaccggggaccggagcttccccagttggggtcctaggggacttattccacgcttcagcggaccagcctccccgcgctcccggagaagggggtcggcgacgcggaggcggggtgggggccgtaggggatggaaccgaggcgcgcgcgagaagagccgaggaagtaagcagtcccaaaagggggcggcggtggggcccccagggaggcgtggggcacgccaagggcgccgtggggcactgacctgtggtgcggcccccaggacaggcccgaggcgcggttgcacaccggcaggtccagcacctccatgcctcgaggcatggcgcggccagggagcggcaggaggacacctagcgtgggacggctacacctgtctgggcgcaggcccgccgcccttgcactctc

SEQ ID NO: 278576 - DNA, 178 bp, Homo sapiens
  chr1:85463947-85464125
  hyper
ggagccgggagggagcgtcagcgtggcccggcgggcgcggagggagggcgcacggccccagggctggactcgtaaccccagcgccctgctgcagccgccgttgcttttccctcttggtgcacgaaaggaagacgcctgtgggaaatcgaacagacaatcggtcgccgttcgtgaatct

SEQ ID NO: 278577 - DNA, 166 bp, Homo sapiens; identical to SEQ ID NO: 197614
  chr1:85527761-85527927
  hyper

SEQ ID NO: 278578 - DNA, 87 bp, Homo sapiens
  chr1:85527957-85528044
  hyper
tagagatgctctgtcagtctcgcagaggactcgcctcttttctcttagcgacagatgcgtcctggcaacagtcggcagagttgctgc

SEQ ID NO: 278579 - DNA, 161 bp, Homo sapiens; identical to SEQ ID NO: 197615
  chr1:85666112-85666273
  hyper

SEQ ID NO: 278580 - DNA, 436 bp, Homo sapiens
  chr1:85666727-85667163
  hyper
gcctgtctccaggcggccgccctccgcccccagggaggagcccgccgctgggggaggcgggggacgccgttccgcctccgccccctcaggctcgggcgcagactgcgagccgccgggcaggttttcgtagtagtcggcgtcgtagtcgtcttcgtccttgtcgtcttcctcctcctctccgctgtcctcggagccctccggggagtgcggaggggcgtgagcgagcccatggctctggggggcggcctcctgcccgccgcgcggccgaggcccgagcgcccccaactgctccgggtgccctccggggacccgcgccccgggaccccacgcctcaggtgacggcgagggctgctgtaggctccgcccgtgtcccccggcgtgctcacgtgggagggtgtctgcggcaccccaggcgtctcccgcggctgccgaagag

SEQ ID NO: 278581 - DNA, 174 bp, Homo sapiens; identical to SEQ ID NO: 227248
  chr1:85741885-85742059
  hyper

SEQ ID NO: 278582 - DNA, 92 bp, Homo sapiens
  chr1:85773929-85774021
  hyper
cagatcctgggaagacgccctttactcagtaaggagggcccaggcgtccaaagcccaccagggggcagcggcggcattcttagccccacttc

SEQ ID NO: 278583 - DNA, 178 bp, Homo sapiens
  chr1:85774083-85774261
  hyper
atttttctgcaaaagctaaggtcggcaaacatggatattcggatttccattgtttttgaggctaaatcaaaagatgcctctggggaaaaggggcaacatgcactgtcggatcggcattcatatggaaaaacagaggtaggaaacattttatacattttgaagatactttgatgtgcag

SEQ ID NO: 278584 - DNA, 1196 bp, Homo sapiens
  chr1:85929935-85931131
  hyper
ggcaccgacaccccgttaattcatccagcttgtcctgctccgagcgccaggcaggacttgggggcttcggtgtcacgactggcgctgccccctggagggacgcccagcctccacccgccctaccggagcggcacccctcgcggccctcgctccctgggaaacactcagagttgcactgtcgtcgctgccgtttaattttcacaaataaaaatgcccgtgagacggaatcccccgcccacccacctgcccgagaccgtacaaccacattgaatcggatcctccagaaggctgccggcagccgggaggtgtgaacaatgaacttctctctgactctctgacacacacacacacacacacactcgccccccgacgggaagttgtgaactactagcccgagggccaatggcgcgactccccaggcaacacggcggccggcggcgggggagggcctggcgcgcgccccggccgcgcccctcgagtcggcagttacctccttcctccggctcggcgccccgggtcgggtgatgagggccgtctcctcgcacaccacggccacgtcctccacgaagacgcagtccggaaggctctcgtcggccggcagctccaccacctgcagccccagcttgctgcccagcacgcccacgtagagctggtgctgccgttccgcgcgggcgacgtccacctcctcgcccttggcgcttctcagcgcgtgctggccgagcgactcgggtagcgcccgcaccacggcgtgggtggcccggccgaaggcggcggggtggccgagcccggccatggcttcgggaggcttaggggcggcggcggcggcggaggcggccgggtcctgccgcgggcagcgcgcgctgagcctgcgagcgcccgtcggctcctcttggcagccgctgaatgtggtgcagaaggagcccagctcgcgcccggagccctgcccgcgcgactgagcatgcccagagctccgggcgccggcccgcgcgcatcccgcgcgcccactccggcgctcgcgggtctcgcgccagcccaggcgggagttgtagcggcgagcgccgggcgaggagtggggccaggagaggcggccggggaagcagcgagggcaagaagtatgcggaggcgggggacctcggcgaaaagccaccgctacccggacctggcggtacctgtgttctgtcgcaggtgcacacctc

SEQ ID NO: 278585 - DNA, 153 bp, Homo sapiens
  chr1:86042081-86042234
  hyper
gggctccccacacgcggaacttctcgaggaggaagaggggaaggggtcgtgggaggccaggagaaaccgagagccagctttaccatgtgtcccttctggggataatggaatccaggcccttcggggcttttccccagagctggctacacgtcc

SEQ ID NO: 278586 - DNA, 35 bp, Homo sapiens; identical to SEQ ID NO: 227252
  chr1:86042647-86042682
  hyper

SEQ ID NO: 278587 - DNA, 384 bp, Homo sapiens; identical to SEQ ID NO: 227253
  chr1:86045827-86046211
  hyper

SEQ ID NO: 278588 - DNA, 753 bp, Homo sapiens; identical to SEQ ID NO: 197619
  chr1:86046271-86047024
  hyper

SEQ ID NO: 278589 - DNA, 190 bp, Homo sapiens; identical to SEQ ID NO: 600
  chr1:86047064-86047254
  hyper

SEQ ID NO: 278590 - DNA, 84 bp, Homo sapiens
  chr1:86621179-86621263
  hyper
ccagggcatccagccaaagccgcgcaacccctggtccgagcccttttcccagggaaggcatgggagcaggtacagcgcccaaag

SEQ ID NO: 278591 - DNA, 63 bp, Homo sapiens
  chr1:86622127-86622190
  hyper
aactctgaactgcttagggtgcaggtactgtccatgaaaaagggaaaaaacaatcacatgaaa

SEQ ID NO: 278592 - DNA, 84 bp, Homo sapiens; identical to SEQ ID NO: 227256
  chr1:87379857-87379941
  hyper

SEQ ID NO: 278593 - DNA, 52 bp, Homo sapiens; identical to SEQ ID NO: 227257
  chr1:87380149-87380201
  hyper

SEQ ID NO: 278594 - DNA, 101 bp, Homo sapiens; identical to SEQ ID NO: 197621
  chr1:87617583-87617684
  hyper

SEQ ID NO: 278595 - DNA, 72 bp, Homo sapiens
  chr1:87617858-87617930
  hyper
aggcctgtcggagaagttgatgaaagatgcaccttaggtgtccccgagcagggccgccggcctccccagagg

SEQ ID NO: 278596 - DNA, 127 bp, Homo sapiens; identical to SEQ ID NO: 197623
  chr1:87793799-87793926
  hyper

SEQ ID NO: 278597 - DNA, 242 bp, Homo sapiens; identical to SEQ ID NO: 227259
  chr1:87800822-87801064
  hyper

SEQ ID NO: 278598 - DNA, 105 bp, Homo sapiens; identical to SEQ ID NO: 197624
  chr1:88928502-88928607
  hyper

SEQ ID NO: 278599 - DNA, 94 bp, Homo sapiens; identical to SEQ ID NO: 227261
  chr1:89149364-89149458
  hyper

SEQ ID NO: 278600 - DNA, 84 bp, Homo sapiens; identical to SEQ ID NO: 227262
  chr1:89150030-89150114
  hyper

SEQ ID NO: 278601 - DNA, 34 bp, Homo sapiens; identical to SEQ ID NO: 227263
  chr1:89990216-89990250
  hyper

SEQ ID NO: 278602 - DNA, 1191 bp, Homo sapiens
  chr1:90098146-90099337
  hyper
ctgaccctggccttcggaggagttcccagaagggctatttttagtggtggctgctcccctctaacttacccaggggaggagctgcggtggctgagccgacgctgcgcgcacagccgcctgtggttttccgcgcattgtgagggatgaggggtggaggtggtattagacgcagccgaatcctccctcagagtccgccaggtgggcgtctcaggggtgggagtggccgcgtcgtgaagcggagagaggatttctctcctggtcctggagaaggcccccggcggccggcggcatccctcgctggcgagtcccgggagcgaggtggtctctgcaggggaggaagttcccgggcggcgcggcctgcgtcacagcggggctggcaccgcggagtcgactcggcgggcggtggcgaccccggggccgggcgctgggcggcgctggctgccgctagccgggctgcgtgcggggcggcgctggaggcggctccgtccgcggccggggaggcggaggggaggagggcttgcggggctggggcgttagctgcgtcccggctggaagcccgcgaagagaagtaggaggaaggcgccgccgtggccgcggccgcagtgctcgggcgcgacaagccatgagcagcgaccccgcgggcgacgccgccgtccctggcagccgctgagcccgacccccaggcagctcgccgctccctagcaccttctccagtcgacactctcgcgcccggaggtaagggcgggggatccgcggagggatggagaggggcagcccgcagagggccacccgctcggtccgctgtgcgcgccggaccgggactcgccccgcctcactcgcgtccttgcttccccccggctctcagacaggcagaatgtggttgcccgcccggcgtgtggtgctgggaaccttccgctactgcggctcaggagcccgccaacccctaccccacccaatccgcgctagcccgagcggccgcgcgaggatctcagcctggcgcccaacgccgcgccgcagcggcaggtcctgcagactgggcgcgggggtgggggggcggtccgcgaggggaaatgcgtccgtggccggggcgatcgttgttctttcctacctcgaaaatctctgagaccccggggccagtcctttccggtctatcacccccctgccacctccgaacccttgaagttagcactt

SEQ ID NO: 278603 - DNA, 143 bp, Homo sapiens; identical to SEQ ID NO: 221399
  chr1:90228347-90228490
  hyper

SEQ ID NO: 278604 - DNA, 146 bp, Homo sapiens; identical to SEQ ID NO: 103789
  chr1:90228980-90229126
  hyper

SEQ ID NO: 278605 - DNA, 172 bp, Homo sapiens; identical to SEQ ID NO: 197626
  chr1:90286176-90286348
  hyper

SEQ ID NO: 278606 - DNA, 45 bp, Homo sapiens; identical to SEQ ID NO: 197627
  chr1:90287493-90287538
  hyper

SEQ ID NO: 278607 - DNA, 439 bp, Homo sapiens; identical to SEQ ID NO: 197628
  chr1:90308853-90309292
  hyper

SEQ ID NO: 278608 - DNA, 130 bp, Homo sapiens; identical to SEQ ID NO: 197629
  chr1:90309490-90309620
  hyper

SEQ ID NO: 278609 - DNA, 212 bp, Homo sapiens; identical to SEQ ID NO: 227269
  chr1:91170441-91170653
  hyper

SEQ ID NO: 278610 - DNA, 55 bp, Homo sapiens; identical to SEQ ID NO: 197630
  chr1:91172715-91172770
  hyper

SEQ ID NO: 278611 - DNA, 149 bp, Homo sapiens; identical to SEQ ID NO: 197631
  chr1:91172771-91172920
  hyper

SEQ ID NO: 278612 - DNA, 166 bp, Homo sapiens; identical to SEQ ID NO: 197632
  chr1:91173081-91173247
  hyper

SEQ ID NO: 278613 - DNA, 205 bp, Homo sapiens
  chr1:91179021-91179226
  hyper
ccatccatacccggcagctccagccaaattaataaacatgtcgcccattttaaattggctacaaatgacactaatgttttccgacagaattagggtggctgaaaccgtatgtaatgagacagaaaattatggtaaagatgacaagtggatgggcatttccaaccgcacttatggacgattagaacacaaacgggagaaaaggagg

SEQ ID NO: 278614 - DNA, 58 bp, Homo sapiens; identical to SEQ ID NO: 227274
  chr1:91179581-91179639
  hyper

SEQ ID NO: 278615 - DNA, 42 bp, Homo sapiens
  chr1:91180306-91180348
  hyper
tttgtccctaccatagaaacccagccacggtggtaagttagc

SEQ ID NO: 278616 - DNA, 201 bp, Homo sapiens
  chr1:91183993-91184194
  hyper
cgcgcgcgggaatagtccgaagacattaagagcggaggaaggagatccctgaaggaatccacagaaaagtgtgtcacttcaggcgccggagccttgcataagcgggcgggtcggctctgggctctgatttctcgcccgacgaacccaggcgctcgggctcagcccggcgggaggcggatccctgagagggacacagccggg

SEQ ID NO: 278617 - DNA, 60 bp, Homo sapiens
  chr1:91185065-91185125
  hyper
aaaaaaaaaaaaaaaaaaaaaaacagcactacttggagggtgggttgagctgtttctcat

SEQ ID NO: 278618 - DNA, 35 bp, Homo sapiens; identical to SEQ ID NO: 197634
  chr1:91316202-91316237
  hyper

SEQ ID NO: 278619 - DNA, 41 bp, Homo sapiens
  chr1:91317362-91317403
  hyper
ctctccgggagacgaacgcgaagcgacgtggaaacccttcc

SEQ ID NO: 278620 - DNA, 114 bp, Homo sapiens; identical to SEQ ID NO: 227288
  chr1:91486937-91487051
  hyper

SEQ ID NO: 278621 - DNA, 134 bp, Homo sapiens; identical to SEQ ID NO: 227289
  chr1:91487792-91487926
  hyper

SEQ ID NO: 278622 - DNA, 94 bp, Homo sapiens
  chr1:91869767-91869861
  hyper
tggctggaagggtccggctggggaccgaatcagcacctaaagcaaaataacagctctgtggatttcctaaggagaatatcctaaatccaaggca

SEQ ID NO: 278623 - DNA, 89 bp, Homo sapiens
  chr1:91870376-91870465
  hyper
ccagtcgagcgccgatttatcagcccctctgaggaccgccaagcctggctaagccgagctccaagcaatggatcgcccaagcccccaac

SEQ ID NO: 278624 - DNA, 140 bp, Homo sapiens; identical to SEQ ID NO: 197635
  chr1:91966293-91966433
  hyper

SEQ ID NO: 278625 - DNA, 105 bp, Homo sapiens; identical to SEQ ID NO: 227292
  chr1:91966641-91966746
  hyper

SEQ ID NO: 278626 - DNA, 170 bp, Homo sapiens; identical to SEQ ID NO: 197636
  chr1:92350554-92350724
  hyper

SEQ ID NO: 278627 - DNA, 331 bp, Homo sapiens; identical to SEQ ID NO: 197637
  chr1:92351379-92351710
  hyper

SEQ ID NO: 278628 - DNA, 304 bp, Homo sapiens; identical to SEQ ID NO: 197638
  chr1:92495400-92495704
  hyper

SEQ ID NO: 278629 - DNA, 70 bp, Homo sapiens; identical to SEQ ID NO: 197639
  chr1:92495832-92495902
  hyper

SEQ ID NO: 278630 - DNA, 616 bp, Homo sapiens; identical to SEQ ID NO: 227296
  chr1:92545648-92546264
  hyper

SEQ ID NO: 278631 - DNA, 184 bp, Homo sapiens; identical to SEQ ID NO: 197640
  chr1:92764405-92764589
  hyper

SEQ ID NO: 278632 - DNA, 35 bp, Homo sapiens; identical to SEQ ID NO: 221405
  chr1:92946278-92946313
  hyper

SEQ ID NO: 278633 - DNA, 60 bp, Homo sapiens
  chr1:92946605-92946665
  hyper
tgggcttcgtccagcgatgggcacattgacttctccgaggctgtggaggcacaaggggag

SEQ ID NO: 278634 - DNA, 924 bp, Homo sapiens; identical to SEQ ID NO: 35990
  chr1:92946768-92947692
  hyper

SEQ ID NO: 278635 - DNA, 166 bp, Homo sapiens
  chr1:92948158-92948324
  hyper
actggccagctccgcgcaaacgaatctaagcgacaagcagctagggtcctgccgcctgggatggaggcagcagccccagcgggcaagctgtccaagtcccagagaagccggatgcctccttcccctacgaatcagctcccttctcccggaaagactctccaactcc

SEQ ID NO: 278636 - DNA, 225 bp, Homo sapiens; identical to SEQ ID NO: 197641
  chr1:92949466-92949691
  hyper

SEQ ID NO: 278637 - DNA, 227 bp, Homo sapiens; identical to SEQ ID NO: 197642
  chr1:92950207-92950434
  hyper

SEQ ID NO: 278638 - DNA, 328 bp, Homo sapiens; identical to SEQ ID NO: 197643
  chr1:93250604-93250932
  hyper

SEQ ID NO: 278639 - DNA, 88 bp, Homo sapiens; identical to SEQ ID NO: 227300
  chr1:93426908-93426996
  hyper

SEQ ID NO: 278640 - DNA, 167 bp, Homo sapiens; identical to SEQ ID NO: 227301
  chr1:93427437-93427604
  hyper

SEQ ID NO: 278641 - DNA, 225 bp, Homo sapiens; identical to SEQ ID NO: 227302
  chr1:93544520-93544745
  hyper

SEQ ID NO: 278642 - DNA, 761 bp, Homo sapiens; identical to SEQ ID NO: 227303
  chr1:93645817-93646578
  hyper

SEQ ID NO: 278643 - DNA, 100 bp, Homo sapiens; identical to SEQ ID NO: 227304
  chr1:93646698-93646798
  hyper

SEQ ID NO: 278644 - DNA, 534 bp, Homo sapiens; identical to SEQ ID NO: 227305
  chr1:93810812-93811346
  hyper

SEQ ID NO: 278645 - DNA, 1055 bp, Homo sapiens; identical to SEQ ID NO: 197645
  chr1:93913410-93914465
  hyper

SEQ ID NO: 278646 - DNA, 143 bp, Homo sapiens; identical to SEQ ID NO: 197646
  chr1:93914736-93914879
  hyper

SEQ ID NO: 278647 - DNA, 307 bp, Homo sapiens
  chr1:94146398-94146705
  hyper
acacctgattacaccgttttaaagcggcggcgccctcagcggcctaagtgggtaaggacagttgggctgtacgatctatcggaacctccttcccaccgtccctcccttcctttgccttccctcgcctctccccaccgcgacgcagagggagcaacacaaccaactattcattctttctcaacaaagggagagagggagggagatgttgtcaacagttacagggcaggctccttcgctttctttgcaaacttcccaagagattaccggagaaactcgcctcctcggagccttgggcttccaccagagc

SEQ ID NO: 278648 - DNA, 150 bp, Homo sapiens
  chr1:94146706-94146856
  hyper
ctctgggccctcgcatctgcccgaccccggccggcttctgcgaagaggggacgggcgggacagggcggggtggccggcagagcagctccgacgggcagggggtcgggcgaggccagcgcccgggaagatgccgctcgagtgccaccgagc

SEQ ID NO: 278649 - DNA, 202 bp, Homo sapiens; identical to SEQ ID NO: 197647
  chr1:94312192-94312394
  hyper

SEQ ID NO: 278650 - DNA, 663 bp, Homo sapiens; identical to SEQ ID NO: 227310
  chr1:94344323-94344986
  hyper

SEQ ID NO: 278651 - DNA, 131 bp, Homo sapiens; identical to SEQ ID NO: 197648
  chr1:94374254-94374385
  hyper

SEQ ID NO: 278652 - DNA, 514 bp, Homo sapiens; identical to SEQ ID NO: 197649
  chr1:94702421-94702935
  hyper

SEQ ID NO: 278653 - DNA, 88 bp, Homo sapiens; identical to SEQ ID NO: 197650
  chr1:94702990-94703078
  hyper

SEQ ID NO: 278654 - DNA, 221 bp, Homo sapiens; identical to SEQ ID NO: 197651
  chr1:94703103-94703324
  hyper

SEQ ID NO: 278655 - DNA, 171 bp, Homo sapiens; identical to SEQ ID NO: 197652
  chr1:94703357-94703528
  hyper

SEQ ID NO: 278656 - DNA, 286 bp, Homo sapiens; identical to SEQ ID NO: 197653
  chr1:94713018-94713304
  hyper

SEQ ID NO: 278657 - DNA, 120 bp, Homo sapiens; identical to SEQ ID NO: 197654
  chr1:94884615-94884735
  hyper

SEQ ID NO: 278658 - DNA, 765 bp, Homo sapiens; identical to SEQ ID NO: 197655
  chr1:95006902-95007667
  hyper

SEQ ID NO: 278659 - DNA, 236 bp, Homo sapiens
  chr1:95007896-95008132
  hyper
ccccacgaaggtcaagaatacctggcctgcccacctcgcggggcccttagcgggtcgcacaggagaaaggcggtgggaatgccggtgtcagccacggtgtgaccggctcggctcacaggtctgagggtcagttggctcaggcatcgcccggtacgaccagagatagtgactgaggaagagcagcctcacatctggcagtttgcctctgggagaattccagcgtgacatctgcagct

SEQ ID NO: 278660 - DNA, 672 bp, Homo sapiens; identical to SEQ ID NO: 227318
  chr1:95285587-95286259
  hyper

SEQ ID NO: 278661 - DNA, 345 bp, Homo sapiens; identical to SEQ ID NO: 197658
  chr1:95391395-95391740
  hyper

SEQ ID NO: 278662 - DNA, 219 bp, Homo sapiens
  chr1:95392624-95392843
  hyper
gggtgctacagagcctcgagctccgctgcgaagcacccggctgcctcgctcgccgcccgcacctcggttccccacaggccgcccccgcctccgcctgggccttcgaggattggccgccgggcccgaccaatggagggccgcctcctcccgcctctgcgccgaggggcggtgcggccaattgaagggccgcgggggccgctttccctcccgctccctccc

SEQ ID NO: 278663 - DNA, 108 bp, Homo sapiens; identical to SEQ ID NO: 197661
  chr1:95392887-95392995
  hyper

SEQ ID NO: 278664 - DNA, 32 bp, Homo sapiens; identical to SEQ ID NO: 197662
  chr1:95393067-95393099
  hyper

SEQ ID NO: 278665 - DNA, 169 bp, Homo sapiens; identical to SEQ ID NO: 197663
  chr1:95428574-95428743
  hyper

SEQ ID NO: 278666 - DNA, 491 bp, Homo sapiens; identical to SEQ ID NO: 227321
  chr1:95538361-95538852
  hyper

SEQ ID NO: 278667 - DNA, 935 bp, Homo sapiens
  chr1:95582633-95583568
  hyper
accgctgcgggggcgggctcacacagttcccccgctggcaagttttgtgacttgctttggaaaacccgggaattgcaccctctgcccttggcaaggtgtgagcttccaggatctctccgctgcgacttcgggtgttagggtttttgggctctttccgggacccaagttccagggcaagaaggtctgctcggcggcccgcctcggggccccgcccactttggccagggtcggagccgcccggagcgggagccggagcccgagcggccgcggcccctttaaggagcagctctgcggtaacccgagcccgcagtccgggcgggcgcgacggccgccgcggtagctggagcctccgcgactgcacctccaagcggcccggaacccgcggcttccctggctcccgtgagcatctcaccgggcggcactggccagcgccagccctcgggccggcccggatgagcagactcctgtagacacccgccgccctctcccggctcggcgcagccgccgcccgcgcgcgactcgccccgggacccggcacaggtgacgccgtttggagggggggttggggaggaaggcgggcttgcctcgccccgcggctcccccgcgccagccgccaagcgcagcccgcggagaggggtgccgcggcttcccgcccctggcctagcgcggccgagagctcctgcgcctggaggctgggtgggcgtccggcgcgcgggaggcggcccggggctcccgggcgggctccggcaggtgtgtgcggaaggctcagcatcgtccccgcccggcgggccacggcgtcgctccgggagcaaatggtgtcccggggcccgcggcccccgcgccgcccgggcgccccgcattcctctcgcgtttctcgggctgcacgattccggctgccctgtctgcctggcggtgcctctcgggtctgagcttaa

SEQ ID NO: 278668 - DNA, 246 bp, Homo sapiens; identical to SEQ ID NO: 227324
  chr1:95699851-95700097
  hyper

SEQ ID NO: 278669 - DNA, 43 bp, Homo sapiens; identical to SEQ ID NO: 227325
  chr1:97187291-97187334
  hyper

SEQ ID NO: 278670 - DNA, 372 bp, Homo sapiens
  chr1:98386195-98386567
  hyper
aaacaggtcccgacgcaaagggcaacccctccagtagcggaaagtcctcccctgagctccccgcctgcccacgcgggcctgtggctccgcgctcctccgctcccccgcagagctcccacgggggaaactttcccgcgtctctcactctccggggtgcgggggccgcgggggcctccccggcacctacccgcagagcactccccaccaccccgccaccaccgacgagccggcgcgaagtccgtacctcgatgtccgccgagtccttactgagcacaggggccatggcagtgcctacagtctcgagtctgccagtgacaaaccctccttgcgtcctcaagctccagccagagagccaagtgacagcagccggag

SEQ ID NO: 278671 - DNA, 310 bp, Homo sapiens; identical to SEQ ID NO: 36023
  chr1:98386618-98386928
  hyper

SEQ ID NO: 278672 - DNA, 190 bp, Homo sapiens; identical to SEQ ID NO: 197668
  chr1:98514255-98514445
  hyper

SEQ ID NO: 278673 - DNA, 42 bp, Homo sapiens
  chr1:98515026-98515068
  hyper
ctgcttcttctctccgagtgccgggttacagtgttaacaagc

SEQ ID NO: 278674 - DNA, 756 bp, Homo sapiens
  chr1:99126875-99127631
  hyper
gtgccttccagcctcgctgtggatcccgcgaagtggacggttcgcttcgtggcttcttcccagaccccgccactgcggaaaccgtcactcggtggcccccgactgggtcaatgcgaggacgcccacctcctacctttgagtctctcctcttctccagggtacagccaaccctttctccaacgtagccggagtccgagagtcccagttccgcccctccagcccgccccaggccaggtggggatgcgcccggcccgggccagcgctggtcccggcagttccgcgtctgcgcagcgggcgaggggctggagcggggccggccggggaggtgcaggagacgtgggagccaatgggcacgctcgggggagccgggctggcggcggcggtggcggccggctgggcgcgcactctcgggatggagggcgagcgccgggcatcgcaggcgccctcctcgggcctcccggccgggggcgccaacggggagagcccggggggcggcgccccctttccgggcagcagtggctcttccgccctgctgcaggcggaggtgctggatctggacgaggacgaggacgacctggaggtgttcagcaaggtgagggcggcggcggcgagtcccgggaaacttccaaggcaactccgggcgttgccagcattgcgccgacggctgcctctggcgcgcttgccctcccggggcggtggctctgagctggggacgagtgaggtcccccgggctgctggaccccgcctgccagctct

SEQ ID NO: 278675 - DNA, 339 bp, Homo sapiens
  chr1:99127671-99128010
  hyper
cagccgctccctcctccgcactttgaccttccgttcggcggggctgtggcttagtggagtctgcaaagttgtgatttgttttccctttctgcttctctgacacagacatcttcctcgcggcagctcccgaacctgggaggctggtggctcaaaaccgctcccgccagctgcttttcgggcgaggccagccctgaactctgggagagcagccaagtttagagaaattattcttaatttagtgttgttgcttgtggatttgagacttgggtgagtctcgggtcttgtgggaataggttctaggaaatctccctgaacaggagaaaacggttgtttctaaca

SEQ ID NO: 278676 - DNA, 134 bp, Homo sapiens
  chr1:99470847-99470981
  hyper
aagcccaccaaggcgcaaagtgccgatgcggcgcccagagtttcaaccggtgcgttcagcctgcatccctcgaattccttgacccagcccggggctggagcctggcggtggtttctaggcgctgttagaaaaat

SEQ ID NO: 278677 - DNA, 32 bp, Homo sapiens; identical to SEQ ID NO: 227333
  chr1:99730207-99730239
  hyper

SEQ ID NO: 278678 - DNA, 40 bp, Homo sapiens; identical to SEQ ID NO: 197672
  chr1:100316318-100316358
  hyper

SEQ ID NO: 278679 - DNA, 328 bp, Homo sapiens; identical to SEQ ID NO: 227335
  chr1:100435244-100435572
  hyper

SEQ ID NO: 278680 - DNA, 551 bp, Homo sapiens; identical to SEQ ID NO: 227336
  chr1:100503350-100503901
  hyper

SEQ ID NO: 278681 - DNA, 248 bp, Homo sapiens; identical to SEQ ID NO: 227337
  chr1:100598145-100598393
  hyper

SEQ ID NO: 278682 - DNA, 56 bp, Homo sapiens; identical to SEQ ID NO: 103899
  chr1:100715426-100715482
  hyper

SEQ ID NO: 278683 - DNA, 305 bp, Homo sapiens; identical to SEQ ID NO: 227339
  chr1:100731302-100731607
  hyper

SEQ ID NO: 278684 - DNA, 100 bp, Homo sapiens; identical to SEQ ID NO: 227340
  chr1:100816956-100817056
  hyper

SEQ ID NO: 278685 - DNA, 65 bp, Homo sapiens; identical to SEQ ID NO: 227341
  chr1:100817825-100817890
  hyper

SEQ ID NO: 278686 - DNA, 63 bp, Homo sapiens; identical to SEQ ID NO: 227344
  chr1:101491304-101491367
  hyper

SEQ ID NO: 278687 - DNA, 79 bp, Homo sapiens; identical to SEQ ID NO: 227345
  chr1:101491588-101491667
  hyper

SEQ ID NO: 278688 - DNA, 288 bp, Homo sapiens
  chr1:101702081-101702369
  hyper
cagacttttcgagagaaaagttttcaaagtctctccaccttttttttttttcaggggctcgggagaatcctctccacagccagggatcagcgtctatctgggcgagggcagtgatttatacagtagaatccaggggttaccgggctccgccccttctctctctctctttttttctttcatttgttgtttggggaggaggggttcttttttttttttttttttttttttttgcttctgccccagatctttcctggacagtgcgtctcagcagttcagatccgggggccc

SEQ ID NO: 278689 - DNA, 392 bp, Homo sapiens
  chr1:101702796-101703188
  hyper
tctctgggctactaaggagcccatctcgatcagattgttcttgggcacttgtgatttatggagttcagaaaaaaggttaattcccaactgtggaacctacgggtgtaggggcagtgaaaattgcagttggtcggaggaataggagggaaggcgttaaattttggaaatcctatagacaaagaatatggtgggtggtgtggagcgtgggtaatggcttaaattagtactgcccaggagcagggtataaaattagttgggggaaaatgcggagcttcttggcttgagcagcctctgctgttcgcggagttgctgggattgttctcatctctattacctcattttattgcattgctgcattaccttgaaatatttaagcaacttagaagtagact

SEQ ID NO: 278690 - DNA, 189 bp, Homo sapiens
  chr1:101774905-101775094
  hyper
tttgccgcagcaaacgggaaaataccaatttagctctgtttgctgcagcttcgcagctttaccaggagagggcgccgacggacctgacttttgccttgcctcgcagtagagcccaactagagggtaaacagcagccacagtaagttctagctgttgcagaaataaattacaaatacatgtaggaaaaag

SEQ ID NO: 278691 - DNA, 39 bp, Homo sapiens; identical to SEQ ID NO: 197678
  chr1:101775488-101775527
  hyper

SEQ ID NO: 278692 - DNA, 108 bp, Homo sapiens; identical to SEQ ID NO: 197679
  chr1:102462482-102462590
  hyper

SEQ ID NO: 278693 - DNA, 106 bp, Homo sapiens; identical to SEQ ID NO: 197680
  chr1:102462591-102462697
  hyper

SEQ ID NO: 278694 - DNA, 43 bp, Homo sapiens
  chr1:103572600-103572643
  hyper
tttcgcctgccagtcgattctaaggcacctaacggaccgctcc

SEQ ID NO: 278695 - DNA, 249 bp, Homo sapiens
  chr1:103574168-103574417
  hyper
ggctgagggtcagacccaatcacacgactctggggcggccccaagcccgcccccgcctccctcagcccaagaatgaggactccgagcaggcccagcccaccaaccaccccccatctccccactcctctcctccctcctcgcctaccaaatccccgagaaaaaatgggagggagttacgggggacgcgtgcttggctccagcactttgggaatgaaaggaattgcaggagagccccggagcacacggagt

SEQ ID NO: 278696 - DNA, 421 bp, Homo sapiens; identical to SEQ ID NO: 227353
  chr1:104068298-104068719
  hyper

SEQ ID NO: 278697 - DNA, 1057 bp, Homo sapiens
  chr1:107599193-107600250
  hyper
caggagaccttccgcgccgccggccgggcgaccccgcaggaagtaggaaggacgagcgcgcactacaagtcccagaagcccccgtttcctggagcccgcgccgtgccgcgctacgcccgccgggagccgggcagagcggccaagatgtcgcagcccaagaaaagaaagcttgagtcggggggcggcggcgaaggaggggagggaactgaagaggaagatggcgcggagcgggaggcggccctggagcgaccccggaggactaagcgggaacgggaccagctgtactacgagtgctactcggacgtttcggtccacgaggagatgatcgcggaccgcgtccgcaccgatgcctaccgcctgggtatccttcggaactgggcagcactgcgaggcaagacggtactggacgtgggcgcgggcaccggcattctgagcatcttctgtgcccaggccggggcccggcgcgtgtacgcggtagaggccagcgccatctggcaacaggcccgggaggtggtgcggttcaacgggctggaggaccgggtgcacgtcctgccgggaccagtggagactgtagagttgccggaacaggtggatgccatcgtgagcgagtggatgggctacggactcctgcacgagtccatgctgagctccgtcctccacgcgcgaaccaagtggctgaaggagggcggtcttctcctgccggcctccgccgagctcttcatagcccccatcagcgaccagatgctggaatggcgcctgggcttctggagccaggtgaagcagcactatggtgtggacatgagctgcctggagggcttcgccacgcgctgtctcatgggccactcggagatcgttgtgcagggattgtccggcgaggacgtgctggcccggccgcagcgctttgctcagctagagctctcccgcgccggcttggagcaggagctggaggccggagtgggcgggcgcttccgctgcagctgctatggctcggcgcccatgcatggctttgccatctggttccaggtgaccttccctggaggggagtcggagaaacccc

SEQ ID NO: 278698 - DNA, 43 bp, Homo sapiens
  chr1:107600359-107600402
  hyper
cacgctgctgccctcccgggacaacccccgtcgcctgcgcgtg

SEQ ID NO: 278699 - DNA, 63 bp, Homo sapiens
  chr1:107684495-107684558
  hyper
tttggggaaaagcaaacaaaaaaaacaaaaaaacacttgccctattgccggccttggggatct

SEQ ID NO: 278700 - DNA, 318 bp, Homo sapiens
  chr1:108506277-108506595
  hyper
agctgaggctctgcgtcatagaggattagtgctgaaatgtgtcagggagagggctctgtcctctcccttttaagttgaaagcagtttggttttttgttttgttttaacattctgaaagagaaagaggctctgaaccgagtttaacatccttctgtacaaaaattttccgacaggacaaataaactactcttccactgaactgtgacttttgagctgactctagggtgcacccaaccttccagaggtgtctggcttaaccctcaaagaggcagctccagccccaggagccgaccggcaccacagcacctgagcagggca

SEQ ID NO: 278701 - DNA, 884 bp, Homo sapiens; identical to SEQ ID NO: 227359
  chr1:108742393-108743277
  hyper

SEQ ID NO: 278702 - DNA, 118 bp, Homo sapiens; identical to SEQ ID NO: 197686
  chr1:109204221-109204339
  hyper

SEQ ID NO: 278703 - DNA, 208 bp, Homo sapiens; identical to SEQ ID NO: 227361
  chr1:109234633-109234841
  hyper

SEQ ID NO: 278704 - DNA, 182 bp, Homo sapiens; identical to SEQ ID NO: 227362
  chr1:109235041-109235223
  hyper

SEQ ID NO: 278705 - DNA, 37 bp, Homo sapiens; identical to SEQ ID NO: 227363
  chr1:109584672-109584709
  hyper

SEQ ID NO: 278706 - DNA, 171 bp, Homo sapiens; identical to SEQ ID NO: 227364
  chr1:109618424-109618595
  hyper

SEQ ID NO: 278707 - DNA, 453 bp, Homo sapiens
  chr1:109632945-109633398
  hyper
tcatttcatttgcaacgttcagacgcagtctgactagatttccatccggagtaaggaagagcagctcaagggcagtcacggaggccgcaggtgcggcttcttcacccgcggtgctggagttctctcaagtggaagcccaggacgatgaaaacctcataggtaggctgctgcttacacacagcagccgccacggcgcaaaataaactacaaaactacaagcctttaccttttcaaacacactgacgcgggccagccccagccctacgcccgcaggggcacgcagaaaagacttagttaccacggccaagtacgaagccttcgagatagcgttcttcttaccctacgtaaacacgcagtttcccgagctcgacaatcggctagccactcctgatagcgttcggcgctcgcctctcggcccttgctcctgcgtactacggcttcttccagtcacct

SEQ ID NO: 278708 - DNA, 36 bp, Homo sapiens; identical to SEQ ID NO: 227366
  chr1:109642650-109642686
  hyper

SEQ ID NO: 278709 - DNA, 210 bp, Homo sapiens; identical to SEQ ID NO: 227367
  chr1:109643170-109643380
  hyper

SEQ ID NO: 278710 - DNA, 119 bp, Homo sapiens
  chr1:109656101-109656220
  hyper
gcgcttgggaaattgcggctaaggcaaactcctcgcttaaactcggatcaactacagtgtcagggcttctcttctagccggttgtaaaagcacggatggatttggcgggatgtaagatc

SEQ ID NO: 278711 - DNA, 203 bp, Homo sapiens; identical to SEQ ID NO: 197688
  chr1:109656291-109656494
  hyper

SEQ ID NO: 278712 - DNA, 137 bp, Homo sapiens; identical to SEQ ID NO: 197689
  chr1:109657070-109657207
  hyper

SEQ ID NO: 278713 - DNA, 617 bp, Homo sapiens
  chr1:109940219-109940836
  hyper
tgttggccagcttggcgacgaagtcccggacccggccgcactcctcgtcctcgcccggcgcgctgcgacgccaacggccgccgcggggaaacgcgcccccggctgcggccgcccgcagcccccagctcaccccgatggggccagaccagcgcggcagcggcgcagcgggcggcggcggcgcgtccagccggtcctggctgagggtcgacggcggcagcagctgcaggaggaggaggaggccgaggccatggggccagcgcgagaggccgtccgcagctccccagggccgctccatcgccgccgaatgccgccgacgccgacacctgccgcccggcgcgcccgcccacccccgccggcgcgcgccacacccccgagccgagcgcggcgctccttggatacgcgcggccgggcctctccgccccataggctggccgcctgtccctcttccccggcccactcctcattggctcgcgtcgcctccggcttcgggggtcctggattcggatgctaagatgcgggactgattggctggaacggggcagagactgctgaggtcaaccccgcctcgcccggcgtctcccgggcccggcttgtggagttcacgtaggagcttctca

SEQ ID NO: 278714 - DNA, 210 bp, Homo sapiens; identical to SEQ ID NO: 227370
  chr1:109968966-109969176
  hyper

SEQ ID NO: 278715 - DNA, 49 bp, Homo sapiens; identical to SEQ ID NO: 227371
  chr1:109969513-109969562
  hyper

SEQ ID NO: 278716 - DNA, 122 bp, Homo sapiens
  chr1:110008894-110009016
  hyper
aggagaaaaaccggcgctgggcagtttgcaatccaggaaaatagggaaggataaacctgaagcctgtgcgtccaggtgcgcctggctagggtttccgacggccgcggtgtctcggtggggac

SEQ ID NO: 278717 - DNA, 489 bp, Homo sapiens
  chr1:110009094-110009583
  hyper
cctttaaggtgcccggcgagcggagaaagggagcagagggggcgggaggagggttcgggagcgcacgccacgtgacccggcggccaagttcgctgcgagtttgacagaagtttgaatccgagtcgggggctttctgctgccggcggggcaccgcggcggccgcagcctctgagagcacgaacagcagcgcccccgcgtcccagccagccagccagccagactggactccggcccaccgacggccgctcgcgctccggccccgctcgcctgctctgccccggacctgcagctccccgctcccccgccgtgtccgccgcctcccggccagagagccaagccaccacgccgcgcccagcgctcgccgcgccagcatgtcctcgaccgagagcgccggccgcacggcggacaagtcgccgcgccagcaggtagtccctgcgcgcccaggactctcacccgcccctctccacctagatgtcgggctgcacactt

SEQ ID NO: 278718 - DNA, 273 bp, Homo sapiens
  chr1:110009818-110010091
  hyper
atggagccagggtgggggctggggaggtgctgcggccgggccacggcggaagggtggggggcggcgacaggtgggcgggggaggggcgggctggggctgcttctccggacttagtggcaggagggtgaagagcgaggcatgcggagtcccggattcggtccttctatgtgcaaggagcctttgcccagggcgctcacatttcacccgggcgagaggacccgggtgtaacctttccagaactctgatcctgcacataccactccttggtgacgg

SEQ ID NO: 278719 - DNA, 99 bp, Homo sapiens
  chr1:110025979-110026078
  hyper
gaggaggcacgacacgggagccgaggccctcccccacaccacccctgtgtccttcagcacctcctacagactccctccccttgcccttctgattcacag

SEQ ID NO: 278720 - DNA, 206 bp, Homo sapiens; identical to SEQ ID NO: 197691
  chr1:110052079-110052285
  hyper

SEQ ID NO: 278721 - DNA, 103 bp, Homo sapiens; identical to SEQ ID NO: 227374
  chr1:110090998-110091101
  hyper

SEQ ID NO: 278722 - DNA, 172 bp, Homo sapiens; identical to SEQ ID NO: 227375
  chr1:110162331-110162503
  hyper

SEQ ID NO: 278723 - DNA, 157 bp, Homo sapiens; identical to SEQ ID NO: 197692
  chr1:110185990-110186147
  hyper

SEQ ID NO: 278724 - DNA, 49 bp, Homo sapiens; identical to SEQ ID NO: 197693
  chr1:110186177-110186226
  hyper

SEQ ID NO: 278725 - DNA, 160 bp, Homo sapiens
  chr1:110230559-110230719
  hyper
cgagggcgcaggggagggaagtgcgaagcagctgcgggacggactctagggaccgttcctcttcagggctgcccgcctcagaagggcctgtgcatgccgctgtgtgtgtgttgggggtgtgggcgggtagaggaggcaacgggtacgtgcagtgtaaact

SEQ ID NO: 278726 - DNA, 32 bp, Homo sapiens
  chr1:110282510-110282542
  hyper
aggcggatggcgtgcgccagctggggaagaca

SEQ ID NO: 278727 - DNA, 147 bp, Homo sapiens; identical to SEQ ID NO: 197694
  chr1:110453160-110453307
  hyper

SEQ ID NO: 278728 - DNA, 421 bp, Homo sapiens; identical to SEQ ID NO: 197695
  chr1:110453531-110453952
  hyper

SEQ ID NO: 278729 - DNA, 62 bp, Homo sapiens; identical to SEQ ID NO: 227380
  chr1:110526885-110526947
  hyper

SEQ ID NO: 278730 - DNA, 191 bp, Homo sapiens
  chr1:110526977-110527168
  hyper
gagctttaatccaaagggcctggggctgggccagtgagtgagtgggctgtctcgagccccggacatttcctaggaatcgctgtaggatgtgtcgtgtggggctctggtctttgctcccaaacacccctttcatgcgcctctgaggccttgccaggaaccccgcagcccaaagaccctccgttccgcagcat

SEQ ID NO: 278731 - DNA, 84 bp, Homo sapiens; identical to SEQ ID NO: 227382
  chr1:110577102-110577186
  hyper

SEQ ID NO: 278732 - DNA, 70 bp, Homo sapiens; identical to SEQ ID NO: 197696
  chr1:110672763-110672833
  hyper

SEQ ID NO: 278733 - DNA, 139 bp, Homo sapiens; identical to SEQ ID NO: 227389
  chr1:110752409-110752548
  hyper

SEQ ID NO: 278734 - DNA, 384 bp, Homo sapiens; identical to SEQ ID NO: 197697
  chr1:110753510-110753894
  hyper

SEQ ID NO: 278735 - DNA, 46 bp, Homo sapiens; identical to SEQ ID NO: 197698
  chr1:110753957-110754003
  hyper

SEQ ID NO: 278736 - DNA, 218 bp, Homo sapiens; identical to SEQ ID NO: 227393
  chr1:110880352-110880570
  hyper

SEQ ID NO: 278737 - DNA, 357 bp, Homo sapiens; identical to SEQ ID NO: 227394
  chr1:110881806-110882163
  hyper

SEQ ID NO: 278738 - DNA, 600 bp, Homo sapiens; identical to SEQ ID NO: 197699
  chr1:111148988-111149588
  hyper

SEQ ID NO: 278739 - DNA, 40 bp, Homo sapiens; identical to SEQ ID NO: 197700
  chr1:111289414-111289454
  hyper

SEQ ID NO: 278740 - DNA, 369 bp, Homo sapiens; identical to SEQ ID NO: 197701
  chr1:111506646-111507015
  hyper

SEQ ID NO: 278741 - DNA, 88 bp, Homo sapiens; identical to SEQ ID NO: 227401
  chr1:111682579-111682667
  hyper

SEQ ID NO: 278742 - DNA, 260 bp, Homo sapiens; identical to SEQ ID NO: 227402
  chr1:111683181-111683441
  hyper

SEQ ID NO: 278743 - DNA, 748 bp, Homo sapiens; identical to SEQ ID NO: 227403
  chr1:111746591-111747339
  hyper

SEQ ID NO: 278744 - DNA, 46 bp, Homo sapiens
  chr1:111813500-111813546
  hyper
gtgagtcccgggtggcctagggtaaggcggaccgggagccacctca

SEQ ID NO: 278745 - DNA, 63 bp, Homo sapiens
  chr1:111813604-111813667
  hyper
caacagcctattcctcccgtgtgtgacgaccccagccagagagaacccaacctgagtgccagc

SEQ ID NO: 278746 - DNA, 155 bp, Homo sapiens; identical to SEQ ID NO: 227405
  chr1:111889101-111889256
  hyper

SEQ ID NO: 278747 - DNA, 279 bp, Homo sapiens; identical to SEQ ID NO: 227406
  chr1:111991909-111992188
  hyper

SEQ ID NO: 278748 - DNA, 145 bp, Homo sapiens; identical to SEQ ID NO: 227408
  chr1:112532138-112532283
  hyper

SEQ ID NO: 278749 - DNA, 155 bp, Homo sapiens; identical to SEQ ID NO: 197704
  chr1:112532952-112533107
  hyper

SEQ ID NO: 278750 - DNA, 35 bp, Homo sapiens; identical to SEQ ID NO: 197705
  chr1:112938562-112938597
  hyper

SEQ ID NO: 278751 - DNA, 165 bp, Homo sapiens; identical to SEQ ID NO: 227411
  chr1:112939042-112939207
  hyper

SEQ ID NO: 278752 - DNA, 195 bp, Homo sapiens; identical to SEQ ID NO: 227412
  chr1:113008785-113008980
  hyper

SEQ ID NO: 278753 - DNA, 426 bp, Homo sapiens
  chr1:113051157-113051583
  hyper
catttcacagaagcgcaaggatggaggaaatgagtgcatcctccgtgctcagcgccggtgtcactgtaggttggggacaggagggaagtgcccgcatccccttcccgctccgccagcctggccgtcacccatagaagtggggctgctgagtgaagggcgctaggacccggtggcgcggtgtcggcagggactgggcgcttggggcgcaggagggagccgcggcgtcccgtcgcagcgtgcgggagcaggtgggggtgcagcgcggtggcgcgcgggagccccgaggggcggaggcggctgctacacctagggcgtcgcggagcgccccgggcttggcgcgggcggagccgccctaagggccgcgcgtgtccccggcctcggccccgccccgtcccgtccaatgagagcccgcggccgaaggggctg

SEQ ID NO: 278754 - DNA, 53 bp, Homo sapiens
  chr1:113052113-113052166
  hyper
gccggaggcgcctggagggactggctgctcacgggaccaggctgttgcttcga

SEQ ID NO: 278755 - DNA, 119 bp, Homo sapiens; identical to SEQ ID NO: 227414
  chr1:113162277-113162396
  hyper

SEQ ID NO: 278756 - DNA, 436 bp, Homo sapiens; identical to SEQ ID NO: 227415
  chr1:113216760-113217196
  hyper

SEQ ID NO: 278757 - DNA, 190 bp, Homo sapiens; identical to SEQ ID NO: 197708
  chr1:113249226-113249416
  hyper

SEQ ID NO: 278758 - DNA, 160 bp, Homo sapiens; identical to SEQ ID NO: 227416
  chr1:113249975-113250135
  hyper

SEQ ID NO: 278759 - DNA, 657 bp, Homo sapiens; identical to SEQ ID NO: 227417
  chr1:113256960-113257617
  hyper

SEQ ID NO: 278760 - DNA, 140 bp, Homo sapiens; identical to SEQ ID NO: 197710
  chr1:113258352-113258492
  hyper

SEQ ID NO: 278761 - DNA, 57 bp, Homo sapiens
  chr1:113392152-113392209
  hyper
ctagcgccgcgctccgaggtcacgcagctgcctgcgaagccctcagtgaggccgcct

SEQ ID NO: 278762 - DNA, 122 bp, Homo sapiens; identical to SEQ ID NO: 197711
  chr1:113497849-113497971
  hyper

SEQ ID NO: 278763 - DNA, 1352 bp, Homo sapiens
  chr1:113498188-113499540
  hyper
ggggcggacaatgtcacgaatcataaataacttctgccccgagtcccttcccttggggcagaagcggccaggagagtctggaggtaccacatgcagcagcctcatgttatcccttttccagatcaaagcatctctcgaggagcctattgaagacttaggggggaagggacttccccaccgtcaccgggcaccacgacccaactcctcggccaggcctgggaccggcatcttagcacggggcccgcggctcggctaagagaggcgctgaccccagcgcctcaaggtctccttcaccagcactgcagtccgaggccacgcggctgcctgtgaccacgatgccctctgctgggccgcctccctccgccggagacaaagtctcccaaccccggaggtcccctccgaccccaccagggcagcgagggcaccgtggggtccgcgccgcgtgccgccggctgttacccaactaaccgttatatgcgcggatcgcagcgccgagcgtgtgcgtgacgtggtggcgcaggctggagttccacggggcccagggtccggctcccgtccttcgctcgctgcctcgtttgcttgttccagtacccacgcagctagccagtcacgtcgcagctcaccactttgtctggccgggccagcgaggctgccttataacccgccggggccggagcatgcgcgcagggggcggagtcgtctctcccggccgccgccccctccccgccacacagacatccgaactgcagcccgcgcctccacacgctttcagccgcgcgcgccctctagctcgcccgcgcgcgccggcgccccctccccgccacgtgaccggcgtcccagtccgacccgcgcgctgcgcccctgctgagcggcgcggagctaccacgccctgccagactcgcccttgggtccctgtctgacgagctctaggcaatctgccctcgttcgggacacaaccatcggtctcacccctcagtttctgccagagaaaaaggaaaagtcaccgagaggcctgaccctgacgggtgggggagatgcgcgtgcggagtagcgggaagcgactgaggagcggggaatgggcagcatttgaatggatgcgggtgccgctggcacccgggaagacgctgggggccggcgctgtagagccgggcatgggctgggatgtgtttggattccaatccgggcctgacaccagttcagtgacctcgggaagttccccaaccctccgggcctgtttcctccctctgaagtggcgacagtagtagaaccgacctcgtaggctcatcgggaggtcctgatgggagaacccatgcaacttgccaccatagagccaggcccgcggcggttggcgc

SEQ ID NO: 278764 - DNA, 706 bp, Homo sapiens; identical to SEQ ID NO: 197714
  chr1:113932573-113933279
  hyper

SEQ ID NO: 278765 - DNA, 778 bp, Homo sapiens; identical to SEQ ID NO: 36142
  chr1:113933305-113934083
  hyper

SEQ ID NO: 278766 - DNA, 203 bp, Homo sapiens; identical to SEQ ID NO: 221447
  chr1:114302510-114302713
  hyper

SEQ ID NO: 278767 - DNA, 254 bp, Homo sapiens; identical to SEQ ID NO: 227423
  chr1:114354449-114354703
  hyper

SEQ ID NO: 278768 - DNA, 84 bp, Homo sapiens; identical to SEQ ID NO: 197717
  chr1:114355230-114355314
  hyper

SEQ ID NO: 278769 - DNA, 155 bp, Homo sapiens; identical to SEQ ID NO: 227425
  chr1:114471834-114471989
  hyper

SEQ ID NO: 278770 - DNA, 165 bp, Homo sapiens
  chr1:114695147-114695312
  hyper
actccctcccgccccggaccctccagatatcgggacaaagaagccccgcggcagccggcgagcgtggctgccgggcactggtgcagcaggtaaataccctgggccggccgccacgtcgccgaccctcccgcagctcccgccgccagggcgcgacacgccattccc

SEQ ID NO: 278771 - DNA, 218 bp, Homo sapiens
  chr1:114697443-114697661
  hyper
tgatctacacctgtcggcggtggggccccttctgtgtggggctcgcctgaagccccagactcaggtccatttgctctcccggagctgggaaggaagctttagctgcagcccctggaggctgctgggttggtgtatgcccgagtggctggcgagggagaaaggtcttgcctcttaattaacacgcttattggaagtgactcgggcagtgactcacgttc

SEQ ID NO: 278772 - DNA, 107 bp, Homo sapiens; identical to SEQ ID NO: 197718
  chr1:114697918-114698025
  hyper

SEQ ID NO: 278773 - DNA, 99 bp, Homo sapiens; identical to SEQ ID NO: 227430
  chr1:115053407-115053506
  hyper

SEQ ID NO: 278774 - DNA, 275 bp, Homo sapiens; identical to SEQ ID NO: 197719
  chr1:115124231-115124506
  hyper

SEQ ID NO: 278775 - DNA, 629 bp, Homo sapiens; identical to SEQ ID NO: 227432
  chr1:115212645-115213274
  hyper

SEQ ID NO: 278776 - DNA, 61 bp, Homo sapiens; identical to SEQ ID NO: 197721
  chr1:115258668-115258729
  hyper

SEQ ID NO: 278777 - DNA, 195 bp, Homo sapiens; identical to SEQ ID NO: 227433
  chr1:115323253-115323448
  hyper

SEQ ID NO: 278778 - DNA, 31 bp, Homo sapiens; identical to SEQ ID NO: 197722
  chr1:115631836-115631867
  hyper

SEQ ID NO: 278779 - DNA, 49 bp, Homo sapiens; identical to SEQ ID NO: 104068
  chr1:115632692-115632741
  hyper

SEQ ID NO: 278780 - DNA, 1147 bp, Homo sapiens; identical to SEQ ID NO: 197724
  chr1:116184427-116185574
  hyper

SEQ ID NO: 278781 - DNA, 106 bp, Homo sapiens
  chr1:116370915-116371021
  hyper
caaggtcccgtggccgcgatcccacctgcggcgtccgcgtccgcccgctctccctgaggtctgcaccctgagaggaggggcgagcgagccaacttggggcagggat

SEQ ID NO: 278782 - DNA, 443 bp, Homo sapiens
  chr1:116381944-116382387
  hyper
ttgtcccggcgggagctgcatctctgccggcaaagttcgggcgctcccggaaccggagctcggcaggctgcagctgtccccgggtggcctggccaagtccgggcatgtcggtgcttagccttcctctaacttaactgtgccctcttggaaacgccacctggccaggcttctctggggcgcctggagcactggcccggactgtgcgccttctgggagggggccgctcagaaccgctgggcttccgggtaattcgggcttcgagaaagggcccggcaggaggagaaaggcccctgcaggggctgcacgcaccgcccctgggcgtcgggagtgaggaccaggctgagaactcggggccccggcgtgggcagcctccacgacgctcggcacgggagaaatccgcgtcggcgacgtataggagcgtttgcttctagagaaacaaaagc

SEQ ID NO: 278783 - DNA, 35 bp, Homo sapiens; identical to SEQ ID NO: 227443
  chr1:116519005-116519040
  hyper

SEQ ID NO: 278784 - DNA, 62 bp, Homo sapiens; identical to SEQ ID NO: 197727
  chr1:116711292-116711354
  hyper

SEQ ID NO: 278785 - DNA, 59 bp, Homo sapiens; identical to SEQ ID NO: 197728
  chr1:116961169-116961228
  hyper

SEQ ID NO: 278786 - DNA, 338 bp, Homo sapiens; identical to SEQ ID NO: 197729
  chr1:117209809-117210147
  hyper

SEQ ID NO: 278787 - DNA, 40 bp, Homo sapiens; identical to SEQ ID NO: 227447
  chr1:117215387-117215427
  hyper

SEQ ID NO: 278788 - DNA, 480 bp, Homo sapiens; identical to SEQ ID NO: 197730
  chr1:117452364-117452844
  hyper

SEQ ID NO: 278789 - DNA, 218 bp, Homo sapiens; identical to SEQ ID NO: 197731
  chr1:117453203-117453421
  hyper

SEQ ID NO: 278790 - DNA, 378 bp, Homo sapiens
  chr1:117664693-117665071
  hyper
tcttaaaaagccacgctgatttggcgccgggacggccttctttctgccctcggactcgtcccacgaacgcagactgggttctcccattggtggatggcactgtcagttggctctgcgctgggagtgggagacgtttttcgggctcccgaggtctcggccgctcgggggcgccagacgtttctcctccacgcgggtttgaggctgcgaggctcccctctgtcctcaggcgcttactgtagctcacaggtccctcaggcctagcgtgctgggtacaagcactcccgcggctccccgactttgggtatttttcgggggtgagggcatctcaggctcgcgttacggggaccggttcgggagaccgtggagccgaggtgtcga

SEQ ID NO: 278791 - DNA, 263 bp, Homo sapiens
  chr1:117665105-117665368
  hyper
caccctccttgtcgggctcgggaaggctttgttttccggtccggggggagtgcagatgacctaaggagttgaatgtcacccgggattccacagtcctgtgtaacagaaacgagctgagcgagttggacccgctgtttttatcagtcaatcacggagggctcctgcctggtcacagtgagacaatggacggtggcaatgagggacaagccctttgtgggcttaaaactaattgggaagatgaacacgtccgacccctttaactt

SEQ ID NO: 278792 - DNA, 412 bp, Homo sapiens; identical to SEQ ID NO: 227450
  chr1:118148622-118149034
  hyper

SEQ ID NO: 278793 - DNA, 317 bp, Homo sapiens; identical to SEQ ID NO: 227451
  chr1:118149462-118149779
  hyper

SEQ ID NO: 278794 - DNA, 236 bp, Homo sapiens
  chr1:118471568-118471804
  hyper
cttccccctcaagcggccagagagcggaaacacaaagccaggccagtgtcactccagggattgcgggaacctagacaacgcaccatcctgggctcagcgtctacccacccctcacccgaggtgctctcggttccgtagaatgtccagtccacaggaacggcaacacggacttgtctttgggactacaaccagcaagagctcccgcctgccccatttcacctgcaccctagggcgcc

SEQ ID NO: 278795 - DNA, 78 bp, Homo sapiens; identical to SEQ ID NO: 104099
  chr1:118471866-118471944
  hyper

SEQ ID NO: 278796 - DNA, 119 bp, Homo sapiens; identical to SEQ ID NO: 227453
  chr1:118472379-118472498
  hyper

SEQ ID NO: 278797 - DNA, 136 bp, Homo sapiens
  chr1:119527652-119527788
  hyper
ccggcagagcggactaaaaaacggtgctatgagagatggtgagaatactctaggcatgaacgtgtgcgtgtgtgtttgtgtgtgtgtgtgtgtttcattcttcccgcaaaacaattttttgtttttttcctattcc

SEQ ID NO: 278798 - DNA, 48 bp, Homo sapiens
  chr1:119527820-119527868
  hyper
cgcagcggcttctgggccctaaggacaaaagagttaaaacaatgaggc

SEQ ID NO: 278799 - DNA, 224 bp, Homo sapiens
  chr1:119535349-119535573
  hyper
caccccctcacactttttaaaaataaaagtccatgggggtgaaaggtctttaatgatgtttttttgttttcacgaaataaaatcttttatttttattttaaaccagcagcgtgcccatcccttggtccttccagatgtttgcaataaaatcgcaggttttgcctttgggactggaaataaaatttaacggccttcaccctgtaattattctcttagcttgccct

SEQ ID NO: 278800 - DNA, 80 bp, Homo sapiens; identical to SEQ ID NO: 197733
  chr1:119544707-119544787
  hyper

SEQ ID NO: 278801 - DNA, 141 bp, Homo sapiens; identical to SEQ ID NO: 197734
  chr1:119548917-119549058
  hyper

SEQ ID NO: 278802 - DNA, 74 bp, Homo sapiens; identical to SEQ ID NO: 227467
  chr1:119683271-119683345
  hyper

SEQ ID NO: 278803 - DNA, 113 bp, Homo sapiens
  chr1:119869837-119869950
  hyper
acagaacttcaaagcgaaaggaagcacaagcagtagggggaggaggtgtaaatttcccccgcggtcccttggaactgtgaacatttgcagattccccaagccctcccgctagc

SEQ ID NO: 278804 - DNA, 426 bp, Homo sapiens
  chr1:119870254-119870680
  hyper
aagccggcccgggtcgtaaaagtgtcagcacgcgatatatttcttgcaggggatcctctctggctcttgccagcgcctctcccccgtggctggcagccgccctagccgggcctgcaaacagcggatgccccaggtcgctatccctccgccctgccccggagcgccgggccctcacgttctcgctccagcctggggtctctcacgtggcatctggccctggggacggtgcagcggaggagttaattgctgtcactcctgacttcagcgaaagaggtcgatcgtggggtgagatattgaagctggggattgacctgtggaccaagagtttgatggggcaactcaatagcaaactcaatgttcccagagatgaaccaagtaatcagttatttattcagaaaattaagtgccattcgtgtgccaggcact

SEQ ID NO: 278805 - DNA, 293 bp, Homo sapiens; identical to SEQ ID NO: 197736
  chr1:120190872-120191165
  hyper

SEQ ID NO: 278806 - DNA, 68 bp, Homo sapiens; identical to SEQ ID NO: 197737
  chr1:120191312-120191380
  hyper

SEQ ID NO: 278807 - DNA, 255 bp, Homo sapiens; identical to SEQ ID NO: 227471
  chr1:120254605-120254860
  hyper

SEQ ID NO: 278808 - DNA, 217 bp, Homo sapiens; identical to SEQ ID NO: 227473
  chr1:150459684-150459901
  hyper

SEQ ID NO: 278809 - DNA, 38 bp, Homo sapiens; identical to SEQ ID NO: 227475
  chr1:150552000-150552038
  hyper

SEQ ID NO: 278810 - DNA, 112 bp, Homo sapiens; identical to SEQ ID NO: 227476
  chr1:150586171-150586283
  hyper

SEQ ID NO: 278811 - DNA, 61 bp, Homo sapiens; identical to SEQ ID NO: 197738
  chr1:150601697-150601758
  hyper

SEQ ID NO: 278812 - DNA, 458 bp, Homo sapiens; identical to SEQ ID NO: 197739
  chr1:150669481-150669939
  hyper

SEQ ID NO: 278813 - DNA, 69 bp, Homo sapiens; identical to SEQ ID NO: 227479
  chr1:150849135-150849204
  hyper

SEQ ID NO: 278814 - DNA, 87 bp, Homo sapiens; identical to SEQ ID NO: 227480
  chr1:150898621-150898708
  hyper

SEQ ID NO: 278815 - DNA, 48 bp, Homo sapiens; identical to SEQ ID NO: 197740
  chr1:150947649-150947697
  hyper

SEQ ID NO: 278816 - DNA, 33 bp, Homo sapiens; identical to SEQ ID NO: 197741
  chr1:150980783-150980816
  hyper

SEQ ID NO: 278817 - DNA, 201 bp, Homo sapiens; identical to SEQ ID NO: 104165
  chr1:150980853-150981054
  hyper

SEQ ID NO: 278818 - DNA, 814 bp, Homo sapiens; identical to SEQ ID NO: 227483
  chr1:151020069-151020883
  hyper

SEQ ID NO: 278819 - DNA, 55 bp, Homo sapiens; identical to SEQ ID NO: 197744
  chr1:151031281-151031336
  hyper

SEQ ID NO: 278820 - DNA, 170 bp, Homo sapiens; identical to SEQ ID NO: 227485
  chr1:151032105-151032275
  hyper

SEQ ID NO: 278821 - DNA, 106 bp, Homo sapiens; identical to SEQ ID NO: 227486
  chr1:151042862-151042968
  hyper

SEQ ID NO: 278822 - DNA, 238 bp, Homo sapiens; identical to SEQ ID NO: 197745
  chr1:151043249-151043487
  hyper

SEQ ID NO: 278823 - DNA, 189 bp, Homo sapiens; identical to SEQ ID NO: 227488
  chr1:151119043-151119232
  hyper

SEQ ID NO: 278824 - DNA, 78 bp, Homo sapiens; identical to SEQ ID NO: 227489
  chr1:151138453-151138531
  hyper

SEQ ID NO: 278825 - DNA, 132 bp, Homo sapiens; identical to SEQ ID NO: 227490
  chr1:151170900-151171032
  hyper

SEQ ID NO: 278826 - DNA, 178 bp, Homo sapiens; identical to SEQ ID NO: 227491
  chr1:151254486-151254664
  hyper

SEQ ID NO: 278827 - DNA, 48 bp, Homo sapiens; identical to SEQ ID NO: 227492
  chr1:151319768-151319816
  hyper

SEQ ID NO: 278828 - DNA, 232 bp, Homo sapiens; identical to SEQ ID NO: 227493
  chr1:151483994-151484226
  hyper

SEQ ID NO: 278829 - DNA, 565 bp, Homo sapiens; identical to SEQ ID NO: 197746
  chr1:151512578-151513143
  hyper

SEQ ID NO: 278830 - DNA, 259 bp, Homo sapiens; identical to SEQ ID NO: 197747
  chr1:151513212-151513471
  hyper

SEQ ID NO: 278831 - DNA, 211 bp, Homo sapiens; identical to SEQ ID NO: 197748
  chr1:151566653-151566864
  hyper

SEQ ID NO: 278832 - DNA, 289 bp, Homo sapiens; identical to SEQ ID NO: 227496
  chr1:151584377-151584666
  hyper

SEQ ID NO: 278833 - DNA, 34 bp, Homo sapiens; identical to SEQ ID NO: 197749
  chr1:151584888-151584922
  hyper

SEQ ID NO: 278834 - DNA, 146 bp, Homo sapiens
  chr1:151689189-151689335
  hyper
cggctgctcccgccgctggggctgcctgctttcccggtcacctgggtcccggagctctgctctccggccgcgctctcctcaacaaaaacctcccccctccacacccccctccccactcccacctcctttcccctgacatcagtgat

SEQ ID NO: 278835 - DNA, 40 bp, Homo sapiens; identical to SEQ ID NO: 197751
  chr1:151693822-151693862
  hyper

SEQ ID NO: 278836 - DNA, 79 bp, Homo sapiens; identical to SEQ ID NO: 197752
  chr1:151694406-151694485
  hyper

SEQ ID NO: 278837 - DNA, 110 bp, Homo sapiens; identical to SEQ ID NO: 197753
  chr1:151762601-151762711
  hyper

SEQ ID NO: 278838 - DNA, 303 bp, Homo sapiens
  chr1:151763859-151764162
  hyper
agggagcgggtctccgcaggcggaagtttgctttggaagattttattccagacgctgtcctggtccctggacggttaggaacggttgggtcctgctactgcctccgtggggcagggagcctcgcgagaccagcactgcgccctactcggtccaccctgtccccgctccgcgctaggggctcaccctgggaacaggggtcgggcgatcctggtcattgggggatcttccgcactagcttccatcacaatacctggcaggtgatgagcaataaatatttgctgaaagaacgcaaggttgtatctt

SEQ ID NO: 278839 - DNA, 137 bp, Homo sapiens
  chr1:151801436-151801573
  hyper
agtgtgagactctgtctcaaaaaaaaaaaaaaaaagcctggtgcaggctccctgtctcccttggcagcagcgctgagttcctgagttcctgaggccaccccgcctccgcacacccccctacctctatctccttcctt

SEQ ID NO: 278840 - DNA, 86 bp, Homo sapiens
  chr1:151811028-151811114
  hyper
ggcgacgaggccgtgtcgctgtcgggggcccggcagaggcgcaggtccggggcggagacgtgcagccgggactgcgccgcggggag

SEQ ID NO: 278841 - DNA, 45 bp, Homo sapiens; identical to SEQ ID NO: 197754
  chr1:151966778-151966823
  hyper

SEQ ID NO: 278842 - DNA, 144 bp, Homo sapiens; identical to SEQ ID NO: 227505
  chr1:152008864-152009008
  hyper

SEQ ID NO: 278843 - DNA, 321 bp, Homo sapiens
  chr1:152080641-152080962
  hyper
agctgctgttcctccccttcctggagcagctgttcctcttcacggaattttctgtcgcggtcgtgacgcagctgttgttcgcgctcctggcggcgcagctgcggttcctcctcgaggaattttctgtcacgctcttggcggtgcagctgctgttcttccctttcctggagcagctgttcgtcttcgcggaattttctgtcgcgctcctggcgcagctgttgttggccctcctggcggcgcagctgctgttcgtcctccatgaattttctctcttgttcctggcggcgcactttctgttcctctaaacggaattttctgtca

SEQ ID NO: 278844 - DNA, 83 bp, Homo sapiens; identical to SEQ ID NO: 227508
  chr1:152082878-152082961
  hyper

SEQ ID NO: 278845 - DNA, 90 bp, Homo sapiens
  chr1:152084599-152084689
  hyper
tcagctgctgctcgcgcctctcctcctcctgctcgcgcctcagctgctgctcgcgcctctcctcctgctcgcgcctcagctgctgctcgc

SEQ ID NO: 278846 - DNA, 46 bp, Homo sapiens; identical to SEQ ID NO: 227511
  chr1:153377336-153377382
  hyper

SEQ ID NO: 278847 - DNA, 176 bp, Homo sapiens; identical to SEQ ID NO: 227514
  chr1:153508699-153508875
  hyper

SEQ ID NO: 278848 - DNA, 75 bp, Homo sapiens; identical to SEQ ID NO: 227515
  chr1:153606602-153606677
  hyper

SEQ ID NO: 278849 - DNA, 180 bp, Homo sapiens; identical to SEQ ID NO: 227516
  chr1:153631120-153631300
  hyper

SEQ ID NO: 278850 - DNA, 420 bp, Homo sapiens; identical to SEQ ID NO: 197755
  chr1:153651023-153651443
  hyper

SEQ ID NO: 278851 - DNA, 189 bp, Homo sapiens; identical to SEQ ID NO: 227519
  chr1:153895707-153895896
  hyper

SEQ ID NO: 278852 - DNA, 208 bp, Homo sapiens; identical to SEQ ID NO: 227520
  chr1:153919195-153919403
  hyper

SEQ ID NO: 278853 - DNA, 108 bp, Homo sapiens; identical to SEQ ID NO: 227521
  chr1:153931160-153931268
  hyper

SEQ ID NO: 278854 - DNA, 172 bp, Homo sapiens; identical to SEQ ID NO: 227522
  chr1:153936113-153936285
  hyper

SEQ ID NO: 278855 - DNA, 176 bp, Homo sapiens; identical to SEQ ID NO: 197756
  chr1:153936615-153936791
  hyper

SEQ ID NO: 278856 - DNA, 156 bp, Homo sapiens; identical to SEQ ID NO: 197757
  chr1:153940532-153940688
  hyper

SEQ ID NO: 278857 - DNA, 330 bp, Homo sapiens; identical to SEQ ID NO: 197758
  chr1:153958647-153958977
  hyper

SEQ ID NO: 278858 - DNA, 308 bp, Homo sapiens; identical to SEQ ID NO: 104239
  chr1:153963300-153963608
  hyper

SEQ ID NO: 278859 - DNA, 135 bp, Homo sapiens; identical to SEQ ID NO: 227525
  chr1:154244745-154244880
  hyper

SEQ ID NO: 278860 - DNA, 449 bp, Homo sapiens
  chr1:154297541-154297990
  hyper
ctcggtgctgtgtcgttcattcaaggagagttgagatacagtgaaatgagccagggcgaggagggagggtgaaggaacggagggcgggcggctccgaggagcgagagtcgggctgagggcaacctggcgccagggaaaattctggttattcaccacttctacagctctcctgccgctccctgcagaggatgctcgttttgcagagaaggcagtgttcctctattcccttcttccgaattaaaaataccccctcagagcgatctagcctcccgaattgttttttcttttaagatgcggatggacgtacgtgtgggggcatcccagcccagccacgccgaggctcggaagggctaagaccctcccactgccccgcacaaagatggctgctccctcctccccgctccttctcccctccccaaaaccccctcccgccccccggcccccgccgc

SEQ ID NO: 278861 - DNA, 72 bp, Homo sapiens
  chr1:154298038-154298110
  hyper
cgggccgaggccccgggggagcggggccgcagctgggggggcgggagcccgtggggagccgagccgagcgcc

SEQ ID NO: 278862 - DNA, 215 bp, Homo sapiens; identical to SEQ ID NO: 227528
  chr1:154377607-154377822
  hyper

SEQ ID NO: 278863 - DNA, 248 bp, Homo sapiens
  chr1:154474301-154474549
  hyper
cttgcgcaatttgccgccgccgcccccgggcttggcccgctccgacacggtcttcaggttcagggggaactccttgaaccacttggccgccatgagggggccccggccggctcggcccaggagcgtcggggccgtggagcaggcgagcgaggaagcccagcccagacacgcagaggcgccaggggtcggggaccactgcattccccgtgactggggcgctggaggccgcggcgaggccccgcgacggc

SEQ ID NO: 278864 - DNA, 68 bp, Homo sapiens; identical to SEQ ID NO: 227529
  chr1:154531379-154531447
  hyper

SEQ ID NO: 278865 - DNA, 53 bp, Homo sapiens; identical to SEQ ID NO: 227531
  chr1:154600442-154600495
  hyper

SEQ ID NO: 278866 - DNA, 79 bp, Homo sapiens; identical to SEQ ID NO: 197762
  chr1:154842703-154842782
  hyper

SEQ ID NO: 278867 - DNA, 643 bp, Homo sapiens; identical to SEQ ID NO: 227533
  chr1:154909302-154909945
  hyper

SEQ ID NO: 278868 - DNA, 195 bp, Homo sapiens; identical to SEQ ID NO: 197764
  chr1:154955613-154955808
  hyper

SEQ ID NO: 278869 - DNA, 216 bp, Homo sapiens
  chr1:154971706-154971922
  hyper
cgaccgtaacctcctagctggctgggttcgagaagccggggacctgcgcctcctggtggctgatcggaaggaggctgagtgcagaggggttgtcttgccttctctgggacgtggagttttggaaactgttcccctgagcttcctgaagctaaatttgcctcccccggccttggggggcgcagagatcccggcggcgattagcgctgcgcggcagcc

SEQ ID NO: 278870 - DNA, 460 bp, Homo sapiens
  chr1:154971923-154972383
  hyper
gctccaacccagaggcccggaataggcgcggagttataaatagtgccacccgcaggtgttggggggagtcggcgggaggggggtacccctggcggccacggccccttcaggtgggttgggcggtcgcggtgggagcgctggggggcggggggcgtggggggtctgcggtctgagcgcccccagcggtttcctgggcggcgggtttttcgagggaagcggaggcagcggaggatgggggggagcagcggagaagaggtgggcgcctggcgcatgctgacgctccgcttgcagctcagccccccacattccgaaacaggcccccagacccactcacgcaggaccccgcccaggcaaagcctcgcctttcttaacacctgaaggcctcattcccccaggttctgcaagcatctaacttctatgcttctacccttcggcgcacgtggcccggccagtccgcgca

SEQ ID NO: 278871 - DNA, 812 bp, Homo sapiens; identical to SEQ ID NO: 227536
  chr1:155036005-155036817
  hyper

SEQ ID NO: 278872 - DNA, 165 bp, Homo sapiens; identical to SEQ ID NO: 197767
  chr1:155043706-155043871
  hyper

SEQ ID NO: 278873 - DNA, 238 bp, Homo sapiens; identical to SEQ ID NO: 227538
  chr1:155051346-155051584
  hyper

SEQ ID NO: 278874 - DNA, 537 bp, Homo sapiens
  chr1:155099556-155100093
  hyper
attcaagagcctgttcgcacggtgtacgcgtgtgttgttacatatactcaggttattagcgctctttgacttatctaaaataagaacggccccctctcgagcccagggtcccgcgtgtcgctcctgcgggcaggcactgatgtgatggacagaggcgtccttagccccggccgcacacgttacacactcgatcacacaaagcgttgcactttattcccggcatctaggcgatgacacaatctccagaacaaagacaacattgacaaacccaacaaaaacaaacagccgcgtgtgtgtggggaggggcagtcaagcgcagagtccgggaaggggatgggggaggaggagagtgtgggaacgcgggcgcccgagcctgggcatgcgaggctcagaaaggtgcggggcatgtcaacaacctcgcaccctgcaaggtccgcgcgcggagcagcaaagccgtgtcccgcacccccgcgttcgcagactcgcacttgcgagttcttcccttctcccgcacgcgactgcgcccagggacgcaag

SEQ ID NO: 278875 - DNA, 225 bp, Homo sapiens; identical to SEQ ID NO: 197769
  chr1:155100352-155100577
  hyper

SEQ ID NO: 278876 - DNA, 63 bp, Homo sapiens
  chr1:155147170-155147233
  hyper
gggggaggggacttccggtggggagggggcgagtaggcggggctcttgattcccccgctagtt

SEQ ID NO: 278877 - DNA, 114 bp, Homo sapiens; identical to SEQ ID NO: 36305
  chr1:155147320-155147434
  hyper

SEQ ID NO: 278878 - DNA, 443 bp, Homo sapiens
  chr1:155152069-155152512
  hyper
gccaggccctgactgacacccgctgtctcttccaacagtgcctgaggcccccgtcattgacacccagcgcacctttgcctatgatcagatcttcctgtgctggcggctgcccccccattcaccacctgcctggcactataccgttgagttccggcgcacggatgtgcctgctcagccaggccccacccgctggcagcggcgggaggaggtgaggggcaccagtgccctgcttgagaaccccgacacgggctctgtgtatgtgctgcgtgtccgcggctgcaacaaggccggctacggcgaatacagtgaagatgtgcacctgcacacgcccccggcacctggtgagtgggcaggcacaggtggtcgtgcaaagggcatggggtatgccagggcctaggccctgacggttggttccggtggccgctagagaggccatataacat

SEQ ID NO: 278879 - DNA, 295 bp, Homo sapiens; identical to SEQ ID NO: 197771
  chr1:155164120-155164415
  hyper

SEQ ID NO: 278880 - DNA, 597 bp, Homo sapiens; identical to SEQ ID NO: 197772
  chr1:155164455-155165052
  hyper

SEQ ID NO: 278881 - DNA, 182 bp, Homo sapiens; identical to SEQ ID NO: 197773
  chr1:155178388-155178570
  hyper

SEQ ID NO: 278882 - DNA, 117 bp, Homo sapiens; identical to SEQ ID NO: 227546
  chr1:155179121-155179238
  hyper

SEQ ID NO: 278883 - DNA, 115 bp, Homo sapiens; identical to SEQ ID NO: 227547
  chr1:155278330-155278445
  hyper

SEQ ID NO: 278884 - DNA, 34 bp, Homo sapiens; identical to SEQ ID NO: 227548
  chr1:155278672-155278706
  hyper

SEQ ID NO: 278885 - DNA, 457 bp, Homo sapiens; identical to SEQ ID NO: 221478
  chr1:155294652-155295109
  hyper

SEQ ID NO: 278886 - DNA, 265 bp, Homo sapiens
  chr1:155830059-155830324
  hyper
tggctggcagccaggggaggcggcggcctctggggaaagaggggtgcggggtggggagcaaaaaggaagccactccttaagccggtcagctggatgctggggctaggaggaaacgtgagccctgcaagctccattccgcatcgtaatggtggggtccctccgatgctaccaaatggcgcttggcgctgctgggctgggggatgacgtgatgtctatttctgggcctcctggcagcgccgacgctctccttccggggcctttgttc

SEQ ID NO: 278887 - DNA, 127 bp, Homo sapiens; identical to SEQ ID NO: 197775
  chr1:155830382-155830509
  hyper

SEQ ID NO: 278888 - DNA, 217 bp, Homo sapiens; identical to SEQ ID NO: 227550
  chr1:155881088-155881305
  hyper

SEQ ID NO: 278889 - DNA, 179 bp, Homo sapiens; identical to SEQ ID NO: 227551
  chr1:155904142-155904321
  hyper

SEQ ID NO: 278890 - DNA, 221 bp, Homo sapiens; identical to SEQ ID NO: 227552
  chr1:155946472-155946693
  hyper

SEQ ID NO: 278891 - DNA, 65 bp, Homo sapiens; identical to SEQ ID NO: 227553
  chr1:156023928-156023993
  hyper

SEQ ID NO: 278892 - DNA, 126 bp, Homo sapiens; identical to SEQ ID NO: 227554
  chr1:156024563-156024689
  hyper

SEQ ID NO: 278893 - DNA, 65 bp, Homo sapiens; identical to SEQ ID NO: 197777
  chr1:156036261-156036326
  hyper

SEQ ID NO: 278894 - DNA, 157 bp, Homo sapiens; identical to SEQ ID NO: 197778
  chr1:156084256-156084413
  hyper

SEQ ID NO: 278895 - DNA, 423 bp, Homo sapiens
  chr1:156084629-156085052
  hyper
gcagtctctgtccttcgacccgagccccgcgccctttccgggacccctgccccgcgggcagcgctgccaacctgccggccatggagaccccgtcccagcggcgcgccacccgcagcggggcgcaggccagctccactccgctgtcgcccacccgcatcacccggctgcaggagaaggaggacctgcaggagctcaatgatcgcttggcggtctacatcgaccgtgtgcgctcgctggaaacggagaacgcagggctgcgccttcgcatcaccgagtctgaagaggtggtcagccgcgaggtgtccggcatcaaggccgcctacgaggccgagctcggggatgcccgcaagacccttgactcagtagccaaggagcgcgcccgcctgcagctggagctgagcaaagtgcgtgaggagtttaagg

SEQ ID NO: 278896 - DNA, 169 bp, Homo sapiens; identical to SEQ ID NO: 227558
  chr1:156182942-156183111
  hyper

SEQ ID NO: 278897 - DNA, 116 bp, Homo sapiens; identical to SEQ ID NO: 197779
  chr1:156215213-156215329
  hyper

SEQ ID NO: 278898 - DNA, 48 bp, Homo sapiens; identical to SEQ ID NO: 197780
  chr1:156215871-156215919
  hyper

SEQ ID NO: 278899 - DNA, 360 bp, Homo sapiens; identical to SEQ ID NO: 227560
  chr1:156307948-156308308
  hyper

SEQ ID NO: 278900 - DNA, 253 bp, Homo sapiens; identical to SEQ ID NO: 227561
  chr1:156326779-156327032
  hyper

SEQ ID NO: 278901 - DNA, 56 bp, Homo sapiens; identical to SEQ ID NO: 197781
  chr1:156390040-156390096
  hyper

SEQ ID NO: 278902 - DNA, 49 bp, Homo sapiens
  chr1:156405318-156405367
  hyper
tctgggtcctctgtgtgccccggggccaggccaaaaccaggctggaacc

SEQ ID NO: 278903 - DNA, 95 bp, Homo sapiens
  chr1:156406613-156406708
  hyper
gcttagccagaggcgcccgtacccccctcccctgcgcgtttgctgggagccgctccctttcccttttctttccaagctgccgaattctgtcccta

SEQ ID NO: 278904 - DNA, 80 bp, Homo sapiens; identical to SEQ ID NO: 227567
  chr1:156427347-156427427
  hyper

SEQ ID NO: 278905 - DNA, 205 bp, Homo sapiens; identical to SEQ ID NO: 227569
  chr1:156469263-156469468
  hyper

SEQ ID NO: 278906 - DNA, 262 bp, Homo sapiens
  chr1:156541960-156542222
  hyper
gtagccagcagtaactgctgaatttcaaggagccattaggatcacctacattctcccgactccggaaccccagaacttggaaataggaagaaagttctttgtaagctttaaagcgcagcacattagtcaggggacaatgcgccgctcacagttccactcgggcccacggcgcccgggctgaggattcccgtcccactgagcagtcccaccgccctcgcccctcaggcttcacgcccgacacacgccccaatctctcccggga

SEQ ID NO: 278907 - DNA, 113 bp, Homo sapiens; identical to SEQ ID NO: 221488
  chr1:156542391-156542504
  hyper

SEQ ID NO: 278908 - DNA, 139 bp, Homo sapiens; identical to SEQ ID NO: 227570
  chr1:156571300-156571439
  hyper

SEQ ID NO: 278909 - DNA, 442 bp, Homo sapiens; identical to SEQ ID NO: 197782
  chr1:156593618-156594060
  hyper

SEQ ID NO: 278910 - DNA, 202 bp, Homo sapiens; identical to SEQ ID NO: 197783
  chr1:156594227-156594429
  hyper

SEQ ID NO: 278911 - DNA, 38 bp, Homo sapiens; identical to SEQ ID NO: 197784
  chr1:156595265-156595303
  hyper

SEQ ID NO: 278912 - DNA, 70 bp, Homo sapiens
  chr1:156611643-156611713
  hyper
cgctgggcgaacgctccctccccgcccctcctgcccctcctccctactccaagccctcggcttctcatcc

SEQ ID NO: 278913 - DNA, 47 bp, Homo sapiens
  chr1:156612119-156612166
  hyper
gggagtgcctgcctggtctgcgccccccgcctgtcagcccttgcctc

SEQ ID NO: 278914 - DNA, 50 bp, Homo sapiens; identical to SEQ ID NO: 197785
  chr1:156627098-156627148
  hyper

SEQ ID NO: 278915 - DNA, 209 bp, Homo sapiens; identical to SEQ ID NO: 227574
  chr1:156627378-156627587
  hyper

SEQ ID NO: 278916 - DNA, 146 bp, Homo sapiens
  chr1:156646447-156646593
  hyper
cgacgtctccatgtgtgccacgcgctcctggtagccgcgcactgccccgcgccacgcctcgcccagtcgccttgccagctcctctacctccggggccggcgcgggaggcccgcggggcggcgcggggcagcggggggcacaggcag

SEQ ID NO: 278917 - DNA, 424 bp, Homo sapiens
  chr1:156646856-156647280
  hyper
acgagggcccgcagggccgccagctcgtcgtcggcatgcgcccgccaggaggtgtccgcggattgtgcccggagccccccgagctccgcgctgagcagctcattctgctcctccagcgccttgacccgggccaggtaggcctccaggcgccgattgagctcccacatctgaaacgactcctcccccatgcagccctccatcctgctcgtctgacccactgaggatggacagacgcggggcaccgggagaagggagcggctcgcagagcttttaggacggaagagaaaagagaccgacggggacaatgacggggcggggcggggtgggagtagcctgagcgactgagagtcgggagtgggagcgaggctattcatactcccgccaggcgggcgggaagaggggcgggacccaggccttaacccct

SEQ ID NO: 278918 - DNA, 62 bp, Homo sapiens; identical to SEQ ID NO: 197787
  chr1:156647957-156648019
  hyper

SEQ ID NO: 278919 - DNA, 187 bp, Homo sapiens; identical to SEQ ID NO: 227577
  chr1:156662234-156662421
  hyper

SEQ ID NO: 278920 - DNA, 126 bp, Homo sapiens; identical to SEQ ID NO: 197788
  chr1:156675374-156675500
  hyper

SEQ ID NO: 278921 - DNA, 618 bp, Homo sapiens
  chr1:156675831-156676449
  hyper
tggatccagtgggaccactccgtactcagagaggggcttgggagctgcggggttccgggggttagggatctaagtgaggcaacggcgccccctgctggaacaactcggagaggctgggcgggggcggcacggtccccccacccctccaccctgcttcgggctcacgtaatgcctggggactctggaagtagtcgccaggcgactcgctccccttaatgcgctgggcggacattgaagggttaagcaggagcccagggcgcgaggctgggagggcagaggtcacagccaatcacttgacgcaaggtctttattaaaacgctttctctgtcgcttcactcccgagaccccgagggggtctcagtagggggaagggagggaggcggggacagaggcgcggagccctggcgagctgcgccaccacctagataggcgggaggatgggtgccgggggagaaggcggagcagggtctcaggtgtcaccatcctgagctgtaaaacgggcggaaggagcgacctcccctcccttggagagcggctttgaaacgggagatcaaagagggtgggaggagggcacggcttcctgcagagacccgagtgggagtgggcgagaccccagtg

SEQ ID NO: 278922 - DNA, 135 bp, Homo sapiens; identical to SEQ ID NO: 197790
  chr1:156676539-156676674
  hyper

SEQ ID NO: 278923 - DNA, 222 bp, Homo sapiens; identical to SEQ ID NO: 227581
  chr1:156710901-156711123
  hyper

SEQ ID NO: 278924 - DNA, 45 bp, Homo sapiens; identical to SEQ ID NO: 197791
  chr1:156716455-156716500
  hyper

SEQ ID NO: 278925 - DNA, 60 bp, Homo sapiens; identical to SEQ ID NO: 197792
  chr1:156716530-156716590
  hyper

SEQ ID NO: 278926 - DNA, 47 bp, Homo sapiens; identical to SEQ ID NO: 227584
  chr1:156721109-156721156
  hyper

SEQ ID NO: 278927 - DNA, 209 bp, Homo sapiens; identical to SEQ ID NO: 227585
  chr1:156722050-156722259
  hyper

SEQ ID NO: 278928 - DNA, 138 bp, Homo sapiens; identical to SEQ ID NO: 227586
  chr1:156737022-156737160
  hyper

SEQ ID NO: 278929 - DNA, 110 bp, Homo sapiens
  chr1:156830840-156830950
  hyper
gcctgctgcccccacggctcctcgggactgcgatgcacccgggatggggccctggatagcctccaccacctgcccggcgcagagaacctgactgagctgtgagtgtccgg

SEQ ID NO: 278930 - DNA, 73 bp, Homo sapiens
  chr1:156890423-156890496
  hyper
gttgtcttggagagggacgcgtaggctacgccaccgcggacgggtcggatccggtccctggacgcggaacaga

SEQ ID NO: 278931 - DNA, 177 bp, Homo sapiens; identical to SEQ ID NO: 197793
  chr1:156897224-156897401
  hyper

SEQ ID NO: 278932 - DNA, 222 bp, Homo sapiens; identical to SEQ ID NO: 197794
  chr1:156897431-156897653
  hyper

SEQ ID NO: 278933 - DNA, 126 bp, Homo sapiens; identical to SEQ ID NO: 197795
  chr1:157108692-157108818
  hyper

SEQ ID NO: 278934 - DNA, 279 bp, Homo sapiens
  chr1:157963009-157963288
  hyper
gggtatgtgtgtgcgcgcgttgtgggggggcagggggagggctcgtggagggaggcgccgtcggagggagagtagacgtcaggcggagggagggaggcaggcaggcagggaggcagggagggagagagggaaggaagagaaggggagagaaagggggagcaaagaccgaaagagacccagagagatacagcttgagaggagaaataattaaagggggagggcgaccaggaggagaaaaaggtctgggaggaaagagagataaagagaatcggagggcag

SEQ ID NO: 278935 - DNA, 221 bp, Homo sapiens; identical to SEQ ID NO: 197797
  chr1:157963516-157963737
  hyper

SEQ ID NO: 278936 - DNA, 117 bp, Homo sapiens; identical to SEQ ID NO: 197798
  chr1:158083065-158083182
  hyper

SEQ ID NO: 278937 - DNA, 178 bp, Homo sapiens; identical to SEQ ID NO: 227596
  chr1:158088031-158088209
  hyper

SEQ ID NO: 278938 - DNA, 429 bp, Homo sapiens
  chr1:159141761-159142190
  hyper
cagccgctgctaatacccttgtgtctgtctctgagcatccgtgtctctgtggactgtgggtgtgccggtgtgtgcacccttctgtgtacaccactgagcgtgtgtctgcgtgtgcaccggggtttggctctcggggctgatgtccgttaggagcagcccggggtctggatgtgttgctgtccgtgtgcgcgcgcgtctgtgttggtgtctggctctgcgtttctgtgtcagtatctgtgtgtatgtctgtgtcagtgtgtgttgggggcggagtgagatttgtcgctgtttcagtcagggcgtgtgtcgggtgtttgtgtatgtatgtctgtaggggttgggtagccagtgcaatcccccaaactgctgtatgcaaacatttctgctcccccgcccgtcccccaccacccgcggcgcagctccgagtgg

SEQ ID NO: 278939 - DNA, 120 bp, Homo sapiens
  chr1:159158185-159158305
  hyper
cctcagggaccctaagcccacgtcccacttttctttgtaatctcgacctcccggcccccgcgcgccctctctcggtcctagcgcccctttctcccctctcctcccccacctgcctctccc

SEQ ID NO: 278940 - DNA, 32 bp, Homo sapiens
  chr1:159750347-159750379
  hyper
cctgggagaaagccgatttgtcatctcttaaa

SEQ ID NO: 278941 - DNA, 361 bp, Homo sapiens
  chr1:159750772-159751133
  hyper
gccgaggccaggtaggtggtgagttacttggctcggagcgggcgaggggacgcgtgggcggagcggggctggccagcctcggcccccatgacccgctgtcctgtgccctttcccagcgatgggcgtgcagccccccaacttctcctgggtgcttccgggccggctggcgggactggcgctgccgcggctccccgcccactaccagttcctgttggacctgggcgtgcggcacctggtgtccctgacggagcgcgggccccctcacagcgacagctgccccggcctcaccctgcaccgcctgcgcatccccgacttctgcccgccggcccccgaccagatcgaccgcttcgtgcagatcgtg

SEQ ID NO: 278942 - DNA, 68 bp, Homo sapiens
  chr1:159751247-159751315
  hyper
ttaactgggctcggggaggcagacagtagggccgggagactgggaagccagtgcgggggagggaagcg

SEQ ID NO: 278943 - DNA, 676 bp, Homo sapiens; identical to SEQ ID NO: 104420
  chr1:159824348-159825024
  hyper

SEQ ID NO: 278944 - DNA, 929 bp, Homo sapiens; identical to SEQ ID NO: 197801
  chr1:159894400-159895329
  hyper

SEQ ID NO: 278945 - DNA, 386 bp, Homo sapiens
  chr1:159915360-159915746
  hyper
acctgctccgcaccgctcggctccactctcgccgctacacaatagggggcggacccgcctccccgcctcggatgccccgagcgcctcccgtcgccctggagaccgccaatccccctcccgcggcggccaattggagccgccagaggcacggcgaggcgggcgggacccctgagcggcctgggagttgtagtttcaggagggaagagctcggctgcacgtgggctcaggtcgccccctcgtggacctctgcacagccaagcgtggaaaggccggtgggccgcttcccgccgccagcaagaggggcagcagggtccggctcgcgctccagggctgcgggagctggccccttgccaggctactggtacgccgtccttctttcggaacct

SEQ ID NO: 278946 - DNA, 58 bp, Homo sapiens
  chr1:159915791-159915849
  hyper
gcagcgagggttgaaatctgagcctgggggtaggagaaccaggcggggagcatgactc

SEQ ID NO: 278947 - DNA, 223 bp, Homo sapiens; identical to SEQ ID NO: 227603
  chr1:160001425-160001648
  hyper

SEQ ID NO: 278948 - DNA, 49 bp, Homo sapiens; identical to SEQ ID NO: 197803
  chr1:160039928-160039977
  hyper

SEQ ID NO: 278949 - DNA, 152 bp, Homo sapiens; identical to SEQ ID NO: 197804
  chr1:160040181-160040333
  hyper

SEQ ID NO: 278950 - DNA, 51 bp, Homo sapiens; identical to SEQ ID NO: 197805
  chr1:160040504-160040555
  hyper

SEQ ID NO: 278951 - DNA, 103 bp, Homo sapiens; identical to SEQ ID NO: 197806
  chr1:160040585-160040688
  hyper

SEQ ID NO: 278952 - DNA, 401 bp, Homo sapiens; identical to SEQ ID NO: 227607
  chr1:160053733-160054134
  hyper

SEQ ID NO: 278953 - DNA, 92 bp, Homo sapiens; identical to SEQ ID NO: 227608
  chr1:160055539-160055631
  hyper

SEQ ID NO: 278954 - DNA, 43 bp, Homo sapiens; identical to SEQ ID NO: 227609
  chr1:160232422-160232465
  hyper

SEQ ID NO: 278955 - DNA, 329 bp, Homo sapiens
  chr1:160370270-160370599
  hyper
ccgggaggcggcacccgggagctcgcgctcccccgccccctgcaccccccaccctcatcccctccccctccgccccctcccccctgcgccgccggctcccgatctgattcctgatccttgattccttgatccttggtcccgccatgggagcctgagcgccccctattcccccctggcccccagcccccggggccttgagggggaagaggcagcggtctgggacggagcagggggtgaccagactcaagaacccccccctcaacatcccccatcgcgcgcgctgcctgtccaggagcgccgagttcggagcgacccggagcgctgcggat

SEQ ID NO: 278956 - DNA, 229 bp, Homo sapiens
  chr1:160370629-160370858
  hyper
cggagcccacccggcagttcgcagcggcgggtgagtgccgggccgcgggggcgcgggcaaagtttgaaaaaaaaagaagaaagaaagagagagaaaaaaagaaatggaaaaggaggaaaatcatgcaaggggccagggggtgcccgaccccagagcgagcggggtggcttatgggggaaggggggctggactccgggcaacccccttccggtccgcttccccactgcac

SEQ ID NO: 278957 - DNA, 188 bp, Homo sapiens; identical to SEQ ID NO: 197809
  chr1:160526915-160527103
  hyper

SEQ ID NO: 278958 - DNA, 424 bp, Homo sapiens; identical to SEQ ID NO: 197810
  chr1:160983485-160983909
  hyper

SEQ ID NO: 278959 - DNA, 947 bp, Homo sapiens; identical to SEQ ID NO: 197811
  chr1:160990370-160991317
  hyper

SEQ ID NO: 278960 - DNA, 148 bp, Homo sapiens; identical to SEQ ID NO: 227614
  chr1:161015808-161015956
  hyper

SEQ ID NO: 278961 - DNA, 56 bp, Homo sapiens
  chr1:161067872-161067928
  hyper
aaatgatccctcccggccctagtggagcagcacctgcacctcaaatgtcaaaatcg

SEQ ID NO: 278962 - DNA, 152 bp, Homo sapiens
  chr1:161068574-161068726
  hyper
gcggcacccgtggacgggcgttggctctgcgtggtgggcggctgggacgggtctcgccgcttggccacagtgaccgcactggacacagagcgcggtgtgtgggaggcgtggacagggacccctggtgactgcccccccgccggcctcagtag

SEQ ID NO: 278963 - DNA, 41 bp, Homo sapiens; identical to SEQ ID NO: 227616
  chr1:161087909-161087950
  hyper

SEQ ID NO: 278964 - DNA, 106 bp, Homo sapiens; identical to SEQ ID NO: 227617
  chr1:161102589-161102695
  hyper

SEQ ID NO: 278965 - DNA, 120 bp, Homo sapiens; identical to SEQ ID NO: 227618
  chr1:161123623-161123743
  hyper

SEQ ID NO: 278966 - DNA, 60 bp, Homo sapiens; identical to SEQ ID NO: 227619
  chr1:161129125-161129185
  hyper

SEQ ID NO: 278967 - DNA, 131 bp, Homo sapiens; identical to SEQ ID NO: 227620
  chr1:161136046-161136177
  hyper

SEQ ID NO: 278968 - DNA, 99 bp, Homo sapiens; identical to SEQ ID NO: 197812
  chr1:161171825-161171924
  hyper

SEQ ID NO: 278969 - DNA, 385 bp, Homo sapiens; identical to SEQ ID NO: 227622
  chr1:161195513-161195898
  hyper

SEQ ID NO: 278970 - DNA, 203 bp, Homo sapiens; identical to SEQ ID NO: 227623
  chr1:161196136-161196339
  hyper

SEQ ID NO: 278971 - DNA, 209 bp, Homo sapiens
  chr1:161228440-161228649
  hyper
aggctgtcattctacggtaggaggagcttctattggtcgggctggaggcgggtaccgagctgagtataaaaggtggggccggaggcggcgagctgagcggctctgacaggacgggtcgcagggggtcgcctggccggagctgggctccgagaatcccgggtgccagcaccagagcagcggctctccgcactaactctcctctcctggtc

SEQ ID NO: 278972 - DNA, 95 bp, Homo sapiens; identical to SEQ ID NO: 197813
  chr1:161276123-161276218
  hyper

SEQ ID NO: 278973 - DNA, 190 bp, Homo sapiens; identical to SEQ ID NO: 227626
  chr1:161283831-161284021
  hyper

SEQ ID NO: 278974 - DNA, 69 bp, Homo sapiens; identical to SEQ ID NO: 197814
  chr1:161368924-161368993
  hyper

SEQ ID NO: 278975 - DNA, 96 bp, Homo sapiens; identical to SEQ ID NO: 197815
  chr1:161369405-161369501
  hyper

SEQ ID NO: 278976 - DNA, 298 bp, Homo sapiens; identical to SEQ ID NO: 197816
  chr1:161369561-161369859
  hyper

SEQ ID NO: 278977 - DNA, 313 bp, Homo sapiens; identical to SEQ ID NO: 197817
  chr1:161369945-161370258
  hyper

SEQ ID NO: 278978 - DNA, 713 bp, Homo sapiens
  chr1:161409991-161410704
  hyper
tgcttggaaggcaactatgctcaccactataccaccaacgccgcacggcgcgggcagccccgccgcgccggcccggggctcccaccagcgcgccgccgacgcccggggcaggccggccccgacgcccggtccgtccgcccgcccgcagctccgcgctgccgcggcctctccaaaggccgccccgcgccccaccggtgcaaggccagcgcggctgacccgttacgcccgcctgcctctgggggcgctctcgctcactcgccgcctcgggcccccagagcccttccccaacaggtgcccgggggggaaacggccggcgccggcagggtccccactcctacgcttcccaccgggcgcagggccccgtgtgtcgcagaaagcctcttccgacaaccactttgagccggcagctcgttgggcgccgtgcagggccagaggaggcctcccggctgccgctaccaagccgcggacgagaagaaaagacaggaggccaaggaggcccagaaggccaaagggccaggcaggccaggcccgagatggcaccctgcgactagctggagggcggaggaaggagaaggagggcccacaggctgggtccgaggcggcggcccaaaaagcacggctgcctccccgtcggggaatcgaaccccggtctcccgcgtgacaggcggggatactcaccactatactaacgaggacgacggcgacggtcgccg

SEQ ID NO: 278979 - DNA, 34 bp, Homo sapiens
  chr1:161582200-161582234
  hyper
ggacatgaggagtgcgggggggaagagaagacgg

SEQ ID NO: 278980 - DNA, 108 bp, Homo sapiens; identical to SEQ ID NO: 197819
  chr1:161591364-161591472
  hyper

SEQ ID NO: 278981 - DNA, 82 bp, Homo sapiens; identical to SEQ ID NO: 197820
  chr1:161591546-161591628
  hyper

SEQ ID NO: 278982 - DNA, 368 bp, Homo sapiens
  chr1:161695853-161696221
  hyper
ctaaggtggctgtgacagtgcaaggtgggagagaccaggggccccgggagggaggcaaatgagcattgagaaattctgggacaggagctcggcgagaaaagaaggggcggaagttcaaatagctgccacttggagggtttctcttagactatggacgctgtctcctctcctttgccgtgaagcagcgcttgatccgccgcctgcttggaggctggtccctttccccgacgcacatcctggcttctcactctggctggggactcccacagagagggcagctctggcaggggcaggggccactgtgggactgggacgaaggagcgactccctagcgtcctgcaaggcaggcgcagcgtctcctattctag

SEQ ID NO: 278983 - DNA, 285 bp, Homo sapiens; identical to SEQ ID NO: 227636
  chr1:161696448-161696733
  hyper

SEQ ID NO: 278984 - DNA, 35 bp, Homo sapiens; identical to SEQ ID NO: 197821
  chr1:161736084-161736119
  hyper

SEQ ID NO: 278985 - DNA, 930 bp, Homo sapiens; identical to SEQ ID NO: 197822
  chr1:162039135-162040065
  hyper

SEQ ID NO: 278986 - DNA, 343 bp, Homo sapiens; identical to SEQ ID NO: 227640
  chr1:162530845-162531188
  hyper

SEQ ID NO: 278987 - DNA, 125 bp, Homo sapiens; identical to SEQ ID NO: 227641
  chr1:162531409-162531534
  hyper

SEQ ID NO: 278988 - DNA, 74 bp, Homo sapiens; identical to SEQ ID NO: 197824
  chr1:162792553-162792627
  hyper

SEQ ID NO: 278989 - DNA, 70 bp, Homo sapiens; identical to SEQ ID NO: 227643
  chr1:163291479-163291549
  hyper

SEQ ID NO: 278990 - DNA, 89 bp, Homo sapiens; identical to SEQ ID NO: 197825
  chr1:163378351-163378440
  hyper

SEQ ID NO: 278991 - DNA, 131 bp, Homo sapiens; identical to SEQ ID NO: 36436
  chr1:164290723-164290854
  hyper

SEQ ID NO: 278992 - DNA, 312 bp, Homo sapiens; identical to SEQ ID NO: 227645
  chr1:164529156-164529468
  hyper

SEQ ID NO: 278993 - DNA, 211 bp, Homo sapiens
  chr1:165086749-165086960
  hyper
gcttccccgccggccgttctctccgcaggtgcccggcccctgcctccgagtgcgcctcgcggagcgcaaagcgctgtcacgactcggtggccgaggtgattaattagcggcgtggccgtgcgggggacgcgtgctggcctccacatctgccccgtgccagcaggggtcaatatgcggtgtcactgctttccctctcactccctccaaagcc

SEQ ID NO: 278994 - DNA, 81 bp, Homo sapiens; identical to SEQ ID NO: 197828
  chr1:165087027-165087108
  hyper

SEQ ID NO: 278995 - DNA, 103 bp, Homo sapiens
  chr1:165204594-165204697
  hyper
ccaggggactctccctttcagcacaagcgctcacacgtgcgctcgcgcggacacacacacacacactcacactcacacacaaataaatccccagcacctgcct

SEQ ID NO: 278996 - DNA, 93 bp, Homo sapiens
  chr1:165204732-165204825
  hyper
cggctccgccagcggagagcctttggatttaccgtggcattacttttaattaactctgcggcgcggcgcggggagcgcagggtgggccctaat

SEQ ID NO: 278997 - DNA, 102 bp, Homo sapiens
  chr1:165205366-165205468
  hyper
ctggcaggggtgtaattcaaactgttgtgagcagacggcaggagggagttgccaaggtaacgggtgattcccacccgccgccctttcgctaaggctggggag

SEQ ID NO: 278998 - DNA, 393 bp, Homo sapiens
  chr1:165321203-165321596
  hyper
tgcagaattctgcgcgtgcacgcgcgcgtccacacagtcaacctacaccagtcctaatgcacaaaaacagagacctctggatcagccacttttcttcaatcatctccaaagccctgcaaagccaatacacttattaattaaacatttcgcaaggaaaaaaccgttccctctccttacacctcctaagctcctcccggcacgcccggagagaataaggaagttcttctacctcccactttctggcttcatccaggctttagtgttataaaaatccagtttcgaaatatccactttcttaaattcctgcctcccagttctcctctgaacgtaccagaacgttcatgtggacaggagggaactgaacttgctccgtggcagaagagcgtacccaca

SEQ ID NO: 278999 - DNA, 241 bp, Homo sapiens
  chr1:165321942-165322183
  hyper
cgcagggcaccccggtaaaagagggagaccaagctcgagggattccaaggctaacaaagagtggcctctggaaacggccgagtcagagaaaggggcctggaaggaccagaaagcaggcgagcagaccgtggaggacagccattgcgcgcacttctgcgggactcgggccactgctgcgcgcacccgcgcggatctctgccctaccaccttcccgtgaggggcaatgtacacgactgcgctg

SEQ ID NO: 279000 - DNA, 177 bp, Homo sapiens
  chr1:165322220-165322397
  hyper
ttccagaaaaggactagggtaaaggaggacaaagtcctcgacgcacactgatgccagtgcgcggggagcgctgcgggggtgcggccacttacttctcgtagtcatacttgcagtacagcttcttgtcccggtagaagcaggtggtctccaggggctctttgcaggaggcgcactgca

SEQ ID NO: 279001 - DNA, 106 bp, Homo sapiens; identical to SEQ ID NO: 104504
  chr1:165322515-165322621
  hyper

SEQ ID NO: 279002 - DNA, 42 bp, Homo sapiens; identical to SEQ ID NO: 197830
  chr1:165323109-165323151
  hyper

SEQ ID NO: 279003 - DNA, 66 bp, Homo sapiens; identical to SEQ ID NO: 197831
  chr1:165323181-165323247
  hyper

SEQ ID NO: 279004 - DNA, 38 bp, Homo sapiens; identical to SEQ ID NO: 197832
  chr1:165323481-165323519
  hyper

SEQ ID NO: 279005 - DNA, 189 bp, Homo sapiens
  chr1:165345284-165345473
  hyper
tgctctgcccgaaccgcaggctgcctgggccggggacgcgcggaggggccccccgcagagggcgggctcagccgggcagagctctcgggggcgccccgcgcccagccccgccggctcctgctctccccgagcacgcggcgttagctaatcttctcagggactgccgaggccctttctccgccaaaccgc

SEQ ID NO: 279006 - DNA, 152 bp, Homo sapiens
  chr1:165414039-165414191
  hyper
ctcatacaggtccacgcagtgaagcccaagggagatacttacctccatagcctgcgggaaacttcatgaagtgagaataatttccatacatgtttactcgtcagttcatgttcctctcctgtgcagcttctaaatattaccgcctctctcgg

SEQ ID NO: 279007 - DNA, 55 bp, Homo sapiens; identical to SEQ ID NO: 197834
  chr1:165599887-165599942
  hyper

SEQ ID NO: 279008 - DNA, 124 bp, Homo sapiens; identical to SEQ ID NO: 227657
  chr1:165667436-165667560
  hyper

SEQ ID NO: 279009 - DNA, 189 bp, Homo sapiens; identical to SEQ ID NO: 227658
  chr1:165667892-165668081
  hyper

SEQ ID NO: 279010 - DNA, 826 bp, Homo sapiens; identical to SEQ ID NO: 197835
  chr1:165737818-165738644
  hyper

SEQ ID NO: 279011 - DNA, 643 bp, Homo sapiens
  chr1:166135586-166136229
  hyper
tcccggtcagactcagctcgcacctaggagcggggagccgccgggcatccttggggaagccccctcctcttgcagccgcgcggggtccccgctgccccgacgtccgcccacgcccgccccctcgctccggcagggcgcgcggagggtgcactcctaggaggcggcgggtgccctcgccggctccagcgcccgggcggagggcagggaggggagcggcgctgcgaggaatggtgcccaccccgggccggagccccccgcccctcgccggagaggaggaggcggcagcggcggcggcatggagccgggggagggcggcggtggcagcgcccggtctgtctgcctccgcggcggcagcagcagcagccgccgccgccgccgccgctgcatgaacctctgcaccacggctgccccccgcgtgcagcgcacccagcggcgggcgagcgggcggcccaagaggcaggcggaggcagcagcggcggcggcggcgaccggagctcccgccggccccgccccgtagccggaccacaccgacactcctcggcccggctgcctcggcccggggggcgccaggaggctgtggcccggggtggagagccccaacggctggagcagcacaggacgtgctccgcggaggaaactggct

SEQ ID NO: 279012 - DNA, 33 bp, Homo sapiens; identical to SEQ ID NO: 227661
  chr1:166136429-166136462
  hyper

SEQ ID NO: 279013 - DNA, 95 bp, Homo sapiens; identical to SEQ ID NO: 227662
  chr1:166808337-166808432
  hyper

SEQ ID NO: 279014 - DNA, 39 bp, Homo sapiens
  chr1:166853524-166853563
  hyper
tcgggatgggcgggcggcacggtgctgctcttagcacta

SEQ ID NO: 279015 - DNA, 61 bp, Homo sapiens
  chr1:166853592-166853653
  hyper
gaatgcagagctggccccggcgcgagcgaaatgtctctgcagcagcaccgcttgccttcgc

SEQ ID NO: 279016 - DNA, 44 bp, Homo sapiens
  chr1:166853747-166853791
  hyper
tccaggatgcccgggatcccaaggagggtcgtgggtctccgcgt

SEQ ID NO: 279017 - DNA, 208 bp, Homo sapiens; identical to SEQ ID NO: 197837
  chr1:166944964-166945172
  hyper

SEQ ID NO: 279018 - DNA, 41 bp, Homo sapiens; identical to SEQ ID NO: 197838
  chr1:167028536-167028577
  hyper

SEQ ID NO: 279019 - DNA, 108 bp, Homo sapiens
  chr1:167090757-167090865
  hyper
ggatgaggcagatcccagaatgtggaacgcatcccagaagcgatagccagccttggagggtggagggaggaagaacgagcccaaacgcggaggcggagtcggtgccag

SEQ ID NO: 279020 - DNA, 252 bp, Homo sapiens; identical to SEQ ID NO: 227667
  chr1:167189609-167189861
  hyper

SEQ ID NO: 279021 - DNA, 237 bp, Homo sapiens; identical to SEQ ID NO: 197839
  chr1:167190164-167190401
  hyper

SEQ ID NO: 279022 - DNA, 165 bp, Homo sapiens; identical to SEQ ID NO: 197840
  chr1:167423949-167424114
  hyper

SEQ ID NO: 279023 - DNA, 131 bp, Homo sapiens; identical to SEQ ID NO: 227669
  chr1:167424548-167424679
  hyper

SEQ ID NO: 279024 - DNA, 77 bp, Homo sapiens; identical to SEQ ID NO: 197841
  chr1:167522408-167522485
  hyper

SEQ ID NO: 279025 - DNA, 34 bp, Homo sapiens; identical to SEQ ID NO: 227671
  chr1:167523050-167523084
  hyper

SEQ ID NO: 279026 - DNA, 199 bp, Homo sapiens; identical to SEQ ID NO: 227673
  chr1:167691106-167691305
  hyper

SEQ ID NO: 279027 - DNA, 390 bp, Homo sapiens; identical to SEQ ID NO: 227674
  chr1:167906376-167906766
  hyper

SEQ ID NO: 279028 - DNA, 177 bp, Homo sapiens; identical to SEQ ID NO: 227675
  chr1:168105713-168105890
  hyper

SEQ ID NO: 279029 - DNA, 243 bp, Homo sapiens; identical to SEQ ID NO: 227676
  chr1:168194875-168195118
  hyper

SEQ ID NO: 279030 - DNA, 189 bp, Homo sapiens; identical to SEQ ID NO: 227677
  chr1:168195384-168195573
  hyper

SEQ ID NO: 279031 - DNA, 282 bp, Homo sapiens; identical to SEQ ID NO: 197843
  chr1:168311897-168312179
  hyper

SEQ ID NO: 279032 - DNA, 334 bp, Homo sapiens; identical to SEQ ID NO: 197844
  chr1:169074762-169075096
  hyper

SEQ ID NO: 279033 - DNA, 332 bp, Homo sapiens; identical to SEQ ID NO: 197845
  chr1:169076042-169076374
  hyper

SEQ ID NO: 279034 - DNA, 191 bp, Homo sapiens; identical to SEQ ID NO: 227680
  chr1:169337029-169337220
  hyper

SEQ ID NO: 279035 - DNA, 150 bp, Homo sapiens; identical to SEQ ID NO: 197846
  chr1:169454465-169454615
  hyper

SEQ ID NO: 279036 - DNA, 202 bp, Homo sapiens; identical to SEQ ID NO: 227683
  chr1:169455342-169455544
  hyper

SEQ ID NO: 279037 - DNA, 358 bp, Homo sapiens; identical to SEQ ID NO: 227684
  chr1:169763976-169764334
  hyper

SEQ ID NO: 279038 - DNA, 37 bp, Homo sapiens; identical to SEQ ID NO: 197847
  chr1:170043654-170043691
  hyper

SEQ ID NO: 279039 - DNA, 92 bp, Homo sapiens; identical to SEQ ID NO: 227686
  chr1:170043982-170044074
  hyper

SEQ ID NO: 279040 - DNA, 128 bp, Homo sapiens
  chr1:170629412-170629540
  hyper
ccagggcttggtccctgcagctgaggcctacgggatatcccaggaaagagcagcctctccgtagtggtgaagagtctctcaagccttagcgctctggtgacctccgcgggattctgagaaaagcactg

SEQ ID NO: 279041 - DNA, 102 bp, Homo sapiens
  chr1:170629569-170629671
  hyper
gcttcgcgccccccacccgcccggggaccgcgactaagtccccgacgcagctcttcccttttcctgaataccctgggactctgctcccgagttccagctccg

SEQ ID NO: 279042 - DNA, 255 bp, Homo sapiens; identical to SEQ ID NO: 197848
  chr1:170633637-170633892
  hyper

SEQ ID NO: 279043 - DNA, 185 bp, Homo sapiens
  chr1:170634283-170634468
  hyper
gaatgtcctttaagggtgaaacctgaaatccagccccgcatgatcccgcacaggcgagctgcatccgggaggcgcgagcttcagtgcggaggccagtgtcaccttagaggagctctccctattggctcttaaacgcccagaaaagtccagtttcccttccccatcctcaccgaccaacctcgcga

SEQ ID NO: 279044 - DNA, 31 bp, Homo sapiens; identical to SEQ ID NO: 227691
  chr1:170634835-170634866
  hyper

SEQ ID NO: 279045 - DNA, 149 bp, Homo sapiens
  chr1:170637493-170637642
  hyper
aacctctaaattagcgaaaccagattgtcctaataagaccttttgttggaaacacatgtagtcataaaaaggtagacggaaagtcaattagacacgcgcgcacacacgcacacattcacaagccggtgctaagtgtgcacccggcgcag

SEQ ID NO: 279046 - DNA, 48 bp, Homo sapiens
  chr1:170637810-170637858
  hyper
caggagagcgggaacattttctagggcgctcccaagttggaattctca

SEQ ID NO: 279047 - DNA, 398 bp, Homo sapiens; identical to SEQ ID NO: 197849
  chr1:171220522-171220920
  hyper

SEQ ID NO: 279048 - DNA, 97 bp, Homo sapiens; identical to SEQ ID NO: 197850
  chr1:171220980-171221077
  hyper

SEQ ID NO: 279049 - DNA, 153 bp, Homo sapiens; identical to SEQ ID NO: 197851
  chr1:171455049-171455202
  hyper

SEQ ID NO: 279050 - DNA, 271 bp, Homo sapiens; identical to SEQ ID NO: 227697
  chr1:171711247-171711518
  hyper

SEQ ID NO: 279051 - DNA, 626 bp, Homo sapiens; identical to SEQ ID NO: 227698
  chr1:171750679-171751305
  hyper

SEQ ID NO: 279052 - DNA, 136 bp, Homo sapiens
  chr1:171811643-171811779
  hyper
acagcttcaggcaattgtgagagagcccgaggcacagacttggcagggggtggacgtggacttatgttgtccaggtgccatgtcattcctgcatcatctcggaactgaccagcatctttctcgcactctctctgcg

SEQ ID NO: 279053 - DNA, 116 bp, Homo sapiens; identical to SEQ ID NO: 227700
  chr1:172412823-172412939
  hyper

SEQ ID NO: 279054 - DNA, 111 bp, Homo sapiens
  chr1:172501926-172502037
  hyper
gagggacgaagggcggtccactgtaaggggaaatgctgaggatcactgggctcctcccggctttctgaacgcaagccagcaagtgggcgggacctggggcgggcggagcgg

SEQ ID NO: 279055 - DNA, 350 bp, Homo sapiens; identical to SEQ ID NO: 104599
  chr1:172502085-172502435
  hyper

SEQ ID NO: 279056 - DNA, 136 bp, Homo sapiens; identical to SEQ ID NO: 227703
  chr1:173683924-173684060
  hyper

SEQ ID NO: 279057 - DNA, 54 bp, Homo sapiens; identical to SEQ ID NO: 197854
  chr1:173793622-173793676
  hyper

SEQ ID NO: 279058 - DNA, 345 bp, Homo sapiens; identical to SEQ ID NO: 104607
  chr1:173793729-173794074
  hyper

SEQ ID NO: 279059 - DNA, 95 bp, Homo sapiens; identical to SEQ ID NO: 197856
  chr1:173836713-173836808
  hyper

SEQ ID NO: 279060 - DNA, 37 bp, Homo sapiens; identical to SEQ ID NO: 227706
  chr1:173837159-173837196
  hyper

SEQ ID NO: 279061 - DNA, 152 bp, Homo sapiens; identical to SEQ ID NO: 227707
  chr1:174968320-174968472
  hyper

SEQ ID NO: 279062 - DNA, 134 bp, Homo sapiens; identical to SEQ ID NO: 227708
  chr1:174968762-174968896
  hyper

SEQ ID NO: 279063 - DNA, 322 bp, Homo sapiens
  chr1:175048508-175048830
  hyper
ggagacctgcagctgccactgcgaagagggcagggagggccccgcctgcgagcggctggcctgccccggggcgtgcagcggccacgggcgttgcgtggacgggcgctgcctgtgccatgagccctacgtgggtgccgactgcggctacccggcctgccctgagaactgcagcggacacggcgagtgcgtgcgcggcgtgtgccagtgccacgaagacttcatgtcggaggactgcagcgagaagcgctgtcccggcgactgcagcggccacggcttctgtgacacgggcgagtgctactgcgaggagggcttcacaggcctg

SEQ ID NO: 279064 - DNA, 255 bp, Homo sapiens; identical to SEQ ID NO: 227709
  chr1:175161547-175161802
  hyper

SEQ ID NO: 279065 - DNA, 37 bp, Homo sapiens; identical to SEQ ID NO: 227710
  chr1:175162030-175162067
  hyper

SEQ ID NO: 279066 - DNA, 89 bp, Homo sapiens; identical to SEQ ID NO: 227711
  chr1:176176505-176176594
  hyper

SEQ ID NO: 279067 - DNA, 136 bp, Homo sapiens
  chr1:177133309-177133445
  hyper
aggaggctcagcatccaggtcggatttggggagaagtcaggtgcacagaggcgctagtatgcaagtgggtgtggagaatggtccgggagtggggcggatccgggaggtaggagtgggggaggggaggtcgtcggcg

SEQ ID NO: 279068 - DNA, 191 bp, Homo sapiens
  chr1:177134163-177134354
  hyper
tctcctccgttgcatcctccaacacgagcaaggctcttggctatgaactacctgcacggcatttttaatacattgatctttgcaatgtaaaatcttccctctcgcatcatcatccagaaggcttgagagaggcacacacagacatacaccttaaagggcgcttctgcaaagctgcgcggtgaggggagatg

SEQ ID NO: 279069 - DNA, 113 bp, Homo sapiens; identical to SEQ ID NO: 197858
  chr1:177140714-177140827
  hyper

SEQ ID NO: 279070 - DNA, 45 bp, Homo sapiens; identical to SEQ ID NO: 197859
  chr1:177150728-177150773
  hyper

SEQ ID NO: 279071 - DNA, 696 bp, Homo sapiens
  chr1:178062416-178063112
  hyper
cagcgcggacagggcgcagggcgcagaccctgtgcatatcccagaatcccggacccactgccactccactctgggaaggaagaaggcgctcccccttgggtgactgtaagataaagcagcttcttcgatctctttgtccaataagaaagaaacgttggcccataaagaaagaaagaaacaaataaataggaaaggtgtgagaaggaagggaagctcctttcttttctgtttaaatttcccgcacccttttacctccccgccttctcaaacggtctttactttgagcagcagagacccggaccgctcaatacccggctatccctgggagggtacttggaaagtaggcgggacaggccggatgaataattcggtgtccgacttttcctgcctgcggcgcagtccctccccggcttcgttactcgagtgcacacgcggccgggctctcggccctcgattgcttcagcctatcaccctgggatgccgcctgccgctgccgccgccgccgccgccgccaccgccaccgccaccgccaccgccaccgccgtggctgccgggtttgtgggatccgccgcggagcaggagccagagctgtggccggagctgtggcctgagagtcagggggcgggcaggctcattccagaagtgggggccgaggacaggcgggctagaacccggggccaccgccccctacccctc

SEQ ID NO: 279072 - DNA, 475 bp, Homo sapiens; identical to SEQ ID NO: 197861
  chr1:178063150-178063625
  hyper

SEQ ID NO: 279073 - DNA, 110 bp, Homo sapiens; identical to SEQ ID NO: 197862
  chr1:178063733-178063843
  hyper

SEQ ID NO: 279074 - DNA, 212 bp, Homo sapiens; identical to SEQ ID NO: 221520
  chr1:178693954-178694166
  hyper

SEQ ID NO: 279075 - DNA, 38 bp, Homo sapiens
  chr1:179050619-179050657
  hyper
ttcctcttgcttttcgtggactcccactgtggaaacct

SEQ ID NO: 279076 - DNA, 39 bp, Homo sapiens; identical to SEQ ID NO: 227718
  chr1:179262758-179262797
  hyper

SEQ ID NO: 279077 - DNA, 91 bp, Homo sapiens
  chr1:179545304-179545395
  hyper
gcgtgtctgcaggtgccaacccgggctgtgaagactcatctcctggagggttcctaatgtcatgctagagggctgacggagatacagaagc

SEQ ID NO: 279078 - DNA, 42 bp, Homo sapiens; identical to SEQ ID NO: 197863
  chr1:179711890-179711932
  hyper

SEQ ID NO: 279079 - DNA, 402 bp, Homo sapiens
  chr1:179851080-179851482
  hyper
aggacatggtcaacgtagcagtcgatcaaaaagattccagggaaactgcgcaacagcctggggccgagaagcgaaacttgggtcttctccaccctcgtcgcactccttttccccgagacttggtactgggagataggacgggagtctcctacacgcagtcaacacttgccacgagcggctagacttaggacaggcaagttgccctgccatccttctatcgcccccacccctcctttacttaagggcgatggcagagacgtcctcctcccccttctcctcctctttggtgcctccagccaggaggcgggagcgatccacagcagctgacccagctcaggcactgcctctctcacagccctcaagacacaccatgggcccagaggcaggtttgctacacagcag

SEQ ID NO: 279080 - DNA, 96 bp, Homo sapiens; identical to SEQ ID NO: 104653
  chr1:179851494-179851590
  hyper

SEQ ID NO: 279081 - DNA, 360 bp, Homo sapiens; identical to SEQ ID NO: 227722
  chr1:179923500-179923860
  hyper

SEQ ID NO: 279082 - DNA, 214 bp, Homo sapiens; identical to SEQ ID NO: 197864
  chr1:180123473-180123687
  hyper

SEQ ID NO: 279083 - DNA, 890 bp, Homo sapiens; identical to SEQ ID NO: 975
  chr1:180123700-180124590
  hyper

SEQ ID NO: 279084 - DNA, 68 bp, Homo sapiens
  chr1:180197993-180198061
  hyper
gggcacacagtcccccttcccgcctaagctgaaccccactaggctggaaggacacgtatgtctgcatt

SEQ ID NO: 279085 - DNA, 1610 bp, Homo sapiens; identical to SEQ ID NO: 227724
  chr1:180199360-180200970
  hyper

SEQ ID NO: 279086 - DNA, 91 bp, Homo sapiens; identical to SEQ ID NO: 197866
  chr1:180472131-180472222
  hyper

SEQ ID NO: 279087 - DNA, 45 bp, Homo sapiens; identical to SEQ ID NO: 197867
  chr1:180881296-180881341
  hyper

SEQ ID NO: 279088 - DNA, 255 bp, Homo sapiens; identical to SEQ ID NO: 197868
  chr1:180881580-180881835
  hyper

SEQ ID NO: 279089 - DNA, 140 bp, Homo sapiens
  chr1:180881864-180882004
  hyper
cggccggggacactcgctccctgggccgcggctcaggagaggcggccccgcggggctccgggcggggtgggaggccgaggcccggctcctccagcccctcccgcggccccacctctccgcgctcggctccctctgcccag

SEQ ID NO: 279090 - DNA, 110 bp, Homo sapiens
  chr1:180882432-180882542
  hyper
agtatagaggaggcagcgccgggccggccgggcgggggtggcggaccggcggggcggaggagcggggagcccaggtcgccccggccactgggaagcgggcctcccacggg

SEQ ID NO: 279091 - DNA, 669 bp, Homo sapiens; identical to SEQ ID NO: 197870
  chr1:181058994-181059663
  hyper

SEQ ID NO: 279092 - DNA, 36 bp, Homo sapiens; identical to SEQ ID NO: 227731
  chr1:181286826-181286862
  hyper

SEQ ID NO: 279093 - DNA, 38 bp, Homo sapiens; identical to SEQ ID NO: 197871
  chr1:181287267-181287305
  hyper

SEQ ID NO: 279094 - DNA, 121 bp, Homo sapiens
  chr1:181288202-181288323
  hyper
tcacttgctgcagtcgtgtctgtgagtctggctgctcagagcagatgattcaggctgtgggtgcgtgcagagatctgggggcttgtcgtaatggttcaccgtgttggaacattgatgcata

SEQ ID NO: 279095 - DNA, 82 bp, Homo sapiens
  chr1:182026347-182026429
  hyper
cagcggcttgctgggcttctgaaaggcccgcccgccccgcaggcacctgtagggacgcgcctcagcctctccgccctcgcgc

SEQ ID NO: 279096 - DNA, 115 bp, Homo sapiens; identical to SEQ ID NO: 227737
  chr1:182358842-182358957
  hyper

SEQ ID NO: 279097 - DNA, 89 bp, Homo sapiens
  chr1:182359608-182359697
  hyper
gtcctccctgccccctcactcaccccagccacagaaagtcaagcgtatcgttagggttgccctctttaacccttctctttttggagtgg

SEQ ID NO: 279098 - DNA, 46 bp, Homo sapiens
  chr1:182359742-182359788
  hyper
cggagctttctgggagagggcgatggagaaggggacagacagcggc

SEQ ID NO: 279099 - DNA, 57 bp, Homo sapiens; identical to SEQ ID NO: 197872
  chr1:182360260-182360317
  hyper

SEQ ID NO: 279100 - DNA, 71 bp, Homo sapiens; identical to SEQ ID NO: 197873
  chr1:182360888-182360959
  hyper

SEQ ID NO: 279101 - DNA, 132 bp, Homo sapiens; identical to SEQ ID NO: 221526
  chr1:182361439-182361571
  hyper

SEQ ID NO: 279102 - DNA, 435 bp, Homo sapiens; identical to SEQ ID NO: 227740
  chr1:182557967-182558402
  hyper

SEQ ID NO: 279103 - DNA, 251 bp, Homo sapiens; identical to SEQ ID NO: 197874
  chr1:182583797-182584048
  hyper

SEQ ID NO: 279104 - DNA, 61 bp, Homo sapiens; identical to SEQ ID NO: 197875
  chr1:182584613-182584674
  hyper

SEQ ID NO: 279105 - DNA, 95 bp, Homo sapiens
  chr1:182758310-182758405
  hyper
ccaggaaagctcccgtatgagtagataattcactttaaaattcgctcatctctctttaacacgagagtctgcagggctggtgcagcggcgtcaac

SEQ ID NO: 279106 - DNA, 97 bp, Homo sapiens
  chr1:182911449-182911546
  hyper
caggaggcttagctgacaaccgccccgatctcctgttgggctcttccttggcggccccttcggcggagctgaccttcctcttgggtatcctggcggc

SEQ ID NO: 279107 - DNA, 225 bp, Homo sapiens; identical to SEQ ID NO: 227744
  chr1:182991637-182991862
  hyper

SEQ ID NO: 279108 - DNA, 343 bp, Homo sapiens; identical to SEQ ID NO: 197876
  chr1:182992844-182993187
  hyper

SEQ ID NO: 279109 - DNA, 291 bp, Homo sapiens; identical to SEQ ID NO: 221529
  chr1:183155179-183155470
  hyper

SEQ ID NO: 279110 - DNA, 201 bp, Homo sapiens; identical to SEQ ID NO: 227747
  chr1:183441278-183441479
  hyper

SEQ ID NO: 279111 - DNA, 193 bp, Homo sapiens; identical to SEQ ID NO: 227748
  chr1:183604496-183604689
  hyper

SEQ ID NO: 279112 - DNA, 144 bp, Homo sapiens; identical to SEQ ID NO: 227749
  chr1:183605167-183605311
  hyper

SEQ ID NO: 279113 - DNA, 332 bp, Homo sapiens; identical to SEQ ID NO: 197877
  chr1:183774429-183774761
  hyper

SEQ ID NO: 279114 - DNA, 507 bp, Homo sapiens; identical to SEQ ID NO: 197878
  chr1:184355381-184355888
  hyper

SEQ ID NO: 279115 - DNA, 278 bp, Homo sapiens; identical to SEQ ID NO: 197879
  chr1:184355936-184356214
  hyper

SEQ ID NO: 279116 - DNA, 146 bp, Homo sapiens; identical to SEQ ID NO: 197880
  chr1:184356541-184356687
  hyper

SEQ ID NO: 279117 - DNA, 132 bp, Homo sapiens
  chr1:184633156-184633288
  hyper
ctggctgcaaagtccggctcctctacactctgcagagctgttttcccccttcagagctcctctcctccgggagggcttgcctcgccccggtccaggatctctgccttcggttgaagcgcagcgcccccagcc

SEQ ID NO: 279118 - DNA, 79 bp, Homo sapiens
  chr1:184633350-184633429
  hyper
ggtggtctcctcttccccccatcgcggcccagcaacctgggggtccgcgtgacttctccctggccgggggatggaggat

SEQ ID NO: 279119 - DNA, 225 bp, Homo sapiens; identical to SEQ ID NO: 197881
  chr1:184722805-184723030
  hyper

SEQ ID NO: 279120 - DNA, 367 bp, Homo sapiens; identical to SEQ ID NO: 227756
  chr1:184724483-184724850
  hyper

SEQ ID NO: 279121 - DNA, 397 bp, Homo sapiens; identical to SEQ ID NO: 227757
  chr1:184943400-184943797
  hyper

SEQ ID NO: 279122 - DNA, 135 bp, Homo sapiens; identical to SEQ ID NO: 227758
  chr1:185014250-185014385
  hyper

SEQ ID NO: 279123 - DNA, 254 bp, Homo sapiens; identical to SEQ ID NO: 227759
  chr1:185125952-185126206
  hyper

SEQ ID NO: 279124 - DNA, 374 bp, Homo sapiens; identical to SEQ ID NO: 227760
  chr1:185286448-185286822
  hyper

SEQ ID NO: 279125 - DNA, 176 bp, Homo sapiens; identical to SEQ ID NO: 227761
  chr1:185643478-185643654
  hyper

SEQ ID NO: 279126 - DNA, 519 bp, Homo sapiens; identical to SEQ ID NO: 227762
  chr1:185703184-185703703
  hyper

SEQ ID NO: 279127 - DNA, 65 bp, Homo sapiens
  chr1:186344948-186345013
  hyper
gtgggaagtaggtcgctttctgatgaattcagtggcagtgaattgagaccggagggaatctggcc

SEQ ID NO: 279128 - DNA, 409 bp, Homo sapiens; identical to SEQ ID NO: 197885
  chr1:186649187-186649596
  hyper

SEQ ID NO: 279129 - DNA, 258 bp, Homo sapiens; identical to SEQ ID NO: 197886
  chr1:186649698-186649956
  hyper

SEQ ID NO: 279130 - DNA, 61 bp, Homo sapiens
  chr1:186650033-186650094
  hyper
gtacgtctttagagggtcgaggaagtcacgtcgggacagactggggcgagtaaggttaaga

SEQ ID NO: 279131 - DNA, 493 bp, Homo sapiens; identical to SEQ ID NO: 227765
  chr1:186798092-186798585
  hyper

SEQ ID NO: 279132 - DNA, 43 bp, Homo sapiens; identical to SEQ ID NO: 197887
  chr1:190444812-190444855
  hyper

SEQ ID NO: 279133 - DNA, 45 bp, Homo sapiens
  chr1:190445093-190445138
  hyper
cttgtcaggcaggacgaccggactgggaaagagaccaggtagaaa

SEQ ID NO: 279134 - DNA, 73 bp, Homo sapiens; identical to SEQ ID NO: 227770
  chr1:190448067-190448140
  hyper

SEQ ID NO: 279135 - DNA, 139 bp, Homo sapiens; identical to SEQ ID NO: 227771
  chr1:193028795-193028934
  hyper

SEQ ID NO: 279136 - DNA, 107 bp, Homo sapiens; identical to SEQ ID NO: 227772
  chr1:193074685-193074792
  hyper

SEQ ID NO: 279137 - DNA, 93 bp, Homo sapiens; identical to SEQ ID NO: 227773
  chr1:193091321-193091414
  hyper

SEQ ID NO: 279138 - DNA, 92 bp, Homo sapiens; identical to SEQ ID NO: 197888
  chr1:196577279-196577371
  hyper

SEQ ID NO: 279139 - DNA, 193 bp, Homo sapiens; identical to SEQ ID NO: 197889
  chr1:196577435-196577628
  hyper

SEQ ID NO: 279140 - DNA, 161 bp, Homo sapiens
  chr1:196578387-196578548
  hyper
tttagatgacagggaaagcacatggaaacgcactgaggattttacagtggtgagttgctgttactgctgtcgctgctactagcagcgttgtgggcttccaggtggcctggcctcagccttcggtcccctcctattagtggttcacacggaggaagaagtga

SEQ ID NO: 279141 - DNA, 59 bp, Homo sapiens; identical to SEQ ID NO: 197890
  chr1:197744743-197744802
  hyper

SEQ ID NO: 279142 - DNA, 100 bp, Homo sapiens
  chr1:197881312-197881412
  hyper
ccgccgcctcccgccgagaaccgagttctagttggggaaacgtctgacatctggacatcaaggtaagaccctgatggagatattttagtcggagcagttt

SEQ ID NO: 279143 - DNA, 184 bp, Homo sapiens
  chr1:197881604-197881788
  hyper
cttttctctgccagtgcaaccaccattacggcgtgatccactccttttcctctaagaatgctgaacggtaccactctagaggcaggtgagttatgtgccaggttccttctgatgttctctgccccttgggccagtgcgtataccatgtgagtgtgtgtgcgtgtgtgtgcgccttcgttgggtg

SEQ ID NO: 279144 - DNA, 62 bp, Homo sapiens; identical to SEQ ID NO: 197891
  chr1:197881990-197882052
  hyper

SEQ ID NO: 279145 - DNA, 219 bp, Homo sapiens; identical to SEQ ID NO: 197892
  chr1:197882208-197882427
  hyper

SEQ ID NO: 279146 - DNA, 261 bp, Homo sapiens
  chr1:197882611-197882872
  hyper
gtatggatctgccaacctcagtgtagggggaaattttccacatggagtatctcagtctccactgtctggagaaaggccccagcgtgtcccggcaatccgctcaccttccatccagcgcagcccgggcatccagggccaggtggcgcggcactgaacgcatggttcccagcctcaggctgacgctgacgtttcactgggccttgggtgctcaggacagtgccagacgctggatactgttttaagagccgcgcctttcaaacc

SEQ ID NO: 279147 - DNA, 87 bp, Homo sapiens; identical to SEQ ID NO: 197894
  chr1:197889656-197889743
  hyper

SEQ ID NO: 279148 - DNA, 293 bp, Homo sapiens
  chr1:199998439-199998732
  hyper
gttgagctgggtcgggagaccacgcacgccgatccctcacagtctcccccacaccccatgggtgaattaaagagggtaaggtaggggaaagagacgctgttgcacttttctctgcaaccctggaagaactgtgtttccagctaccgcacgcgcaactcacatcgcaagggaccgaggcggtacactctgagcgtaaacagagaacacctgcagctctggaatcggtcccaccgcagagggctgggaaccggaggactgtcggtccagcccataaggggctgctggggactaaa

SEQ ID NO: 279149 - DNA, 237 bp, Homo sapiens
  chr1:200008278-200008515
  hyper
agagagatagggggaaggggcggagaggaggggagagagaagggaggcgagagaaagaggagagagacccctgccgatcctgagccagagggcggtggagggaggggaaggagtcgcccgagccgtccgggagcagtggcagcggcacagccggggcggcaatagcagccccgcggtcgcctccgctgcccgccgggagctcggcggttcacggctccgcgccccgggcagctgcgt

SEQ ID NO: 279150 - DNA, 376 bp, Homo sapiens
  chr1:200008691-200009067
  hyper
acgctccggcgaggcgagagggttgggttagcaggcatcccggtcgccccttccttcttttcgccggagttgaatctgtgctgcccgtgtccaggtgctgggcttccggaccgacacggatcccccatccccgcccgcggtcgccttgtcatgctgcccaaagtggagacggaagccctgggactggctcgatcgcatggggaacagggccagatgccggaaaacatgcaaggtaaggaggcgccgcgcggcgctccggctcccgctgcttccccacccccgggctcgccctgcaggcttcagcctcccgccccgcgcgggcgcgggagtagccccgctgggcgctcgcagccgcgggagtcaagccccctcccca

SEQ ID NO: 279151 - DNA, 82 bp, Homo sapiens; identical to SEQ ID NO: 197896
  chr1:200009450-200009532
  hyper

SEQ ID NO: 279152 - DNA, 92 bp, Homo sapiens
  chr1:200012227-200012319
  hyper
ttttccttctttttattttcacagattttcaaacgtaaggagatgaaagtatccagaatagaaaagtactgtcaatacggaactgaatgttt

SEQ ID NO: 279153 - DNA, 149 bp, Homo sapiens
  chr1:200271192-200271341
  hyper
taaaaaaaaaaacgcgtaccaaacaacgaagctcctgcccttgggagtttatacacaggctatgttaatatttgcaaagggccccgagtgtctaagcggctaatgaacgtcttgggtcggtttcctcaaaatccagcccattgtttccc

SEQ ID NO: 279154 - DNA, 540 bp, Homo sapiens; identical to SEQ ID NO: 104788
  chr1:200271373-200271913
  hyper

SEQ ID NO: 279155 - DNA, 283 bp, Homo sapiens; identical to SEQ ID NO: 197898
  chr1:200379703-200379986
  hyper

SEQ ID NO: 279156 - DNA, 118 bp, Homo sapiens; identical to SEQ ID NO: 227789
  chr1:200589896-200590014
  hyper

SEQ ID NO: 279157 - DNA, 235 bp, Homo sapiens; identical to SEQ ID NO: 197899
  chr1:200708632-200708867
  hyper

SEQ ID NO: 279158 - DNA, 816 bp, Homo sapiens
  chr1:201083266-201084082
  hyper
caggaagccagagaacgccaccggggcacacaggtcgcctctgctgagtctgtaggttcggtctgggctgagcgccagcagcaatctggcctcccatcccttcctctgggttcctttctcgaggagtaagcgtgctcccaaagaagtcgctagtatctgaggccatctggtggagagcagtggcatggtaaccgagggctcaaagtcgggctcgcatcccggggactcgcagagactggactgcgcctgcggcaaggaaggacggagcagagccacctgaggccgagcgggagccagacccagggatgaccgtcctggggagcccctctgcaccccggaggggacgcaggacgcccggagcagtcccaggccctgcccctcgcttcacccacggagctcctaggtctctatcgtgcccatcgtacccgctgccctgcacttccgccccaagctggtggaggagggagggtgtcgcagacacgggagcgccgcggacctcctacagtcaccgtcctgcggcgcatcgcgggtgacccaacagcctcccgctgctcccgaaagtgggacggggccggcggatcatcctccaagccgggggcggccacaggcccgatcaatgccaggattcctccgactccaagaaaggcgacggggagaagcaggaggactcggatgactccggcaccagggaggagggcgcccgggcctcgccgtcgccagggcggtcgggacggggggtggcgggcggcgcggggcagggcccggtgcccgggaggccgcgggaagcggggggcgtcgagccgtcgggggccgagc

SEQ ID NO: 279159 - DNA, 323 bp, Homo sapiens; identical to SEQ ID NO: 227791
  chr1:201228892-201229215
  hyper

SEQ ID NO: 279160 - DNA, 56 bp, Homo sapiens
  chr1:201252438-201252494
  hyper
gagaaaaaaaagagcgagcaggaaggcgcccagcgtcccacacaggggactcgcag

SEQ ID NO: 279161 - DNA, 132 bp, Homo sapiens
  chr1:201252816-201252948
  hyper
cgcctcccgccaccatgaaccactcgccgctcaagaccgccttggcgtacgaatgcttccaggaccaggacaactccacgttggctttgccgtcggaccaaaagatgaaaacaggcacgtctggcaggcagc

SEQ ID NO: 279162 - DNA, 207 bp, Homo sapiens; identical to SEQ ID NO: 197901
  chr1:201368375-201368582
  hyper

SEQ ID NO: 279163 - DNA, 121 bp, Homo sapiens; identical to SEQ ID NO: 197902
  chr1:201368727-201368848
  hyper

SEQ ID NO: 279164 - DNA, 233 bp, Homo sapiens; identical to SEQ ID NO: 197903
  chr1:201437933-201438166
  hyper

SEQ ID NO: 279165 - DNA, 592 bp, Homo sapiens
  chr1:201449631-201450223
  hyper
ctaatcattagaaccgttcagaggcagccccagctgcggggcggggcggggcggggcggggcggggcggggcgcggagctgttggcagctaagtggttgaggttgagcggccgggtggaggccggcacctactaggaggctgggctggtccgcaggttctcaagcccggctgagcccgggcaagcgtcagagaatcaccagagcagcttgtcgaatacagattcccaggccccacccaggccaaccgaatcagaatctctaggggtggggctgggaatccatttttaaaggcttccccaatgattctcagaataaaggttgggcttggaggcggggccggggctgggcgtggcacggaggcgaggcgcggggagggccggaccttccagttgttaatccctgtgttcctcactccgccacactcacctccactgatctaagtcgggggatcgttcctcgctgggtgcccccctcacttgatcttagccaaaaggtcgagaagcgattgggagcccctctcgaataatttctgtggcccttgattcagggatcactcccacacttaatagcagctctaacgccccccaacccc

SEQ ID NO: 279166 - DNA, 204 bp, Homo sapiens
  chr1:201476297-201476501
  hyper
gtgtcccgggccacgccaaccagtgggctttgcacactgcaccactccagggctgatgtcatggcgcgaagcccggcggtgctgccctcctaggccccgggaaggccggccggcaggggcgggggcaggagtcgccgactctgggggtgctccgagctcgtgctgcggtcccactgtgcgccctgtcgccgccaccgcggaaaa

SEQ ID NO: 279167 - DNA, 453 bp, Homo sapiens; identical to SEQ ID NO: 197905
  chr1:201857901-201858354
  hyper

SEQ ID NO: 279168 - DNA, 42 bp, Homo sapiens; identical to SEQ ID NO: 197906
  chr1:201915621-201915663
  hyper

SEQ ID NO: 279169 - DNA, 310 bp, Homo sapiens
  chr1:201915739-201916049
  hyper
aatccccaagctgggggcgggcctacctcgctgtcagagctgtttgaaacttgaggacattccagggaatcttggagcgctgcgtgaccaaatttagtacagagcagtttagccttttaaagacaaggggccacgcaatgagaaaaagatacaaaaatgcgtaggctggcagaagcagatcacagccacggagagccagacaagcagggacgaggccatgagggccggtgaactcgccagcccggggcacgttcaagagcgtattttactactccatcaccgggtggacgtatcactgtggtcaatgtgt

SEQ ID NO: 279170 - DNA, 169 bp, Homo sapiens
  chr1:201924323-201924492
  hyper
ggaaagaaagaagcgtatttaggcagtatcgcgttgatttcagtccacggaacctctggtgaccgggtagtgtgactccgtcattggtagccccccgcccacacagccgggactcgcggcctttgaggacgtgggcagggccagtctcgccacgccgcggccaatgccc

SEQ ID NO: 279171 - DNA, 188 bp, Homo sapiens; identical to SEQ ID NO: 197908
  chr1:202112266-202112454
  hyper

SEQ ID NO: 279172 - DNA, 549 bp, Homo sapiens; identical to SEQ ID NO: 221540
  chr1:202162904-202163453
  hyper

SEQ ID NO: 279173 - DNA, 82 bp, Homo sapiens
  chr1:202183289-202183371
  hyper
tggagggagagggccgctcagcgagggcgggacagaacctctcccgggctgggagtgcacggcgcggtgcgcccaggtaggc

SEQ ID NO: 279174 - DNA, 42 bp, Homo sapiens
  chr1:202183676-202183718
  hyper
tccactgaaccacctggcgtgggttcgcgctgccaattctta

SEQ ID NO: 279175 - DNA, 205 bp, Homo sapiens; identical to SEQ ID NO: 227802
  chr1:202317590-202317795
  hyper

SEQ ID NO: 279176 - DNA, 83 bp, Homo sapiens
  chr1:202611678-202611761
  hyper
cttcctccaatgcacagagccgtggcgcgtgtcaaagtgtgggaaagttcccgggagaggaaggggtggaaaatgcagccgct

SEQ ID NO: 279177 - DNA, 983 bp, Homo sapiens
  chr1:202612039-202613022
  hyper
ccagcgctaaggcaccgcggcttctctcgccttctctccgctttggacccgggctctccgcggggagagataggttgggggctaggggttcccgaaataattcaggacacctcccccgggtctagccaggtaattccgacgcccatggatttccggattacagttcccaccgcgggctcagtcctacctactcttagtttaccccgcagtgagcaccaagtcccaaaagtcggagtgtcaccgtttggcgaccccgcgtccgcccacgcctcaggccctagaggtggccactgtcggtcgaggcacggcttcgctcgggactactggctgccctcgtggggtgccccgcctggggttccctcttaccctgggacgttccgggcgcgttcagcctgagctggtggagagggcgggggcgggggcgggggcggggacagctggggtcccgaagtccaggtccctcttcccacttccccgccggccctgccgctgcggccctcgctcccgcgctcgctcgctctcgagtctctccctctctctattctcttcctctctctctctctgcagtagtaacaacctgatcccgcttcccccgcccgcctattgatatgctcctcacattcgcctgcacacagcgcgtgcggcccctccgagggcgatccccgcaaaccacgacgcagggcccccgccccaggcaatccccgctgctggggaggctgcctccgcgcgcccacgcctcccttctccagtccggactgccagcggaggggaaaatgggcgacaggagaaggggaggtgtgtgcgggagggactaggctgggggagaggggtttaaactggcgcggtcctacagaagtttgaggagggcggggccggctccgagcccccggagccctacgggactcccccgattctgccgaggagtccccgccagctccgtgcactcctgcaacactccccaccccacccgccagctccgagtt

SEQ ID NO: 279178 - DNA, 94 bp, Homo sapiens
  chr1:202613545-202613639
  hyper
cactcctgtgcctcagtgtcacccttgggcctcaccctcaacccccaacctcacccgataagacctcggggccacagctcgccaggtggaattt

SEQ ID NO: 279179 - DNA, 62 bp, Homo sapiens
  chr1:202679708-202679770
  hyper
gcgggcctgccccccgggacgggttctttctgcgcagccccccaggcgctcggcgcccccgc

SEQ ID NO: 279180 - DNA, 51 bp, Homo sapiens; identical to SEQ ID NO: 197910
  chr1:202830113-202830164
  hyper

SEQ ID NO: 279181 - DNA, 394 bp, Homo sapiens
  chr1:202830481-202830875
  hyper
ccgttttgcgctgcgggcccttcccaccgaccccccgtgcgcccccggcatcctccccatcgtgcgacaccctcccccgcacagcatccttcaccatggttgatccagtagttgaagttggagggtcgctgactgcagacaccatacgggtctccagcaacaccacgaatcccaacgcgcggttgctggcgggaccttataaatccccggagagccgccggttgtgtctcctggcggggactcccattgggtcgcagctggacagagatcggatcgtcccccgcgcgactctcactgggccaggcccccaccgaggcccgcccctctctccgctattggccagccgcttacgaaacagccccgccgcagcggtcattgggcagttggtaaagcc

SEQ ID NO: 279182 - DNA, 64 bp, Homo sapiens; identical to SEQ ID NO: 197911
  chr1:202858344-202858408
  hyper

SEQ ID NO: 279183 - DNA, 280 bp, Homo sapiens; identical to SEQ ID NO: 227809
  chr1:202936076-202936356
  hyper

SEQ ID NO: 279184 - DNA, 148 bp, Homo sapiens; identical to SEQ ID NO: 227810
  chr1:202976330-202976478
  hyper

SEQ ID NO: 279185 - DNA, 87 bp, Homo sapiens; identical to SEQ ID NO: 197912
  chr1:203242476-203242563
  hyper

SEQ ID NO: 279186 - DNA, 210 bp, Homo sapiens; identical to SEQ ID NO: 227813
  chr1:203296275-203296485
  hyper

SEQ ID NO: 279187 - DNA, 412 bp, Homo sapiens; identical to SEQ ID NO: 197913
  chr1:203595793-203596205
  hyper

SEQ ID NO: 279188 - DNA, 159 bp, Homo sapiens; identical to SEQ ID NO: 197914
  chr1:203596926-203597085
  hyper

SEQ ID NO: 279189 - DNA, 219 bp, Homo sapiens; identical to SEQ ID NO: 227817
  chr1:203830671-203830890
  hyper

SEQ ID NO: 279190 - DNA, 373 bp, Homo sapiens; identical to SEQ ID NO: 197915
  chr1:204042251-204042624
  hyper

SEQ ID NO: 279191 - DNA, 244 bp, Homo sapiens; identical to SEQ ID NO: 197916
  chr1:204042692-204042936
  hyper

SEQ ID NO: 279192 - DNA, 108 bp, Homo sapiens; identical to SEQ ID NO: 197917
  chr1:204042966-204043074
  hyper

SEQ ID NO: 279193 - DNA, 1003 bp, Homo sapiens; identical to SEQ ID NO: 197918
  chr1:204043134-204044137
  hyper

SEQ ID NO: 279194 - DNA, 188 bp, Homo sapiens; identical to SEQ ID NO: 197919
  chr1:204332591-204332779
  hyper

SEQ ID NO: 279195 - DNA, 502 bp, Homo sapiens
  chr1:204347106-204347608
  hyper
gacgggcaattagcgcggtgagtaattacgatgcctctcctgccgggactgttaacgggcagcgctgggtctccgttcctcctggctctgctgccctccagcctggcggagcccggagagcagaagctggagcggggaggatccctccccgaagggagcaggttgcagtgcgagcaggggtgttgcctctccgctcccagctccgatcttgcacttgaaccaccggcggggccgggggcggagccgcgccgccgcctcggaaggtaattcacagccccgagaactcgccggcagcgccaagtcccccagtccaggcgcaccgcgcagagaaccagtttgactaaaagagctttgaatcaggaacctggtggacatgtccagccactgaacggaaaaggggaagtgattaaacctggttctacttggtgggaggttaggagaggaacaaaggtcaaaggcacggaagcgtggcggggctgtgagcagcgaggggcccggggag

SEQ ID NO: 279196 - DNA, 205 bp, Homo sapiens; identical to SEQ ID NO: 227824
  chr1:204379620-204379825
  hyper

SEQ ID NO: 279197 - DNA, 178 bp, Homo sapiens; identical to SEQ ID NO: 197921
  chr1:204380935-204381113
  hyper

SEQ ID NO: 279198 - DNA, 451 bp, Homo sapiens; identical to SEQ ID NO: 227826
  chr1:204485346-204485797
  hyper

SEQ ID NO: 279199 - DNA, 105 bp, Homo sapiens; identical to SEQ ID NO: 197922
  chr1:204487763-204487868
  hyper

SEQ ID NO: 279200 - DNA, 200 bp, Homo sapiens
  chr1:204518656-204518856
  hyper
tgagaaaagaccacgagacgggaacattattcatggaaggacgggccatcttgtcacttgttttcactgtgccagaagactaaagaaggctggggcttcatgccctatttgcaagaaagagattcagctggttattaaggtttttatagcataatggtagtacgaacataaaaatgcatttattccgttcacttaccaca

SEQ ID NO: 279201 - DNA, 357 bp, Homo sapiens
  chr1:204654218-204654575
  hyper
agtctccggctcccccgcaggcgtctcggcggaaggcagcggccggccctcctctggcccccacccgggtcaggcggagctgcggtgccggggcaggagccaggagccctgaggcggctgctccggccgctcccgccgcgtacgcctcggccacgccagcgacctcggtgtccacgattccccggcggcggcggcgctgcccaggtcagccccgaagctgcacactcaccccgtgggcgccgggcaccgtctgccgtctgctgcccgcgcggccgcgctccgctcgccttccgcccggggccgggctggggacgctggtccgcgccctcccgccgcgcgcgccgtctgcacaggccg

SEQ ID NO: 279202 - DNA, 74 bp, Homo sapiens
  chr1:204654769-204654843
  hyper
caggccctcgcggcgcccggcaccccctccacgcgcgcccctcttcccggcttcgcgctcgccctcctcactcg

SEQ ID NO: 279203 - DNA, 117 bp, Homo sapiens; identical to SEQ ID NO: 227829
  chr1:205091310-205091427
  hyper

SEQ ID NO: 279204 - DNA, 243 bp, Homo sapiens; identical to SEQ ID NO: 227830
  chr1:205196742-205196985
  hyper

SEQ ID NO: 279205 - DNA, 65 bp, Homo sapiens; identical to SEQ ID NO: 227831
  chr1:205290855-205290920
  hyper

SEQ ID NO: 279206 - DNA, 487 bp, Homo sapiens
  chr1:205313006-205313493
  hyper
acttcactgggaagacgcggcggcggagggcgccccccgggggcagcaccacaccctgcactgcttggtccccgccccctccccacccgctgctcggacactgccgaagcaagccgcaggccggggctttcaggggttcggggtgccgggcagtccccgggcggaggaaggagttagcgtctctcggcgtcgacgcctctctttccccgcgccccctccccgcagtctcggcgcccccgcccccgcatcacttacgctgccaggcccggggagcgcggcggcgaggcgcagacgacgcatcactggggagcccggagcccccgccccgctgcacgggagccggggagagggcgctctgtccttccccagtccgcgcgccgctgtcacacatgcagatgaggagatgaagtgaacagcaggaaggagaagcggagccgccgccggggaggaggccggcgagcctgctccgctccgtccccatccgcag

SEQ ID NO: 279207 - DNA, 77 bp, Homo sapiens; identical to SEQ ID NO: 197924
  chr1:205400134-205400211
  hyper

SEQ ID NO: 279208 - DNA, 60 bp, Homo sapiens; identical to SEQ ID NO: 197925
  chr1:205425836-205425896
  hyper

SEQ ID NO: 279209 - DNA, 454 bp, Homo sapiens
  chr1:205425997-205426451
  hyper
gtctctcttctctcttttgcagccccccagccccggggccggcgtgcccggcccaccccgccctccgcgccccccgacggccgcggtcagccggcattccggagcagcgcgtcggagctgcaacttcgcgcctaagcgcccgcacctcgcagcccggcgggcgggagacaaaagctgcggcgccgccgccggaggccgcgcggccaaggtgtgttcgctaattgtcaggaaatgtgtgtgtgtgcggccgggagcccgcaggggcgggggaggggacggaggaagaggagacccacccctcctacccccgccactcgccagcgccgggtacccgaaccgggattagagaataaattatctgctctcttctcattgggctgtggctgaggacgccgtcggcggcgccgggctgggagctctcccggctctttgcattcaccgcacagctccggct

SEQ ID NO: 279210 - DNA, 288 bp, Homo sapiens; identical to SEQ ID NO: 227842
  chr1:205538140-205538428
  hyper

SEQ ID NO: 279211 - DNA, 34 bp, Homo sapiens; identical to SEQ ID NO: 227843
  chr1:205560983-205561017
  hyper

SEQ ID NO: 279212 - DNA, 115 bp, Homo sapiens; identical to SEQ ID NO: 197927
  chr1:205561301-205561416
  hyper

SEQ ID NO: 279213 - DNA, 85 bp, Homo sapiens; identical to SEQ ID NO: 227845
  chr1:205719206-205719291
  hyper

SEQ ID NO: 279214 - DNA, 139 bp, Homo sapiens; identical to SEQ ID NO: 197928
  chr1:205721778-205721917
  hyper

SEQ ID NO: 279215 - DNA, 33 bp, Homo sapiens; identical to SEQ ID NO: 227846
  chr1:205744399-205744432
  hyper

SEQ ID NO: 279216 - DNA, 88 bp, Homo sapiens; identical to SEQ ID NO: 227847
  chr1:207223723-207223811
  hyper

SEQ ID NO: 279217 - DNA, 167 bp, Homo sapiens; identical to SEQ ID NO: 197929
  chr1:207628133-207628300
  hyper

SEQ ID NO: 279218 - DNA, 147 bp, Homo sapiens; identical to SEQ ID NO: 227850
  chr1:207925329-207925476
  hyper

SEQ ID NO: 279219 - DNA, 208 bp, Homo sapiens
  chr1:207995189-207995397
  hyper
agaagggcggtgctcgtcctaggccagagacccagggcgcactgcgcttccagatgcgcagtcacgggtgggggccactgcgcatggcgcagggcttggtaaaccccctccccacaaacgtgagacctgcgacaaagacaggttagagagccgggaccctgatttttcgaggcctccctcccccaaccaaaggcggacagcctgctgc

SEQ ID NO: 279220 - DNA, 530 bp, Homo sapiens; identical to SEQ ID NO: 197931
  chr1:208416772-208417302
  hyper

SEQ ID NO: 279221 - DNA, 54 bp, Homo sapiens; identical to SEQ ID NO: 104925
  chr1:208417907-208417961
  hyper

SEQ ID NO: 279222 - DNA, 150 bp, Homo sapiens; identical to SEQ ID NO: 197932
  chr1:208418636-208418786
  hyper

SEQ ID NO: 279223 - DNA, 218 bp, Homo sapiens; identical to SEQ ID NO: 227854
  chr1:209364148-209364366
  hyper

SEQ ID NO: 279224 - DNA, 103 bp, Homo sapiens; identical to SEQ ID NO: 227856
  chr1:209743000-209743103
  hyper

SEQ ID NO: 279225 - DNA, 113 bp, Homo sapiens
  chr1:209849317-209849430
  hyper
tccaaccggcagcacgcctcctaggaactgtgggagaccagcggagtgggagggagacgcagtagacagagacagaccgagagaggaatggagagacagagggggcgcgcgca

SEQ ID NO: 279226 - DNA, 603 bp, Homo sapiens; identical to SEQ ID NO: 197934
  chr1:209957603-209958206
  hyper

SEQ ID NO: 279227 - DNA, 109 bp, Homo sapiens
  chr1:209979378-209979487
  hyper
tcttagccaaggggcgcctggctctacccaagtagggactgcaggttcctctccccgtcccgcaccagcccttacctgcccagcccaggtgcgccgagctcacgtcagc

SEQ ID NO: 279228 - DNA, 124 bp, Homo sapiens
  chr1:209979488-209979612
  hyper
cctcgccccaggacgccgcagccttcgcatccgcccggccacgcctcccaggtgtggccacgccccccggcgttcgggattggcgagttgcaagaaatatgacactccgcgtttctgggctgcc

SEQ ID NO: 279229 - DNA, 229 bp, Homo sapiens; identical to SEQ ID NO: 227860
  chr1:210001204-210001433
  hyper

SEQ ID NO: 279230 - DNA, 42 bp, Homo sapiens; identical to SEQ ID NO: 227862
  chr1:210405541-210405583
  hyper

SEQ ID NO: 279231 - DNA, 343 bp, Homo sapiens
  chr1:210405793-210406136
  hyper
ctagggcgggagcccgagagcgcgtggggtctgggctgcgggctggagctgggcccgcgtgtccccgggcaccgggaggggaggggaggaaaaggaggagggagggcgggaagcagggaaggaggcagggggcgggctggggtgggggtgcgggaaaggcgccccgtgtgcagcctgaggagcggcggcggcggcctgagcagagggagggagggagagcgggcgcgcttgtcatgttccctctctcaccctgggggcatcctgcagaacctctcctcggaaatccacggggaaatggcaaacaggattgacgggtttcacacgctcctcgctagacagagcc

SEQ ID NO: 279232 - DNA, 290 bp, Homo sapiens
  chr1:210406189-210406479
  hyper
ggcgggacctgccgggacccttgcccgccgcgcacccgcagtcaccgccgagcgggcggccgggccgggacccgcgagtgtgcaccggcggccgggctggcgccgagcccagagcggaccagcagcagctcaagcgctgcggccgccgcctccccgctgaccccgcggtaagagccgggctgggcgcgggccgcgggggcgggagggccgggcagggtggagggcgagggccccccggggctcctgccctcgcagacgggcacccacgcggcctcccgcgcgccctcttg

SEQ ID NO: 279233 - DNA, 561 bp, Homo sapiens
  chr1:210406528-210407089
  hyper
ggagtcggggcggcgtgggggccaaggcacagctgggcgcggaggcggcgcgggcttttccctgggctagcgtgcgccgcggcgccttcaccagggcgggaaccgccgcctcctctagggctgctcgggctgccacccgcgcgcaccgagacaactccaggggcgggtggggtcagaagctctggtgagacctcatggtcctccgtggccgcttagtccctcatcgtaggggaaggggttaagtaggaggggtgcccccaggtccggatgccgcggcgcttggcaggtggggagagagggattgtggatgtcaggagcgcgcgtttgcaagaaaaaggaattgatgcagtagctgacaccttctgtcccccgccacctccgcccccgcaccctcctcccaggcagcagagctgcgctgcgggcggcggcggctcctctgtcctcagctcacctcctcggcgggctgaggctgctgcccgcctggtccacgcctccgcctctcgcttcccttcctcccctcccgcctcttcggccctagcaactttccgagtgcccagctgt

SEQ ID NO: 279234 - DNA, 144 bp, Homo sapiens; identical to SEQ ID NO: 197935
  chr1:210407459-210407603
  hyper

SEQ ID NO: 279235 - DNA, 497 bp, Homo sapiens; identical to SEQ ID NO: 227865
  chr1:210424844-210425341
  hyper

SEQ ID NO: 279236 - DNA, 254 bp, Homo sapiens; identical to SEQ ID NO: 197936
  chr1:210465689-210465943
  hyper

SEQ ID NO: 279237 - DNA, 133 bp, Homo sapiens; identical to SEQ ID NO: 197937
  chr1:210466012-210466145
  hyper

SEQ ID NO: 279238 - DNA, 221 bp, Homo sapiens
  chr1:211306898-211307119
  hyper
ttccatcacttttcccagtactttgctcagcagctgtcacgcatccttggagataagaccgagagggcgctagaaaggcccaaaaggcgtccccagaagagctctcctgttaggatggggacccatcagaccccgccccgccctgcccacctttctctgcctcggggaggctgccctgggtgcccgcgccgcggctccttagcagagctcgcgggttctgc

SEQ ID NO: 279239 - DNA, 150 bp, Homo sapiens
  chr1:211307539-211307689
  hyper
agcagcggcgcctgggccggcggcgccccctaccgggctcgtgccccaccgccggcctgcgggagaccaagctggggggctcccgcagaggcagggaagtggcgggcggccgtggaccaaggctgggacggcagcgccaccctctgggtt

SEQ ID NO: 279240 - DNA, 198 bp, Homo sapiens; identical to SEQ ID NO: 227869
  chr1:211431628-211431826
  hyper

SEQ ID NO: 279241 - DNA, 117 bp, Homo sapiens; identical to SEQ ID NO: 227870
  chr1:211434031-211434148
  hyper

SEQ ID NO: 279242 - DNA, 135 bp, Homo sapiens; identical to SEQ ID NO: 227871
  chr1:211496969-211497104
  hyper

SEQ ID NO: 279243 - DNA, 118 bp, Homo sapiens; identical to SEQ ID NO: 227872
  chr1:211499931-211500049
  hyper

SEQ ID NO: 279244 - DNA, 149 bp, Homo sapiens; identical to SEQ ID NO: 227873
  chr1:211689002-211689151
  hyper

SEQ ID NO: 279245 - DNA, 189 bp, Homo sapiens; identical to SEQ ID NO: 227874
  chr1:211750953-211751142
  hyper

SEQ ID NO: 279246 - DNA, 296 bp, Homo sapiens; identical to SEQ ID NO: 104963
  chr1:211848657-211848953
  hyper

SEQ ID NO: 279247 - DNA, 149 bp, Homo sapiens; identical to SEQ ID NO: 227876
  chr1:211872028-211872177
  hyper

SEQ ID NO: 279248 - DNA, 767 bp, Homo sapiens; identical to SEQ ID NO: 197938
  chr1:212003416-212004183
  hyper

SEQ ID NO: 279249 - DNA, 155 bp, Homo sapiens; identical to SEQ ID NO: 227878
  chr1:212209085-212209240
  hyper

SEQ ID NO: 279250 - DNA, 74 bp, Homo sapiens; identical to SEQ ID NO: 227879
  chr1:212588336-212588410
  hyper

SEQ ID NO: 279251 - DNA, 119 bp, Homo sapiens; identical to SEQ ID NO: 227880
  chr1:212781881-212782000
  hyper

SEQ ID NO: 279252 - DNA, 202 bp, Homo sapiens; identical to SEQ ID NO: 227881
  chr1:212838653-212838855
  hyper

SEQ ID NO: 279253 - DNA, 268 bp, Homo sapiens
  chr1:212873456-212873724
  hyper
ctctgaaaccccggagggaacgcgaagcccacccacgcgaggcgacgcccgggggggtggggaccaggggggcgccatgcagcctttggggtccttcggcggctgccggggaactcaggttgagaaacacagtgggtgttttggggtcggtgttttttcccggtcccatcgcggcatcttcctgcgcctcagccacgccctgcgtccgccccccggcgcgggggtcacagtcccgggggactttctccgcggcgatcagtcatccggg

SEQ ID NO: 279254 - DNA, 224 bp, Homo sapiens; identical to SEQ ID NO: 197940
  chr1:212873750-212873974
  hyper

SEQ ID NO: 279255 - DNA, 277 bp, Homo sapiens
  chr1:212874266-212874543
  hyper
ggaaccagaccagaagggcagaagtgcctaccaagtgtggtcgcttgggtcttcaggtttgtgggcagcagtgggcatggggacagtcatttccgattcctttttaagtcttaaatgagtgcacgtgccccccgccaggatttaagacccactcttgcaaaagctttgagagagcttgagtgaacttggctgcctggaggccagcgggaaagcgagcggagattcttgtctgtgtgatcagaagcttcggccaactgagaggcggggaggaagacgg

SEQ ID NO: 279256 - DNA, 43 bp, Homo sapiens; identical to SEQ ID NO: 197942
  chr1:213189228-213189271
  hyper

SEQ ID NO: 279257 - DNA, 115 bp, Homo sapiens; identical to SEQ ID NO: 197943
  chr1:214156950-214157065
  hyper

SEQ ID NO: 279258 - DNA, 155 bp, Homo sapiens
  chr1:214158625-214158780
  hyper
cgagatagggggctcgggcctcaagtcttgtccagggcagcccgagacccaggagaatgccgcagctctagcaagagaggttgccaggagcctggcctgtacgcctccccgacagtagaggacaggacacgggacagggctgcgccgaggcagct

SEQ ID NO: 279259 - DNA, 79 bp, Homo sapiens; identical to SEQ ID NO: 197945
  chr1:214159483-214159562
  hyper

SEQ ID NO: 279260 - DNA, 410 bp, Homo sapiens; identical to SEQ ID NO: 197946
  chr1:214159697-214160107
  hyper

SEQ ID NO: 279261 - DNA, 41 bp, Homo sapiens; identical to SEQ ID NO: 227889
  chr1:214160834-214160875
  hyper

SEQ ID NO: 279262 - DNA, 149 bp, Homo sapiens; identical to SEQ ID NO: 197947
  chr1:214161237-214161386
  hyper

SEQ ID NO: 279263 - DNA, 163 bp, Homo sapiens
  chr1:214162294-214162457
  hyper
gatccccgctttccgccaaaccccatccttccgatctccccaggctaaaactccggggccggtccccttgtcctttctctttgtcttgtttattatagctgcctttcttcccggctcttccaatttgcttgtcatttgcatacctttcacttctcctttttta

SEQ ID NO: 279264 - DNA, 54 bp, Homo sapiens
  chr1:214360413-214360467
  hyper
ctatttggattatttttcagcgtgtctatttggaaacattacctcgtaacattt

SEQ ID NO: 279265 - DNA, 91 bp, Homo sapiens; identical to SEQ ID NO: 197948
  chr1:214387777-214387868
  hyper

SEQ ID NO: 279266 - DNA, 295 bp, Homo sapiens; identical to SEQ ID NO: 221568
  chr1:214453830-214454125
  hyper

SEQ ID NO: 279267 - DNA, 236 bp, Homo sapiens
  chr1:214724212-214724448
  hyper
tctcgttcccaaaacgcagaagggaatggagagaggggaccagggtgtgggtttaaccacaaactccccagactgcgctcaccttccagctcgctcccgggaccagctttgcgcctcaccgcgggcagctcccaccgcgagataacacccctgcggcccggccaccccgcgccccaggctgccctgccaggcgtcccggggcgccaatcgcaagttggcgttgccagcgtctgccc

SEQ ID NO: 279268 - DNA, 44 bp, Homo sapiens; identical to SEQ ID NO: 197950
  chr1:214724487-214724531
  hyper

SEQ ID NO: 279269 - DNA, 182 bp, Homo sapiens; identical to SEQ ID NO: 197951
  chr1:214724561-214724743
  hyper

SEQ ID NO: 279270 - DNA, 427 bp, Homo sapiens; identical to SEQ ID NO: 197952
  chr1:214724786-214725213
  hyper

SEQ ID NO: 279271 - DNA, 254 bp, Homo sapiens
  chr1:214725561-214725815
  hyper
atagtccaccttatattggggaaccctccaagcaggacgtttcatgcagccaccccacaggggaaaacagaccaggagaaagtaaggtggcctcaccaagtaggcaatctcagagatctctccctagaatctctgggtactggacccggtgtcttagccttctctccctgccccctcccgccccgtaggaatgataaaaagcagcctgtgtgctgagagttggaaaatgtcgttttcccggtttgttccatgcc

SEQ ID NO: 279272 - DNA, 351 bp, Homo sapiens
  chr1:215740687-215741038
  hyper
attttgtcccgaacggtgacccctcctcccaggcaggctgcggcggcgtcggtggcagcggagcacggagaagaggcccgggcggcccggcggcctggaggccgcgaaaggtggaggccgggccgcccttgtgcaccgcaggattgacccgggaaggggcagaagctagcgagccccgcccggccgccgggaaggtgggggaagccccgtgcaccccccgccctccggccgccgccgccccgctggccctgcagccgtcgccgctgcctcgggctacagccccgggctcggcggtcccggctggggaaggagggcggcgagcgcgtccggagccgccggagatggcgggag

SEQ ID NO: 279273 - DNA, 31 bp, Homo sapiens; identical to SEQ ID NO: 226531
  chr1:215744970-215745001
  hyper

SEQ ID NO: 279274 - DNA, 619 bp, Homo sapiens
  chr1:216774194-216774813
  hyper
cacaggacacaaccgccgcgctctggttggacgcaggctgcatcctgtttcccggacacatttattcagcccaatctttcctgtctgaacacagactgttgatgataaaatagcatctcaaattatgagggagaaagagctgcttcggcgttcctccccggttctctgcctggattgggctcccgtgggttgctgaggccctcgcggaggcctaggaagcccggcagcgcgggcggcagcagcgggttggggagcaaggccggcttggaacgcgggctcctgcccactgccacccgcaggctgccccgggctcccgggcgggcgctcggccaggggctctgctcgctccatggacagctgggtggaaaggacgccccgtgaaggacacccggccgtcggaccgcgcccacccctgggcctcccaggggctccctccgcagactcccagggacttcctgggagccaccgcggagggcgctgcgcgcgtccggagccgacgccgggcttcaaacagaaaccaaagcccgctccaacgccgcgaaggaggggggctccaagcatcctagaaaagaaagctggagggagcgcatcagagacacaagtgcggataagacttaac

SEQ ID NO: 279275 - DNA, 320 bp, Homo sapiens
  chr1:216896567-216896887
  hyper
aagaaaaaaggtacctactcttcctcgtagtgcagggaaaaagattcaggaaggcaaagttctaccgaatccatgtgcgaccggcaaccattatttgtgcaccccagctataaatcaaagtttccttgacagagcacagtgcaattaacacaaatgttctcctagtgacaagcctataggcacagccagttgggaccaaagctctcacactctcctaatcaaggacttaaagccccgattggagcttattaatatgaagtagggctttacatatgcagtcccaccggcccagccgcgcagccgattggggggcctctgcc

SEQ ID NO: 279276 - DNA, 63 bp, Homo sapiens
  chr1:216896974-216897037
  hyper
actgagagtgggcagagaaaaagggagcggagaagggagcgattgaaacgctcccaatacaca

SEQ ID NO: 279277 - DNA, 105 bp, Homo sapiens
  chr1:217262878-217262983
  hyper
tcaggtgagtcgtcggggattttaaagaagccgaagccggtttctttggctatgaaagtctacaaaacccccatgcaggaacattgcacatcttacacacgcctc

SEQ ID NO: 279278 - DNA, 166 bp, Homo sapiens
  chr1:217263356-217263522
  hyper
aaataaatatctatatttttctaaaaaaaattcccggcactgtcatgatttgattgcattattgcgtttgcataattgacgcctctgggtgtgtatatatgtgtgcatatgcgtgtgatttttttcccctttaaatcctgctgctcctgccgccgccgcagccgct

SEQ ID NO: 279279 - DNA, 459 bp, Homo sapiens
  chr1:218519310-218519769
  hyper
ctgcggcacccgaccgagtaccgagcgccctgcgaagcgcaccctcctccccgcggtgcgctgggctcgcccccagcgcgcgcacacgcacacacacacacacacacacacacgcacgcacacacgtgtgcgcttctctgctccggagctgctgctgctcctgctctcagcgccgcagtggaaggcaggaccgaaccgctccttctttaaatatataaatttcagcccaggtcagcctcggcggcccccctcaccgcgctcccggcgcccctcccgtcagttcgccagctgccagccccgggaccttttcatctcttcccttttggccggaggagccgagttcagatccgccactccgcacccgagactgacacactgaactccacttcctcctcttaaatttatttctacttaatagccactcgtctctttttttccccatctcattgctccaagaat

SEQ ID NO: 279280 - DNA, 68 bp, Homo sapiens; identical to SEQ ID NO: 197958
  chr1:218520805-218520873
  hyper

SEQ ID NO: 279281 - DNA, 151 bp, Homo sapiens; identical to SEQ ID NO: 197959
  chr1:219347035-219347186
  hyper

SEQ ID NO: 279282 - DNA, 76 bp, Homo sapiens; identical to SEQ ID NO: 197960
  chr1:219347516-219347592
  hyper

SEQ ID NO: 279283 - DNA, 112 bp, Homo sapiens; identical to SEQ ID NO: 197961
  chr1:220102055-220102167
  hyper

SEQ ID NO: 279284 - DNA, 334 bp, Homo sapiens; identical to SEQ ID NO: 227910
  chr1:220267776-220268110
  hyper

SEQ ID NO: 279285 - DNA, 209 bp, Homo sapiens; identical to SEQ ID NO: 197962
  chr1:220700605-220700814
  hyper

SEQ ID NO: 279286 - DNA, 588 bp, Homo sapiens; identical to SEQ ID NO: 197963
  chr1:220701527-220702115
  hyper

SEQ ID NO: 279287 - DNA, 141 bp, Homo sapiens; identical to SEQ ID NO: 197964
  chr1:220863499-220863640
  hyper

SEQ ID NO: 279288 - DNA, 42 bp, Homo sapiens
  chr1:220864193-220864235
  hyper
gccggagggaagccgcgagttgcgagtcgtgatagaaactta

SEQ ID NO: 279289 - DNA, 254 bp, Homo sapiens
  chr1:220921312-220921566
  hyper
gagtgcagaggtttagactgtgtctttgtgtgcagaaagtcctgcagttctcacagcgacctgccagaaaaagtcgttcccaaatgtttgtaaatcctccgttgggcaacccgccttcacgttctgcggtgatcttgtcgagcgactaagcgtgcagtattagcagagaagggggtggcagagtgctggcgctgaaggtcatgttgcatgggtaactgtcgtgttgtaggggcggggaagagggaggagacact

SEQ ID NO: 279290 - DNA, 127 bp, Homo sapiens
  chr1:220922060-220922187
  hyper
acccggtgaaatcctgcaaaggggtgccggtgagcgaggctgagtgcacggccatggggctgcgcagcggcaacctgcgggacaggtacagcacagcgcgggcgcggggcagcgcggagcctgcctg

SEQ ID NO: 279291 - DNA, 83 bp, Homo sapiens; identical to SEQ ID NO: 227915
  chr1:220950173-220950256
  hyper

SEQ ID NO: 279292 - DNA, 85 bp, Homo sapiens; identical to SEQ ID NO: 197966
  chr1:220959916-220960001
  hyper

SEQ ID NO: 279293 - DNA, 88 bp, Homo sapiens
  chr1:221051885-221051973
  hyper
aacaacgaaccccacgtgatccggagatgtggtggaggggtgaggctaacatttcctacaacctcctgcaaaggatggaagcgcgtgc

SEQ ID NO: 279294 - DNA, 208 bp, Homo sapiens; identical to SEQ ID NO: 227921
  chr1:222792068-222792276
  hyper

SEQ ID NO: 279295 - DNA, 222 bp, Homo sapiens; identical to SEQ ID NO: 227922
  chr1:223254692-223254914
  hyper

SEQ ID NO: 279296 - DNA, 74 bp, Homo sapiens; identical to SEQ ID NO: 227923
  chr1:223297159-223297233
  hyper

SEQ ID NO: 279297 - DNA, 82 bp, Homo sapiens
  chr1:223302695-223302777
  hyper
ccaccggttcaccacgttgctcttgcccctagcccaccaggccctggccctcagcagcggacctgccgcggtttctggacta

SEQ ID NO: 279298 - DNA, 198 bp, Homo sapiens; identical to SEQ ID NO: 197968
  chr1:223307128-223307326
  hyper

SEQ ID NO: 279299 - DNA, 176 bp, Homo sapiens
  chr1:223537487-223537663
  hyper
ccgctgcgcgagcgagcgagacggaagcttcggcggcggcgctcggctccagctcccccgcccgcgcgctccctccccaggcgcccccgagcgggcgggtgttgggggaggacgggagcccggccgcgcgcccccgcggaggcgcccgcgcgcccgctacctgaactcgcgagcgc

SEQ ID NO: 279300 - DNA, 220 bp, Homo sapiens
  chr1:223537693-223537913
  hyper
ggtggggacggggtgagtgggggggcggggacggggcgaggggtgcgcgggcgcgcgagcacgcgcctctgccaacccagccggcgccgcggcgtggccggagactggcgagggcggggacggggaaaggggcccgccgccgcgaccaatgggaagcccgcgcgcctgcacctgtcggggcgcgaggcgccggcggccggtcttgcacacgcacgcagct

SEQ ID NO: 279301 - DNA, 212 bp, Homo sapiens
  chr1:223537946-223538158
  hyper
cctgccccggctgcgcgccagctcaggtgcccgccccggcctccgcgcggcctctggtgcccccagcccgcggcgcggcgcgggagagcgctccgccctagaactaccgccgcggcggtggctgcagacccggggcgagtgcgcggccggcagctcccaaccccagaactctcgccacagacccggttaacttgagcaccgccaattgcccg

SEQ ID NO: 279302 - DNA, 86 bp, Homo sapiens; identical to SEQ ID NO: 197969
  chr1:223538641-223538727
  hyper

SEQ ID NO: 279303 - DNA, 775 bp, Homo sapiens
  chr1:223899911-223900686
  hyper
cctctgctaactccccgggtgttttccggacggccacaactatcctagccttcttccctatgggctgcaaaggtggcctcgggttccggtgggagccccaactctggaccgcgattcgcgagcctccccggcgccgggccgcgccatcccgggagctgtccgcagatggcagcaccggccccgggtcgcggcgttcccggcgctcggcaggccgcaggatggcctggtcccgggccgggagcccagcaggccgggagcggctgaggccacaccccgcgggccgggccgcttccctccggtgaatcatcgctcgcagcggcggcgcccgcagtggccgcagcagcgcgccgggccctggccgcgccccagccgagcgcagcgcggagtcgccccgacctttctctgcgcagtacggccgccgggaccgcagcatggcgggcatcgcggccaagctggcgaaggaccgggaggcggccgaggggctgggctcccacgacagggccatcaagtacctcaaccaggactacgaggcgctgcggaacgagtgcctggaggccgggacgctcttccaggacccgtccttcccggccatcccctcggccctgggcttcaaggagttggggccctactccagcaaaacccggggcatcgagtggaagcgccccacggtaggaagcgcgcggcaggacgcgggcagggcggggtgccgggcagggcggggtgcaggccggcccgcggcgcgctggggcggggggcagcccgggtgctgcagtgg

SEQ ID NO: 279304 - DNA, 51 bp, Homo sapiens; identical to SEQ ID NO: 197971
  chr1:223936529-223936580
  hyper

SEQ ID NO: 279305 - DNA, 53 bp, Homo sapiens; identical to SEQ ID NO: 227931
  chr1:224301981-224302034
  hyper

SEQ ID NO: 279306 - DNA, 150 bp, Homo sapiens; identical to SEQ ID NO: 197972
  chr1:224302336-224302486
  hyper

SEQ ID NO: 279307 - DNA, 85 bp, Homo sapiens; identical to SEQ ID NO: 221583
  chr1:224481061-224481146
  hyper

SEQ ID NO: 279308 - DNA, 47 bp, Homo sapiens
  chr1:224528889-224528936
  hyper
ctttgggatgcagagcacaggggacccaccgccgccactgctgctcc

SEQ ID NO: 279309 - DNA, 204 bp, Homo sapiens; identical to SEQ ID NO: 197973
  chr1:224622416-224622620
  hyper

SEQ ID NO: 279310 - DNA, 34 bp, Homo sapiens; identical to SEQ ID NO: 197974
  chr1:224622766-224622800
  hyper

SEQ ID NO: 279311 - DNA, 250 bp, Homo sapiens; identical to SEQ ID NO: 197975
  chr1:224691180-224691430
  hyper

SEQ ID NO: 279312 - DNA, 234 bp, Homo sapiens
  chr1:224803483-224803717
  hyper
ttgcagggtctgggagcagagcagtaaacgcagccctaagcactgagtatgctacagtttggtaaaatccatccaagcagctttgggatccaaggcttgcactgtatccccaaccaacactaggcaacgccccaagtccccacacttcccactccgataggcgaaactgcaagaaccgggaggggcggctgcggcgtttaggcgcgaggcacacaccatacccttccgcagctt

SEQ ID NO: 279313 - DNA, 99 bp, Homo sapiens; identical to SEQ ID NO: 197977
  chr1:225117651-225117750
  hyper

SEQ ID NO: 279314 - DNA, 87 bp, Homo sapiens; identical to SEQ ID NO: 197978
  chr1:225117751-225117838
  hyper

SEQ ID NO: 279315 - DNA, 956 bp, Homo sapiens
  chr1:225614336-225615292
  hyper
cttctccaaattcatctaaacgtggcatagagcaagacgctcgaatgacgttggacagcttccttttcacacctgagccccggtagccccactaggcaaaatgcaaacaggaaccccgggccttgctccgcgccctttgcttcatgaagcaacagaaaggccaccttcctggctgtaaaggcagaagcgccttcttccccataaacatccttgggcagctcatcattcccctcctgctcgttcttctccctcttcccaggcagcctgagaaacaaaacttaaactggacttgttgcctaatctaaattaggatccctctgctcttctccgtagctccatcttctcccacacaccagttactacaatgcgtaactacagatctacacgtgtttacgtgcaaggtccccgggggcctgttcaccctggcactgcccaggcgccgcgcctcgcgctgcaggtgtccacgcgcggaccacggtatctaccgcgccctcgtgtgaacacccgaccgggccccgtaatcactctgggaaagcgccttcaacaaagccctccgaaagcaagtgctttactaagtgccccttgaggctactggcagtgcgaggctggctgtcattagaacatttttctgaaccctcaaaaaggtgaaaaagcaggaccgtgctttagcaggaacacgcacacccgcctaaatacccgatttttgagactgtccgggcgaaggaattcaacgcataggagcgagcagccatgcagtgtgcctggagaatcaccaaaccgcgacgaccacgaccctcaaagccagtgacaagcagcgcgaatctaagcccacctcggccgcagacccttccccgtcccgccaggccgccgcgccctgtcagcctcctactgcaggaccgcggggccgcctgctcatctgtcagacgggcgctcggaggggccgggagccaggctgc

SEQ ID NO: 279316 - DNA, 31 bp, Homo sapiens; identical to SEQ ID NO: 227941
  chr1:225965662-225965693
  hyper

SEQ ID NO: 279317 - DNA, 50 bp, Homo sapiens; identical to SEQ ID NO: 221589
  chr1:225998107-225998157
  hyper

SEQ ID NO: 279318 - DNA, 299 bp, Homo sapiens
  chr1:226069175-226069474
  hyper
tgttagagcccaacgaacagctaggagagacctttgcccccacactaaacaaaggagaggggcgtgtgaagggaaaaggagcctcggcttccgttcatatcccccttgaaggcacagcagacttgaggatgacctgagaggtgtcaagggagggtcagtgggtccgccacgctgtccacccctgcccttgaagaggacaccacctgcctggggctgaatgaccaaggcccctccagggcctcaggtagctagtcttatcaggtgctggaacctttgcggatttggtttcttagcagagc

SEQ ID NO: 279319 - DNA, 589 bp, Homo sapiens
  chr1:226069510-226070099
  hyper
tccccgagtccccagcctccctcctcaggactccgccaaggctgcaggaagtggtcacccaggaacagcccgaggggtggcctctgccttcctggcgtcaggagagtcggacgcttggccctttcccagcccggcctcgtatagggtccgaggagcccatagctgcactcctagttaggtgggaggtcggactccgccgacaaatcccaaagagaggggtggggaagaaggagataccagccctgaaagcgaaaagccggagaggaaagtcctgaaaagccgccaggaattcccaaggagcgcagggctggaatggaggcgctgcccggaccctctcctcccacccaatcccgcgtcgtcaccccctgcttggggtcgggggctctggggtctgcgtaggctgggagccgttccggaaccggacacctggcgcgcacgtcccgggaaaggcggagggtgcattgcccctcctcacgccccctgtcccctgtacctgcggcggcggcgtgtctggcgggacccagcagcgcggggcgtgttccgaccacttaaaagttacaaagtgaaactccggcgcctcctgcacatg

SEQ ID NO: 279320 - DNA, 289 bp, Homo sapiens; identical to SEQ ID NO: 197981
  chr1:226070382-226070671
  hyper

SEQ ID NO: 279321 - DNA, 34 bp, Homo sapiens; identical to SEQ ID NO: 227944
  chr1:226249797-226249831
  hyper

SEQ ID NO: 279322 - DNA, 35 bp, Homo sapiens; identical to SEQ ID NO: 227945
  chr1:226250417-226250452
  hyper

SEQ ID NO: 279323 - DNA, 171 bp, Homo sapiens; identical to SEQ ID NO: 197982
  chr1:226297380-226297551
  hyper

SEQ ID NO: 279324 - DNA, 52 bp, Homo sapiens
  chr1:226374595-226374647
  hyper
aactcccctcccccgcaccccatcctttcggatcccagttgctccaggtggg

SEQ ID NO: 279325 - DNA, 85 bp, Homo sapiens; identical to SEQ ID NO: 105119
  chr1:226374683-226374768
  hyper

SEQ ID NO: 279326 - DNA, 148 bp, Homo sapiens
  chr1:226497226-226497374
  hyper
tccgagtggagaacgggagggaggccccggcggggggaaagaagccctcggttctgggtcgcattgcccgagggggctctacgcaaagtgaaatactcacagttcccgaaacccacgttgcttgggcgcctccgtcccctcacttttc

SEQ ID NO: 279327 - DNA, 56 bp, Homo sapiens; identical to SEQ ID NO: 221594
  chr1:226497394-226497450
  hyper

SEQ ID NO: 279328 - DNA, 41 bp, Homo sapiens
  chr1:226736491-226736532
  hyper
cggccgcctgagctcggcgcggagcccggagcccgcagccg

SEQ ID NO: 279329 - DNA, 65 bp, Homo sapiens
  chr1:226814281-226814346
  hyper
ctgagctcctgacccgtcttccttttcttcgggcaccttgtaatgcacccgaccgtccagaaggg

SEQ ID NO: 279330 - DNA, 48 bp, Homo sapiens; identical to SEQ ID NO: 197983
  chr1:226924724-226924772
  hyper

SEQ ID NO: 279331 - DNA, 1206 bp, Homo sapiens; identical to SEQ ID NO: 197984
  chr1:226925659-226926865
  hyper

SEQ ID NO: 279332 - DNA, 70 bp, Homo sapiens; identical to SEQ ID NO: 197985
  chr1:226926951-226927021
  hyper

SEQ ID NO: 279333 - DNA, 33 bp, Homo sapiens; identical to SEQ ID NO: 197986
  chr1:227058123-227058156
  hyper

SEQ ID NO: 279334 - DNA, 71 bp, Homo sapiens; identical to SEQ ID NO: 221598
  chr1:227058816-227058887
  hyper

SEQ ID NO: 279335 - DNA, 274 bp, Homo sapiens
  chr1:227505242-227505516
  hyper
ttcaaaattcaactcgtgcaacgtaatcctgaaacgaatccggttgcatcattaatgaataaagtccgatttgcatcagcaattcacttcccgggaagaagaaaaacagaaaagggaggaaaaaaacagaatgcatagaagggggagggaaaaccaaaaatgttgctgcaaatcctcccaaccaccacttggataatgcatcagcggcaatttctccagcgggaaagggagggggcgaggtccctgaagcagcccctcggctcggagcacgcca

SEQ ID NO: 279336 - DNA, 153 bp, Homo sapiens; identical to SEQ ID NO: 197988
  chr1:227505859-227506012
  hyper

SEQ ID NO: 279337 - DNA, 716 bp, Homo sapiens; identical to SEQ ID NO: 36900
  chr1:227506042-227506758
  hyper

SEQ ID NO: 279338 - DNA, 205 bp, Homo sapiens; identical to SEQ ID NO: 197990
  chr1:227652539-227652744
  hyper

SEQ ID NO: 279339 - DNA, 477 bp, Homo sapiens; identical to SEQ ID NO: 227954
  chr1:227975252-227975729
  hyper

SEQ ID NO: 279340 - DNA, 41 bp, Homo sapiens
  chr1:227976220-227976261
  hyper
agcagggcgtccagcggagaaggcagaggaggggagatgcg

SEQ ID NO: 279341 - DNA, 34 bp, Homo sapiens
  chr1:227976621-227976655
  hyper
gtgtgtgcactgcgtggtgtgtgtacactcaggt

SEQ ID NO: 279342 - DNA, 282 bp, Homo sapiens
  chr1:228134409-228134691
  hyper
ctgcagggctcctcggcccaggcggcctctccctgcccgggcgggtgccagattcctggaccaacggggccctctgccggccagcccgccgcgcgctggcgctcaggccagagggccgggaacaggtgaccggcggagggcggcggcccggctgagggagcggcccagggcgtccaggtcgggggctgggatccgaaggccagccagggctcccagcggcggcgctcggggtaggaggctggagggtggcggggaggcccggggcgctgcctcgcacggcgc

SEQ ID NO: 279343 - DNA, 216 bp, Homo sapiens; identical to SEQ ID NO: 197992
  chr1:228134891-228135107
  hyper

SEQ ID NO: 279344 - DNA, 207 bp, Homo sapiens; identical to SEQ ID NO: 197993
  chr1:228135899-228136106
  hyper

SEQ ID NO: 279345 - DNA, 119 bp, Homo sapiens; identical to SEQ ID NO: 197994
  chr1:228136152-228136271
  hyper

SEQ ID NO: 279346 - DNA, 31 bp, Homo sapiens; identical to SEQ ID NO: 227959
  chr1:228193571-228193602
  hyper

SEQ ID NO: 279347 - DNA, 149 bp, Homo sapiens
  chr1:228193977-228194126
  hyper
ggggtcaatccctgcgccacagagagagtcccactcgtccccagctgtgacccacagacgcgtggctgcaccttggaggtccacctggccgctgtccccattgcaggctgcacccatcccggaccctttctatccgccgaaggcgcagg

SEQ ID NO: 279348 - DNA, 104 bp, Homo sapiens; identical to SEQ ID NO: 197995
  chr1:228225422-228225526
  hyper

SEQ ID NO: 279349 - DNA, 63 bp, Homo sapiens; identical to SEQ ID NO: 197996
  chr1:228225939-228226002
  hyper

SEQ ID NO: 279350 - DNA, 112 bp, Homo sapiens
  chr1:228247886-228247998
  hyper
ggcgtggcttctgcaggaatcccggctccagagcaggaaattcagcccaccagccacctcatccccaaccccctgtaaggttccatccacccctgcgtcgagctgggaaggt

SEQ ID NO: 279351 - DNA, 33 bp, Homo sapiens
  chr1:228248269-228248302
  hyper
ccgggctcccacaccgtcaggtactcctgccag

SEQ ID NO: 279352 - DNA, 117 bp, Homo sapiens; identical to SEQ ID NO: 227966
  chr1:228270662-228270779
  hyper

SEQ ID NO: 279353 - DNA, 302 bp, Homo sapiens
  chr1:228444468-228444770
  hyper
acaaggacgggaagaagctgagcttcagctcgaaagtgcgcatggaggctgtgggctgcacacggaggctggtggtgcagcaggcgggccaggcggtcgccggggagtacagctgcgaggcggggagccagcggctctccttccacctgcacgtggcaggtcagtgctttgggggttggagagtgactttgtgtggaggtgatgatgagactggctgatggactccacggcctccagtgccctttccatgagactccacctctccacttctccatgccctcacttcccggtttcataccctt

SEQ ID NO: 279354 - DNA, 215 bp, Homo sapiens
  chr1:228566260-228566475
  hyper
tgccttccccacacccctcccgccgctgggccacgtgctgagcctatgtccgtcccaggggccggccctgcgcgtccagctgcctgcagtgcccgtggctaacagaggagggcccggcctgttcgcggcccgcgcccgtgaccttccctaccgcgcggctgcgcgtcttcgtgcgcaatcgcgagaagagacgcgcgctgctgtacaagaggcac

SEQ ID NO: 279355 - DNA, 75 bp, Homo sapiens
  chr1:228566547-228566622
  hyper
cgccaataaaaacgcacagccgggcgagaagtcttccgtctcgttgcattattttcttttggggaggagagggag

SEQ ID NO: 279356 - DNA, 51 bp, Homo sapiens
  chr1:228566672-228566723
  hyper
gctgtgtttgggcctgtgagccccttagaaggcgtccttaggggtcgctcc

SEQ ID NO: 279357 - DNA, 87 bp, Homo sapiens
  chr1:228566969-228567056
  hyper
ggcttcagagtcgctggcgcgtggcctcggtgaaaagcaacccagtgtttgagattccatgggcaatgactacgctggccgagcccc

SEQ ID NO: 279358 - DNA, 250 bp, Homo sapiens; identical to SEQ ID NO: 227969
  chr1:228594015-228594265
  hyper

SEQ ID NO: 279359 - DNA, 44 bp, Homo sapiens; identical to SEQ ID NO: 197998
  chr1:228644857-228644901
  hyper

SEQ ID NO: 279360 - DNA, 120 bp, Homo sapiens; identical to SEQ ID NO: 197999
  chr1:228646026-228646146
  hyper

SEQ ID NO: 279361 - DNA, 253 bp, Homo sapiens
  chr1:228646941-228647194
  hyper
ttggcgtgcgccgtgcaggtgaggagtgcgggtcacctccccccaaaagaccctgtgccaacctccccaaccctacccgccccccatgggcgaggccagacgtggcgcaagaccacgggctctgaggccatgggtgttgtcactttcccctggcggtggtgcctggctctgcatttgcttaagacttttccatccctgcctggaccagacagacatgtttagatttaagcaatgaacattccgggaggatatt

SEQ ID NO: 279362 - DNA, 117 bp, Homo sapiens
  chr1:228647317-228647434
  hyper
ttatgggagtgggggtgggggaaggggttaatttaggaggaaaagaattccctttttctgagcaaatgtagctgcctccctctttagccacattattttctgcgaggcgttagcaac

SEQ ID NO: 279363 - DNA, 156 bp, Homo sapiens
  chr1:228652629-228652785
  hyper
attgaggtcttctctggctgtgaggcacatacatgggggcattttttttttctgaggcccacagctagggaggggtagttagtgcttatttagaaggggaggtggcggtgggaatggcagtttgcaacgaccttaacccttcgtttcttgcccttc

SEQ ID NO: 279364 - DNA, 178 bp, Homo sapiens; identical to SEQ ID NO: 227980
  chr1:228674803-228674981
  hyper

SEQ ID NO: 279365 - DNA, 94 bp, Homo sapiens; identical to SEQ ID NO: 227981
  chr1:228783178-228783272
  hyper

SEQ ID NO: 279366 - DNA, 708 bp, Homo sapiens; identical to SEQ ID NO: 198001
  chr1:228783332-228784040
  hyper

SEQ ID NO: 279367 - DNA, 40 bp, Homo sapiens; identical to SEQ ID NO: 105183
  chr1:228784106-228784146
  hyper

SEQ ID NO: 279368 - DNA, 112 bp, Homo sapiens; identical to SEQ ID NO: 198003
  chr1:228870693-228870805
  hyper

SEQ ID NO: 279369 - DNA, 328 bp, Homo sapiens; identical to SEQ ID NO: 198004
  chr1:228870899-228871227
  hyper

SEQ ID NO: 279370 - DNA, 269 bp, Homo sapiens; identical to SEQ ID NO: 198005
  chr1:228871596-228871865
  hyper

SEQ ID NO: 279371 - DNA, 255 bp, Homo sapiens
  chr1:228872003-228872258
  hyper
tgccaaaaaaaaaaaaaaaaaaaatctcacaatttaagcaacagataagtaggagtgaaacaggttgagttcagggtgcccggtcagtttgttgcatagagcaaagtttcctgagggcgacgtcgctggcgccgctgcagagtttcaatcagaaggtgacgcgcaggtgcctttacctgagcgtcgctcctttgcttttaggcggctcagctcacaaggggcgtctccgctttaaagagccgcggagacgccggg

SEQ ID NO: 279372 - DNA, 107 bp, Homo sapiens
  chr1:229543603-229543710
  hyper
gttcaaaccaaggtaagagctatcagatccagccagatctgcttcctaagcctggccagggccctaagcacccccacccacacgctcagaggcgggcgacgccgagg

SEQ ID NO: 279373 - DNA, 477 bp, Homo sapiens; identical to SEQ ID NO: 227989
  chr1:229643803-229644280
  hyper

SEQ ID NO: 279374 - DNA, 156 bp, Homo sapiens; identical to SEQ ID NO: 227990
  chr1:229694643-229694799
  hyper

SEQ ID NO: 279375 - DNA, 94 bp, Homo sapiens; identical to SEQ ID NO: 227991
  chr1:230202416-230202510
  hyper

SEQ ID NO: 279376 - DNA, 219 bp, Homo sapiens; identical to SEQ ID NO: 198009
  chr1:230223230-230223449
  hyper

SEQ ID NO: 279377 - DNA, 633 bp, Homo sapiens; identical to SEQ ID NO: 198010
  chr1:230561973-230562606
  hyper

SEQ ID NO: 279378 - DNA, 163 bp, Homo sapiens; identical to SEQ ID NO: 198011
  chr1:231053145-231053308
  hyper

SEQ ID NO: 279379 - DNA, 32 bp, Homo sapiens; identical to SEQ ID NO: 227994
  chr1:231114517-231114549
  hyper

SEQ ID NO: 279380 - DNA, 584 bp, Homo sapiens
  chr1:231175065-231175649
  hyper
ggggctgagggacccggccgcctccctcgcccggggtgcgcgtctgctttcgcagccatctgtgcgccggggccatcccgcggtaatcggatcacggacgcgcggcctggggcgccggaaagggggccgggctgttccaatctgctgtctacactggcggcggacaaaagttgtcctcttcgtggtaggaaaacgcaatcgcgttaatccgttgggccgctgtgaaagcctttcccccaccgggaaggtctgtttcactcggggagaggtgacaaggccgcccccgcccccaggccaggcacgaaccccgcacagcgcttccgggcgcccaggtttccgagccagcggggccggactgagggcgccgggcataagaaagccgccctctgcgcgcggggctctcccgcgggggttccaatcgtgggcacggagcacgcgagaaaaatgggggtcgttgggaggacggcgccggcgcctggggcggaggagcccgaaagggcgggtgggcgcggggacttccggacagagcgcggtccccgcgaactttcccgggacggcgagcccggccgggaagagccccagct

SEQ ID NO: 279381 - DNA, 707 bp, Homo sapiens; identical to SEQ ID NO: 36954
  chr1:231175692-231176399
  hyper

SEQ ID NO: 279382 - DNA, 228 bp, Homo sapiens; identical to SEQ ID NO: 198012
  chr1:231297569-231297797
  hyper

SEQ ID NO: 279383 - DNA, 411 bp, Homo sapiens; identical to SEQ ID NO: 227997
  chr1:231376707-231377118
  hyper

SEQ ID NO: 279384 - DNA, 34 bp, Homo sapiens; identical to SEQ ID NO: 227998
  chr1:231473772-231473806
  hyper

SEQ ID NO: 279385 - DNA, 91 bp, Homo sapiens; identical to SEQ ID NO: 198013
  chr1:231664200-231664291
  hyper

SEQ ID NO: 279386 - DNA, 102 bp, Homo sapiens; identical to SEQ ID NO: 228000
  chr1:231762650-231762752
  hyper

SEQ ID NO: 279387 - DNA, 108 bp, Homo sapiens; identical to SEQ ID NO: 228001
  chr1:231763012-231763120
  hyper

SEQ ID NO: 279388 - DNA, 169 bp, Homo sapiens; identical to SEQ ID NO: 198014
  chr1:232765026-232765195
  hyper

SEQ ID NO: 279389 - DNA, 162 bp, Homo sapiens; identical to SEQ ID NO: 198015
  chr1:232765375-232765537
  hyper

SEQ ID NO: 279390 - DNA, 889 bp, Homo sapiens; identical to SEQ ID NO: 105229
  chr1:232765595-232766484
  hyper

SEQ ID NO: 279391 - DNA, 219 bp, Homo sapiens; identical to SEQ ID NO: 198017
  chr1:232941034-232941253
  hyper

SEQ ID NO: 279392 - DNA, 345 bp, Homo sapiens; identical to SEQ ID NO: 198018
  chr1:232941254-232941599
  hyper

SEQ ID NO: 279393 - DNA, 277 bp, Homo sapiens; identical to SEQ ID NO: 228006
  chr1:233086110-233086387
  hyper

SEQ ID NO: 279394 - DNA, 330 bp, Homo sapiens
  chr1:233749401-233749731
  hyper
acactacacgcgcgcgaacacacacacacacacacgcacacgccgcgcgcggtcagctagagtttggctactggacccaggaagggagggagcgggaggagctggtggctgtcgggtcggggtctgggcgccaccgagcgcccgccccacctctggagtgcgcagaaggcggtgcgtcccgggccccggcagcccagcccaggcgctctggccaagtttgcgcgcggtctccgctgactctcgggttacctgagccggcaaccacgtcagcgccacatcatctgggctttttatattgcaaggaaacaggaaaagaaggaagaaaaacat

SEQ ID NO: 279395 - DNA, 314 bp, Homo sapiens; identical to SEQ ID NO: 198020
  chr1:233749768-233750082
  hyper

SEQ ID NO: 279396 - DNA, 180 bp, Homo sapiens; identical to SEQ ID NO: 198021
  chr1:233750511-233750691
  hyper

SEQ ID NO: 279397 - DNA, 116 bp, Homo sapiens
  chr1:234350341-234350457
  hyper
ccgggggtccctgcaccctagccggggaatgctgccaccctgaggggggctgtctggctgcggggcgccggggctgggggtactgctcccccaggacgcggctccgcagtgcagag

SEQ ID NO: 279398 - DNA, 516 bp, Homo sapiens; identical to SEQ ID NO: 228013
  chr1:234508999-234509515
  hyper

SEQ ID NO: 279399 - DNA, 187 bp, Homo sapiens
  chr1:234736239-234736426
  hyper
ccattctgaacaacgatacaaagtgaaaaaataaattttttaaaaaagaaagggaaaaactacaatttgaccattctgaccagcctccttgttccaactggcctcttgatttgtataaagataatggggtccggcggcccccttgatgcatgaattgcacgctgggcataatgaacttattgtgcga

SEQ ID NO: 279400 - DNA, 138 bp, Homo sapiens; identical to SEQ ID NO: 228015
  chr1:234743048-234743186
  hyper

SEQ ID NO: 279401 - DNA, 211 bp, Homo sapiens; identical to SEQ ID NO: 228016
  chr1:234744132-234744343
  hyper

SEQ ID NO: 279402 - DNA, 190 bp, Homo sapiens; identical to SEQ ID NO: 228017
  chr1:234812047-234812237
  hyper

SEQ ID NO: 279403 - DNA, 141 bp, Homo sapiens; identical to SEQ ID NO: 198023
  chr1:234828214-234828355
  hyper

SEQ ID NO: 279404 - DNA, 195 bp, Homo sapiens; identical to SEQ ID NO: 228018
  chr1:235257187-235257382
  hyper

SEQ ID NO: 279405 - DNA, 284 bp, Homo sapiens; identical to SEQ ID NO: 228019
  chr1:235292117-235292401
  hyper

SEQ ID NO: 279406 - DNA, 110 bp, Homo sapiens; identical to SEQ ID NO: 228020
  chr1:235491613-235491723
  hyper

SEQ ID NO: 279407 - DNA, 344 bp, Homo sapiens; identical to SEQ ID NO: 228021
  chr1:235530666-235531010
  hyper

SEQ ID NO: 279408 - DNA, 188 bp, Homo sapiens; identical to SEQ ID NO: 228022
  chr1:235667334-235667522
  hyper

SEQ ID NO: 279409 - DNA, 64 bp, Homo sapiens; identical to SEQ ID NO: 198024
  chr1:235667932-235667996
  hyper

SEQ ID NO: 279410 - DNA, 95 bp, Homo sapiens; identical to SEQ ID NO: 198025
  chr1:235811920-235812015
  hyper

SEQ ID NO: 279411 - DNA, 184 bp, Homo sapiens
  chr1:235813161-235813345
  hyper
gaccacgcgggcctgggggcgcaggcggaccctcccccggccctggacgctgggggcttctgctcggccccctgtgccgtgggggcccagactggggaagggagagccggcgactctgcgaccctcgcccccgttccacgctggccgcgcccactccgccgcggggtctcgcccgggaaatccc

SEQ ID NO: 279412 - DNA, 45 bp, Homo sapiens; identical to SEQ ID NO: 198027
  chr1:236305443-236305488
  hyper

SEQ ID NO: 279413 - DNA, 85 bp, Homo sapiens; identical to SEQ ID NO: 228028
  chr1:236305805-236305890
  hyper

SEQ ID NO: 279414 - DNA, 709 bp, Homo sapiens
  chr1:236444198-236444907
  hyper
acctctctgaaggcgaaaggatctggtcagctaagcctcagatttctagcacactgagaacacttgtaatcatcgcttcacatcaacaaccagccagcacctcacgactgccagagccagagcctccatccacgagccacaacgccccactcagacccccccagtctcgtattgggacttacctggcgatgccacttggcagacacagctcagctgggtaaaaataaagcaatcttgagcaagggaaggtgctcgaggaagagtaaaagcccagaaagctctagtccgacagttcgagtgaagtcttgccccctcccaatcccctgcgcctggcggggcctcgggggtctgcggagtgcccccaactctcagtctccctccctcactaactcctgaagggaaggacgtcaccgtttctctgggcgctcgctcccttcgcaagacagccgaggtggttcatgcccgtcccatctcccgccacactcccagccgcttaacacatccgagaggaaaaaacgaaaacagctcagggggaccgtcaccatcttcctcttttgactgccattacccggagtgtcgccgtccccccaccctgcgggcggttcgcagatgtttcccgcactggacggtcaggtctctgctccccgggttttctgctcgccagaaatcacctcttttctggcccggccctgcccggccctccccgcgt

SEQ ID NO: 279415 - DNA, 450 bp, Homo sapiens; identical to SEQ ID NO: 198030
  chr1:236445121-236445571
  hyper

SEQ ID NO: 279416 - DNA, 106 bp, Homo sapiens; identical to SEQ ID NO: 198031
  chr1:236850212-236850318
  hyper

SEQ ID NO: 279417 - DNA, 36 bp, Homo sapiens; identical to SEQ ID NO: 198032
  chr1:237205188-237205224
  hyper

SEQ ID NO: 279418 - DNA, 166 bp, Homo sapiens
  chr1:238027762-238027928
  hyper
gcctgacctgcgcacgtgtccgggagagcgctgacctccgggccaaggccactgtgtactggccatttgccaaagcggagctggcctccgcgcggttcccaattaaccaaagccacgtggatttgtcatcagagcgttcaagtgacacggccgggccctgcgcgtg

SEQ ID NO: 279419 - DNA, 220 bp, Homo sapiens
  chr1:239549364-239549584
  hyper
gggaaaagtcaagtcgtcctctattacactgctctgcagaaacagactcactaaatgtcaaaaagtagatgcatcagactgttccttagagaaaggtttgccatggagtcgtatattgtaactgagctgaagttcactcatcgataagttgtgcccaaggaatcgaattccttccagtccttctaagcagtccagggaaaccaatttaaaagcgaacaca

SEQ ID NO: 279420 - DNA, 219 bp, Homo sapiens; identical to SEQ ID NO: 198034
  chr1:239549815-239550034
  hyper

SEQ ID NO: 279421 - DNA, 199 bp, Homo sapiens; identical to SEQ ID NO: 198035
  chr1:239551218-239551417
  hyper

SEQ ID NO: 279422 - DNA, 34 bp, Homo sapiens; identical to SEQ ID NO: 198036
  chr1:240775455-240775489
  hyper

SEQ ID NO: 279423 - DNA, 433 bp, Homo sapiens
  chr1:241519638-241520071
  hyper
ctctctattcccccgggtctcccacacagagccggagtatatgcttcgcctactttcacctgcctgcgctgccagccaccggctgctctcctttctccccacttcgcttcggaagtccggaggtaatcctgcctaatttttgcaagaagacaccagaatatgtcccggcaacaagaactagtgggaggtcaagccttcaggccattttacccgggtcaccgtgggtaaaagcctaactgcagaagcctccagagcaaccagccaaagaggagaaaacaggcaagcccctgctccccttgctcgctctcacggcagcagcaaatggcaggcgagcctgtgccccgcgccgcggcggccgccggagccgggcagcagtttcagcaccgtggaccgcggggtgcgcgcggcgcccgtagcccagccccggcgcggg

SEQ ID NO: 279424 - DNA, 50 bp, Homo sapiens; identical to SEQ ID NO: 198037
  chr1:241520533-241520583
  hyper

SEQ ID NO: 279425 - DNA, 147 bp, Homo sapiens; identical to SEQ ID NO: 198038
  chr1:241520612-241520759
  hyper

SEQ ID NO: 279426 - DNA, 97 bp, Homo sapiens; identical to SEQ ID NO: 198039
  chr1:241520789-241520886
  hyper

SEQ ID NO: 279427 - DNA, 33 bp, Homo sapiens; identical to SEQ ID NO: 221633
  chr1:241588237-241588270
  hyper

SEQ ID NO: 279428 - DNA, 306 bp, Homo sapiens; identical to SEQ ID NO: 228040
  chr1:241682870-241683176
  hyper

SEQ ID NO: 279429 - DNA, 185 bp, Homo sapiens; identical to SEQ ID NO: 228041
  chr1:242011573-242011758
  hyper

SEQ ID NO: 279430 - DNA, 93 bp, Homo sapiens
  chr1:242161830-242161923
  hyper
aactgggtcatggtcagctcctgcgggaccaggaacttggttttgtccagcgggggcaggaacgtctccctggggtagcgctccactaccacc

SEQ ID NO: 279431 - DNA, 159 bp, Homo sapiens
  chr1:243646220-243646379
  hyper
gggcgtgtgtggttcgcaggctgtggggggcttcttgcagcgggggctgctgcctaaacagactccgcgggccccatgatggcaaaccccctcgccccgttcatgacttaatgcctcctagaagaaaaggctaaaaacaagacacacagaacaagaaat

SEQ ID NO: 279432 - DNA, 856 bp, Homo sapiens
  chr1:244012279-244013135
  hyper
agaacataaacagtaaataccggtattggaaaaacctggccccaacgagattctttatctctaggctaactgtagattcccgggaaatcccaaacaagggatggtgaccccgcctcggcgtcagggtcaacacagcaaccagctaggcttcaactttgggctctgaagggccccaccggcatcatggctgatgcggaccgatgcgccggaggaggtggacaaggaagaggctggtctgtttacttgcagccagagctgccgccgccgccagcagcgacagcatcactggatcagccaaacccagcatcttccgcacatttctattcttagcacacaactcccaagcggatcaaaaccccactactattaaaaacacagacaagcacgttacccacctcccacacacacacccccccccccaccccaccagtgccgtcttttcctgcgcgccagtggcggggaagggtgggggaaggaaggagaccccggggacgcctgtgcatcctcgccttcaccccaccccacgcgcagacagcctcagcgccagggcgcgcggcagacggctccctccccccaacccaaacacactgacaccggcgctccacgcgttatataacctcgccgccgcccccggtccaggcgggcgccccctccccacgccgcgcggcccgggcggggaggggcgaggggaaggagcgagagttgcgcagacagcaggcgccgggccggggcagcccagacacagacggtaccgctaggccgggaacacccctcccccggcccgctgcgcaccgccgccccccagctttccccggaaagcggggggtgtcggtgtcaaccgcgctgggcatccccc

SEQ ID NO: 279433 - DNA, 514 bp, Homo sapiens; identical to SEQ ID NO: 198041
  chr1:244013707-244014221
  hyper

SEQ ID NO: 279434 - DNA, 35 bp, Homo sapiens
  chr1:244014671-244014706
  hyper
actacgaagagaccgtttctttattttgaagtcag

SEQ ID NO: 279435 - DNA, 168 bp, Homo sapiens
  chr1:244080795-244080963
  hyper
tgtcatcaaggggcaggctgctcaggatgcaaggtaaccagagctttcctcggactgcttcagtctttggggacgtggggtcaccctaatccttcctgtttatattgtgaacgcgtaggcagcgagacttaagctctgcgtcggtcaataagcatcacgacgcaggca

SEQ ID NO: 279436 - DNA, 96 bp, Homo sapiens; identical to SEQ ID NO: 228048
  chr1:244211309-244211405
  hyper

SEQ ID NO: 279437 - DNA, 65 bp, Homo sapiens; identical to SEQ ID NO: 228049
  chr1:244615535-244615600
  hyper

SEQ ID NO: 279438 - DNA, 150 bp, Homo sapiens; identical to SEQ ID NO: 228051
  chr1:244998150-244998300
  hyper

SEQ ID NO: 279439 - DNA, 95 bp, Homo sapiens; identical to SEQ ID NO: 228052
  chr1:245028045-245028140
  hyper

SEQ ID NO: 279440 - DNA, 197 bp, Homo sapiens; identical to SEQ ID NO: 228053
  chr1:245134410-245134607
  hyper

SEQ ID NO: 279441 - DNA, 122 bp, Homo sapiens; identical to SEQ ID NO: 228054
  chr1:245474020-245474142
  hyper

SEQ ID NO: 279442 - DNA, 60 bp, Homo sapiens; identical to SEQ ID NO: 228055
  chr1:246730174-246730234
  hyper

SEQ ID NO: 279443 - DNA, 910 bp, Homo sapiens
  chr1:246887311-246888221
  hyper
tgctccacccccacgtgcaacaaggacaaccggctgccgcctccagcttccagcagggctagaagatgcgctgcccggggcggccagagccctgcagaacaaaccgccgcacggaattaggggccgccgtccgcgcctgccaggcttggaagcggactcgcccccagggccaccgccctaggaaacctcccgtcggaagcctcccaagcaagccgctcacccgcggctcccgcgcgaggcggcgtgggcgtgggcgcggccctggcgcggcggcgcgcgcggggtgaagggagcccggcgcgctggctgcggcgacggcggccgttgctgcgccgggtactggggtcgctgcctgaggcgcaggcgccgtggactccacccgccccggggcctgggctcgctgtggactcgtcatggcgaccgagcagaggcctttccacctggtggtgttcggcgcgtctggcttcaccggccagttcgtgaccgaggaggtggcccgggagcaggtggacccggagcggagctcccgcctgccctgggccgtggcgggccgctcccgggagaagctgcagcgggtgctggagaaggcggccctgaagctgggtacagcggcggggcgggacggggctgcgcgggcggctgggccggggaccccgcatcgccccaaacgagcgtttctcccgcagggatgcgccctacgtgtccccgagccctgcgtgaggacaagaagaggagagggagagatgtttcaaatactgccatagctttgtcccacctccttaactatatgtgtgtgtgcgcgtgcgtgtataatatacacacacatttttttttctttccttctcctctttcccgctttttgcatttctgcctcagtttggggagctcccctggcgaaatggtcaagaac

SEQ ID NO: 279444 - DNA, 199 bp, Homo sapiens; identical to SEQ ID NO: 198043
  chr1:247170806-247171005
  hyper

SEQ ID NO: 279445 - DNA, 329 bp, Homo sapiens; identical to SEQ ID NO: 198044
  chr1:247241959-247242288
  hyper

SEQ ID NO: 279446 - DNA, 837 bp, Homo sapiens; identical to SEQ ID NO: 228059
  chr1:247267050-247267887
  hyper

SEQ ID NO: 279447 - DNA, 226 bp, Homo sapiens
  chr1:247274600-247274826
  hyper
actacgcaccctcggcccccagcctcgcgccagacacggcgccgcagccccagcgcgcgggggtggagagagccgcggggcaggggcgccctgtgggtcccgcggtcacgccggatcgctcggccgcagtagtggggcccgggcgggcgcagggccgggctacggggaccggcaggcgcgcgaagggcccggggcgccgggaggactcgggttcacagtcgctccc

SEQ ID NO: 279448 - DNA, 516 bp, Homo sapiens
  chr1:247275030-247275546
  hyper
aggcaccgcgcgcggtgcggggagcggccggggcggagggacccagcgagcccggggagggccggggtcctgcaggcggaggcgccggggagggtgtggggtcagggcccgcgcggcgctgcttctgctcccgaagactgcggtcggagctggcgcagcggagggtgcggctcccggagcgcgaggccgcagcggggagtgaccggaagtggcctctgcagccgcgtccctgggcccatgtcagggacggctctggctgaagcaggaggacggcgtttggagggtggggtgggcgcgtcctctcggcggcccgcgtggactgacagccaccactgcccccacgctgccctcgtgcccgcggttctaagaagtcgaatgccaggcggaggcgacggggcaaatggcccaggcttgggaggccgctggcggtccaggtcccgcaggatgtggaggattttcgaggagggcccaggggctggagggtgcacaggcccatcttgcacaggagccacggcc

SEQ ID NO: 279449 - DNA, 37 bp, Homo sapiens; identical to SEQ ID NO: 228062
  chr1:247494236-247494273
  hyper

SEQ ID NO: 279450 - DNA, 641 bp, Homo sapiens
  chr1:247495198-247495839
  hyper
acacttcctgctccgctctaggactggggaggtctccgcatctcagtggttcgctcccccgccccccggccgaggtgtgcgctgggggtgacatccgacacccccggcccgccccgctccgcgcgcgcctgggcctggccgccgggccgggggctttgtgggtcagccacgtcgccgcgcccgggcttccccgcgggcccgccggtccggaaggtcggcccggggctcttttctccgctgttctccttctctggcgcccccaggacacgcggccagtggacgcccggaacggccgaccgggagtcgcggctggggatggaagctggaattgggggtgcgggatggagcggagagaggaggccccgcgcgccgtcggccgcctcatttcagactcccctgcgaccccccccccgccgccagccgaagcccgggccgcccagcccctcctgccgctgcgggacgccgaaggtagcgctcacatccgcgccttccgggcctggcgcccacgtgcggagtccccgggttaggaaaggccgcgcatccggaggccacgcagagcctcggggcttgcgcagaggggctgcggtgagtcctgaccctgagtgggggtcacggggctcgttgctcgctgaagtgaacac

SEQ ID NO: 279451 - DNA, 137 bp, Homo sapiens; identical to SEQ ID NO: 228064
  chr1:247536197-247536334
  hyper

SEQ ID NO: 279452 - DNA, 205 bp, Homo sapiens; identical to SEQ ID NO: 228066
  chr1:248406538-248406743
  hyper

SEQ ID NO: 279453 - DNA, 375 bp, Homo sapiens; identical to SEQ ID NO: 228067
  chr1:249120445-249120820
  hyper

SEQ ID NO: 279454 - DNA, 234 bp, Homo sapiens; identical to SEQ ID NO: 198045
  chr1:249167654-249167888
  hyper

SEQ ID NO: 279455 - DNA, 542 bp, Homo sapiens
  chr2:45390-45932
  hyper
cacagccccgcacacggccagccccgcccccagccttctgggcacacacctcgggtccggctctgctcctggctgggggtctccttggccttcttacaggtgtacagccacttgatgatgcgggcgttcctctcgatgaccgaagtggtgctgggcacctgctctatcagctcctcctcctgcagcccctcgtcgtcgccgccgctgtgccgggagaagccgctgccggaggtggcgacgctcacgctgcgcaccttgagggtcacacagtccgaccccgcggtgaagttctccctccccagggcctccaccacctcggggtccaggccgcagtactggaagaaggtgtcagactcggccaaggcagcggaatagcgggagctgaggtccgactgtgagcgctgcagcccccgacgcctcaccacccgcggctctggcccagggggcgcggccgggacactggagggcgccgcggaccgcgcggctggggctggggtctcggggattgcggggtccgccgcggggccaggagtggtcgggac

SEQ ID NO: 279456 - DNA, 245 bp, Homo sapiens
  chr2:45969-46214
  hyper
cggggcaccggcgccttgtccttacccggcccctggaagagcttcttcaccaggcttgccctggggccgtcggcgcccgatcctcgcacgaattcgcatttctgccggtagatgatcagcgagtccggtctcaacggcttccgcgcaatagccctgcgcgccaccggggccggggcgcgggccgggggcccagggtcgttccccgggcacttgatcgcccccgggccgctgccctcggaagcgac

SEQ ID NO: 279457 - DNA, 146 bp, Homo sapiens; identical to SEQ ID NO: 198048
  chr2:46450-46596
  hyper

SEQ ID NO: 279458 - DNA, 541 bp, Homo sapiens; identical to SEQ ID NO: 198049
  chr2:46668-47209
  hyper

SEQ ID NO: 279459 - DNA, 272 bp, Homo sapiens; identical to SEQ ID NO: 198050
  chr2:263891-264163
  hyper

SEQ ID NO: 279460 - DNA, 267 bp, Homo sapiens; identical to SEQ ID NO: 198051
  chr2:264204-264471
  hyper

SEQ ID NO: 279461 - DNA, 344 bp, Homo sapiens; identical to SEQ ID NO: 228072
  chr2:264740-265084
  hyper

SEQ ID NO: 279462 - DNA, 156 bp, Homo sapiens
  chr2:287344-287500
  hyper
ggaaaccaccgacccgcgccgcagctcacgcgcgccagaaggagaccaggcgcttctccgccaggcctcatgcgcggacctattgctgctattttctttttcttaaaaaaaaaaaaaaaaaaaaaaggaatcctgctgttcagtggtcaaaattga

SEQ ID NO: 279463 - DNA, 91 bp, Homo sapiens
  chr2:289132-289223
  hyper
ctttaccaggaactcggttctgtttttgtctaaatgtagatcttgggctattaaaaagggagctgcctgattgcttcgacatttaataagt

SEQ ID NO: 279464 - DNA, 239 bp, Homo sapiens; identical to SEQ ID NO: 198052
  chr2:677555-677794
  hyper

SEQ ID NO: 279465 - DNA, 101 bp, Homo sapiens; identical to SEQ ID NO: 198053
  chr2:945451-945552
  hyper

SEQ ID NO: 279466 - DNA, 55 bp, Homo sapiens; identical to SEQ ID NO: 228079
  chr2:1610486-1610541
  hyper

SEQ ID NO: 279467 - DNA, 121 bp, Homo sapiens; identical to SEQ ID NO: 228082
  chr2:1754708-1754829
  hyper

SEQ ID NO: 279468 - DNA, 143 bp, Homo sapiens; identical to SEQ ID NO: 228084
  chr2:3307440-3307583
  hyper

SEQ ID NO: 279469 - DNA, 236 bp, Homo sapiens; identical to SEQ ID NO: 228085
  chr2:3381720-3381956
  hyper

SEQ ID NO: 279470 - DNA, 118 bp, Homo sapiens; identical to SEQ ID NO: 228086
  chr2:3383399-3383517
  hyper

SEQ ID NO: 279471 - DNA, 175 bp, Homo sapiens; identical to SEQ ID NO: 198054
  chr2:3465089-3465264
  hyper

SEQ ID NO: 279472 - DNA, 42 bp, Homo sapiens
  chr2:5506156-5506198
  hyper
atgggagccgcaccgccctcccctttcggtgaggcagcgccc

SEQ ID NO: 279473 - DNA, 186 bp, Homo sapiens
  chr2:5813468-5813654
  hyper
acagcttgatcagccgcccctgtaaccgggtggggcatccccgccctccgctgccctggaaggagccctcggctgggtcagggccgcgggagccctggccaggagccacctccgccaggcgcggccgctcccgggggctcctcctgcgtccccagcgcccacgccccgccccacctggctccgctg

SEQ ID NO: 279474 - DNA, 168 bp, Homo sapiens
  chr2:5813907-5814075
  hyper
gagcagctgagccaaaaacagaggggccgggggtgggggacagaggggtcatcactgcctggacagagctgcgtcctgcgcaggaccggcagcccgaggcggagacgaagggggcccgcagggactcctggccttgcgtcttgggagagcgcacgctggcctgcgcta

SEQ ID NO: 279475 - DNA, 35 bp, Homo sapiens; identical to SEQ ID NO: 198055
  chr2:5832394-5832429
  hyper

SEQ ID NO: 279476 - DNA, 60 bp, Homo sapiens; identical to SEQ ID NO: 198056
  chr2:5832655-5832715
  hyper

SEQ ID NO: 279477 - DNA, 95 bp, Homo sapiens; identical to SEQ ID NO: 198057
  chr2:5834133-5834228
  hyper

SEQ ID NO: 279478 - DNA, 65 bp, Homo sapiens; identical to SEQ ID NO: 105426
  chr2:5837518-5837583
  hyper

SEQ ID NO: 279479 - DNA, 273 bp, Homo sapiens
  chr2:5866211-5866484
  hyper
ggaaggtgtgtgtcacagtccctaatggatcagctaccaatcattagccaagtccttctcttacttttctcctcggagagaaccaagcttagacaatagcatggctttcgaggtgggaaggacctcatgaaggagacggaaaagagtgactgcagatcttacatgtaggatctggcggagctcagcttaaagccgttgccacccagccatgggcattttctccacattttgcaggcatcctacaactgaaaactgggtcgcaggcatttgaat

SEQ ID NO: 279480 - DNA, 279 bp, Homo sapiens
  chr2:7005154-7005433
  hyper
cctccaaaacggcccgggcggcttcccggtccgggaagaccacggaactgggcaagtctggcaccaccgggtgcagcgggggctccgggacgggcacgacctgtgcgcagcccacctgcagccgcctgccgtcttgcacctcccagaggcgctgccacagctggccgcgcgggtcggcctcgaactcgcccaagtgcgggcgtggtgcctcctgacaggcgcccagcagctcgagcagcgcttgccgggtgtcagggtcatccagggggtcgcgcagca

SEQ ID NO: 279481 - DNA, 729 bp, Homo sapiens; identical to SEQ ID NO: 198059
  chr2:7005469-7006198
  hyper

SEQ ID NO: 279482 - DNA, 305 bp, Homo sapiens
  chr2:7057748-7058053
  hyper
cccaggtagagtgacgcgcgtcccctttgtgtccgcatcgcccgggccggccgcggagcggggagggcgggacgcggcgctgcgcggccggccttggggctcggggcttgcggccgcgcctgccccgctgggtcctgccccggcgcccggtggcagcgggcggggggcagcgtcccgggcggggactcgcgggctccgttcagaggacgcccgccctgccctgcccgtgtccctgacctcgtccctgctctgctcctgccctgccctgcctctcgcaggcggcgcccgcgccccagggcagtggg

SEQ ID NO: 279483 - DNA, 48 bp, Homo sapiens
  chr2:7058391-7058439
  hyper
gagttccctgcgggtcttacccaccccagcctccggccgccgacccca

SEQ ID NO: 279484 - DNA, 302 bp, Homo sapiens; identical to SEQ ID NO: 221656
  chr2:8818278-8818580
  hyper

SEQ ID NO: 279485 - DNA, 665 bp, Homo sapiens; identical to SEQ ID NO: 221657
  chr2:8818829-8819494
  hyper

SEQ ID NO: 279486 - DNA, 169 bp, Homo sapiens; identical to SEQ ID NO: 198061
  chr2:8821592-8821761
  hyper

SEQ ID NO: 279487 - DNA, 709 bp, Homo sapiens; identical to SEQ ID NO: 198062
  chr2:8821976-8822685
  hyper

SEQ ID NO: 279488 - DNA, 136 bp, Homo sapiens; identical to SEQ ID NO: 198063
  chr2:8823634-8823770
  hyper

SEQ ID NO: 279489 - DNA, 208 bp, Homo sapiens; identical to SEQ ID NO: 198064
  chr2:8825635-8825843
  hyper

SEQ ID NO: 279490 - DNA, 89 bp, Homo sapiens; identical to SEQ ID NO: 228098
  chr2:8826161-8826250
  hyper

SEQ ID NO: 279491 - DNA, 31 bp, Homo sapiens; identical to SEQ ID NO: 198065
  chr2:9143113-9143144
  hyper

SEQ ID NO: 279492 - DNA, 210 bp, Homo sapiens; identical to SEQ ID NO: 198066
  chr2:9143658-9143868
  hyper

SEQ ID NO: 279493 - DNA, 459 bp, Homo sapiens; identical to SEQ ID NO: 221662
  chr2:9144090-9144549
  hyper

SEQ ID NO: 279494 - DNA, 1192 bp, Homo sapiens; identical to SEQ ID NO: 198068
  chr2:9346368-9347560
  hyper

SEQ ID NO: 279495 - DNA, 316 bp, Homo sapiens; identical to SEQ ID NO: 198069
  chr2:9347677-9347993
  hyper

SEQ ID NO: 279496 - DNA, 123 bp, Homo sapiens
  chr2:9348023-9348146
  hyper
ccccctcaacctggaaaaggcctggttttagtaaagtgctctcaaggtgcaaagtcatcacgcctagctgctaagcagtacgctctccaggtcctggggagaggaacacgtaggaacgaagaa

SEQ ID NO: 279497 - DNA, 196 bp, Homo sapiens; identical to SEQ ID NO: 228102
  chr2:9695939-9696135
  hyper

SEQ ID NO: 279498 - DNA, 318 bp, Homo sapiens; identical to SEQ ID NO: 228103
  chr2:10092151-10092469
  hyper

SEQ ID NO: 279499 - DNA, 33 bp, Homo sapiens; identical to SEQ ID NO: 198071
  chr2:10151842-10151875
  hyper

SEQ ID NO: 279500 - DNA, 185 bp, Homo sapiens
  chr2:10152410-10152595
  hyper
ggacaggtgtgcgtatgagtgtgcgtatgggcgagtcaggtgggcagacgtgcatatgagtgtgcatatgggtgattcaggtggacacgcgtgggtatgggtggctcacgtggacaggcgtgcgtgtcagcgtgtcacgtggacaggcgtgtgtgtgggcgggtcaggtgggcaggcgtgtgtat

SEQ ID NO: 279501 - DNA, 199 bp, Homo sapiens; identical to SEQ ID NO: 198073
  chr2:10183604-10183803
  hyper

SEQ ID NO: 279502 - DNA, 453 bp, Homo sapiens; identical to SEQ ID NO: 37134
  chr2:10183814-10184267
  hyper

SEQ ID NO: 279503 - DNA, 144 bp, Homo sapiens; identical to SEQ ID NO: 228106
  chr2:10220229-10220373
  hyper

SEQ ID NO: 279504 - DNA, 73 bp, Homo sapiens; identical to SEQ ID NO: 198075
  chr2:10220687-10220760
  hyper

SEQ ID NO: 279505 - DNA, 202 bp, Homo sapiens; identical to SEQ ID NO: 228108
  chr2:10260352-10260554
  hyper

SEQ ID NO: 279506 - DNA, 512 bp, Homo sapiens
  chr2:10443618-10444130
  hyper
gtgagcagctgtgcgcagagcggggtggcggggtgggtgtgggtggtccagccccacgcccagagccccctgtccctgctggtcggcgcagtgcgtagcttaggagcctcgaggacagctgggacccgacgggcaagggcgggcctcgcgggcaggctgggcagccctcagggaacaggtccgtgcggcccacgtgggtcgcctgtgagcttctgccaagggtgggggcccacgcggaggcgatccgctcgttcctcccagggccatggggcgacgaggagagccctggcctccccgcgacccgcactgcgacctgggccagacgcgccaccttccccggtcgcggtttgcttctctttaaaatgaggacagctcctcccttgggggctgtggtgacaggtgaaatgagaacgcactgaagacagctcttggtccaaagccccgcacacagtaggtactgtgttaattggattagcgtctcctgtttaaaatcctttttttttcccctttat

SEQ ID NO: 279507 - DNA, 165 bp, Homo sapiens
  chr2:10444193-10444358
  hyper
cgcgaagcactgagattcgagaaagtttagctgccagctgcgctgcctcctgcagcacctcccgggcggcgccgcctccgcgagtgcccgagagcgccgcgctgggcgccggccctgccccagcccccaggctcccgcgcaagcgtgggggtccctctcctggcc

SEQ ID NO: 279508 - DNA, 226 bp, Homo sapiens; identical to SEQ ID NO: 221669
  chr2:10587833-10588059
  hyper

SEQ ID NO: 279509 - DNA, 198 bp, Homo sapiens; identical to SEQ ID NO: 198077
  chr2:10588856-10589054
  hyper

SEQ ID NO: 279510 - DNA, 117 bp, Homo sapiens; identical to SEQ ID NO: 198078
  chr2:10589055-10589172
  hyper

SEQ ID NO: 279511 - DNA, 218 bp, Homo sapiens; identical to SEQ ID NO: 198079
  chr2:10589298-10589516
  hyper

SEQ ID NO: 279512 - DNA, 424 bp, Homo sapiens
  chr2:10862101-10862525
  hyper
acaaaatgccctcggattggagcgggaccgggagtccgaaaggaagaggttccaccaggggtctctggctcctcagagcttatcctgctttcccccagccgtccggagacgccgcggggaggcaagcggaaagggggaacctggccgagggggaaaggtgcgggtgtggacacctgtgaaggagcagcacgaatcgaatcggccgtagaggctgcagacgcggccgcgaaaccaccggccacgccgggcaagggacccagcactgctgagcgggcacctcgcctagtggaaaaaagactttagtagttcccctcaccccctactacttttttttttcttatttaaaaaaatcctctgaagtctatttttaaagctaataccaatcacaaggttggccagtttgacctgcggtttgacctggtag

SEQ ID NO: 279513 - DNA, 207 bp, Homo sapiens
  chr2:10953101-10953308
  hyper
ggcctgctgggggcggggctggcagtctcggctcgcaccgcctcagctcctccgggccctctcggggtgctgctcggaggggagtccagtactgggcgtttttaccttagttccttattctgcacccccccaccccgcctcctccttgcctgtgtgcgcccccaccctctttatcccgggggagcgtgactcggcctcagggcaccc

SEQ ID NO: 279514 - DNA, 52 bp, Homo sapiens
  chr2:10953334-10953386
  hyper
cctcttgtgcccgacgaatattccgtggacacacatttgctccgcacgcgct

SEQ ID NO: 279515 - DNA, 55 bp, Homo sapiens
  chr2:11051788-11051843
  hyper
gcccagcaacaggcggcagcattctctccccactaatcctctccaaacagcagtg

SEQ ID NO: 279516 - DNA, 229 bp, Homo sapiens
  chr2:11052132-11052361
  hyper
cggcgtgggtccgccagctccgggacctgccgccgctgcctgcgcgccccggggcggaggacggtgccagccgcccacgaggagaccccgctcccgcaggaggccgagctgaagcggcggagcgcgccgccagccagccggggtgagtgccccgggcgaggccggcggccgccaaagcccccgcgggctcgcccgggcgcccggatgccagccccgagccccgccgccg

SEQ ID NO: 279517 - DNA, 102 bp, Homo sapiens
  chr2:11270218-11270320
  hyper
tcccgggctggtggggccaccctgtggctgcctgggctggaacgttctgcctcgcccagctgaaggccctaaacttgctacgccttttggggtgaggaaaac

SEQ ID NO: 279518 - DNA, 33 bp, Homo sapiens; identical to SEQ ID NO: 198081
  chr2:11621413-11621446
  hyper

SEQ ID NO: 279519 - DNA, 65 bp, Homo sapiens
  chr2:11623404-11623469
  hyper
agtgcgcgtgtgcgtgcgtgcatgtgtacgcgtgtatcggtgtgcgcgcgcgtgtgtgtgtgtga

SEQ ID NO: 279520 - DNA, 98 bp, Homo sapiens
  chr2:11810287-11810385
  hyper
actgcccggagtctgggcgagctgcctggttagtgagcacctcctcttctctgggaacctctagaactgggaggacacgcccccgaaagggtgtccct

SEQ ID NO: 279521 - DNA, 220 bp, Homo sapiens; identical to SEQ ID NO: 228121
  chr2:11828584-11828804
  hyper

SEQ ID NO: 279522 - DNA, 73 bp, Homo sapiens; identical to SEQ ID NO: 198082
  chr2:12856408-12856481
  hyper

SEQ ID NO: 279523 - DNA, 864 bp, Homo sapiens; identical to SEQ ID NO: 198083
  chr2:12856549-12857413
  hyper

SEQ ID NO: 279524 - DNA, 182 bp, Homo sapiens
  chr2:12857962-12858144
  hyper
cgttgggactgagtcgccgccgtgagctccccgaagactgcacaaactaccgcgggctcctccgccccgtctgcgattcggaagccggcctgggggtcgcgtcgggagccctggcgctgcagctccgcaccttagcagcccgggtactcatccagatccacgccggggacacacacacagag

SEQ ID NO: 279525 - DNA, 281 bp, Homo sapiens
  chr2:14772284-14772565
  hyper
agacgtctggggaacgaaaagggtcttcgatccaaggaccagcctaggggccatcgggaaccaaggctctgggggatcccagcagggcccagacgcccgcctcgggcaatgtcgctgcctgccccgggccgctcgcagtgcctgggccatactggggtgccctggggtttcttctccatacccagactcagcttccccgctggagtctgtcttcctggaacacggaacgcgggcgggctgtgttctcagtcacaatcagctcggatgagctggggggcgcg

SEQ ID NO: 279526 - DNA, 172 bp, Homo sapiens
  chr2:14772823-14772995
  hyper
gtcggcgcggcggtgggaaagcagagccgagccgggactgtccagtgggagcaggcgccccggccagcgcagacctggaggcgcacgggcgccgcaccgcacgattcggctcggggtagagcggagccgcagccccacgcgcagcccaggacccactcgccaccgccgcttc

SEQ ID NO: 279527 - DNA, 98 bp, Homo sapiens; identical to SEQ ID NO: 198086
  chr2:14773809-14773907
  hyper

SEQ ID NO: 279528 - DNA, 239 bp, Homo sapiens; identical to SEQ ID NO: 198087
  chr2:14774042-14774281
  hyper

SEQ ID NO: 279529 - DNA, 255 bp, Homo sapiens; identical to SEQ ID NO: 198088
  chr2:14774684-14774939
  hyper

SEQ ID NO: 279530 - DNA, 239 bp, Homo sapiens; identical to SEQ ID NO: 198089
  chr2:14775287-14775526
  hyper

SEQ ID NO: 279531 - DNA, 113 bp, Homo sapiens; identical to SEQ ID NO: 228127
  chr2:15701352-15701465
  hyper

SEQ ID NO: 279532 - DNA, 231 bp, Homo sapiens; identical to SEQ ID NO: 198090
  chr2:16079905-16080136
  hyper

SEQ ID NO: 279533 - DNA, 87 bp, Homo sapiens; identical to SEQ ID NO: 105506
  chr2:16080304-16080391
  hyper

SEQ ID NO: 279534 - DNA, 168 bp, Homo sapiens
  chr2:16080606-16080774
  hyper
tctctccccgccccccgggtgtgtcagatttttcagttaataatatcccccgagcttcaaagcgcaggctgtgacagtcatctgtctggacgcgctgggtggatgcggggggctcctgggaactgtgttggagccgagcaagcgctagccaggcgcaagcgcgcacag

SEQ ID NO: 279535 - DNA, 364 bp, Homo sapiens; identical to SEQ ID NO: 228131
  chr2:16790116-16790480
  hyper

SEQ ID NO: 279536 - DNA, 488 bp, Homo sapiens; identical to SEQ ID NO: 228132
  chr2:17699488-17699976
  hyper

SEQ ID NO: 279537 - DNA, 173 bp, Homo sapiens; identical to SEQ ID NO: 198094
  chr2:17721349-17721522
  hyper

SEQ ID NO: 279538 - DNA, 247 bp, Homo sapiens; identical to SEQ ID NO: 198095
  chr2:17721867-17722114
  hyper

SEQ ID NO: 279539 - DNA, 35 bp, Homo sapiens; identical to SEQ ID NO: 228134
  chr2:17934473-17934508
  hyper

SEQ ID NO: 279540 - DNA, 33 bp, Homo sapiens; identical to SEQ ID NO: 228135
  chr2:17934861-17934894
  hyper

SEQ ID NO: 279541 - DNA, 35 bp, Homo sapiens; identical to SEQ ID NO: 228136
  chr2:17935192-17935227
  hyper

SEQ ID NO: 279542 - DNA, 419 bp, Homo sapiens
  chr2:18060198-18060617
  hyper
cgaccccgagggtctacggccgcagagcactttccgtccttctgggcgtctggcccgcggcgcccgcatcctctggtccccagagcccgccgtcgctggagccctaaggctccgcctgttgcgtgaactgcgggctgttgaagcggtggctgggttgatttgaaagcctcggggaaggtatttaggatcagctttcggggagtggggtgggctatggtcagggggaggaccacctggaggcgggagaatcgatgagccgaagaaaggcggcacctcgcgtaggggcatccccggggcgtttccttggccgggaagccgttccttcccttcctcgagaggaggcgctttcctggcgcttgtaaatgcttcccgggccgtctgctccgccttctttgtcattcctcccctcccctttgccc

SEQ ID NO: 279543 - DNA, 62 bp, Homo sapiens
  chr2:18060926-18060988
  hyper
agggcttgtcctgcacccccaaccccgctctgtcccttctcgttcatttggagaaaggagca

SEQ ID NO: 279544 - DNA, 193 bp, Homo sapiens; identical to SEQ ID NO: 198096
  chr2:18741865-18742058
  hyper

SEQ ID NO: 279545 - DNA, 137 bp, Homo sapiens; identical to SEQ ID NO: 198097
  chr2:19550409-19550546
  hyper

SEQ ID NO: 279546 - DNA, 288 bp, Homo sapiens; identical to SEQ ID NO: 105529
  chr2:19550611-19550899
  hyper

SEQ ID NO: 279547 - DNA, 294 bp, Homo sapiens
  chr2:19551656-19551950
  hyper
aagcttatatggtcaaagacaaaaataaaaaagaaaacgtataaaataacaatagaaaaagtaatacttctgggagaggcgccgctgcggctccgcggagctttcgttctttttttaatgcagtttcccttccgccacgtgagtaccgccttttggccaagagtttagccgcgtcctaggggagcagcagggacggtcggggtcgcggccccgggcggggctctgaagtgccgcgtgcgccagggacccaggggacaatgttggagaggtggaaggtcccgagcgagcgcctct

SEQ ID NO: 279548 - DNA, 361 bp, Homo sapiens
  chr2:19557098-19557459
  hyper
gggtgaaatttaccaaattgtggcaacaaagaaacccttgcggctactttacacattgagaacccaacccgctactgcctgagctgctgaaaaaggactaaacgtggtttttcattcttctccgagacatttccgaggagaaattagttcagcaggcagcccttcacccctttcccccttctttctctcctgacggctggattagcggacagtcaggggagtaacagaacttttcctgtccccagcccggagaccctagggctccacagagtttccactagtgctgtgtgtgggtctcgaattggaaagcagtgcttgcgcccactgcattgcctccctgcaccaggacaatcaagggttc

SEQ ID NO: 279549 - DNA, 196 bp, Homo sapiens
  chr2:19557489-19557685
  hyper
atcctatggagaatatccctaagttagagcgcgagtgcaaggcggggttcagactcgcagccctgcgctctcgggtctaggcggcctcatactagagcgcaactcctcaaaagacaaacttgaacgaaagcgctaccgagctggggcatgcacctgtccctggcgcggtcggctgcggctgtggccattcactccc

SEQ ID NO: 279550 - DNA, 234 bp, Homo sapiens
  chr2:19557727-19557961
  hyper
ggagcgcgtctcaggaaagtttgtgcccgctgaagttgctctggtttcttaaagggggcccacagattgactttcaaagtccgtgggcacctcgcccgtgattccgcagagccgggcgggctggccgcagtagcggaggcccgccccccttaatccccagcggtcagaggccgaggaccccgcgcaggaagtcctgaggcagcacccccaaccaccctgctctcactttcacaa

SEQ ID NO: 279551 - DNA, 340 bp, Homo sapiens
  chr2:19558041-19558381
  hyper
aacctgggagtcctgcccgcattcgctttgctgagcccaggcgcccaggactgcaattaccttgttccgcagaggtcctggggctgagcacgtctctggggctttagctgaaggggactggggaagccggaggccctggagcccacaggcgcccctggagctctagtgtcccgactcctctcctgccgcggggactccaagcgccggacacgcgggagcgagcgctcagcagccccggatcctgcacgccggggacggtgagcctcgctcgcggctccctcgctgggtctgaaccaggagcagctgagaacgtgccggggagaggccgagctccgactca

SEQ ID NO: 279552 - DNA, 300 bp, Homo sapiens
  chr2:19561707-19562007
  hyper
tcggagtgaaaattgagcagcttccagaaaattaactagaatgtggtctatattgctttgagttgttttggattcaaaaaaaaatgaaccccacctctccgcaccccatagcctaaaaaaaaaaaaaaaagtcctcattttttcaaatgaagtttgctcagcacttgcgaatttttgcttccaacgcaactacttcctgtaactactttgcagacaattgggggtctgctcgttagaaacccccttacgcatgtacagggctttcaaataacctggagatttaggcgtccctctgtattc

SEQ ID NO: 279553 - DNA, 155 bp, Homo sapiens
  chr2:19563156-19563311
  hyper
tgccccaaaccagacgtccttgctctcagatggatgagggcttttgtttgtttgtttgtttgtttttaaataatccgaaattcctagcaactatctgccgccgttcgcttctggtcctgggaagacgatgagcaaagatctactgggaccccatc

SEQ ID NO: 279554 - DNA, 65 bp, Homo sapiens; identical to SEQ ID NO: 198101
  chr2:19563433-19563498
  hyper

SEQ ID NO: 279555 - DNA, 119 bp, Homo sapiens; identical to SEQ ID NO: 198102
  chr2:20101402-20101521
  hyper

SEQ ID NO: 279556 - DNA, 193 bp, Homo sapiens; identical to SEQ ID NO: 228146
  chr2:20101765-20101958
  hyper

SEQ ID NO: 279557 - DNA, 42 bp, Homo sapiens; identical to SEQ ID NO: 198103
  chr2:20190155-20190197
  hyper

SEQ ID NO: 279558 - DNA, 329 bp, Homo sapiens
  chr2:20212119-20212448
  hyper
ggcttctcctcgttcgatgctcacgcgtccctcccgccgcccgcctgtacctgcaccgcgggcgcggccaggctcgctggtcccggaagcgggcgcgccgtcgggagccgcaggagaggggcggcgtccagggctgcccccgggacctcgggtctccagcctccggaagcccgggcgggccacggggtcgggggcggcggagggcagcagcagcagcggccagagcagcaggaggagtcccgggaggcggcgcgcgggggccgggcgcggcatggtgggctccgtgggcctggtggtgtccgtcgggggccaggagcccacgcgaggct

SEQ ID NO: 279559 - DNA, 44 bp, Homo sapiens
  chr2:20251336-20251380
  hyper
agccaaactcaaacggctgtttcacggcctccaaaacccaacga

SEQ ID NO: 279560 - DNA, 164 bp, Homo sapiens; identical to SEQ ID NO: 105547
  chr2:20251427-20251591
  hyper

SEQ ID NO: 279561 - DNA, 80 bp, Homo sapiens; identical to SEQ ID NO: 228150
  chr2:20251798-20251878
  hyper

SEQ ID NO: 279562 - DNA, 737 bp, Homo sapiens
  chr2:20424156-20424893
  hyper
ggtctgcagggggggcgttgtggccgcggtcactgcatccccccgggtcaccgacgggggcccggccgccgcggtggccggggcgaggagggtgggaacgggcgaccccgggcgccgctgtgggctggcgggctccgacagatgtggagacgttttacataattgagcgcggggccccggccccccaccctccccagcgcgggaccggtgcggcacccaccgacagcggaggaaattggggctggagccctggtctcggggctcaccgtcccgggacccgctgggctagcgcgggaagaagggaagtcttcgctccccctccccctccacgtgcacccgccggcatccgcgggtgaccagtcccggcttcccgccgcctccccgcctggccgccggccgcactcaccggcagggccggctgcaggctcagcgccagcgcgcacagccagagccagagcgccgcgcgcctcatgctgcccggaccggcggcgggagagcggcaggctgcgcgggtcgcggctgcgggccggcttcgcgggttccgctgctcgatgctctcttgggcgcctgcccagcgcgccgctgtcccaggcgagggctgcagggtccgccggctggagtccgctctctactgccggattcctctccgctcggctcggattcggcccgcacctctcccgccgagctccgccttataataaacccacaggcccttccttagccgttgcaaaaactgg

SEQ ID NO: 279563 - DNA, 440 bp, Homo sapiens; identical to SEQ ID NO: 228152
  chr2:20425310-20425750
  hyper

SEQ ID NO: 279564 - DNA, 361 bp, Homo sapiens; identical to SEQ ID NO: 198108
  chr2:20646413-20646774
  hyper

SEQ ID NO: 279565 - DNA, 423 bp, Homo sapiens; identical to SEQ ID NO: 198109
  chr2:20646843-20647266
  hyper

SEQ ID NO: 279566 - DNA, 459 bp, Homo sapiens
  chr2:20647309-20647768
  hyper
cgagttccccgaggtgtacgtgcccaccgtcttcgagaactatgtggccgacattgaggtggacggcaagcaggtggagctggcgctgtgggacacggcgggccaggaggactacgaccgcctgcggccgctctcctacccggacaccgacgtcattctcatgtgcttctcggtggacagcccggactcgctggagaacatccccgagaagtgggtccccgaggtgaagcacttctgtcccaatgtgcccatcatcctggtggccaacaaaaaagacctgcgcagcgacgagcatgtccgcacagagctggcccgcatgaagcaggaacccgtgcgcacggatgacggccgcgccatggccgtgcgcatccaagcctacgactacctcgagtgctctgccaagaccaaggaaggcgtgcgcgaggtcttcgagacggccacgcgcgccgcgctgcagaa

SEQ ID NO: 279567 - DNA, 183 bp, Homo sapiens
  chr2:20865453-20865636
  hyper
gtgagcaggcgccgcgtctccgcggtggccgagagggcaatggctgaggagttcgtttgggacgaagcagtggagcaggggaactggggagcctgggccgggcctctctgtgggtcccagcgcagcgcagccaggcaggcgtcgggacctaggcggctttggattcggcgggcgacctcgctt

SEQ ID NO: 279568 - DNA, 449 bp, Homo sapiens; identical to SEQ ID NO: 198111
  chr2:20866660-20867109
  hyper

SEQ ID NO: 279569 - DNA, 161 bp, Homo sapiens; identical to SEQ ID NO: 198112
  chr2:20867313-20867474
  hyper

SEQ ID NO: 279570 - DNA, 508 bp, Homo sapiens; identical to SEQ ID NO: 198113
  chr2:21022199-21022707
  hyper

SEQ ID NO: 279571 - DNA, 137 bp, Homo sapiens; identical to SEQ ID NO: 228158
  chr2:21540143-21540280
  hyper

SEQ ID NO: 279572 - DNA, 126 bp, Homo sapiens; identical to SEQ ID NO: 228159
  chr2:23607987-23608113
  hyper

SEQ ID NO: 279573 - DNA, 136 bp, Homo sapiens
  chr2:23608339-23608475
  hyper
ctcgatgagagccgcgccgcaccgctcatagccgcacaggctgacaggcaggaggaccgacttccctctcccgggcatcctccctgggctgccgggaggcggcggcggcggaggaggaggaggaacgaggggagaa

SEQ ID NO: 279574 - DNA, 249 bp, Homo sapiens; identical to SEQ ID NO: 198115
  chr2:23609647-23609896
  hyper

SEQ ID NO: 279575 - DNA, 218 bp, Homo sapiens; identical to SEQ ID NO: 198116
  chr2:23610070-23610288
  hyper

SEQ ID NO: 279576 - DNA, 32 bp, Homo sapiens; identical to SEQ ID NO: 228161
  chr2:23886284-23886316
  hyper

SEQ ID NO: 279577 - DNA, 165 bp, Homo sapiens; identical to SEQ ID NO: 228163
  chr2:24270302-24270467
  hyper

SEQ ID NO: 279578 - DNA, 526 bp, Homo sapiens
  chr2:24272437-24272963
  hyper
agtgggttaatgtcgtcaggcggggccaggctcgctaacagccgggcggggtcccttcccccgggccccgccccggccgaccccacctttccgcgcggctccgccccgccgcccccttgccagtggcccctccccgcgcaggtcccgactccagccgcacctcctccggctctgcagtggcggcgaggaggcgagccggagcgacggcggggctggggccggagccgagccggggtcgggcagcagcagggaccccccagaggcggggcctgtgggaccgctatgggcgtggagatcgagaccatctcccccggagacggtaccgggctccctccggagccaggggaggggaggggtcccggggcggagcccggagggcgggggtctgattcggaggtggcgtggagggtgctgaagggtcggggggctggatggggaaggcaggcggagacgccggacgggattcttgggggtctaggagaccatcctccgccatcctcttccgcgctcacctaggggaatgtag

SEQ ID NO: 279579 - DNA, 173 bp, Homo sapiens; identical to SEQ ID NO: 228165
  chr2:24299237-24299410
  hyper

SEQ ID NO: 279580 - DNA, 486 bp, Homo sapiens; identical to SEQ ID NO: 228166
  chr2:24299777-24300263
  hyper

SEQ ID NO: 279581 - DNA, 33 bp, Homo sapiens; identical to SEQ ID NO: 198118
  chr2:24307619-24307652
  hyper

SEQ ID NO: 279582 - DNA, 81 bp, Homo sapiens; identical to SEQ ID NO: 228168
  chr2:24346201-24346282
  hyper

SEQ ID NO: 279583 - DNA, 181 bp, Homo sapiens; identical to SEQ ID NO: 228169
  chr2:24583444-24583625
  hyper

SEQ ID NO: 279584 - DNA, 256 bp, Homo sapiens; identical to SEQ ID NO: 221689
  chr2:24714925-24715181
  hyper

SEQ ID NO: 279585 - DNA, 132 bp, Homo sapiens; identical to SEQ ID NO: 228170
  chr2:25016064-25016196
  hyper

SEQ ID NO: 279586 - DNA, 204 bp, Homo sapiens; identical to SEQ ID NO: 1365
  chr2:25142479-25142683
  hyper

SEQ ID NO: 279587 - DNA, 79 bp, Homo sapiens; identical to SEQ ID NO: 198120
  chr2:25265055-25265134
  hyper

SEQ ID NO: 279588 - DNA, 301 bp, Homo sapiens
  chr2:25354447-25354748
  hyper
caacagggaggggtcggagtccgttttcctcgggagaagtccgccaggaagttgggagcgcagaggaagcccaggctggaagggggcgtgaccctgccctgcctgcgcgcggtgcacagaggaggagggtgccagccttggatctcgggtgtcccgccccaccgctctcagggcccacagtactggagatgttcaacacgctgctgaggcagctgcggctcagcatcgactacgcgctgaccgggagctacgacggggcggtcagcctcggcaccaagatcatcaaggagcacgaggagcg

SEQ ID NO: 279589 - DNA, 58 bp, Homo sapiens
  chr2:25354957-25355015
  hyper
ggttggagagggagggaccgcactggggcgaagggcatccaaccgggcccctgtagga

SEQ ID NO: 279590 - DNA, 120 bp, Homo sapiens; identical to SEQ ID NO: 198121
  chr2:25440006-25440126
  hyper

SEQ ID NO: 279591 - DNA, 149 bp, Homo sapiens; identical to SEQ ID NO: 198122
  chr2:25457152-25457301
  hyper

SEQ ID NO: 279592 - DNA, 139 bp, Homo sapiens; identical to SEQ ID NO: 198123
  chr2:25458563-25458702
  hyper

SEQ ID NO: 279593 - DNA, 95 bp, Homo sapiens; identical to SEQ ID NO: 198124
  chr2:25459791-25459886
  hyper

SEQ ID NO: 279594 - DNA, 108 bp, Homo sapiens; identical to SEQ ID NO: 198125
  chr2:25461984-25462092
  hyper

SEQ ID NO: 279595 - DNA, 448 bp, Homo sapiens; identical to SEQ ID NO: 198126
  chr2:25463164-25463612
  hyper

SEQ ID NO: 279596 - DNA, 172 bp, Homo sapiens; identical to SEQ ID NO: 198127
  chr2:25464417-25464589
  hyper

SEQ ID NO: 279597 - DNA, 774 bp, Homo sapiens; identical to SEQ ID NO: 198128
  chr2:25466755-25467529
  hyper

SEQ ID NO: 279598 - DNA, 98 bp, Homo sapiens; identical to SEQ ID NO: 198129
  chr2:25468111-25468209
  hyper

SEQ ID NO: 279599 - DNA, 310 bp, Homo sapiens; identical to SEQ ID NO: 198130
  chr2:25468877-25469187
  hyper

SEQ ID NO: 279600 - DNA, 173 bp, Homo sapiens; identical to SEQ ID NO: 198131
  chr2:25469474-25469647
  hyper

SEQ ID NO: 279601 - DNA, 123 bp, Homo sapiens; identical to SEQ ID NO: 198132
  chr2:25469906-25470029
  hyper

SEQ ID NO: 279602 - DNA, 162 bp, Homo sapiens; identical to SEQ ID NO: 198133
  chr2:25470449-25470611
  hyper

SEQ ID NO: 279603 - DNA, 192 bp, Homo sapiens; identical to SEQ ID NO: 198134
  chr2:25470892-25471084
  hyper

SEQ ID NO: 279604 - DNA, 90 bp, Homo sapiens; identical to SEQ ID NO: 198135
  chr2:25497816-25497906
  hyper

SEQ ID NO: 279605 - DNA, 237 bp, Homo sapiens; identical to SEQ ID NO: 198136
  chr2:25505304-25505541
  hyper

SEQ ID NO: 279606 - DNA, 106 bp, Homo sapiens; identical to SEQ ID NO: 228173
  chr2:25565423-25565529
  hyper

SEQ ID NO: 279607 - DNA, 47 bp, Homo sapiens; identical to SEQ ID NO: 228174
  chr2:25896707-25896754
  hyper

SEQ ID NO: 279608 - DNA, 32 bp, Homo sapiens; identical to SEQ ID NO: 228175
  chr2:26100797-26100829
  hyper

SEQ ID NO: 279609 - DNA, 217 bp, Homo sapiens; identical to SEQ ID NO: 228176
  chr2:26101334-26101551
  hyper

SEQ ID NO: 279610 - DNA, 330 bp, Homo sapiens; identical to SEQ ID NO: 221709
  chr2:26395999-26396329
  hyper

SEQ ID NO: 279611 - DNA, 143 bp, Homo sapiens; identical to SEQ ID NO: 228179
  chr2:26467720-26467863
  hyper

SEQ ID NO: 279612 - DNA, 79 bp, Homo sapiens; identical to SEQ ID NO: 198137
  chr2:26521880-26521959
  hyper

SEQ ID NO: 279613 - DNA, 376 bp, Homo sapiens; identical to SEQ ID NO: 198138
  chr2:26522127-26522503
  hyper

SEQ ID NO: 279614 - DNA, 197 bp, Homo sapiens; identical to SEQ ID NO: 228181
  chr2:26568767-26568964
  hyper

SEQ ID NO: 279615 - DNA, 185 bp, Homo sapiens; identical to SEQ ID NO: 228182
  chr2:26726521-26726706
  hyper

SEQ ID NO: 279616 - DNA, 64 bp, Homo sapiens
  chr2:26915613-26915677
  hyper
gcgggtgcccggcgcggagagcggcgagcgcagccatgccccaggccgcctccggggcagcagc

SEQ ID NO: 279617 - DNA, 141 bp, Homo sapiens; identical to SEQ ID NO: 228184
  chr2:27008750-27008891
  hyper

SEQ ID NO: 279618 - DNA, 59 bp, Homo sapiens
  chr2:27069931-27069990
  hyper
tctgcagctgcagcttggaggtccttgatgctgcattttaacgcgcatcgcaacgcctt

SEQ ID NO: 279619 - DNA, 233 bp, Homo sapiens
  chr2:27071919-27072152
  hyper
ggggatggggaaggctggggagctgggttaggacaggtagtgggtctcggggagcagggagtgggaactagggtttgaggaggaaagagaaggggcgggggcgggtccgaagaacgagggaaggagctcggtgcaggtggcgcccggcgaggctggttctgctgaagaatggggaggggaggagggatgcaggcgggtggaggccgcctgggtttgaggagggaggacgggag

SEQ ID NO: 279620 - DNA, 61 bp, Homo sapiens; identical to SEQ ID NO: 228188
  chr2:27165767-27165828
  hyper

SEQ ID NO: 279621 - DNA, 42 bp, Homo sapiens; identical to SEQ ID NO: 228189
  chr2:27273188-27273230
  hyper

SEQ ID NO: 279622 - DNA, 375 bp, Homo sapiens; identical to SEQ ID NO: 228190
  chr2:27274194-27274569
  hyper

SEQ ID NO: 279623 - DNA, 208 bp, Homo sapiens; identical to SEQ ID NO: 228191
  chr2:27274788-27274996
  hyper

SEQ ID NO: 279624 - DNA, 195 bp, Homo sapiens; identical to SEQ ID NO: 228192
  chr2:27294084-27294279
  hyper

SEQ ID NO: 279625 - DNA, 132 bp, Homo sapiens
  chr2:27304248-27304380
  hyper
tggcctctggagaccgcaggtcccagcatgcagcagttcctgtggcttgccttccctcctgcgtgctgcacaccggatgtgctgtttccctgccccgagatagccttactataattatgcaaacaggaactc

SEQ ID NO: 279626 - DNA, 250 bp, Homo sapiens; identical to SEQ ID NO: 198140
  chr2:27308893-27309143
  hyper

SEQ ID NO: 279627 - DNA, 111 bp, Homo sapiens; identical to SEQ ID NO: 1396
  chr2:27309206-27309317
  hyper

SEQ ID NO: 279628 - DNA, 110 bp, Homo sapiens; identical to SEQ ID NO: 228196
  chr2:27435624-27435734
  hyper

SEQ ID NO: 279629 - DNA, 224 bp, Homo sapiens; identical to SEQ ID NO: 228197
  chr2:27440128-27440352
  hyper

SEQ ID NO: 279630 - DNA, 108 bp, Homo sapiens
  chr2:27473082-27473190
  hyper
cagtgagggtctctgcctggcggaggggaaaagggtcttcccgtcctgaccccagtcctgagactccctgcaaagacttccggctgcctctgccgctgcggtggcgta

SEQ ID NO: 279631 - DNA, 90 bp, Homo sapiens; identical to SEQ ID NO: 198142
  chr2:27473358-27473448
  hyper

SEQ ID NO: 279632 - DNA, 226 bp, Homo sapiens
  chr2:27485733-27485959
  hyper
cgagtggtctccaagcccccagcggctggagagggctccatgttcccggtgccccgaccgtctaggccccaccgaggaagagagaggccgggccggccccgcgccaagtccgagcagcccgccgacccccgggatccccgcagggcggcggggccaccagagtggagcgaactgcagcgactgtggcgcgcggagtccgaactgcagatcccgctgccgccggagc

SEQ ID NO: 279633 - DNA, 544 bp, Homo sapiens; identical to SEQ ID NO: 228199
  chr2:27592814-27593358
  hyper

SEQ ID NO: 279634 - DNA, 76 bp, Homo sapiens; identical to SEQ ID NO: 228200
  chr2:27603727-27603803
  hyper

SEQ ID NO: 279635 - DNA, 224 bp, Homo sapiens; identical to SEQ ID NO: 228201
  chr2:27651189-27651413
  hyper

SEQ ID NO: 279636 - DNA, 93 bp, Homo sapiens; identical to SEQ ID NO: 228202
  chr2:27712679-27712772
  hyper

SEQ ID NO: 279637 - DNA, 43 bp, Homo sapiens
  chr2:27717787-27717830
  hyper
ggtgcccagagggcggcccatcgcccgactcggtggcgctgcc

SEQ ID NO: 279638 - DNA, 511 bp, Homo sapiens; identical to SEQ ID NO: 228204
  chr2:27805830-27806341
  hyper

SEQ ID NO: 279639 - DNA, 484 bp, Homo sapiens; identical to SEQ ID NO: 228205
  chr2:27851762-27852246
  hyper

SEQ ID NO: 279640 - DNA, 251 bp, Homo sapiens; identical to SEQ ID NO: 228206
  chr2:27886206-27886457
  hyper

SEQ ID NO: 279641 - DNA, 91 bp, Homo sapiens; identical to SEQ ID NO: 221715
  chr2:27937851-27937942
  hyper

SEQ ID NO: 279642 - DNA, 72 bp, Homo sapiens
  chr2:27938253-27938325
  hyper
gcctagaaatccctcgtgctggactctttcaccctgcacgggggagaagccctcctcccgggagcctgtttg

SEQ ID NO: 279643 - DNA, 214 bp, Homo sapiens; identical to SEQ ID NO: 228208
  chr2:28113199-28113413
  hyper

SEQ ID NO: 279644 - DNA, 177 bp, Homo sapiens; identical to SEQ ID NO: 228209
  chr2:28114002-28114179
  hyper

SEQ ID NO: 279645 - DNA, 223 bp, Homo sapiens; identical to SEQ ID NO: 228210
  chr2:28617015-28617238
  hyper

SEQ ID NO: 279646 - DNA, 201 bp, Homo sapiens; identical to SEQ ID NO: 228211
  chr2:28617456-28617657
  hyper

SEQ ID NO: 279647 - DNA, 424 bp, Homo sapiens; identical to SEQ ID NO: 228212
  chr2:28789407-28789831
  hyper

SEQ ID NO: 279648 - DNA, 101 bp, Homo sapiens; identical to SEQ ID NO: 228213
  chr2:28844563-28844664
  hyper

SEQ ID NO: 279649 - DNA, 71 bp, Homo sapiens; identical to SEQ ID NO: 198145
  chr2:29033265-29033336
  hyper

SEQ ID NO: 279650 - DNA, 185 bp, Homo sapiens; identical to SEQ ID NO: 228215
  chr2:29093424-29093609
  hyper

SEQ ID NO: 279651 - DNA, 41 bp, Homo sapiens; identical to SEQ ID NO: 198146
  chr2:29337889-29337930
  hyper

SEQ ID NO: 279652 - DNA, 71 bp, Homo sapiens; identical to SEQ ID NO: 198147
  chr2:30142811-30142882
  hyper

SEQ ID NO: 279653 - DNA, 82 bp, Homo sapiens; identical to SEQ ID NO: 198148
  chr2:30142977-30143059
  hyper

SEQ ID NO: 279654 - DNA, 139 bp, Homo sapiens; identical to SEQ ID NO: 198149
  chr2:30143137-30143276
  hyper

SEQ ID NO: 279655 - DNA, 206 bp, Homo sapiens; identical to SEQ ID NO: 198150
  chr2:30143712-30143918
  hyper

SEQ ID NO: 279656 - DNA, 171 bp, Homo sapiens
  chr2:30144693-30144864
  hyper
ctgttccctctccagtctcttgttcttcccctcctctagattccctgccctatttctctgcagtgtgaaagggagcaaatgtgagaactggaagaggcctttgcaatcaagcactctccctaattatacatttaagagattaaacgggtccgacttcggaaaaacaggttc

SEQ ID NO: 279657 - DNA, 223 bp, Homo sapiens
  chr2:30369368-30369591
  hyper
acgtgcgatgtctcgcagctgccgcaattagacaggccaagccttcgcctttaagaagctgactcacgtggatgctgtgttgtgtgcgctcagctgaaagggggaggtgggtccccagactgactacattggccgcctcgagagaaggggcagagttagcctctttgattggctgtacgagtccgaggtgctgggtcaggggcggggcgagctgtcgcaagcc

SEQ ID NO: 279658 - DNA, 47 bp, Homo sapiens; identical to SEQ ID NO: 198153
  chr2:30453520-30453567
  hyper

SEQ ID NO: 279659 - DNA, 497 bp, Homo sapiens
  chr2:30454906-30455403
  hyper
tcacgtgtgaatcccccccaatgaaaccaccctatgcggagagctgcaggaggcgcgcgccccacttggcgcaggggggctcctgctcttcccgggcccctcctctttttctttttgtttgcatgcaagtctcaacgtcgaggccggcagcagcggggctgagctggtgcggccgcagggtttgcagagctccgggggggtggggggcgggaaacgctctccccacacgtaaccccactaaagccacaagcagcagggcacgcgctgcagcctctcaacccctgccctctccaccgcccctaaaaaccgacgcacattggtgggggccgggactgggaggagccgccttcgccgtgctgaaggggaaggagcccgggccgggcgcggggcgtcggaggtttgccccggactggggatcggagccgggagggatgcagagagaggcaggcccctgactgctgggacttccttgctggcagtttcttccttcctgctct

SEQ ID NO: 279660 - DNA, 68 bp, Homo sapiens; identical to SEQ ID NO: 198154
  chr2:31361021-31361089
  hyper

SEQ ID NO: 279661 - DNA, 178 bp, Homo sapiens; identical to SEQ ID NO: 198155
  chr2:31361118-31361296
  hyper

SEQ ID NO: 279662 - DNA, 84 bp, Homo sapiens; identical to SEQ ID NO: 198156
  chr2:31361690-31361774
  hyper

SEQ ID NO: 279663 - DNA, 105 bp, Homo sapiens; identical to SEQ ID NO: 198157
  chr2:31457427-31457532
  hyper

SEQ ID NO: 279664 - DNA, 177 bp, Homo sapiens; identical to SEQ ID NO: 228224
  chr2:32234815-32234992
  hyper

SEQ ID NO: 279665 - DNA, 351 bp, Homo sapiens; identical to SEQ ID NO: 228225
  chr2:32235911-32236262
  hyper

SEQ ID NO: 279666 - DNA, 429 bp, Homo sapiens; identical to SEQ ID NO: 228226
  chr2:32264569-32264998
  hyper

SEQ ID NO: 279667 - DNA, 318 bp, Homo sapiens; identical to SEQ ID NO: 228227
  chr2:32288258-32288576
  hyper

SEQ ID NO: 279668 - DNA, 83 bp, Homo sapiens; identical to SEQ ID NO: 228228
  chr2:32502955-32503038
  hyper

SEQ ID NO: 279669 - DNA, 182 bp, Homo sapiens; identical to SEQ ID NO: 228229
  chr2:32581580-32581762
  hyper

SEQ ID NO: 279670 - DNA, 418 bp, Homo sapiens
  chr2:32852661-32853079
  hyper
tagagcagtgtcaaaaccagatcctttccttacacgctcattcgccgaaagacccatgctatgctgacggggttccaacctgggcttcaccgactccacgtcagagggtctgtgattccctgagagggtacccttaggctgagagcaagggcccacctgcactctgcgcgaaggactgtggttttcatcgggttgtcgagagcgttctaacccaaaatgctttaagaatcacaactctagcccttctaatcaaactgctttggccaagacgtccgttttgagttgcatttgaaccctagccctcggtgggaggcacactcacttccacgttcacagttcttggaagcggtcccactgggggcggggctgagcgcgaccgcgccctcaactccccctattgcccgccccggggtggggc

SEQ ID NO: 279671 - DNA, 139 bp, Homo sapiens; identical to SEQ ID NO: 198160
  chr2:33171660-33171799
  hyper

SEQ ID NO: 279672 - DNA, 142 bp, Homo sapiens; identical to SEQ ID NO: 198161
  chr2:33172105-33172247
  hyper

SEQ ID NO: 279673 - DNA, 114 bp, Homo sapiens; identical to SEQ ID NO: 228233
  chr2:33824328-33824442
  hyper

SEQ ID NO: 279674 - DNA, 258 bp, Homo sapiens; identical to SEQ ID NO: 228234
  chr2:36825136-36825394
  hyper

SEQ ID NO: 279675 - DNA, 230 bp, Homo sapiens; identical to SEQ ID NO: 228235
  chr2:37194141-37194371
  hyper

SEQ ID NO: 279676 - DNA, 31 bp, Homo sapiens; identical to SEQ ID NO: 228236
  chr2:37384213-37384244
  hyper

SEQ ID NO: 279677 - DNA, 740 bp, Homo sapiens; identical to SEQ ID NO: 228237
  chr2:37458343-37459083
  hyper

SEQ ID NO: 279678 - DNA, 77 bp, Homo sapiens
  chr2:37571656-37571733
  hyper
ttgtgtctgtcacccagggccgcccagccccggggtttgcgaaggtccggggtaggagggctgcagcctgcgcgacg

SEQ ID NO: 279679 - DNA, 77 bp, Homo sapiens
  chr2:37571910-37571987
  hyper
ctccacctgctgctgctggtggccgccctgccctgggcatccaggggggtcagtccgagtgcctcagcctggccaga

SEQ ID NO: 279680 - DNA, 163 bp, Homo sapiens; identical to SEQ ID NO: 228239
  chr2:37572275-37572438
  hyper

SEQ ID NO: 279681 - DNA, 1015 bp, Homo sapiens
  chr2:37898934-37899949
  hyper
ggggccaaccggtggccgggcgcgcgcgcgggggggggtcaccgttggaccctcggaggacaatgggcgcccattgttacctccccagcgccaccccccagtaggcgacttctctcggagaagatgccgctttcgactccctaagcacaaagaaaggtcgccggacgctcggtttaaagagggacccggaggtgctgccgcccgggtgcacggggacaataggactccgcccgcaccccggactcccgcactaaaactcgtgcgcccacctctcccgatcccaacaggccgacctagctgtgcgagtggcgggcggtgacccgcagggaagcgaggccacctgagtgcgccgccccggccaggccgcagctccccaggtccctctcagcccgggctccggtgggcgcggagggggagggtcgcgttctgtcagtttctagctcgctcccctcagagctgcagccaaaacccggagagtggaataagcgccctgaagatgccggagctcccggctgagcaactggacacgcgacgaacagcagacgctacaggttctcctacccagagggaggcgtttcttctccctcagggtctttcaaaaggatttgcctaaagctggggcaagccggtggcggctgccccagacgcgcgacgaggcgcaagtggcgcagctgccggcccgagagagtaaaattcaggccgcggtggcacctgcgcccgccggtcacccggccaccgccagcgccgccgcccggcgcgcccctcccctccgccggggccggagcgtgaaccgggttaatgaatgctaattttcttaatcggcctccgtctcttcctcctccgcgagtcgtcggcctggggaaggagtaggcgacaggaaagggcggtgttttccggctgggaggtcccagcccgcatggtcagccaggggagggggctgggacccctgggagtcggacgctgggggcctggcctctgccctgagactctcgggttggatggaaatcctggcaca

SEQ ID NO: 279682 - DNA, 81 bp, Homo sapiens; identical to SEQ ID NO: 198164
  chr2:37899997-37900078
  hyper

SEQ ID NO: 279683 - DNA, 64 bp, Homo sapiens
  chr2:38152927-38152991
  hyper
gctgggctctcgctcggctttcagccttgcgcaaacattttgtttttgtttgtgtggggttttt

SEQ ID NO: 279684 - DNA, 149 bp, Homo sapiens; identical to SEQ ID NO: 198165
  chr2:38303709-38303858
  hyper

SEQ ID NO: 279685 - DNA, 161 bp, Homo sapiens; identical to SEQ ID NO: 198166
  chr2:38342433-38342594
  hyper

SEQ ID NO: 279686 - DNA, 155 bp, Homo sapiens; identical to SEQ ID NO: 228244
  chr2:38604302-38604457
  hyper

SEQ ID NO: 279687 - DNA, 193 bp, Homo sapiens; identical to SEQ ID NO: 228245
  chr2:39005144-39005337
  hyper

SEQ ID NO: 279688 - DNA, 227 bp, Homo sapiens; identical to SEQ ID NO: 221726
  chr2:39663571-39663798
  hyper

SEQ ID NO: 279689 - DNA, 102 bp, Homo sapiens; identical to SEQ ID NO: 228247
  chr2:39847387-39847489
  hyper

SEQ ID NO: 279690 - DNA, 379 bp, Homo sapiens; identical to SEQ ID NO: 228250
  chr2:42068163-42068542
  hyper

SEQ ID NO: 279691 - DNA, 241 bp, Homo sapiens
  chr2:42274303-42274544
  hyper
tacgcggctgaccccgtcagaccccaggcatcttgaggggtagggagcgacccccagctgcatttggggctttagaggcaaggaaaatcagaaacactttggtaaaaggagttgaacagggcatcctcggcgagctcacgagcattcctctatgcctagagctcctgtcccacgcgcgctcgcaggtgctggcccggctgtgcccgcttccccctcaccatcgccccaatccggaatccgg

SEQ ID NO: 279692 - DNA, 1085 bp, Homo sapiens
  chr2:42274691-42275776
  hyper
gtcccctccggagcccgctacccgccggcctcgcccctttatctttcccccactccgcccggccggctccgttatccacctcccaatcccgttatccggccgccccggccccgttatccgccctcgcgttgggcgcggagcccccgcgcgcctcctggccgccgccgccccctcccccgctcccagacggagctcgggggaccgcgggctgggcgggaccgcgggctgggcaggaccggagccgcctccgcgccgcttcccaggcccggacggccgcgggaggaggtcccgctgtcagtcagcggggaaggccgggccgggcggccggagggggcggcgccgaggacgggctcgggccgggagctgggaggtggaggcggaggggcgggggagggggcgggggagggggcgggggcgggggcggggggcggctctgggccttataagcggcgggggcagggcggcagggaggcaagtgtcaggccgatgtgtcgcccgcgaggggccggggtcggggccgccggggccatgcgcgcgggctgggcagggggccggcggggcgcagagcggagccgcctcggagcctgagccgcccggggccggggccggggagccgcgcggggccggccggccggggggaggggagcgatgcggcgccggcgggcggcagtggccgcgggtttctgcgcctccttcctgctgggctccgtcctcaacgtgctcttcgctccgggctcggagcctccgaggccaggccagtcccctgagccttcgccggccccgggtccgggccgtcgcgggggccgcggggagctggcccggcagatccgggcgcgctacgaggaggtgcagcgctattcccgcgggggccccgggcccggggcgggccggccggagcggcggcgcctgatggacctggctccgggcgggcccggcctgccgcgcccccggcccccttgggcccggcccctgtccgacggcgccccaggctggcccccggctcccggcccaggctcccccggcccgggcccgcgcctgggctgcgccgcgcttcgcaacgtgtccggcgcgcagtacatgggctc

SEQ ID NO: 279693 - DNA, 47 bp, Homo sapiens; identical to SEQ ID NO: 198170
  chr2:42329271-42329318
  hyper

SEQ ID NO: 279694 - DNA, 370 bp, Homo sapiens
  chr2:42395973-42396343
  hyper
tccttgcttctgatctgtcccgggccctgcggctgtggcagtggtggtatcgagctagtcaagaagcttcgcccctatttgtcccccaccctattgggggagagggagaacctctccctcttggttgcttctttagtgtccttgtaggacccacgtggtggtcatctcccgtcacgggggtccagtcttggctctgcgggcttcccaggggccacatagggagaggatccttcatgcatcagagtatcgcaggccagagtctatgccttatccccacctgtttggaaccagcttccaaaccgtggtccccagccttcagcaggcctaccgcgcaggcgcaaccaccagcctggcgcgaggcggacaaacg

SEQ ID NO: 279695 - DNA, 149 bp, Homo sapiens; identical to SEQ ID NO: 228255
  chr2:42588290-42588439
  hyper

SEQ ID NO: 279696 - DNA, 82 bp, Homo sapiens; identical to SEQ ID NO: 198171
  chr2:42720180-42720262
  hyper

SEQ ID NO: 279697 - DNA, 295 bp, Homo sapiens
  chr2:42721246-42721541
  hyper
cccgcccgcgcccgcacctccccggcttgctcgggctgggattcccgggcgccccgccctggacctcgggctccccgcctcgtgacgccgtcctccccctccgctccggcccgtagtggcggggaggggtccgcagggcgggggagcggggagcccagcgccgggatgcctgctcccgcgtcctgccctgggccatcgggatgaattgggcagtccccagggccccttttaacagccctggttcaaagcccagtgtggactcgggtgcggggacagacggcgtttggagagcttt

SEQ ID NO: 279698 - DNA, 245 bp, Homo sapiens; identical to SEQ ID NO: 228259
  chr2:42795911-42796156
  hyper

SEQ ID NO: 279699 - DNA, 59 bp, Homo sapiens; identical to SEQ ID NO: 198173
  chr2:43019539-43019598
  hyper

SEQ ID NO: 279700 - DNA, 84 bp, Homo sapiens; identical to SEQ ID NO: 105792
  chr2:43020503-43020587
  hyper

SEQ ID NO: 279701 - DNA, 49 bp, Homo sapiens
  chr2:43037887-43037936
  hyper
aagcaggaagcagctcgcagtggactctcaataccccttttccgagcta

SEQ ID NO: 279702 - DNA, 287 bp, Homo sapiens; identical to SEQ ID NO: 198175
  chr2:43445793-43446080
  hyper

SEQ ID NO: 279703 - DNA, 81 bp, Homo sapiens; identical to SEQ ID NO: 198176
  chr2:43446676-43446757
  hyper

SEQ ID NO: 279704 - DNA, 620 bp, Homo sapiens; identical to SEQ ID NO: 198177
  chr2:43446817-43447437
  hyper

SEQ ID NO: 279705 - DNA, 140 bp, Homo sapiens; identical to SEQ ID NO: 228265
  chr2:43447696-43447836
  hyper

SEQ ID NO: 279706 - DNA, 416 bp, Homo sapiens; identical to SEQ ID NO: 198178
  chr2:43452443-43452859
  hyper

SEQ ID NO: 279707 - DNA, 154 bp, Homo sapiens; identical to SEQ ID NO: 228269
  chr2:43453310-43453464
  hyper

SEQ ID NO: 279708 - DNA, 68 bp, Homo sapiens; identical to SEQ ID NO: 228270
  chr2:43454171-43454239
  hyper

SEQ ID NO: 279709 - DNA, 433 bp, Homo sapiens; identical to SEQ ID NO: 198179
  chr2:43822951-43823384
  hyper

SEQ ID NO: 279710 - DNA, 367 bp, Homo sapiens
  chr2:43864730-43865097
  hyper
gatgtcgccgggagaggtgggcagggggcggtggccggcggtccctcgcgcccgtgggctcccgtgacgttctgtttggaaacactgggcccgggcttctggcgcggcgcgagcggtcccgggggcgcagcggggcagcccagggtccccgagccgagggacccgcgcggtcagggatgccgcgctcgccttaggcttcgggagatccaccaggatctccggggcgaaactttaaactcaaaactttaaagaagcattttgtacacctcgagttgctggcacgtcaaagcaccctaaggtgacctacccggaaaccactgtccccgaagttagtggggcactttttaaaggacaacactttttaccc

SEQ ID NO: 279711 - DNA, 301 bp, Homo sapiens; identical to SEQ ID NO: 228273
  chr2:44223035-44223336
  hyper

SEQ ID NO: 279712 - DNA, 225 bp, Homo sapiens; identical to SEQ ID NO: 228274
  chr2:44588951-44589176
  hyper

SEQ ID NO: 279713 - DNA, 80 bp, Homo sapiens; identical to SEQ ID NO: 228276
  chr2:45030318-45030398
  hyper

SEQ ID NO: 279714 - DNA, 118 bp, Homo sapiens
  chr2:45157711-45157829
  hyper
agtcttgtggccctggcagaggtgacaagggcatttgggaaagacagagaaaaataaattcgctccagtgactgtacacggggcatttgaggctgtgagaaaacgagttgcttttctg

SEQ ID NO: 279715 - DNA, 128 bp, Homo sapiens; identical to SEQ ID NO: 198181
  chr2:45161093-45161221
  hyper

SEQ ID NO: 279716 - DNA, 48 bp, Homo sapiens
  chr2:45163155-45163203
  hyper
ttctcaccagcagcgcacacccctcccttccccgcccctactttagcc

SEQ ID NO: 279717 - DNA, 67 bp, Homo sapiens
  chr2:45164541-45164608
  hyper
gtggagggtcctttagagggcggcggggctcattaggcagagcagggtgccgagaggtgcgcgtcgc

SEQ ID NO: 279718 - DNA, 314 bp, Homo sapiens
  chr2:45165156-45165470
  hyper
gagcaaggccaagtgggtgcagctgccccaaccctccggatcctcgtctcccggaggcctgcagacccgttggctttccctgtaacccaaaacaaggagagagtgggaggtctctcgggcgttctccagatgtggttgagactttcccagtgctggggtggcgggtgacatttgtaaataaatgccagttggtccgggtacaaggagaacactatttaaaccccaaagacatcttttctccctgccccacctgaaggcgatattttagatcgccggggccaggattgaagcggggatgatggcagcaaatttgt

SEQ ID NO: 279719 - DNA, 50 bp, Homo sapiens; identical to SEQ ID NO: 198183
  chr2:45177234-45177284
  hyper

SEQ ID NO: 279720 - DNA, 531 bp, Homo sapiens
  chr2:45180203-45180734
  hyper
cccttctgggcgcgccatcgctcccgccacctgcactaggactttgcaggaacgcgcctcctacgcgctgcctaggaggaccagacgcgagacaagcgctcagcaagcagctacgtgcaggcagacctaccaagccaggagaaagagcggggatttcaggggcctccgctcccacagcggaccggcctccgcttaaaccaccagcacttcccagtgggcctgggaatcgaggatgtgaagtgtgtggatacatgtgaacgttgttgagtgtgcagtgagactgttgtgcagattctcatgaattgcaagagaaatatttaccttgtgcgggtgacaagtctacctgcagatgagcccgggggcttgtccagtgcttgtgagcatgatgcagaaatatcaactaagttctcgaagaatggaggggagagggacaagcacaattgagccctgtcctcaagtttctcacgatccagtaggagggacagttgaggtcaccacttaaaaacaaaccaaccccgtggagttgcacac

SEQ ID NO: 279721 - DNA, 250 bp, Homo sapiens; identical to SEQ ID NO: 228288
  chr2:45182675-45182925
  hyper

SEQ ID NO: 279722 - DNA, 49 bp, Homo sapiens
  chr2:45228528-45228577
  hyper
ggcggaggttcaggcggcaggaatggagaggctgatcctcctctagccc

SEQ ID NO: 279723 - DNA, 57 bp, Homo sapiens
  chr2:45231725-45231782
  hyper
atttccctccttccctgacccttcagtttcactgcaaatccacagaagcaggtttgc

SEQ ID NO: 279724 - DNA, 82 bp, Homo sapiens
  chr2:45236886-45236968
  hyper
ttgacggggcggatgcccaaagagggagggaggaggaggacaggagagcggggggagcgggcgaagacgaaaaggggtggat

SEQ ID NO: 279725 - DNA, 228 bp, Homo sapiens; identical to SEQ ID NO: 198186
  chr2:45396995-45397223
  hyper

SEQ ID NO: 279726 - DNA, 101 bp, Homo sapiens; identical to SEQ ID NO: 228298
  chr2:45837797-45837898
  hyper

SEQ ID NO: 279727 - DNA, 339 bp, Homo sapiens; identical to SEQ ID NO: 228299
  chr2:45878653-45878992
  hyper

SEQ ID NO: 279728 - DNA, 559 bp, Homo sapiens; identical to SEQ ID NO: 198187
  chr2:46524134-46524693
  hyper

SEQ ID NO: 279729 - DNA, 755 bp, Homo sapiens; identical to SEQ ID NO: 198188
  chr2:46524957-46525712
  hyper

SEQ ID NO: 279730 - DNA, 245 bp, Homo sapiens; identical to SEQ ID NO: 198189
  chr2:46525757-46526002
  hyper

SEQ ID NO: 279731 - DNA, 63 bp, Homo sapiens; identical to SEQ ID NO: 198190
  chr2:46526239-46526302
  hyper

SEQ ID NO: 279732 - DNA, 75 bp, Homo sapiens; identical to SEQ ID NO: 198191
  chr2:46526448-46526523
  hyper

SEQ ID NO: 279733 - DNA, 172 bp, Homo sapiens; identical to SEQ ID NO: 228301
  chr2:46689147-46689319
  hyper

SEQ ID NO: 279734 - DNA, 608 bp, Homo sapiens; identical to SEQ ID NO: 228302
  chr2:46727082-46727690
  hyper

SEQ ID NO: 279735 - DNA, 63 bp, Homo sapiens
  chr2:46770636-46770699
  hyper
atattcgaggggaccgagcgagacgtggctacgggacttgggagaagggggtggacggctggg

SEQ ID NO: 279736 - DNA, 128 bp, Homo sapiens
  chr2:46770831-46770959
  hyper
attgccccagagcccaggtcactgtgagcttctctccccgcccccacttctgtccttgcagtcagcgtcaccgtggggggcaagcagtacctcctaggactctatgacacggccggacaggtgagtgt

SEQ ID NO: 279737 - DNA, 56 bp, Homo sapiens; identical to SEQ ID NO: 228303
  chr2:46926176-46926232
  hyper

SEQ ID NO: 279738 - DNA, 545 bp, Homo sapiens; identical to SEQ ID NO: 228304
  chr2:47142871-47143416
  hyper

SEQ ID NO: 279739 - DNA, 81 bp, Homo sapiens; identical to SEQ ID NO: 198192
  chr2:47167906-47167987
  hyper

SEQ ID NO: 279740 - DNA, 122 bp, Homo sapiens; identical to SEQ ID NO: 228305
  chr2:47168426-47168548
  hyper

SEQ ID NO: 279741 - DNA, 97 bp, Homo sapiens; identical to SEQ ID NO: 228306
  chr2:47169106-47169203
  hyper

SEQ ID NO: 279742 - DNA, 42 bp, Homo sapiens; identical to SEQ ID NO: 228307
  chr2:47403982-47404024
  hyper

SEQ ID NO: 279743 - DNA, 482 bp, Homo sapiens; identical to SEQ ID NO: 228308
  chr2:47499351-47499833
  hyper

SEQ ID NO: 279744 - DNA, 329 bp, Homo sapiens; identical to SEQ ID NO: 198194
  chr2:47596115-47596444
  hyper

SEQ ID NO: 279745 - DNA, 60 bp, Homo sapiens; identical to SEQ ID NO: 198195
  chr2:47596505-47596565
  hyper

SEQ ID NO: 279746 - DNA, 55 bp, Homo sapiens; identical to SEQ ID NO: 198196
  chr2:47596794-47596849
  hyper

SEQ ID NO: 279747 - DNA, 41 bp, Homo sapiens; identical to SEQ ID NO: 37435
  chr2:47596941-47596982
  hyper

SEQ ID NO: 279748 - DNA, 763 bp, Homo sapiens
  chr2:47629778-47630541
  hyper
tgtagaataaacccgtaatcccgatgttggcagtttgcttagaaagaaaaagggaggcagtcggagaggggcacacgttttaacaaaatactgggaggaggaggaaggctagttttttttttgttttcaagtttccttctgatgttactcccatgcttccgggcacattacgagctcagtgcctgccggaaatctcccacctggtggcaacctacccttgcatacaccccacccaggggcttcaagccttgcagctgagtaaacacagaaaggagctctactaaggatgcgcgtctgcgggtttccgcgcgacctaggcgcaggcatgcgcagtagctaaagtcaccagcgtgcgcgggaagctgggccgcgtctgcttatgattggttgccgcggcagactcccacccaccgaaacgcagccctggaagctgattgggtgtggtcgccgtggccggacgccgctcgggggacgtgggaggggaggcgggaaacagcttagtgggtgtggggtcgcgcattttcttcaaccaggaggtgaggaggtttcgacatggcggtgcagccgaaggagacgctgcagttggagagcgcggccgaggtcggcttcgtgcgcttctttcagggcatgccggagaagccgaccaccacagtgcgccttttcgaccggggcgacttctatacggcgcacggcgaggacgcgctgctggccgcccgggaggtgttcaagacccagggggtgatcaagtacatggggccggcag

SEQ ID NO: 279749 - DNA, 155 bp, Homo sapiens; identical to SEQ ID NO: 221744
  chr2:47635539-47635694
  hyper

SEQ ID NO: 279750 - DNA, 279 bp, Homo sapiens; identical to SEQ ID NO: 221745
  chr2:47637232-47637511
  hyper

SEQ ID NO: 279751 - DNA, 147 bp, Homo sapiens; identical to SEQ ID NO: 221746
  chr2:47639552-47639699
  hyper

SEQ ID NO: 279752 - DNA, 150 bp, Homo sapiens; identical to SEQ ID NO: 221747
  chr2:47641407-47641557
  hyper

SEQ ID NO: 279753 - DNA, 134 bp, Homo sapiens; identical to SEQ ID NO: 221748
  chr2:47643434-47643568
  hyper

SEQ ID NO: 279754 - DNA, 200 bp, Homo sapiens; identical to SEQ ID NO: 221749
  chr2:47656880-47657080
  hyper

SEQ ID NO: 279755 - DNA, 110 bp, Homo sapiens; identical to SEQ ID NO: 221750
  chr2:47672686-47672796
  hyper

SEQ ID NO: 279756 - DNA, 124 bp, Homo sapiens; identical to SEQ ID NO: 221751
  chr2:47690169-47690293
  hyper

SEQ ID NO: 279757 - DNA, 151 bp, Homo sapiens; identical to SEQ ID NO: 221752
  chr2:47693796-47693947
  hyper

SEQ ID NO: 279758 - DNA, 98 bp, Homo sapiens; identical to SEQ ID NO: 221753
  chr2:47698103-47698201
  hyper

SEQ ID NO: 279759 - DNA, 246 bp, Homo sapiens; identical to SEQ ID NO: 221754
  chr2:47702163-47702409
  hyper

SEQ ID NO: 279760 - DNA, 205 bp, Homo sapiens; identical to SEQ ID NO: 221755
  chr2:47703505-47703710
  hyper

SEQ ID NO: 279761 - DNA, 248 bp, Homo sapiens; identical to SEQ ID NO: 221756
  chr2:47705410-47705658
  hyper

SEQ ID NO: 279762 - DNA, 176 bp, Homo sapiens; identical to SEQ ID NO: 221757
  chr2:47707834-47708010
  hyper

SEQ ID NO: 279763 - DNA, 450 bp, Homo sapiens; identical to SEQ ID NO: 221758
  chr2:47709917-47710367
  hyper

SEQ ID NO: 279764 - DNA, 79 bp, Homo sapiens; identical to SEQ ID NO: 198198
  chr2:47747971-47748050
  hyper

SEQ ID NO: 279765 - DNA, 203 bp, Homo sapiens
  chr2:47748523-47748726
  hyper
ttccggtaggcggcgtgctggctgctcaccaggtccccgaagccgatggtgctgaaggtgacgaagcagaagtagagcgagtccacgtagtcccagccctccacgctggtgtacatggccgaggcgcagcaggacagcagcacggcgaacaggcccaggatgagcagcacgtggtacaccgagggcttccagcccgccaggct

SEQ ID NO: 279766 - DNA, 192 bp, Homo sapiens; identical to SEQ ID NO: 198200
  chr2:48009756-48009948
  hyper

SEQ ID NO: 279767 - DNA, 412 bp, Homo sapiens; identical to SEQ ID NO: 221761
  chr2:48010220-48010632
  hyper

SEQ ID NO: 279768 - DNA, 35 bp, Homo sapiens; identical to SEQ ID NO: 198201
  chr2:48011383-48011418
  hyper

SEQ ID NO: 279769 - DNA, 197 bp, Homo sapiens; identical to SEQ ID NO: 221762
  chr2:48018065-48018262
  hyper

SEQ ID NO: 279770 - DNA, 170 bp, Homo sapiens; identical to SEQ ID NO: 221763
  chr2:48023032-48023202
  hyper

SEQ ID NO: 279771 - DNA, 2545 bp, Homo sapiens; identical to SEQ ID NO: 221764
  chr2:48025749-48028294
  hyper

SEQ ID NO: 279772 - DNA, 266 bp, Homo sapiens; identical to SEQ ID NO: 221765
  chr2:48030558-48030824
  hyper

SEQ ID NO: 279773 - DNA, 118 bp, Homo sapiens; identical to SEQ ID NO: 221766
  chr2:48032048-48032166
  hyper

SEQ ID NO: 279774 - DNA, 90 bp, Homo sapiens; identical to SEQ ID NO: 221767
  chr2:48032756-48032846
  hyper

SEQ ID NO: 279775 - DNA, 750 bp, Homo sapiens; identical to SEQ ID NO: 221768
  chr2:48033342-48034092
  hyper

SEQ ID NO: 279776 - DNA, 227 bp, Homo sapiens; identical to SEQ ID NO: 228315
  chr2:48131259-48131486
  hyper

SEQ ID NO: 279777 - DNA, 55 bp, Homo sapiens; identical to SEQ ID NO: 228316
  chr2:48543151-48543206
  hyper

SEQ ID NO: 279778 - DNA, 152 bp, Homo sapiens; identical to SEQ ID NO: 228317
  chr2:48756956-48757108
  hyper

SEQ ID NO: 279779 - DNA, 111 bp, Homo sapiens
  chr2:48757430-48757541
  hyper
tctgggaaagtttgcgggcgccccgggacgcgggcatctccagggccgctcggcgcctccccatctccccgcgcccgccctggccgcccccaggggcgccctggggcccgc

SEQ ID NO: 279780 - DNA, 267 bp, Homo sapiens
  chr2:48757626-48757893
  hyper
aactcaaacagcaaaaaaaggaatatcgactcagttccgagggcgggggccggggctcgttctcacccgcgcgcggcccctcgacctctcggacccgggccaccagctctgcgcccctcacgcctccctcggggtctctgtgtctctctcccgctcccggactccctcctccttctgactgctgttatttgggctgttgtccctccccgctccctggtacctcagctcggaccttagcctgtgcctgcagcccggagtcccctcctg

SEQ ID NO: 279781 - DNA, 133 bp, Homo sapiens; identical to SEQ ID NO: 198202
  chr2:50573244-50573377
  hyper

SEQ ID NO: 279782 - DNA, 182 bp, Homo sapiens
  chr2:50573865-50574047
  hyper
tgcaataggcactgaatgatgcttgctgctgccatggaaatggtggatgtggtgcgctcccaaactggatgccccccacgccactcctaggaggccgctgagggtgagcgggactatccaaagcagggccaggcgcccccctgcgccgccgccgccgccgccgccgccgccgcccccgggcg

SEQ ID NO: 279783 - DNA, 251 bp, Homo sapiens; identical to SEQ ID NO: 198204
  chr2:50629607-50629858
  hyper

SEQ ID NO: 279784 - DNA, 50 bp, Homo sapiens
  chr2:51259211-51259261
  hyper
tgccttttcagaggcgtcaggcttgagcgtctatctccaggagtgcggga

SEQ ID NO: 279785 - DNA, 235 bp, Homo sapiens; identical to SEQ ID NO: 198205
  chr2:51259566-51259801
  hyper

SEQ ID NO: 279786 - DNA, 41 bp, Homo sapiens; identical to SEQ ID NO: 198206
  chr2:54682463-54682504
  hyper

SEQ ID NO: 279787 - DNA, 140 bp, Homo sapiens; identical to SEQ ID NO: 221769
  chr2:54683032-54683172
  hyper

SEQ ID NO: 279788 - DNA, 448 bp, Homo sapiens; identical to SEQ ID NO: 198207
  chr2:54784958-54785406
  hyper

SEQ ID NO: 279789 - DNA, 713 bp, Homo sapiens; identical to SEQ ID NO: 198208
  chr2:54785407-54786120
  hyper

SEQ ID NO: 279790 - DNA, 425 bp, Homo sapiens; identical to SEQ ID NO: 228325
  chr2:54798138-54798563
  hyper

SEQ ID NO: 279791 - DNA, 93 bp, Homo sapiens; identical to SEQ ID NO: 228326
  chr2:54950042-54950135
  hyper

SEQ ID NO: 279792 - DNA, 94 bp, Homo sapiens; identical to SEQ ID NO: 198209
  chr2:54951619-54951713
  hyper

SEQ ID NO: 279793 - DNA, 283 bp, Homo sapiens; identical to SEQ ID NO: 198210
  chr2:54951795-54952078
  hyper

SEQ ID NO: 279794 - DNA, 89 bp, Homo sapiens; identical to SEQ ID NO: 228328
  chr2:55276442-55276531
  hyper

SEQ ID NO: 279795 - DNA, 199 bp, Homo sapiens; identical to SEQ ID NO: 228329
  chr2:55459598-55459797
  hyper

SEQ ID NO: 279796 - DNA, 375 bp, Homo sapiens; identical to SEQ ID NO: 228330
  chr2:55496130-55496505
  hyper

SEQ ID NO: 279797 - DNA, 581 bp, Homo sapiens; identical to SEQ ID NO: 198212
  chr2:55509213-55509794
  hyper

SEQ ID NO: 279798 - DNA, 101 bp, Homo sapiens
  chr2:55646327-55646428
  hyper
aaaaatcccatcgtggaggaggggggcactctccctcctcaaaaaacaccccagagtgaaacgagccgaaatcccaagaagtggcttcgacgacggacacc

SEQ ID NO: 279799 - DNA, 680 bp, Homo sapiens
  chr2:55646458-55647138
  hyper
taccgggcgaggaggggcagagaaaaggcatctggaggaggaggaagggaaagggggctggaacccaagacaaaaagcccgtcaaggttgtccagctcctggaggatccagaccagcgaaactgctcccaatgaatcaatcccaacgggggctaaatgaaatacgttaaacagagaccacgttaaggataccgaggcgccaccagactcgacctcggcgttccgacctctacacgttccacccaccgatgggcatggagccgctttcgacccgcggagcctccactgcccgcagcccctcagtaccaacaggcagggctcgccccttccccccgagcagacaccattcctccgccgccctcaagcctcgcctccagcccccttcccctcccgggggtgggggcttgaatgtgtgtccctaaccccccagcttcctaagccctgccagcctttcagcgcgtctctgggaatccctggcacaaaatcaccgccgcgctccagccttctccgccctctatggagaagccggagtaacggcctcagaaccgcagtgccgcatcacaccccacccctcgccgcccgccagcgccgcccgccaatgccgggggccgccgtcaaagggagcgcgctgctccctccgcgccgatatccttccgccgactccccgcccctcccgtgcag

SEQ ID NO: 279800 - DNA, 52 bp, Homo sapiens; identical to SEQ ID NO: 228333
  chr2:55746535-55746587
  hyper

SEQ ID NO: 279801 - DNA, 71 bp, Homo sapiens; identical to SEQ ID NO: 105977
  chr2:55921038-55921109
  hyper

SEQ ID NO: 279802 - DNA, 80 bp, Homo sapiens; identical to SEQ ID NO: 198214
  chr2:56149729-56149809
  hyper

SEQ ID NO: 279803 - DNA, 89 bp, Homo sapiens; identical to SEQ ID NO: 198215
  chr2:56150447-56150536
  hyper

SEQ ID NO: 279804 - DNA, 51 bp, Homo sapiens
  chr2:56410766-56410817
  hyper
atccctccaaatacgaagcacctcgcatttgggtcagcagctgtttcccct

SEQ ID NO: 279805 - DNA, 276 bp, Homo sapiens
  chr2:56411253-56411529
  hyper
ggaggcgccgcggtgcccggcgcgccctccaagctaggagaggggagaagccgggggctgcagctgggcaagggggaggaaagtgcgtgtgcgtgcacgcctgtgtgcagggcagagagtgcggggggcgacagtctcggcttagggcggaggagagggcaggggaacggcggtgcagctcccccgctgtccccgaggatttcccgcggcagccccgggctccccagtgcccctcaccatggacttgcgcggagttgggacgggcctcggcagcag

SEQ ID NO: 279806 - DNA, 456 bp, Homo sapiens
  chr2:56411799-56412255
  hyper
cggcggaaagttgttccccagccccggccggctcgtccgcggccccgcccgcgccggtggaggacctgtccaaagtgtcggacgaggagctgctgcagtggagcaaggaggagctgatccgcagcctgcggcgcgccgaggcggagaaggtgagcgcgatgctggaccacagcaacctcatccgcgaggtgaaccgccgcctgcagctgcacctcggcgagatccgcggcctcaaggtgagcgcgggccaggtggggaggcgcggcgcggctgggagcggggtgccccgaggaggaggcggggccaggcaaactttccctccctccctcaacaggtgaccctccccttctcccggtcggcaccccctacccccagtccccagcccctgtgtaacttttccaaacttcggaggcgtctgctcccctcctctccccaacacggggcgctccactgtct

SEQ ID NO: 279807 - DNA, 284 bp, Homo sapiens
  chr2:56412327-56412611
  hyper
ttagggaggctggaaaatctgtgcctggggagccgggtttcagtcagttaggcggaaaggccagtgagggggtgaatccaggggatcttcgccttggagggtcgggaatgcggctgctctgggccagcagctcttgggcgggcagagggcgaggaaagggcgccactgccagggagagcggctggcggggcgcccgggagaagcagcgggcgccaccctcagagcagtcttgtgtcaccgggtacataggagttcaagctctgccttcacgtcttctcccaatt

SEQ ID NO: 279808 - DNA, 193 bp, Homo sapiens; identical to SEQ ID NO: 198216
  chr2:56412856-56413049
  hyper

SEQ ID NO: 279809 - DNA, 160 bp, Homo sapiens; identical to SEQ ID NO: 198217
  chr2:58273538-58273698
  hyper

SEQ ID NO: 279810 - DNA, 54 bp, Homo sapiens; identical to SEQ ID NO: 228340
  chr2:58274020-58274074
  hyper

SEQ ID NO: 279811 - DNA, 232 bp, Homo sapiens; identical to SEQ ID NO: 228341
  chr2:58274307-58274539
  hyper

SEQ ID NO: 279812 - DNA, 33 bp, Homo sapiens; identical to SEQ ID NO: 198219
  chr2:58655395-58655428
  hyper

SEQ ID NO: 279813 - DNA, 348 bp, Homo sapiens
  chr2:58655631-58655979
  hyper
cgccgcgcgcgccacccccgctgcctccccgcccccggcggccccggagcacccccaccatcccctgccccctcccccaccggatcgccccagccccctcctcttgcccccggcgcagctgggctccgcttggatttcggtgacgctgtggctctgttcgtttgctgctgctgctgctgctgctgctgctgcagccagggggaaggggtggggagagttggggtgggggcggcagagcagtgtggagagcagtgcccctccactcgtttgttgcctcttggggtcaggacctccccgcctgggccagcccagcggacggccccggtgcgcgctcgccttgcgccaccg

SEQ ID NO: 279814 - DNA, 101 bp, Homo sapiens; identical to SEQ ID NO: 198220
  chr2:58776940-58777041
  hyper

SEQ ID NO: 279815 - DNA, 216 bp, Homo sapiens; identical to SEQ ID NO: 228343
  chr2:60777863-60778079
  hyper

SEQ ID NO: 279816 - DNA, 70 bp, Homo sapiens; identical to SEQ ID NO: 198221
  chr2:60780329-60780399
  hyper

SEQ ID NO: 279817 - DNA, 175 bp, Homo sapiens; identical to SEQ ID NO: 228345
  chr2:60782018-60782193
  hyper

SEQ ID NO: 279818 - DNA, 90 bp, Homo sapiens; identical to SEQ ID NO: 106001
  chr2:60782777-60782867
  hyper

SEQ ID NO: 279819 - DNA, 545 bp, Homo sapiens; identical to SEQ ID NO: 198222
  chr2:60783807-60784352
  hyper

SEQ ID NO: 279820 - DNA, 394 bp, Homo sapiens; identical to SEQ ID NO: 198223
  chr2:60784505-60784899
  hyper

SEQ ID NO: 279821 - DNA, 405 bp, Homo sapiens; identical to SEQ ID NO: 228351
  chr2:60808827-60809232
  hyper

SEQ ID NO: 279822 - DNA, 252 bp, Homo sapiens; identical to SEQ ID NO: 228353
  chr2:60983180-60983432
  hyper

SEQ ID NO: 279823 - DNA, 213 bp, Homo sapiens; identical to SEQ ID NO: 228354
  chr2:61108072-61108285
  hyper

SEQ ID NO: 279824 - DNA, 378 bp, Homo sapiens; identical to SEQ ID NO: 228355
  chr2:61109141-61109519
  hyper

SEQ ID NO: 279825 - DNA, 77 bp, Homo sapiens; identical to SEQ ID NO: 198225
  chr2:61109819-61109896
  hyper

SEQ ID NO: 279826 - DNA, 137 bp, Homo sapiens; identical to SEQ ID NO: 198226
  chr2:61110113-61110250
  hyper

SEQ ID NO: 279827 - DNA, 438 bp, Homo sapiens; identical to SEQ ID NO: 198227
  chr2:61175661-61176099
  hyper

SEQ ID NO: 279828 - DNA, 253 bp, Homo sapiens; identical to SEQ ID NO: 228358
  chr2:61244606-61244859
  hyper

SEQ ID NO: 279829 - DNA, 286 bp, Homo sapiens; identical to SEQ ID NO: 228359
  chr2:61293059-61293345
  hyper

SEQ ID NO: 279830 - DNA, 138 bp, Homo sapiens; identical to SEQ ID NO: 228360
  chr2:61404133-61404271
  hyper

SEQ ID NO: 279831 - DNA, 116 bp, Homo sapiens; identical to SEQ ID NO: 228361
  chr2:61765409-61765525
  hyper

SEQ ID NO: 279832 - DNA, 95 bp, Homo sapiens; identical to SEQ ID NO: 221776
  chr2:61921788-61921883
  hyper

SEQ ID NO: 279833 - DNA, 826 bp, Homo sapiens
  chr2:61990960-61991786
  hyper
ggcgaagacagggctcgctgacgcccccggtcgcccgcgcctcttcccacagctctccgaggagcccagctaccggaaacacgccacatcaggcctcggaattctgggcatcggacggacagctcgtgacctcagaaggaggaaaacggtcaccttctgaaagaaacacgaactcctctttcctgtatcagaacatttctcattcacctgagcgcggcgtttctatcctgagatgttgggaggaggttcgaggtgggcggggtgacggttttctcttggaaatgaaaaacagcctttcctgctacccctgcccgctcacacaggcgagacttggagtctgccccgcggaaagccgtttctatgggtgacgacgtatggcaacgcgtctaagggaacgtcggcgagtcgactattgtgttcccaaagtcgccctgaaatgaggacagaagttcgggggagccgggggcgtagagtaaaggcacgatctgattggcccgcggccgcgcaacgatgggcgggacggggcagaagtgtgggcgagctggggcgtcaccgcgcgccgggtagtctctctcacgccctggcgggtgcgcaggtctctaaactgggcggagcaagggaagtgatgtgtggcctccggaaggacgcgcgtaaatcctcacccataagtaacgagtcgccgtggtcaaacaaggccctcctacgataccaatcgcgtggcgggtgtggtactgccgaacccgaggaatgagaaaggaggcccggcagaaagttcggatcagctgccggccgttcccggcgtagcctagggcggggagggattgac

SEQ ID NO: 279834 - DNA, 199 bp, Homo sapiens; identical to SEQ ID NO: 228364
  chr2:62081271-62081470
  hyper

SEQ ID NO: 279835 - DNA, 67 bp, Homo sapiens; identical to SEQ ID NO: 228365
  chr2:62115906-62115973
  hyper

SEQ ID NO: 279836 - DNA, 178 bp, Homo sapiens; identical to SEQ ID NO: 228366
  chr2:62132600-62132778
  hyper

SEQ ID NO: 279837 - DNA, 423 bp, Homo sapiens; identical to SEQ ID NO: 228367
  chr2:62422576-62422999
  hyper

SEQ ID NO: 279838 - DNA, 801 bp, Homo sapiens; identical to SEQ ID NO: 228368
  chr2:62424205-62425006
  hyper

SEQ ID NO: 279839 - DNA, 637 bp, Homo sapiens; identical to SEQ ID NO: 198232
  chr2:62732953-62733590
  hyper

SEQ ID NO: 279840 - DNA, 154 bp, Homo sapiens; identical to SEQ ID NO: 198233
  chr2:62798173-62798327
  hyper

SEQ ID NO: 279841 - DNA, 83 bp, Homo sapiens; identical to SEQ ID NO: 198234
  chr2:62798526-62798609
  hyper

SEQ ID NO: 279842 - DNA, 850 bp, Homo sapiens
  chr2:63276492-63277342
  hyper
gcagttaaggaaacagtgtgccctccatcatattctgttaccgtattttattcggactccaaaggaaagtgtcgcttgggggagggggaagcactttgatgagcggcggccgcggccccttttcactcagcgggctcccccttcgttctcctcctcctcacccagcgcccggtccgctctcggcgcccgaccccgcagcccgggcagcgcgagtgctccccactgcgatgcgcctggaggctccttgacttgccctcacacttaatcctgtgcaaactttttaccccgcctgtcggggtgggggagtgggggagattagaaacaaggggtagaaattcctcgaaagggaataaagtgcctaattttcaggaggaggtgccatttaaaagattcgcctagcttagagttggaacgaaaactcttttttgcacttttaaaagtccacccaggtagacgtgtttgggaagttttttcgggtgggaaatgggcttcgcccgtacgaacaatccggggaaatcgcctcaaggaggatccttacgcagcatgtggaaaaaagttgagggcaggggtctgtggccacattttccatcaaaaagtccctgttagaggcagtctaagaaagagagagaaagagcgaaaaagaaactttcctatcaaaatgtttcaattaagaagtagggtgtacgtgtgaggggaagaggacgctgggctccaacgtttcagtagaagcgcttaagacttgcaaacacccttggtggggacctggaaccccgggagatgccgacgagcaagcaggtaagtggcggcgccctcccagtgggtgctcttcccaggcgcgagagtccggagg

SEQ ID NO: 279843 - DNA, 211 bp, Homo sapiens; identical to SEQ ID NO: 198237
  chr2:63278422-63278633
  hyper

SEQ ID NO: 279844 - DNA, 283 bp, Homo sapiens; identical to SEQ ID NO: 106042
  chr2:63279141-63279424
  hyper

SEQ ID NO: 279845 - DNA, 97 bp, Homo sapiens
  chr2:63282553-63282650
  hyper
gggagttgggtccgcggggcggtggagcaacaagctcccctagctccctttgacccactctcccccatccggcccactgcaggtctggttcaagaac

SEQ ID NO: 279846 - DNA, 92 bp, Homo sapiens
  chr2:63284466-63284558
  hyper
gggcgcgggatatccgaagtgtggaggaaacagacaagtcagggtacagaggtgggggttgggcaggggcgcagggctgaccccctcacccg

SEQ ID NO: 279847 - DNA, 75 bp, Homo sapiens; identical to SEQ ID NO: 198238
  chr2:63287368-63287443
  hyper

SEQ ID NO: 279848 - DNA, 489 bp, Homo sapiens; identical to SEQ ID NO: 228377
  chr2:63815746-63816235
  hyper

SEQ ID NO: 279849 - DNA, 86 bp, Homo sapiens; identical to SEQ ID NO: 228378
  chr2:64067905-64067991
  hyper

SEQ ID NO: 279850 - DNA, 83 bp, Homo sapiens; identical to SEQ ID NO: 228379
  chr2:64068891-64068974
  hyper

SEQ ID NO: 279851 - DNA, 94 bp, Homo sapiens; identical to SEQ ID NO: 198240
  chr2:64455371-64455465
  hyper

SEQ ID NO: 279852 - DNA, 34 bp, Homo sapiens; identical to SEQ ID NO: 198241
  chr2:64455661-64455695
  hyper

SEQ ID NO: 279853 - DNA, 84 bp, Homo sapiens; identical to SEQ ID NO: 228381
  chr2:64681068-64681152
  hyper

SEQ ID NO: 279854 - DNA, 293 bp, Homo sapiens; identical to SEQ ID NO: 228382
  chr2:64752068-64752361
  hyper

SEQ ID NO: 279855 - DNA, 147 bp, Homo sapiens; identical to SEQ ID NO: 228383
  chr2:64752591-64752738
  hyper

SEQ ID NO: 279856 - DNA, 142 bp, Homo sapiens; identical to SEQ ID NO: 221780
  chr2:64872367-64872509
  hyper

SEQ ID NO: 279857 - DNA, 395 bp, Homo sapiens; identical to SEQ ID NO: 198242
  chr2:64994380-64994775
  hyper

SEQ ID NO: 279858 - DNA, 357 bp, Homo sapiens; identical to SEQ ID NO: 221781
  chr2:65086836-65087193
  hyper

SEQ ID NO: 279859 - DNA, 482 bp, Homo sapiens; identical to SEQ ID NO: 221782
  chr2:65215348-65215830
  hyper

SEQ ID NO: 279860 - DNA, 236 bp, Homo sapiens; identical to SEQ ID NO: 228385
  chr2:65283407-65283643
  hyper

SEQ ID NO: 279861 - DNA, 40 bp, Homo sapiens; identical to SEQ ID NO: 228386
  chr2:65659688-65659728
  hyper

SEQ ID NO: 279862 - DNA, 90 bp, Homo sapiens; identical to SEQ ID NO: 198244
  chr2:66652773-66652863
  hyper

SEQ ID NO: 279863 - DNA, 59 bp, Homo sapiens; identical to SEQ ID NO: 198245
  chr2:66652963-66653022
  hyper

SEQ ID NO: 279864 - DNA, 95 bp, Homo sapiens; identical to SEQ ID NO: 106088
  chr2:66654136-66654231
  hyper

SEQ ID NO: 279865 - DNA, 264 bp, Homo sapiens; identical to SEQ ID NO: 198247
  chr2:66660314-66660578
  hyper

SEQ ID NO: 279866 - DNA, 1013 bp, Homo sapiens
  chr2:66660888-66661901
  hyper
atacgaaaataacgccactaaatataatcacaagggagaagcttagagcgggagaataaagagaaggggtgagggggaattaaagcccaggcaataggtgttaaagttaaaaacaaaacaaaacaaaaaacagtggttggttggagcctccgagttgtaggtacaggcagcttttgtctgaaatctcagcttccgaagcggatttctttttctctggcactgggaggtttcgccgagccgggttggggacgggaaagaggagcgcggggaaggatgtctggggtggtgagggcagggcttcgctggagaaagagctagtggggcgcgaggttcttacaggcccgggagaggtcgaggctggagcccctcggcgcctctaagacaaaggcagcggtggctgcagccggagcctagcactccggcagcgtcgcgccgcgccgcgccgcgccctgggcgcacggccgcctcaccccgagcgggtcggagaaagagcctccctcccagcggctccccggccccggctccgcccgcgaggtctgggctgctgcgagcccgcgccgggtttcgctttccgacgatcataaatagcttggtgtttgtaaacaggcgctgggggcacattccccgcgctcagctcattgttccctcccttcctctctacttcgcgcaggacgcctgggctggggctgggagccgccggggctaggaggtgggggagtccagacccgaagtgacaaaatgctagcattttctttcccccggccgggcgtccacctctaacagcaaagaaacctctaagctgggtctgcagaaagcccgagccacctcaaccccatgttctcaggactccttagcagaggctttcccaacctggcttctccctccttttcctccacgatcccgctttgacttttctccttgcagtgtttagttctgagaattcagtactttgcgcatcaccccctgccccgaaaaacactggcagaccccaataatttcgaggaaagtcatga

SEQ ID NO: 279867 - DNA, 178 bp, Homo sapiens
  chr2:66662571-66662749
  hyper
cattcattcaccacgttgacaacctcgcctgtgattgacagctggagtggcagaaagccatgagatttggtagttgggtctgaggggcgctcttttttttccttttctttctttctttctttttttttttttaaactgatttttgggggagagaagatctgcttttttttgcccccgc

SEQ ID NO: 279868 - DNA, 98 bp, Homo sapiens; identical to SEQ ID NO: 198251
  chr2:66662824-66662922
  hyper

SEQ ID NO: 279869 - DNA, 350 bp, Homo sapiens; identical to SEQ ID NO: 198252
  chr2:66802947-66803297
  hyper

SEQ ID NO: 279870 - DNA, 406 bp, Homo sapiens
  chr2:66803754-66804160
  hyper
gggggctggagggcacatggaacgcgtgcacggcccactaggagggcgttgggaggagagtgcccgagtctggagccgcagccgggaagccgtagacagcaccccgacgccttaggcagaagctcctcaggatcactttaaaagctctgcaaactttccccagcctttcggataccctcaggcccttggcccaccggaaggcagtaaaaacgtaacttcatgctgcaaagctcccgggtaggcgcttggacgccgatggagagaggcgtggaactgggtagtggggcgccctgcctggctgggcacttttccttgtctcattctcgtctcccatgccatgccttacccactggctgctagcggcgcgtttcacttaaggtggccacggtgcggagactacaggagc

SEQ ID NO: 279871 - DNA, 232 bp, Homo sapiens; identical to SEQ ID NO: 198255
  chr2:67624277-67624509
  hyper

SEQ ID NO: 279872 - DNA, 41 bp, Homo sapiens; identical to SEQ ID NO: 228395
  chr2:68384727-68384768
  hyper

SEQ ID NO: 279873 - DNA, 94 bp, Homo sapiens; identical to SEQ ID NO: 198256
  chr2:68547270-68547364
  hyper

SEQ ID NO: 279874 - DNA, 40 bp, Homo sapiens; identical to SEQ ID NO: 198257
  chr2:69240028-69240068
  hyper

SEQ ID NO: 279875 - DNA, 505 bp, Homo sapiens
  chr2:69240720-69241225
  hyper
acgcagggaggatgggggtccagcctgctacggcggatttgacctgtacttcattttggacaagtaagtgccgcgagttgtcccccccaccccaggctaagcgggcgaaaacgctttcgccccgggccgggctcgttggcagggtcgcctggggacaggagcgcatctccagggccacagagggaccgcgcggcaggcggcggcggagtgctgcgcctttgttggggcgcgctcctcccagcctcggctccagagcccgcagccgaggcgacgccgcttgctcggaaggggacagacttcttttctgtcttgctttctgtgtcccaggagcaggcaaggggcttggaggatgctattgtcttgctgagtttctgtgactccctcccgtgttggtgggaaaggcttgcttaccaaaggcagaacttgcaggcacaggcactcctaaagttagaggcttgggcattttaaagccaatcgtcgcattttgtttttgtttttgtttttt

SEQ ID NO: 279876 - DNA, 37 bp, Homo sapiens; identical to SEQ ID NO: 198259
  chr2:69533478-69533515
  hyper

SEQ ID NO: 279877 - DNA, 83 bp, Homo sapiens
  chr2:69533984-69534067
  hyper
ctggcccgactgtggcccccgggaaagacgccggtcccgtgagcaccgccccttctgttgtctccagacgccccgctgggatc

SEQ ID NO: 279878 - DNA, 72 bp, Homo sapiens; identical to SEQ ID NO: 228402
  chr2:69664548-69664620
  hyper

SEQ ID NO: 279879 - DNA, 374 bp, Homo sapiens
  chr2:69968429-69968803
  hyper
catgggtgcaaagacgacctagccctagttggtgtcttcaagaggctgcgtccagcaggggaagcagatatgaaaacacagaactattacaagggatgagcgccgcgccaagccgaacctgggagctacggacagtgtctaaactttagtcactcacaggagtacaaagatccggggctgctcctaactcctactccaaagctttcctggcctgctgggcgcacagggaagagggaagtgctggaaacttttgggaatgtgtgttttcatgtgaaagaggggaatgaaatgtatccttcagatttcactttctacttttccggccacgggctcggcacgacctgccgttgggagacgaacggtttcccgaggtg

SEQ ID NO: 279880 - DNA, 35 bp, Homo sapiens; identical to SEQ ID NO: 228404
  chr2:69969207-69969242
  hyper

SEQ ID NO: 279881 - DNA, 275 bp, Homo sapiens; identical to SEQ ID NO: 228405
  chr2:70056451-70056726
  hyper

SEQ ID NO: 279882 - DNA, 359 bp, Homo sapiens; identical to SEQ ID NO: 228406
  chr2:70120922-70121281
  hyper

SEQ ID NO: 279883 - DNA, 300 bp, Homo sapiens; identical to SEQ ID NO: 228407
  chr2:70141869-70142169
  hyper

SEQ ID NO: 279884 - DNA, 74 bp, Homo sapiens; identical to SEQ ID NO: 198260
  chr2:70313274-70313348
  hyper

SEQ ID NO: 279885 - DNA, 487 bp, Homo sapiens
  chr2:70313475-70313962
  hyper
ctgagagattgtgaagcacgttgcgcacggggccctttctggtctggcttagcccaaggaggaaggggaaaaggcagaaatcacaactcataggccagcgtcttgagcgacacttcctcagcgggaagaaccggcaaaaaaggccttccaagatggcgggccctgacggggccgccccccttgagcctggcgcagtggctgcgcccatgggcccgaaaagcagccgcgggagcccaggccgcgcggggaaagccgcagaaacgtcctgaagccctggccggcagcccctgaacaaacgaggcctccacaggcgtacactattgtttctaatgtcggaaaagggtgccgcggtggaaacgacacaagggcaggaggtggggtttctgtggctttaaccgaaagaaacttgcgaaacgcaaacaaagcattatgtaaatggacgccattctttttaggaccacgtttctagcacgccccacaaacagca

SEQ ID NO: 279886 - DNA, 331 bp, Homo sapiens
  chr2:70351165-70351496
  hyper
cataggacagcagccggctctttttttcatcaggatgtggagagtgggcgccttgggaagacgaaattgagtatgtgcgggggaggggtcatatgaaacaaggtcgggaagggggcggggagagctggggctctggaggagcttggggctcgcgctgcgggggaggaagcgccttccgcggtcgctggggggaagtggttaggaggaagcacgggcagtggaggggactgctggagggtcccatctgggaaagcaggcacggatgcggggacatttccgcccgtcaccctggcaaagcgctcgcagggctggagggacagagttctcagat

SEQ ID NO: 279887 - DNA, 241 bp, Homo sapiens
  chr2:70351563-70351804
  hyper
gcaaaacagaggaaacaaaggaatgatgaaatgaactgagctgccttcatgccccggatgaatgttcagccattagaaaagagtgaatcccagctgggatttggggttccacggtgtactagaaaagcaaaacaaagagaagcgcctactagatgccatcttggaaaacaaaagcaaacgtgtgtgtgtgtgtgtgtgtgtgtgtgtgtgatgttacatgggcatggggaaattacggaag

SEQ ID NO: 279888 - DNA, 295 bp, Homo sapiens; identical to SEQ ID NO: 198264
  chr2:70369036-70369331
  hyper

SEQ ID NO: 279889 - DNA, 206 bp, Homo sapiens
  chr2:70418110-70418316
  hyper
tctcttcgcctgccgcggccttttacaaacggggccaaactgttcgctgtaacgacaatcgttattggtcagagccgcccacgcgcggcaagtggccgcccacctgagctcgcgttgtcttatgggagttttagttctctccttcagagaccgctgagacactgggggaatgcggtggtagaacatacgccgacctagcggctgta

SEQ ID NO: 279890 - DNA, 405 bp, Homo sapiens; identical to SEQ ID NO: 198266
  chr2:70485366-70485771
  hyper

SEQ ID NO: 279891 - DNA, 409 bp, Homo sapiens; identical to SEQ ID NO: 228413
  chr2:70520657-70521066
  hyper

SEQ ID NO: 279892 - DNA, 322 bp, Homo sapiens; identical to SEQ ID NO: 228414
  chr2:71295259-71295581
  hyper

SEQ ID NO: 279893 - DNA, 413 bp, Homo sapiens; identical to SEQ ID NO: 228415
  chr2:71357126-71357539
  hyper

SEQ ID NO: 279894 - DNA, 452 bp, Homo sapiens; identical to SEQ ID NO: 198268
  chr2:71453495-71453947
  hyper

SEQ ID NO: 279895 - DNA, 242 bp, Homo sapiens; identical to SEQ ID NO: 198269
  chr2:71454386-71454628
  hyper

SEQ ID NO: 279896 - DNA, 68 bp, Homo sapiens
  chr2:71502821-71502889
  hyper
gaagaaaaaaagaaaatgaacgtgcattgttctccattgcgaataacggccaccagaattccagggta

SEQ ID NO: 279897 - DNA, 40 bp, Homo sapiens; identical to SEQ ID NO: 198270
  chr2:71504818-71504858
  hyper

SEQ ID NO: 279898 - DNA, 146 bp, Homo sapiens
  chr2:71680538-71680684
  hyper
gaggcctccccaggatcccccgtcctaccccgggcggtcgggttgagttctggagagactgctccaatccccgaggcggaaggaggcaaccgatttggcgcagcactcagccagggggtagaagctcaggggaggagccgagcctt

SEQ ID NO: 279899 - DNA, 300 bp, Homo sapiens
  chr2:71693924-71694224
  hyper
cgctcccgccctgactgcgcgcctgtgtgccgccggggctgcccagccatgctgtgctgcctgctggtgagggccagcaacctccccagtgcgaagaaggaccggcgcagcgaccctgtcgcaagcctgactttccgaggtgagagccccgtggctgccgcgcccatgctcgggtgctacccgactctcggcgctcactggcgggtctgaagcccctgctccggagctaaccctagtccaggccacagtttctccctttgtcagcagggacggaaatcccagccccgacttctgcagggg

SEQ ID NO: 279900 - DNA, 451 bp, Homo sapiens
  chr2:72371579-72372030
  hyper
tgttttttggtaatgactttcgagaggaaagaggtatcccggacagctggacccgaagcgggagtctccgcccccacccccacccccacacccccaccccgcgctcgggagcctctcggaataaatatttccaggctccgggccacgggctggcgagaccccgcggggtggccgcaggccaaagattatttatagcggtaagcggtcggtgcccggaggcagcaactacagatgggggttggagtttcctccgctctccggtgtggcccgcgcagggacccggcggccctcggaggactctgcagggcggggtcacgggcccagagccgcgattttcctaatgcattttgccctggaaataacggagacggactttggttgccgccctggagtttggaacccgagcgcggggcggggcgggaccgggcagggcgacccgcgcaggtaacca

SEQ ID NO: 279901 - DNA, 354 bp, Homo sapiens; identical to SEQ ID NO: 198272
  chr2:72372237-72372591
  hyper

SEQ ID NO: 279902 - DNA, 495 bp, Homo sapiens
  chr2:72372758-72373253
  hyper
tcttttcctctgtttttcttttctttcaacacaaaagttgggttgtgaattttccgaggtcgccgccgcctcgcccccaccccccgcctctgatctgcctaactataattaaagtgcgttttttgtggcattaataaagagttatttgtccgccgtttccacggtcttcacaaagagtactttcataggggcggccgctcgggccgcgagtccaatttatacaaaaatgttgtatttttagccctgggctctgtttagatggcgctcggtggaaacggagagcccttggaggtccccccgtaaaatctgataaatgactccgaaaaaataacgctgggattcagagggctctcattaaccccttaggcgctcctgtacacgtaccccctatttccctcctcacctccagatctagggccccgggttggagggatggggaggcttaggtttcctcctccctaacttctgtgcaggttggacgctgacccccagggg

SEQ ID NO: 279903 - DNA, 141 bp, Homo sapiens
  chr2:72374234-72374375
  hyper
gacactgtacctggcgctgccgacggcgccgcaggaacacagttttaaatcggcaattcaagctgccaccagccccctcctctcccgactcaattttcggctcccagcgacacagccaaccccagaaagccgagggcgact

SEQ ID NO: 279904 - DNA, 268 bp, Homo sapiens
  chr2:72374932-72375200
  hyper
ccgacaccagatccaagccctcaaagagcatgttggcggccgctcgggggattggctgtgccggccgcggcgggggaggggagggcccgacgggaggggaccggagcggcgggggaggggaggctgcggccgggggtcctggcacctccagccgaaacagagaaggaggaaggggccaagggaaagggagtggaggctgcgaggggagcggagagagggaggaaaaaaattgcctaaaagaagagaggaaacacgaggcgactggggt

SEQ ID NO: 279905 - DNA, 316 bp, Homo sapiens
  chr2:72375582-72375898
  hyper
gagcctaaaagtccctgggctgcccggggcggcgcgctcgagccccagagccgccgcagcacccccgaggcaggagcggcgggcgaggcggcgaggcgggcgctgcggcccgagcgcgggtgcggagccggcgggccgcggccgggacgggacgcagccggcgacagagccccgggcgggcgatggggcggcggcggcggcggcggcggcggcggcggcggcagcgggcgggaggggtgaggcggggtggggttgggggaggaggtggaaaacccgagctgggctattgtatcaattaagaaaaggcagtccgtcc

SEQ ID NO: 279906 - DNA, 198 bp, Homo sapiens
  chr2:72376168-72376366
  hyper
ggcccgcggccggagctggagagcgcagcccggcctcccgccccgccccggccgcccgccgcccgccgcccgcagcccgcccgggacccacttgtagccgccgcaggatcaaactcagttcacctctcgcctcctcttctttctcgccggcgtctcgctgagcccagcgcctacagacggacgagatgagacacacgc

SEQ ID NO: 279907 - DNA, 132 bp, Homo sapiens; identical to SEQ ID NO: 198276
  chr2:72376426-72376558
  hyper

SEQ ID NO: 279908 - DNA, 135 bp, Homo sapiens; identical to SEQ ID NO: 198277
  chr2:72376588-72376723
  hyper

SEQ ID NO: 279909 - DNA, 264 bp, Homo sapiens
  chr2:72376765-72377029
  hyper
cgccatatgtctcttaccctacggaacctggaggttctcctgtccccgtcagcgtcccaggctgctgactctgcagcccctcctttcctgcacattgggacccccctcccctgcttttgtagtccccctccaccgcccgcagcgtcggggaaccccgatactggtccggcaagtgtcctgcgcggggacaaacgcggcggccccggtacccagaggcgggagaagacgggcacaaacgttcattgatacaaatgagtaaataaa

SEQ ID NO: 279910 - DNA, 709 bp, Homo sapiens; identical to SEQ ID NO: 198279
  chr2:73052644-73053353
  hyper

SEQ ID NO: 279911 - DNA, 372 bp, Homo sapiens
  chr2:73114130-73114502
  hyper
ccacgaccagggacgcccagcacccagtgcagggcctgccctggaagaggtcagtagtgcaaagttagggctggaactgggaggaaattcgagcatgcgtcccagccggaggctgagcttgcgggcgaagaacacggcagcgctgggaaccgggctagggctttccgtgtgggccgcgcctgccggccctctctgttgtcccacttggcacggactgggctaccgccacggtttgacttccgccaccagcaaccaagggaaccagatcccaagggaaccagcacccctgggcgctcgcggcccgaagcctgaggttcccgccccgccccggcagggcggccccgccgacacccgtagcggtcccgccccccg

SEQ ID NO: 279912 - DNA, 316 bp, Homo sapiens; identical to SEQ ID NO: 228430
  chr2:73114710-73115026
  hyper

SEQ ID NO: 279913 - DNA, 39 bp, Homo sapiens; identical to SEQ ID NO: 198281
  chr2:73141975-73142014
  hyper

SEQ ID NO: 279914 - DNA, 191 bp, Homo sapiens; identical to SEQ ID NO: 198282
  chr2:73142102-73142293
  hyper

SEQ ID NO: 279915 - DNA, 433 bp, Homo sapiens
  chr2:73142353-73142786
  hyper
gagatcttcctgtctcagcctcccgagtagaaatgtcagcatttgaatgcctcacaagggaaggtggtgtaataaaaggtctattgatttagatatgaacaagtatacccagagccacacgaatgaaaggaggtggccagtgtagatgcaagtctaggacggtcggtagattccaagcttctctacctgcccagttaaacaagttcgtggcccctggccagcctctcggtgggggtctgcgacagaacgggtgggattcattaccaggctaggagcgcaaggccctcgggccgggttcagcttgctgggctcctgtcttgtctcagcccccagcacttgctctgtcaccgcagagcacaggcccaggcaacgtttacccaactgaacccgcatccctgtgggaaccttgttccaacaaaatcccgtcgttgtc

SEQ ID NO: 279916 - DNA, 489 bp, Homo sapiens; identical to SEQ ID NO: 198284
  chr2:73142998-73143487
  hyper

SEQ ID NO: 279917 - DNA, 223 bp, Homo sapiens
  chr2:73144495-73144718
  hyper
gcctggatctccccgcgaaggctccagtccggcttttgcctccgactgcgggctccctccccacccgccgtccctcgccccgccccgccccgccccccaccttggggcaggtgagcggcggccaatgggcgagcgcggggcaggtgcccgctaactcgcgcctcgcagcgctgggcggccggggctgggcagggcagtgcggggacaccgggggctggggtcg

SEQ ID NO: 279918 - DNA, 140 bp, Homo sapiens; identical to SEQ ID NO: 198286
  chr2:73147009-73147149
  hyper

SEQ ID NO: 279919 - DNA, 37 bp, Homo sapiens; identical to SEQ ID NO: 198287
  chr2:73148243-73148280
  hyper

SEQ ID NO: 279920 - DNA, 209 bp, Homo sapiens; identical to SEQ ID NO: 198288
  chr2:73150976-73151185
  hyper

SEQ ID NO: 279921 - DNA, 35 bp, Homo sapiens; identical to SEQ ID NO: 198289
  chr2:73151849-73151884
  hyper

SEQ ID NO: 279922 - DNA, 285 bp, Homo sapiens; identical to SEQ ID NO: 198290
  chr2:73151946-73152231
  hyper

SEQ ID NO: 279923 - DNA, 60 bp, Homo sapiens; identical to SEQ ID NO: 37655
  chr2:73152264-73152324
  hyper

SEQ ID NO: 279924 - DNA, 47 bp, Homo sapiens; identical to SEQ ID NO: 228438
  chr2:73298957-73299004
  hyper

SEQ ID NO: 279925 - DNA, 297 bp, Homo sapiens; identical to SEQ ID NO: 198292
  chr2:73511726-73512023
  hyper

SEQ ID NO: 279926 - DNA, 65 bp, Homo sapiens; identical to SEQ ID NO: 198293
  chr2:73512162-73512227
  hyper

SEQ ID NO: 279927 - DNA, 137 bp, Homo sapiens; identical to SEQ ID NO: 198294
  chr2:73520105-73520242
  hyper

SEQ ID NO: 279928 - DNA, 130 bp, Homo sapiens; identical to SEQ ID NO: 228442
  chr2:73612642-73612772
  hyper

SEQ ID NO: 279929 - DNA, 307 bp, Homo sapiens; identical to SEQ ID NO: 228443
  chr2:74007133-74007440
  hyper

SEQ ID NO: 279930 - DNA, 135 bp, Homo sapiens; identical to SEQ ID NO: 228444
  chr2:74055936-74056071
  hyper

SEQ ID NO: 279931 - DNA, 640 bp, Homo sapiens; identical to SEQ ID NO: 228445
  chr2:74153738-74154378
  hyper

SEQ ID NO: 279932 - DNA, 252 bp, Homo sapiens; identical to SEQ ID NO: 221802
  chr2:74211285-74211537
  hyper

SEQ ID NO: 279933 - DNA, 421 bp, Homo sapiens; identical to SEQ ID NO: 198296
  chr2:74405756-74406177
  hyper

SEQ ID NO: 279934 - DNA, 295 bp, Homo sapiens; identical to SEQ ID NO: 198297
  chr2:74425424-74425719
  hyper

SEQ ID NO: 279935 - DNA, 395 bp, Homo sapiens; identical to SEQ ID NO: 198298
  chr2:74425790-74426185
  hyper

SEQ ID NO: 279936 - DNA, 249 bp, Homo sapiens; identical to SEQ ID NO: 198299
  chr2:74426214-74426463
  hyper

SEQ ID NO: 279937 - DNA, 183 bp, Homo sapiens; identical to SEQ ID NO: 228451
  chr2:74684552-74684735
  hyper

SEQ ID NO: 279938 - DNA, 231 bp, Homo sapiens; identical to SEQ ID NO: 228452
  chr2:74685369-74685600
  hyper

SEQ ID NO: 279939 - DNA, 97 bp, Homo sapiens; identical to SEQ ID NO: 228453
  chr2:74710446-74710543
  hyper

SEQ ID NO: 279940 - DNA, 413 bp, Homo sapiens
  chr2:74729487-74729900
  hyper
tcggattgccggcccggacattccactgaattctgtgaatgtgtagcagggttggaggaccctcggaataacccccttggggaggtggacaaggacaatctcagcgaagagcttgctcccctcctccccacccttaggaaacgtccgtgaaccggagtgagagggcagtgggagttcagggagcaaagtccaggcggaggagcgtgaggcggggcttccgtccgtcccgcacacttctgggattgttttctctttcagaaagcgctactgcggagtgaaccggtccttatatcttagtttcgtgactttgggggcggcaggcctgtgagttgttttccgccctggacgctgttttgcaaagatctctgcgcgcccaccgccaccctcccgggcgtgcgggccgggaagcagcc

SEQ ID NO: 279941 - DNA, 238 bp, Homo sapiens; identical to SEQ ID NO: 198302
  chr2:74729933-74730171
  hyper

SEQ ID NO: 279942 - DNA, 93 bp, Homo sapiens; identical to SEQ ID NO: 198303
  chr2:74730644-74730737
  hyper

SEQ ID NO: 279943 - DNA, 41 bp, Homo sapiens; identical to SEQ ID NO: 228456
  chr2:74735289-74735330
  hyper

SEQ ID NO: 279944 - DNA, 205 bp, Homo sapiens; identical to SEQ ID NO: 198304
  chr2:74740310-74740515
  hyper

SEQ ID NO: 279945 - DNA, 104 bp, Homo sapiens; identical to SEQ ID NO: 228461
  chr2:74756283-74756387
  hyper

SEQ ID NO: 279946 - DNA, 36 bp, Homo sapiens; identical to SEQ ID NO: 198305
  chr2:74776040-74776076
  hyper

SEQ ID NO: 279947 - DNA, 142 bp, Homo sapiens; identical to SEQ ID NO: 198306
  chr2:74776396-74776538
  hyper

SEQ ID NO: 279948 - DNA, 249 bp, Homo sapiens
  chr2:74781686-74781935
  hyper
ggtgctgcagctcccggctaatccgggggtctccaccattccttctcgctcctctccctcaccccaccgcgacccccccagcggctgccggcgggggccggggaggggcggaaactcctccagggaacccggccccgcctcccgccccgcctcccgccgcagggccaggaagcgcggaaggaaccgccgggggccatggacggagcagtgatggaagggccgctttttttgcagagtcagcgctttggg

SEQ ID NO: 279949 - DNA, 122 bp, Homo sapiens; identical to SEQ ID NO: 198308
  chr2:74782349-74782471
  hyper

SEQ ID NO: 279950 - DNA, 96 bp, Homo sapiens; identical to SEQ ID NO: 228464
  chr2:74942355-74942451
  hyper

SEQ ID NO: 279951 - DNA, 1611 bp, Homo sapiens
  chr2:75060918-75062529
  hyper
gtcgccccacaccccgggtccgcgatcacgctccccccacccatagccgagcctgacgcggcggtggctcatgcgcctttccgtcccagcctttagccacggaccacacgtcccatctcaggcgccccgcccctcccccgccccccgcccccggcgcgcctccccaggctgccggctccggtgtctgagcggccgcgcccgcgagccgtgagcgatgattggctgcgccacggcggcgggcggtccgtgggcgcacacaccctccccgcgcagccaatgggcgtgcgcacgtcactgatccggaggcccgcgggccggcagcccctcaataagccacattgttgcatgaaactccggcgcaggagtcccgggctgccgctggcaacatcgtgtcacccagctaagaaaatccgcgggcccgagccacgcgcctgtgaatcggagaggtcccactgcccgagtggagccgggctgagattcttctcaagttgagcctcagtgatcctgtggccgaagttagcgccttgacgtgggacaaccggacacgtcgccaggagagaactgaggcgccttctagcagttgtgacgccaaaatcacgtctccggagacccgcgccctccgccagccgggcgcaccctcgccggtagccttctttgtgcgccgtccggactcccagctcccggcccggcagccgagccccagcacaaagcagtcggaccgcgccgcccgcctcccctctcgcgtctccgcctcggtttcccaactctgcgccgtcgggccgcggcaggatgattgcctcgcatctgcttgcctacttcttcacggagctcaaccatgaccaagtgcagaaggtaagtcagcgcgggcggggcggcaggctgggctctggcaaagtggtctggcctccatcagtctcttcctcgaccctgcggggacccgcttcctccctactccgggcctgggagcggaaaaagtttgggcagccgggacactcctgggcgccaggagccacgtccgctaagcacagccggcgagtgcgcgcgggcggggagccgaggtcgcgctccgccgggcgccctccctccctgagctccggcacgcgctcacgctctctcccccagtccctttttccctgttactggaggggcgggtcaccccgcaggtagtcagggattgctgcgcccacgtgggagggagcccccttctgcagcgcgagttccggcgagagcacgtggagagaatcgtggctgcgggaggctgctccgctgccgcgtggggccgccgggggccgtccgcgctcgcggaccgcgtgtaggagacgagcggttcccttctccttccccgcggccctgcgggggtgggctcgaggagaagctgacccgggaaggagtaggaaaggggcagaggaactccgcccgccgcgccccctccccggaactgtggcgcccggaactgaggctcggcgaggggcgtcccccattaacccccgcccctccaaatcagcctcgggaccgcccagcctcgtgtcctcaggatctgcctctgagtaaggggaggactttggttgttactttctggtttgccctaaaagttactcggagaggccaacg

SEQ ID NO: 279952 - DNA, 244 bp, Homo sapiens; identical to SEQ ID NO: 37701
  chr2:75062575-75062819
  hyper

SEQ ID NO: 279953 - DNA, 47 bp, Homo sapiens; identical to SEQ ID NO: 198309
  chr2:75147056-75147103
  hyper

SEQ ID NO: 279954 - DNA, 186 bp, Homo sapiens
  chr2:75426244-75426430
  hyper
tgcccgcctgcccgcggtggctctgaattcctccactttcaagcttcaggagacgtttgagttcagaagtctggagacagcatctctcttgcggtaaactgaaaaagggaaagaaattccaccggtcacagttctaggaagcaagagatcccccgcatttatgcacctgctgctgcctgcaactcc

SEQ ID NO: 279955 - DNA, 214 bp, Homo sapiens
  chr2:75426570-75426784
  hyper
atttttccttctcttttgctgccgctgccgccgcctgcagtttcgcgggcacctctcggttcgggttgctcagctcgcgagttagctgcgcacgaggcttttataaccccctgcagagacgtcactgggaaggggcagtacctgggctgcgtactcgccagtcccggtgcgcagcgcggcagctgcgccagctgttgacaactgtctcattcca

SEQ ID NO: 279956 - DNA, 165 bp, Homo sapiens
  chr2:75426875-75427040
  hyper
tggcttggaagtaactgacacagatgcggtccgcagctggaatcgtcgttgcacgaggggtgctgggaggaaggaaggatttgggaaacagctggagtggaggacaatcaacttccagggaatgaagcccagagccctgagacagctctgcagaggcggcttgcc

SEQ ID NO: 279957 - DNA, 255 bp, Homo sapiens
  chr2:75427114-75427369
  hyper
gaagccagaggcgacgactccctggtccaggtgtcccgaaaacaactttcctgaggctgtgtttaggaaacacccccacaaaatatctagctcagttacctggctagctgattcacctgggaagtgacagtctctaagctttgaggacactttcctcagccaccctggtgacttggcccctcgttccaggagaagctccatttgagccctccacctgacccctctggatgagcctctgctcaatcactggggaca

SEQ ID NO: 279958 - DNA, 74 bp, Homo sapiens
  chr2:75787357-75787431
  hyper
cgaaacaaaccaggtaaatagtccacggtgcagcacgtacatttctggcaggtccgccccgcgcaggcttggga

SEQ ID NO: 279959 - DNA, 100 bp, Homo sapiens; identical to SEQ ID NO: 198311
  chr2:75787704-75787804
  hyper

SEQ ID NO: 279960 - DNA, 95 bp, Homo sapiens; identical to SEQ ID NO: 198312
  chr2:75788345-75788440
  hyper

SEQ ID NO: 279961 - DNA, 154 bp, Homo sapiens; identical to SEQ ID NO: 228470
  chr2:75873843-75873997
  hyper

SEQ ID NO: 279962 - DNA, 278 bp, Homo sapiens
  chr2:79739572-79739850
  hyper
acaaacctcccttccgcggcagtcactacctttgcagcactctggccctgccctcctcctgccacgtgtcggacccctgctgggctggccctcctttcctactctgcgacacccctatcccccccgcccctatcctgcccgctcccgcacccggtccctctccccgggcctcgcgactccggcgattcagctccgggtccccgcccgcagggtaacgcggttgtcatggacacggcacctgcgccctacggcggtgccccttcgccgccgtcccctcc

SEQ ID NO: 279963 - DNA, 489 bp, Homo sapiens
  chr2:80530839-80531328
  hyper
ggcggcgggcagcatctgaaagcaggcccccagcagacacaagaccacccccgagggcctcctcagcagccagtatagacagagaccgagcagcaggaaatccattagcgagaatctttccagagagactggagaatgtccattggaagcgctcggtcagaaatctacatcatattttattccgagggaggggaagcgggggagggggagaaaagggcaaaaaatcaaataaatacatagaaataaagaaggacccccctccccaaaaaccacacgttcacctctaagcatgcagaaagctgggcagcatagaaagttcacagccacggaaagatcaaagagatggtgatttggtccatgttagatgctgcagcaaagaaaagggaggaaaaaaaaaatcttcgggaaagaatttaattaaaaagtgtcttacccacccttttccagagagtgacaacctccattcagctgctccctttgtgtgcaggc

SEQ ID NO: 279964 - DNA, 114 bp, Homo sapiens
  chr2:80549811-80549925
  hyper
gggtgccagtgtcgccttgtccattatccaaaacccagtcgcttttgctggttcctcactcagcatgtgagagagattgtcttctcactcggtgccactcgggggccatactcc

SEQ ID NO: 279965 - DNA, 490 bp, Homo sapiens; identical to SEQ ID NO: 228474
  chr2:84686316-84686806
  hyper

SEQ ID NO: 279966 - DNA, 115 bp, Homo sapiens
  chr2:85107819-85107934
  hyper
ggagggcaaaggccagggcactgagtcgcttggagcctgcgggctgcgcccccgcgggaaaggggaacccgagggcacggagaggagagcgagcaaggagcgccgcggtgctagg

SEQ ID NO: 279967 - DNA, 91 bp, Homo sapiens; identical to SEQ ID NO: 228477
  chr2:85154122-85154213
  hyper

SEQ ID NO: 279968 - DNA, 101 bp, Homo sapiens; identical to SEQ ID NO: 198314
  chr2:85359942-85360043
  hyper

SEQ ID NO: 279969 - DNA, 402 bp, Homo sapiens
  chr2:85360470-85360872
  hyper
cggcccccctgcccagcccggcggtccctcctccctccctccccgctcgcccctccccggcgggccaggggctgggacgccccggcggagcaggcggcggcggtggcgagttggggagccctaggctcggcgctgccggaggggcccgagccgagccgcctgcgccccggccgggcagcgccgggcccgcttcccgcggggccacgccctgtcaaactttgttgcggcggctagcgcagcgggcccgcaagcgggcgggaggggcgccgggccgggccgggcagggcgcgggcggctaggggctccgagagcggcggccccggcccgcggccccaccatgccccagctcggcggcgggggcggcggcggcggcggcggcagcgggggaggcggcggctccag

SEQ ID NO: 279970 - DNA, 198 bp, Homo sapiens; identical to SEQ ID NO: 228479
  chr2:85553952-85554150
  hyper

SEQ ID NO: 279971 - DNA, 145 bp, Homo sapiens; identical to SEQ ID NO: 228480
  chr2:85555444-85555589
  hyper

SEQ ID NO: 279972 - DNA, 235 bp, Homo sapiens; identical to SEQ ID NO: 228481
  chr2:85581697-85581932
  hyper

SEQ ID NO: 279973 - DNA, 70 bp, Homo sapiens; identical to SEQ ID NO: 228482
  chr2:85788617-85788687
  hyper

SEQ ID NO: 279974 - DNA, 65 bp, Homo sapiens; identical to SEQ ID NO: 228483
  chr2:85788985-85789050
  hyper

SEQ ID NO: 279975 - DNA, 108 bp, Homo sapiens; identical to SEQ ID NO: 228484
  chr2:85804638-85804746
  hyper

SEQ ID NO: 279976 - DNA, 367 bp, Homo sapiens
  chr2:85822391-85822758
  hyper
ccaactagagggccgcgggggcagaagtgtccggcggggatccggacagcgcatccggaagcgccatgggccaacgctcgcaggaacctgaacccctgggccagcgccgcctttgctcgcagaggcctctagcatctgtactgtcgaagccctctgagcttcagggcagactgaagagccttacacaccagacacttggacgcgatcgcgccagaaatccccgggaattcagtcttggctccgactccaaaacaaatgattcctcaccagccagatctccatcattggcgttagtctctggtcacctgacttgttcaagccaatgagagggggccgaattagtacttccgctttccgtgctgtttaa

SEQ ID NO: 279977 - DNA, 235 bp, Homo sapiens; identical to SEQ ID NO: 198316
  chr2:85829251-85829486
  hyper

SEQ ID NO: 279978 - DNA, 249 bp, Homo sapiens; identical to SEQ ID NO: 228486
  chr2:85829658-85829907
  hyper

SEQ ID NO: 279979 - DNA, 158 bp, Homo sapiens; identical to SEQ ID NO: 228487
  chr2:85830122-85830280
  hyper

SEQ ID NO: 279980 - DNA, 841 bp, Homo sapiens; identical to SEQ ID NO: 106285
  chr2:85980859-85981700
  hyper

SEQ ID NO: 279981 - DNA, 168 bp, Homo sapiens; identical to SEQ ID NO: 228488
  chr2:85982463-85982631
  hyper

SEQ ID NO: 279982 - DNA, 761 bp, Homo sapiens; identical to SEQ ID NO: 228489
  chr2:86114869-86115630
  hyper

SEQ ID NO: 279983 - DNA, 204 bp, Homo sapiens; identical to SEQ ID NO: 106290
  chr2:86333309-86333513
  hyper

SEQ ID NO: 279984 - DNA, 115 bp, Homo sapiens; identical to SEQ ID NO: 228491
  chr2:86565024-86565139
  hyper

SEQ ID NO: 279985 - DNA, 265 bp, Homo sapiens; identical to SEQ ID NO: 228492
  chr2:86668219-86668484
  hyper

SEQ ID NO: 279986 - DNA, 53 bp, Homo sapiens; identical to SEQ ID NO: 198319
  chr2:86850368-86850421
  hyper

SEQ ID NO: 279987 - DNA, 138 bp, Homo sapiens; identical to SEQ ID NO: 228493
  chr2:86850743-86850881
  hyper

SEQ ID NO: 279988 - DNA, 81 bp, Homo sapiens
  chr2:87016937-87017018
  hyper
ctcgcgcacctttccccacggggacgcctccccccggttttcctgggagaagggatagcagaggagacaggatggggaccc

SEQ ID NO: 279989 - DNA, 167 bp, Homo sapiens; identical to SEQ ID NO: 198320
  chr2:87018396-87018563
  hyper

SEQ ID NO: 279990 - DNA, 92 bp, Homo sapiens
  chr2:87034564-87034656
  hyper
cttacttggagggtagagaacggtgcttccccacgctgctgtgcaatggataggagctatgtgaagctggcgtatgggtggggtttgcaggc

SEQ ID NO: 279991 - DNA, 643 bp, Homo sapiens
  chr2:87034689-87035332
  hyper
caccaattcctgttctgcaggtctcaccgcagaggggcacgccagccatgaggacagatgagggaacacgtgatgccacgatgggggtgccaggatgaggtgggtgcggtcgcggacaggcgcacgaggagcccagcggagcgccacccggagcaggcgcggaggagggctggggagggccaccaaggcgacgagagccggtgtgcctgaatcagcctaaaggagacggaggaggagtgtggtgggcgcaggggcagggagctgggggaagggcggggggctagcccaggctgaaggcaggcaggagcagggccgcgatgtcagacaagaaacggcagcagtgtgtttgggaacctagcaccaaccgcaccggtggagacagggtctgctgtagaggaggtggggccgggtcccagctaagtaaggcggtggatcttgcagcccttccatcctcagccgctcattctgcgcaaatctcggggccagccttggtggagccgtaaagcgtccaccagaacctggatccctccgccacctttcccatgaattcacctttctgtacacagcaagcgcctgagcggagacggccgacacgtttcccactgttaccccaggaaaccgcggctcctgagggggtcagggc

SEQ ID NO: 279992 - DNA, 118 bp, Homo sapiens; identical to SEQ ID NO: 228496
  chr2:87035595-87035713
  hyper

SEQ ID NO: 279993 - DNA, 915 bp, Homo sapiens; identical to SEQ ID NO: 198321
  chr2:88315897-88316812
  hyper

SEQ ID NO: 279994 - DNA, 81 bp, Homo sapiens; identical to SEQ ID NO: 228499
  chr2:88355120-88355201
  hyper

SEQ ID NO: 279995 - DNA, 165 bp, Homo sapiens
  chr2:88752878-88753043
  hyper
tcttcaaaaacataaaggtgaatgttttcaaagacatttaaataagtaccttcggaattagcattttaaacccgaaagtttcaaagttttaagtaatttaaactgtgcaagaagcgctcatttacaaaaacagcctcatctaacgggcaggtctatgacttgccc

SEQ ID NO: 279996 - DNA, 50 bp, Homo sapiens
  chr2:88926936-88926986
  hyper
ccacgtctcagcccggcctctgccgctgccacctgagtgacagcctatct

SEQ ID NO: 279997 - DNA, 289 bp, Homo sapiens; identical to SEQ ID NO: 106315
  chr2:88927015-88927304
  hyper

SEQ ID NO: 279998 - DNA, 77 bp, Homo sapiens; identical to SEQ ID NO: 228503
  chr2:88990956-88991033
  hyper

SEQ ID NO: 279999 - DNA, 152 bp, Homo sapiens; identical to SEQ ID NO: 228506
  chr2:91635540-91635692
  hyper

SEQ ID NO: 280000 - DNA, 36 bp, Homo sapiens
  chr2:95664132-95664168
  hyper
cttgtcagtccggtcaccgcgcgcccgctctgaagc

SEQ ID NO: 280001 - DNA, 345 bp, Homo sapiens
  chr2:95825283-95825628
  hyper
cagtacaggtctgcgcgcccgcagtctccgaacgctcacaggaccaggccccgcccgccaccccgcgccagcccccgcccgccaccccgcgccagcccccgcccgccaccccgcgccagcccccgcccgccaccccgcgccagcccccgcgtccgccccgcgccagcccccgcgtccgccccgcgccagcccccgcgtccgccccgcgccagccccgcctcccgaggccgtcccgagcttgcgcagacgcggccgccgccggggcccttcagagccagcgccggtggcggggtgctggcgcggcgaagctggagaggcggggctcgcgggcgcctgtaggacctc

SEQ ID NO: 280002 - DNA, 114 bp, Homo sapiens; identical to SEQ ID NO: 228511
  chr2:95831017-95831131
  hyper

SEQ ID NO: 280003 - DNA, 146 bp, Homo sapiens
  chr2:95873228-95873374
  hyper
gggccgtcagccgcgccccgcggaggattctgggagtggtagttcggcctcatggttggccggcgctaggcgtccccgccggctgttagatgcctttgtcgtcgggctcggcttcctcagtgtgtggctggaggtcgaacccaggg

SEQ ID NO: 280004 - DNA, 218 bp, Homo sapiens
  chr2:96011307-96011525
  hyper
tccaaacaggactcgcgcttataggcgtggagcggagctggatttctcccttggctaacacagcgggaaggatgaggtgcgggccgtagccgcgctgccgcgctgagtccgtccggcggggatgcccacagtgcgccgcgcccgctggagggcagcagagggccaggctcccggctcaggtctccggcctcgcggctccaaggaccccgggctccgcc

SEQ ID NO: 280005 - DNA, 129 bp, Homo sapiens
  chr2:96011564-96011693
  hyper
cgcggctttccctcctctaccagacccggcaggaagaaagccacccacaaacgaataagcatgcccttgccctgcccgtgcgtggcactccgcatccgcttagctcttccccgccgcccgaaggcgggc

SEQ ID NO: 280006 - DNA, 578 bp, Homo sapiens
  chr2:96011863-96012441
  hyper
gaccaacttctgcattttcaaagggggccagcctgggcccagtttaatctccggcggaggaccggggttgcgggaaatgcgccggggagtgagggcttcccggatcccccgccgccgactccgcgcgggccagcggcgcggggcgggccgggatcagcgcctccccgggagagcgcagccgccgccccctcctctcgggctcccggcccctccccagcccctcggcccccatcctgcgcgtgggagaaaccgccgaccgcgcggcctccaggggctggcggagcagcggtggcgacgcgccagactccgtcctgggctggcccgtgccgggcggggcggggccggctccctccgcccttcccgggcaggcgcgggggggccgcagggacgcctcccggagtggccgccgcgcctaggccaatgagcgcgcggggagcggcgatggaggctggggcggccgggagcgcccgggacccccgccgccgcgccgccgccgccgcgcccccgcgccccggcgcccgcggggctggagagggggcgacagaggcgcagcgcccgcgccgggcatggaggcgccg

SEQ ID NO: 280007 - DNA, 47 bp, Homo sapiens
  chr2:96012683-96012730
  hyper
gctgcaggggccccggtgcctccgaggcagcgcgtgggcgaggggtg

SEQ ID NO: 280008 - DNA, 180 bp, Homo sapiens; identical to SEQ ID NO: 228514
  chr2:96068500-96068680
  hyper

SEQ ID NO: 280009 - DNA, 264 bp, Homo sapiens
  chr2:96192240-96192504
  hyper
ccagcttgagctgccgccgctccccgagaggccgcaaaagcccgagggctccaagaactgcctgcagaggctcagggactgcgagctgtccgcgctgacgccgcgctccatgcggggcccagaggaccggggcgccctggaccacatggtcaggatgaccacgagcctctaacagccccgccggggccctcgcgtgccagactatgtgccccgagagcaccttgtgctgggggaagaggcggctggcggtgcaggaaatcctgg

SEQ ID NO: 280010 - DNA, 202 bp, Homo sapiens
  chr2:96192624-96192826
  hyper
ggcctccccaagagccggcctcccacctgcccggctgccggggtcctggggctccgccgcccccgccccgcggacggccagcctcctgcccctgcagtgcctgcagcagagcagcttggggcccagcgtggtggtgcccaggtccgcctcagcaaggtgcccgcgcccaccttccaacccaaaaggccggcgcggaagggca

SEQ ID NO: 280011 - DNA, 170 bp, Homo sapiens; identical to SEQ ID NO: 228517
  chr2:96874380-96874550
  hyper

SEQ ID NO: 280012 - DNA, 52 bp, Homo sapiens; identical to SEQ ID NO: 228518
  chr2:96931553-96931605
  hyper

SEQ ID NO: 280013 - DNA, 194 bp, Homo sapiens; identical to SEQ ID NO: 228519
  chr2:96931839-96932033
  hyper

SEQ ID NO: 280014 - DNA, 534 bp, Homo sapiens
  chr2:96987312-96987846
  hyper
aagtgcgtctcctttttcattccgaaatgaaattcgtagttggttaaaacggggcttgccagcacgatttacaaacaagacgagcgctcgctgcaatcacatgaggagaaaaggaaaggactaattcataatgcggtcactagagcctcgatgtgcccaggggagcgcccgccgagcgccagcgggaacagcgcatcgcggacgctgcagggagtgtggcccctccgcaggcgcgtgcacaggctcgcattctggagggcagcgcatctcagccgtgcgcccggtccttgccaccccaaactccggcagcgaacaacgcgtcctgggggcggccccgcggctgctcttggaggcggcggaaaaggcgcgtccgcggcttgggggacggaggcggggtcgggggcgaagggaggcggctcctggggcccagaaagctggcgaggatgaggaacctccccccacctccactcccagctctccgaaccgtgaagacactgccccggcgcaaagcgtctctagcggtcctaggcgcac

SEQ ID NO: 280015 - DNA, 65 bp, Homo sapiens; identical to SEQ ID NO: 198322
  chr2:96991316-96991381
  hyper

SEQ ID NO: 280016 - DNA, 52 bp, Homo sapiens; identical to SEQ ID NO: 228523
  chr2:97001267-97001319
  hyper

SEQ ID NO: 280017 - DNA, 215 bp, Homo sapiens; identical to SEQ ID NO: 228524
  chr2:97073201-97073416
  hyper

SEQ ID NO: 280018 - DNA, 210 bp, Homo sapiens; identical to SEQ ID NO: 198323
  chr2:97171202-97171412
  hyper

SEQ ID NO: 280019 - DNA, 197 bp, Homo sapiens; identical to SEQ ID NO: 198324
  chr2:97173863-97174060
  hyper

SEQ ID NO: 280020 - DNA, 286 bp, Homo sapiens
  chr2:97175214-97175500
  hyper
caatgtcgttctggcggagctggtgagtcagggagcatccacgccgcctgggaagaccggctctggaggctggagggcttgaccagcactgccacccggtggccggcagcggaactgaccacaggcctggtgccctggagggaatgggccacaaacgctccgccaggactgcacctgtgtcctaggcgccgccctcagccaccaagtcggcctgcctctcgagcacccaacaactccaacaagccctctggaccaatagctgcagcccccacggggccttgggggt

SEQ ID NO: 280021 - DNA, 62 bp, Homo sapiens; identical to SEQ ID NO: 198326
  chr2:97203314-97203376
  hyper

SEQ ID NO: 280022 - DNA, 37 bp, Homo sapiens; identical to SEQ ID NO: 198327
  chr2:97203545-97203582
  hyper

SEQ ID NO: 280023 - DNA, 228 bp, Homo sapiens
  chr2:97303973-97304201
  hyper
gatccccacggcccgccactcccctcgaagccaacgctgctctcacccgcggtcttacggccgcgcgctcggccacggccggatccctaagcgcgtgcgcgttaacgcctccacgccccggcgctgcgggcaccgagtaaaacgcggaagcgggttacggcctgggaagggagaggcggtgagcggcaaagcccggaacggatgaagctccggcgcctctgtccggaa

SEQ ID NO: 280024 - DNA, 243 bp, Homo sapiens; identical to SEQ ID NO: 228529
  chr2:97426260-97426503
  hyper

SEQ ID NO: 280025 - DNA, 35 bp, Homo sapiens; identical to SEQ ID NO: 228530
  chr2:97427013-97427048
  hyper

SEQ ID NO: 280026 - DNA, 298 bp, Homo sapiens; identical to SEQ ID NO: 198329
  chr2:97482863-97483161
  hyper

SEQ ID NO: 280027 - DNA, 78 bp, Homo sapiens; identical to SEQ ID NO: 228532
  chr2:97523294-97523372
  hyper

SEQ ID NO: 280028 - DNA, 137 bp, Homo sapiens; identical to SEQ ID NO: 228533
  chr2:97523809-97523946
  hyper

SEQ ID NO: 280029 - DNA, 98 bp, Homo sapiens; identical to SEQ ID NO: 228534
  chr2:97534367-97534465
  hyper

SEQ ID NO: 280030 - DNA, 156 bp, Homo sapiens; identical to SEQ ID NO: 198330
  chr2:97535760-97535916
  hyper

SEQ ID NO: 280031 - DNA, 103 bp, Homo sapiens; identical to SEQ ID NO: 198331
  chr2:97779476-97779579
  hyper

SEQ ID NO: 280032 - DNA, 69 bp, Homo sapiens; identical to SEQ ID NO: 198332
  chr2:98261938-98262007
  hyper

SEQ ID NO: 280033 - DNA, 145 bp, Homo sapiens; identical to SEQ ID NO: 228536
  chr2:98262416-98262561
  hyper

SEQ ID NO: 280034 - DNA, 133 bp, Homo sapiens; identical to SEQ ID NO: 198333
  chr2:98280679-98280812
  hyper

SEQ ID NO: 280035 - DNA, 50 bp, Homo sapiens; identical to SEQ ID NO: 228538
  chr2:98612517-98612567
  hyper

SEQ ID NO: 280036 - DNA, 220 bp, Homo sapiens; identical to SEQ ID NO: 198334
  chr2:98703014-98703234
  hyper

SEQ ID NO: 280037 - DNA, 200 bp, Homo sapiens; identical to SEQ ID NO: 198335
  chr2:98703475-98703675
  hyper

SEQ ID NO: 280038 - DNA, 82 bp, Homo sapiens; identical to SEQ ID NO: 198336
  chr2:98703736-98703818
  hyper

SEQ ID NO: 280039 - DNA, 73 bp, Homo sapiens
  chr2:98964718-98964791
  hyper
tgactggctggtggaggcaggatcttaatcactttagctgggactttggccgtgactacgtgtgcacttgcct

SEQ ID NO: 280040 - DNA, 235 bp, Homo sapiens; identical to SEQ ID NO: 228543
  chr2:99061163-99061398
  hyper

SEQ ID NO: 280041 - DNA, 35 bp, Homo sapiens; identical to SEQ ID NO: 228544
  chr2:99224744-99224779
  hyper

SEQ ID NO: 280042 - DNA, 101 bp, Homo sapiens; identical to SEQ ID NO: 198338
  chr2:99346431-99346532
  hyper

SEQ ID NO: 280043 - DNA, 258 bp, Homo sapiens; identical to SEQ ID NO: 1686
  chr2:99346574-99346832
  hyper

SEQ ID NO: 280044 - DNA, 188 bp, Homo sapiens
  chr2:99553203-99553391
  hyper
ctgtgggtcctgagcgtctccaggctaattagggaagctgccgccccgtctggaggtgattcatgggtgtgacaccggcgagtgtgggaagaaaggcagctgatgccgtctcagctgcgctcgcctttctttattttctttctttcttctttttttaaaatcctttttcttgtaaagacagggctggt

SEQ ID NO: 280045 - DNA, 80 bp, Homo sapiens; identical to SEQ ID NO: 228548
  chr2:99770997-99771077
  hyper

SEQ ID NO: 280046 - DNA, 293 bp, Homo sapiens; identical to SEQ ID NO: 228549
  chr2:99797344-99797637
  hyper

SEQ ID NO: 280047 - DNA, 108 bp, Homo sapiens; identical to SEQ ID NO: 228550
  chr2:99952955-99953063
  hyper

SEQ ID NO: 280048 - DNA, 232 bp, Homo sapiens; identical to SEQ ID NO: 228551
  chr2:99953660-99953892
  hyper

SEQ ID NO: 280049 - DNA, 476 bp, Homo sapiens
  chr2:100721429-100721905
  hyper
cgcggcgctcgcaggccgcgccgccctgccgcccctctctcgtggcttttacggcccgcccgcccctcagcagccctggggtgcccggggcggccctgcaagcgggagagagcggcgaggcggcggcgccgagtgcggggggatgcggagccgtgcccggccctgtcgcatccctcggccgcccgcccgcgcccggccccgcccggccttgcccgggctgcacgcacttctcccgcggcccagaatccacttgaccctgctgggcgctcccgcgggcggcggacccgggtgggtgcgggggaattccccggccgcccaggcgcggggagagtgagctgtgccgcccgcagcagcgccccaaacaaaccgtttaaggtctctggagcccgcaagttcagcgaaataaagcggcggcgcggaggaaacctcttccacccggacctgctctccgttgcggtttggcctccagtggtggt

SEQ ID NO: 280050 - DNA, 391 bp, Homo sapiens; identical to SEQ ID NO: 221837
  chr2:100898414-100898805
  hyper

SEQ ID NO: 280051 - DNA, 155 bp, Homo sapiens; identical to SEQ ID NO: 198342
  chr2:101033436-101033591
  hyper

SEQ ID NO: 280052 - DNA, 371 bp, Homo sapiens; identical to SEQ ID NO: 228554
  chr2:101179132-101179503
  hyper

SEQ ID NO: 280053 - DNA, 486 bp, Homo sapiens; identical to SEQ ID NO: 198344
  chr2:101435066-101435552
  hyper

SEQ ID NO: 280054 - DNA, 94 bp, Homo sapiens; identical to SEQ ID NO: 198345
  chr2:101435590-101435684
  hyper

SEQ ID NO: 280055 - DNA, 273 bp, Homo sapiens; identical to SEQ ID NO: 198346
  chr2:101436113-101436386
  hyper

SEQ ID NO: 280056 - DNA, 885 bp, Homo sapiens
  chr2:101436742-101437627
  hyper
cagcgcctcccgccgccgcccgggaggagctcgccgcgcccgctcgccgcctcgtctcccagcggcggcgggaggcgcgtctccccggcccagtccgcgcccggccccgcggggccgctccggcccgctccgaggtaaggggccgcgcctaggggcgcgggggacccagggtgggtagtacgtgcgcgcggggtcgcaggactcggtcacctgctcgccagcgtggaggacgcgcgggggcggaggggcgctcaggcgcgaggctgcgcggcaccggggaccccggacgcgggggcgcggagaggtgggttcccctccacagtcaggccgctgggggcttcgcgtcctgcaggaggtagcaatcgctgggccggtgggctccgggcgcgtctcgacgcagaagacagaggactgggcatccgagcctcggaatttgggggtcctcggggtgtccgacagggtggagaaggatcgtgccccagggcaacagctttggggattgcccgtggttgtcttcgagacccatcgcgctaccctccgaaacgtcgggcgtcctggacccccggagagtgcggcgtgcgcgccctgggcccgcggtctctcggagtccctgggtcggaattggttccgggccggattgggtgcggaatcggtgcccccaacccccgtgtgcgcagacagcgtgcagcctggctcctcacgtcgctgccgcccccccaccccaactccggagctccccaggttggatgtatgcgtatggttttgttgggagatgtgcccctttcccagccgaggagggacgcacctttgacctttctgaagagctgggcaggtcggtaaccagggaagggacaggcaccacccggctaaattcagaaccagtcc

SEQ ID NO: 280057 - DNA, 704 bp, Homo sapiens; identical to SEQ ID NO: 198348
  chr2:101767139-101767843
  hyper

SEQ ID NO: 280058 - DNA, 955 bp, Homo sapiens; identical to SEQ ID NO: 198349
  chr2:101924527-101925482
  hyper

SEQ ID NO: 280059 - DNA, 227 bp, Homo sapiens; identical to SEQ ID NO: 198350
  chr2:102003274-102003501
  hyper

SEQ ID NO: 280060 - DNA, 225 bp, Homo sapiens; identical to SEQ ID NO: 198351
  chr2:102003609-102003834
  hyper

SEQ ID NO: 280061 - DNA, 112 bp, Homo sapiens
  chr2:102004154-102004266
  hyper
cctcctcgcgcgccaggtcccgggatgggttcgtttcctgcaggatggcacaggttccgcagccagagggtgggcgttcaaatcccggcttaatacacgcgtctgctcaaca

SEQ ID NO: 280062 - DNA, 332 bp, Homo sapiens; identical to SEQ ID NO: 198353
  chr2:102313750-102314082
  hyper

SEQ ID NO: 280063 - DNA, 153 bp, Homo sapiens; identical to SEQ ID NO: 37826
  chr2:102314091-102314244
  hyper

SEQ ID NO: 280064 - DNA, 41 bp, Homo sapiens; identical to SEQ ID NO: 228561
  chr2:102314451-102314492
  hyper

SEQ ID NO: 280065 - DNA, 159 bp, Homo sapiens; identical to SEQ ID NO: 198355
  chr2:102314987-102315146
  hyper

SEQ ID NO: 280066 - DNA, 68 bp, Homo sapiens; identical to SEQ ID NO: 198356
  chr2:102637363-102637431
  hyper

SEQ ID NO: 280067 - DNA, 59 bp, Homo sapiens; identical to SEQ ID NO: 198357
  chr2:102637461-102637520
  hyper

SEQ ID NO: 280068 - DNA, 128 bp, Homo sapiens; identical to SEQ ID NO: 228565
  chr2:102720910-102721038
  hyper

SEQ ID NO: 280069 - DNA, 540 bp, Homo sapiens
  chr2:102758958-102759498
  hyper
gaggagccgggccgcgactcgagagcgcccggcagctctccaatgctttggaaccggcgggacccctgcgggctacccggggcagggcggtgtccgcaggggtctgtccagccgcgcctgctcctccgggtggagagttgggacacccggccagctcgctcgcagcccgcggactggcccagccgagccgtctccgcccgttccccgcccccgcagcggcggggctagagccagagccgcgcccggcagttcccggccgcgagggcgggcgcagcttgtggccggcggccggagccgactcggagcgcgcggcgccggccgggaggagccggagagcggccgggccgggcggtgggggcgccggcctgccccgcgcgccccagggagcggcaggaatgtgacaatcgcgcgcccgcgcaccgaagcactcctcgctcggctcctagggctctcgcccctctgagctgagccgggttccgcccggggctgggatcccatcaccctccacggccgtccgtccaggtacggggaagctggagc

SEQ ID NO: 280070 - DNA, 63 bp, Homo sapiens; identical to SEQ ID NO: 198358
  chr2:102972744-102972807
  hyper

SEQ ID NO: 280071 - DNA, 45 bp, Homo sapiens; identical to SEQ ID NO: 228568
  chr2:103095718-103095763
  hyper

SEQ ID NO: 280072 - DNA, 580 bp, Homo sapiens; identical to SEQ ID NO: 198359
  chr2:103235356-103235936
  hyper

SEQ ID NO: 280073 - DNA, 360 bp, Homo sapiens; identical to SEQ ID NO: 198360
  chr2:103236292-103236652
  hyper

SEQ ID NO: 280074 - DNA, 106 bp, Homo sapiens; identical to SEQ ID NO: 228570
  chr2:103353457-103353563
  hyper

SEQ ID NO: 280075 - DNA, 52 bp, Homo sapiens; identical to SEQ ID NO: 228573
  chr2:105460700-105460752
  hyper

SEQ ID NO: 280076 - DNA, 139 bp, Homo sapiens; identical to SEQ ID NO: 198361
  chr2:105460782-105460921
  hyper

SEQ ID NO: 280077 - DNA, 92 bp, Homo sapiens
  chr2:105468471-105468563
  hyper
aggaaaggaaaacacggggtgctggcaccgactattcaaacgtctgcacctggagatctcagattgattcaatgaaatctgtgttccatctt

SEQ ID NO: 280078 - DNA, 353 bp, Homo sapiens
  chr2:105471069-105471422
  hyper
aggactcttgtttcagaggcaaccaagagctccggcaatagcaacttcagagaaatgcaccatcgcaagaagttttcctaggacagaacaaaacttgaaacgagaggaccagagggggagagcaggagccagcctcccctctccgcactcgcgagcagccagcagcaccacgccttcaaggacgaaaaagttttactactctaagggaaaacgagtgaaatgtgttcctgaggaggagaggagaggagaggagagagcggacaagagaaggagcgggccggttgctggtcatccgtaatttggctaaggaagaaaggagcagcttctttctttgttatctcccgtgaaacctt

SEQ ID NO: 280079 - DNA, 60 bp, Homo sapiens
  chr2:105471748-105471808
  hyper
gccgcggcggcggcggcggcggcgggggcggaggcggcggcggaggaggaggcggcgaag

SEQ ID NO: 280080 - DNA, 60 bp, Homo sapiens; identical to SEQ ID NO: 198364
  chr2:105472048-105472108
  hyper

SEQ ID NO: 280081 - DNA, 170 bp, Homo sapiens; identical to SEQ ID NO: 198365
  chr2:105473814-105473984
  hyper

SEQ ID NO: 280082 - DNA, 245 bp, Homo sapiens; identical to SEQ ID NO: 198366
  chr2:105478381-105478626
  hyper

SEQ ID NO: 280083 - DNA, 91 bp, Homo sapiens
  chr2:105479311-105479402
  hyper
gcaacttctgtaaaagccgtaggagaatacaaaccgatcctgcctttcaattacagatcaaaatggcttgaaacgcgatgttttgttcatc

SEQ ID NO: 280084 - DNA, 98 bp, Homo sapiens
  chr2:105480109-105480207
  hyper
cgtgaccccttgggtcttcccggactgtggcccagcccacagaccagggcccgaaattgaggtggggggcgtactctgtttgtcttcccgaaggatgc

SEQ ID NO: 280085 - DNA, 87 bp, Homo sapiens
  chr2:105480273-105480360
  hyper
ggcagaagaagtcagagcggaacagcctagtgcactggcagggctcattgtctgggaagacaccgaggtctaggcagctgggactgc

SEQ ID NO: 280086 - DNA, 112 bp, Homo sapiens; identical to SEQ ID NO: 198367
  chr2:105483512-105483624
  hyper

SEQ ID NO: 280087 - DNA, 160 bp, Homo sapiens
  chr2:105483840-105484000
  hyper
ctataacaaaggctccctacaaaactagtactaaggatctttaaaggatcacacaccttgcaggcgtgtccccagctcccgggacgcagagcccgctgactgttcccccgggctccgcagacgtgcccgggttgtcagaggtgtggggctggaagtccag

SEQ ID NO: 280088 - DNA, 72 bp, Homo sapiens
  chr2:105484378-105484450
  hyper
cccctttggttcccgaggacccagctcctcccgcccctctactcggcgccccctgccaccatagaactctgg

SEQ ID NO: 280089 - DNA, 130 bp, Homo sapiens
  chr2:105484522-105484652
  hyper
agactggaagagttgaaatcaacgcaggagaacaattaggaaaaagtaagaaaaaaatcacccggatgacctccaacttcacccccacacccccatggggttctgaaggctccggcgcagctcctacagg

SEQ ID NO: 280090 - DNA, 337 bp, Homo sapiens; identical to SEQ ID NO: 198369
  chr2:105489278-105489615
  hyper

SEQ ID NO: 280091 - DNA, 133 bp, Homo sapiens; identical to SEQ ID NO: 1730
  chr2:105490035-105490168
  hyper

SEQ ID NO: 280092 - DNA, 43 bp, Homo sapiens; identical to SEQ ID NO: 198371
  chr2:105654394-105654437
  hyper

SEQ ID NO: 280093 - DNA, 468 bp, Homo sapiens
  chr2:105760095-105760563
  hyper
atggttggaccatccgaaagcgaggtgtgcgggcgggtggaaggaggaaggtgagggttcttcctagaggtgaccaggtgaggccgggagtcgagcattttcataagattgctcgcggacgcgggggtgggtggagagcatcacgattaagaaggaacacacgcacgcacacacacacctccttcctccttcccctcctcttcctctcaccccgccccccggggggcggtaccctagtctcccgggggaggttttggggcggaggaccgcggaggactgcgcccaggagggtggccggccgcgggaggaggacttggggtcgggctgctgcagctgggtggccagcgccgcggcggcccctcccccgctctccctggccgccgccccctcctcctcccgtcctcctcctcctctccctcctcccggtcccccatcctcctcccggcccccggcagctgcggctcgggg

SEQ ID NO: 280094 - DNA, 59 bp, Homo sapiens
  chr2:106014886-106014945
  hyper
cccgcgcagaccaccgtgccaggacagcccgctcgggagtcgggcctggaagcaggcgg

SEQ ID NO: 280095 - DNA, 300 bp, Homo sapiens
  chr2:106015116-106015416
  hyper
gacccctcccattgctccgctcccctctccccgtggtctccccacccccaacccccagggttcggctctcctctcccgggtctaccccacagctcaactcctttctcccggcttctccccgcacggttcgggtcccctctcccagtggtcttcccggacccacagctctgctctcctctcaccagtctccccaactccggctctgctcccctctccttgggtctcgcaccggattcggcccccacttccgagccctggtggctaagcccctcggcctccctccggggcgcagggggttgg

SEQ ID NO: 280096 - DNA, 181 bp, Homo sapiens
  chr2:106015547-106015728
  hyper
tgtcatttgaccatataaggagatgcacgcctcggctcgctggcaccgggcgtggggcgcggggggcgggcgcccccaggcctcgcggttgccgtgcccccgccccgggctgcggcggtcccggcccgtaccctttgtttgccagggctcctttcttcgtgccctccgggtcttgggagca

SEQ ID NO: 280097 - DNA, 214 bp, Homo sapiens; identical to SEQ ID NO: 198372
  chr2:106362018-106362232
  hyper

SEQ ID NO: 280098 - DNA, 225 bp, Homo sapiens; identical to SEQ ID NO: 228591
  chr2:106810964-106811189
  hyper

SEQ ID NO: 280099 - DNA, 42 bp, Homo sapiens
  chr2:107501993-107502035
  hyper
tcagtcccccaacacagaaccggcaaatccgaatgagatgga

SEQ ID NO: 280100 - DNA, 340 bp, Homo sapiens
  chr2:107502087-107502427
  hyper
cggaaagtaaacccaaaagcggagtttgccgcctgccaactacataagaattaacactcgggtatttaggattctaaagatccctactaccccaaacattatagccacagagaaccagaaatgaacagaacacactttaacctttaagaagtgcagttttgtacgggggttggctgaagaaagacaaaaatcttcactcccttccagagccaaaagagccaaaataaaagatcacctttactgagccacaggggcacaactgtatccgcccgtccccaaagcgcaagccgtcctcccgttcgcttctccagaatttcctgcttttccccaaaccaccttc

SEQ ID NO: 280101 - DNA, 104 bp, Homo sapiens; identical to SEQ ID NO: 198374
  chr2:107504132-107504236
  hyper

SEQ ID NO: 280102 - DNA, 173 bp, Homo sapiens; identical to SEQ ID NO: 198375
  chr2:108603415-108603588
  hyper

SEQ ID NO: 280103 - DNA, 274 bp, Homo sapiens
  chr2:109335510-109335784
  hyper
cacgcctggccctcatttaataagatatgaatttaaaaatgtatgctttagtattcacacatgtccgatgcaacgtatttaaccagtcatctccagaaactttgttccaatttacacgttcaccaaattggcctgagtgctttttttcttccaatgcattgcgcacttataatttagaacaagtgaccaaaacgcttaagagcccatcacgcaaattgttatctgctggaaatctacgccctaggctgtggacactggcggccgaaatctgatc

SEQ ID NO: 280104 - DNA, 410 bp, Homo sapiens; identical to SEQ ID NO: 228595
  chr2:109402898-109403308
  hyper

SEQ ID NO: 280105 - DNA, 70 bp, Homo sapiens; identical to SEQ ID NO: 198376
  chr2:109647969-109648039
  hyper

SEQ ID NO: 280106 - DNA, 85 bp, Homo sapiens; identical to SEQ ID NO: 198377
  chr2:109648464-109648549
  hyper

SEQ ID NO: 280107 - DNA, 183 bp, Homo sapiens; identical to SEQ ID NO: 198378
  chr2:109744565-109744748
  hyper

SEQ ID NO: 280108 - DNA, 34 bp, Homo sapiens
  chr2:109746501-109746535
  hyper
cggccgcgggcagcaccgccggcagtctgcggga

SEQ ID NO: 280109 - DNA, 220 bp, Homo sapiens; identical to SEQ ID NO: 198379
  chr2:110370721-110370941
  hyper

SEQ ID NO: 280110 - DNA, 485 bp, Homo sapiens; identical to SEQ ID NO: 198380
  chr2:110371219-110371704
  hyper

SEQ ID NO: 280111 - DNA, 446 bp, Homo sapiens; identical to SEQ ID NO: 198381
  chr2:110371818-110372264
  hyper

SEQ ID NO: 280112 - DNA, 138 bp, Homo sapiens
  chr2:110372284-110372422
  hyper
cgccaagtacgtgcacctcaagaagaggttctgtgaagggccgtccgagccctccggggacccgccgcgaatccaggtgaccgccgagcccgaggcccccgacggccctgccgggcccgaggcgcgcgatcggctccc

SEQ ID NO: 280113 - DNA, 95 bp, Homo sapiens; identical to SEQ ID NO: 106488
  chr2:110372665-110372760
  hyper

SEQ ID NO: 280114 - DNA, 374 bp, Homo sapiens; identical to SEQ ID NO: 228599
  chr2:110962328-110962702
  hyper

SEQ ID NO: 280115 - DNA, 169 bp, Homo sapiens; identical to SEQ ID NO: 228600
  chr2:111435569-111435738
  hyper

SEQ ID NO: 280116 - DNA, 293 bp, Homo sapiens; identical to SEQ ID NO: 198383
  chr2:111490023-111490316
  hyper

SEQ ID NO: 280117 - DNA, 170 bp, Homo sapiens; identical to SEQ ID NO: 198384
  chr2:111490689-111490859
  hyper

SEQ ID NO: 280118 - DNA, 278 bp, Homo sapiens; identical to SEQ ID NO: 198385
  chr2:111874608-111874886
  hyper

SEQ ID NO: 280119 - DNA, 204 bp, Homo sapiens; identical to SEQ ID NO: 198386
  chr2:111874987-111875191
  hyper

SEQ ID NO: 280120 - DNA, 136 bp, Homo sapiens; identical to SEQ ID NO: 198387
  chr2:111875611-111875747
  hyper

SEQ ID NO: 280121 - DNA, 713 bp, Homo sapiens; identical to SEQ ID NO: 198388
  chr2:111877553-111878266
  hyper

SEQ ID NO: 280122 - DNA, 161 bp, Homo sapiens; identical to SEQ ID NO: 228606
  chr2:111879697-111879858
  hyper

SEQ ID NO: 280123 - DNA, 85 bp, Homo sapiens; identical to SEQ ID NO: 221856
  chr2:111880646-111880731
  hyper

SEQ ID NO: 280124 - DNA, 149 bp, Homo sapiens; identical to SEQ ID NO: 228607
  chr2:112641878-112642027
  hyper

SEQ ID NO: 280125 - DNA, 90 bp, Homo sapiens; identical to SEQ ID NO: 198389
  chr2:112656487-112656577
  hyper

SEQ ID NO: 280126 - DNA, 32 bp, Homo sapiens
  chr2:112657092-112657124
  hyper
ggcttttttttttttaatttgagaccgagtct

SEQ ID NO: 280127 - DNA, 44 bp, Homo sapiens
  chr2:112895964-112896008
  hyper
agcccaggggccggcgcctccccgcctcgcgcggactgtctcgt

SEQ ID NO: 280128 - DNA, 71 bp, Homo sapiens
  chr2:112896106-112896177
  hyper
cccagccgccccccggccgcgcggcgccccgcaccctgcagggacggctgccgcatcgctgggacaaactc

SEQ ID NO: 280129 - DNA, 108 bp, Homo sapiens
  chr2:112939135-112939243
  hyper
ggccctggacgggtcgtctgggtctgtggttgattacttgtctctcctttccctactccagagtaagccctttgagaaggggccgtgcctccgtcttggttctgctcc

SEQ ID NO: 280130 - DNA, 147 bp, Homo sapiens; identical to SEQ ID NO: 106508
  chr2:113012388-113012535
  hyper

SEQ ID NO: 280131 - DNA, 67 bp, Homo sapiens; identical to SEQ ID NO: 228611
  chr2:113239297-113239364
  hyper

SEQ ID NO: 280132 - DNA, 177 bp, Homo sapiens; identical to SEQ ID NO: 228612
  chr2:113240292-113240469
  hyper

SEQ ID NO: 280133 - DNA, 35 bp, Homo sapiens
  chr2:113341821-113341856
  hyper
ccaccagctacagtcggagatttggagcgcttgtg

SEQ ID NO: 280134 - DNA, 553 bp, Homo sapiens
  chr2:113341898-113342451
  hyper
cattctctttggacccgaggcaccaccatactttccattgcttacttccgttaaaccccgagcgctgccatggcaagccggaaatagggatgaagcaatttagccagaagagggcggaagtggctactcagggcgccgccatgacgagccgggccggaagaagaggtagggcgccgccgtgacagattagtcctaaagggaacggggttgttagttcaattggctaccggaaaaaaccaggctgggctgggcgccgccatgacaaccgataccggaaaaggcgggtcgttccccccggacagccctacgccggcaaaggtctcgagatgtgagtagtgagagcgcctaccccatacgtgctgccgctccccttcttttacccagtgatctagacctagtctaggacctcgggaactaggaccagcctccctccttcttggagatctgaccctcaggattcagcgccttcgctcacgagctccaaccctccgcatgcccaagccccgccctctaagcgtttaggcctcgccccctctcgcgctgcttaggactt

SEQ ID NO: 280135 - DNA, 206 bp, Homo sapiens; identical to SEQ ID NO: 228614
  chr2:113522193-113522399
  hyper

SEQ ID NO: 280136 - DNA, 33 bp, Homo sapiens; identical to SEQ ID NO: 198390
  chr2:114035443-114035476
  hyper

SEQ ID NO: 280137 - DNA, 88 bp, Homo sapiens; identical to SEQ ID NO: 198391
  chr2:114035831-114035919
  hyper

SEQ ID NO: 280138 - DNA, 87 bp, Homo sapiens
  chr2:115920698-115920785
  hyper
cttattgctagcgtgggatagagggagcgcacgcggctaggctccagcagcgactcggcttttcgcgtattctaagcactgaagagc

SEQ ID NO: 280139 - DNA, 178 bp, Homo sapiens; identical to SEQ ID NO: 228620
  chr2:118572162-118572340
  hyper

SEQ ID NO: 280140 - DNA, 212 bp, Homo sapiens; identical to SEQ ID NO: 228621
  chr2:118771324-118771536
  hyper

SEQ ID NO: 280141 - DNA, 50 bp, Homo sapiens; identical to SEQ ID NO: 198394
  chr2:118981042-118981092
  hyper

SEQ ID NO: 280142 - DNA, 211 bp, Homo sapiens; identical to SEQ ID NO: 198395
  chr2:119068126-119068337
  hyper

SEQ ID NO: 280143 - DNA, 276 bp, Homo sapiens; identical to SEQ ID NO: 198396
  chr2:119532328-119532604
  hyper

SEQ ID NO: 280144 - DNA, 52 bp, Homo sapiens
  chr2:119566105-119566157
  hyper
catcgtgccaggggcgatgaggttcagttgtgcttctggaaggatccagggt

SEQ ID NO: 280145 - DNA, 395 bp, Homo sapiens
  chr2:119591680-119592075
  hyper
tacctggttcccttcctggtggccggtcctgtttggggccaaagtttgcatgcgatgggcacaaaggactctgcgcctcctttccctaaccccaagccctgggcggtcggagaacccaagacgggttcaatcccgaaaagcaaactttgttaacttctggctgaatttggcacggcggaggggggagtgggcaataatccctccattctcccctccaccaacacccagggtccctcacttacatcgcagtccccaagtcaacactcgacttgtcactttgcaccacaatgcggtcagccctgtgaggacatgaagaatggatatgaaactcgaggccagataagcgtggaactaggttcagccgtcctccctggggtacctacctccctactccc

SEQ ID NO: 280146 - DNA, 259 bp, Homo sapiens
  chr2:119594491-119594750
  hyper
tcgttactgggactcgcttttgttttcttcaggattcagtattgaaattgggagtgtggaggcggcttctccccagctctctccgtccagttttccactgtgttctatttatcagatggcagagccgtgggtctcgctgcaggaaatggttgctgtcagggcccgattgctgctgtcagggcccaagcccactcttgcagtagtcgtggttgaatcagaaattctcctgggtcccttctgtctttggactctcatctct

SEQ ID NO: 280147 - DNA, 36 bp, Homo sapiens; identical to SEQ ID NO: 228628
  chr2:119599150-119599186
  hyper

SEQ ID NO: 280148 - DNA, 85 bp, Homo sapiens; identical to SEQ ID NO: 198398
  chr2:119600864-119600949
  hyper

SEQ ID NO: 280149 - DNA, 65 bp, Homo sapiens
  chr2:119604851-119604916
  hyper
ggcgaagcctcagcgaaggcacggggcgggtgcaggaaaaaagctcaggcgtctggcctggatcg

SEQ ID NO: 280150 - DNA, 60 bp, Homo sapiens; identical to SEQ ID NO: 198399
  chr2:119605299-119605359
  hyper

SEQ ID NO: 280151 - DNA, 84 bp, Homo sapiens; identical to SEQ ID NO: 198400
  chr2:119605386-119605470
  hyper

SEQ ID NO: 280152 - DNA, 124 bp, Homo sapiens; identical to SEQ ID NO: 106559
  chr2:119605501-119605625
  hyper

SEQ ID NO: 280153 - DNA, 94 bp, Homo sapiens
  chr2:119606041-119606135
  hyper
tgcgcctagctagcgtcgcacgtttacgtttgtacgtctcctgccggcccgctgcattgctttccctttgtggggaatccgcacccatgccctt

SEQ ID NO: 280154 - DNA, 75 bp, Homo sapiens; identical to SEQ ID NO: 198402
  chr2:119606630-119606705
  hyper

SEQ ID NO: 280155 - DNA, 274 bp, Homo sapiens
  chr2:119607862-119608136
  hyper
ccgaggcccggcctgggccggacgctcggtaccccgcgccgctctgcgctccatgacctccacccagaccctacgccctcttctccctcctgcaaatgaacatgccattgggaactctgtgtgagcgcattggcgtcttgtcaagcatgcgagtgaagtgtgtgagggctgagtgaacaaatgttggccgagagggatgggtgagggtttcacaggactctgagtgagcccaggattgggcgtgtgagtgaggaactacgggcagggtgagttg

SEQ ID NO: 280156 - DNA, 45 bp, Homo sapiens; identical to SEQ ID NO: 198403
  chr2:119609396-119609441
  hyper

SEQ ID NO: 280157 - DNA, 137 bp, Homo sapiens; identical to SEQ ID NO: 198404
  chr2:119610099-119610236
  hyper

SEQ ID NO: 280158 - DNA, 225 bp, Homo sapiens
  chr2:119610619-119610844
  hyper
ctacatacaattccctatttatttttcttcactttaatctgacatcccgctttttatgcttacactgaatcctacccaaaccccagaacccagacccgaatttgggtttaacccctttctctttcgccgaaaaaaagaaaaaatccggagttaattcaatgtctacgcctgaattttcttctatttttttattttgcttttctccctgtatggctccctcccact

SEQ ID NO: 280159 - DNA, 255 bp, Homo sapiens; identical to SEQ ID NO: 198406
  chr2:119610998-119611253
  hyper

SEQ ID NO: 280160 - DNA, 91 bp, Homo sapiens; identical to SEQ ID NO: 198407
  chr2:119611824-119611915
  hyper

SEQ ID NO: 280161 - DNA, 239 bp, Homo sapiens
  chr2:119614242-119614481
  hyper
cccgtaagaagggccgaggctagagggagagcgaagactgagccaacgacgcacctgagccctggggtgggggtggagacgtggctcctaacccaaatctccctgccaggcagtgtccgacgagcatcgacggcaggcgtcgagaccagtgcagggtagctcagacctcaagccacgcttgacctttccatgaaatgaataaaactcgaaagccagggaaaggggacagtactttgatc

SEQ ID NO: 280162 - DNA, 134 bp, Homo sapiens; identical to SEQ ID NO: 198409
  chr2:119615627-119615761
  hyper

SEQ ID NO: 280163 - DNA, 111 bp, Homo sapiens
  chr2:119769050-119769161
  hyper
ggggagtttcacgtcgctgggctccacaaacatgacctggggctgctccacccctctgtcccttctgagtagaaggggggcttagtccagtggcggccgcgccgcaggagg

SEQ ID NO: 280164 - DNA, 153 bp, Homo sapiens
  chr2:119913860-119914013
  hyper
gtcaggagggaatgcggtgtggagaggtgaattttctgtttgctggaattctgctgtgggtggggttttggctgatggacagggaaatctgcacaagtatttcgggtcacaaagaaggacgccccaggaagcccgcgctccctctggcctacc

SEQ ID NO: 280165 - DNA, 147 bp, Homo sapiens
  chr2:119914053-119914200
  hyper
ggaggaggctgtctgaggagggcaggctcccggccctgcctgtccagtctaatcaggtttgcaaagtctgtgccgccgcctcaagggctcgggcgtcccttcctcccttgccgggatggggatggagaccaggagcacagccctgag

SEQ ID NO: 280166 - DNA, 33 bp, Homo sapiens
  chr2:119914247-119914280
  hyper
cgcagggatttgtcttttccaaaggagatgtca

SEQ ID NO: 280167 - DNA, 162 bp, Homo sapiens; identical to SEQ ID NO: 198410
  chr2:120189853-120190015
  hyper

SEQ ID NO: 280168 - DNA, 234 bp, Homo sapiens; identical to SEQ ID NO: 198411
  chr2:120281412-120281646
  hyper

SEQ ID NO: 280169 - DNA, 660 bp, Homo sapiens; identical to SEQ ID NO: 198412
  chr2:120301687-120302347
  hyper

SEQ ID NO: 280170 - DNA, 138 bp, Homo sapiens; identical to SEQ ID NO: 228649
  chr2:120516995-120517133
  hyper

SEQ ID NO: 280171 - DNA, 129 bp, Homo sapiens; identical to SEQ ID NO: 198413
  chr2:120770809-120770938
  hyper

SEQ ID NO: 280172 - DNA, 218 bp, Homo sapiens; identical to SEQ ID NO: 106596
  chr2:120770966-120771184
  hyper

SEQ ID NO: 280173 - DNA, 198 bp, Homo sapiens; identical to SEQ ID NO: 228651
  chr2:121101033-121101231
  hyper

SEQ ID NO: 280174 - DNA, 162 bp, Homo sapiens
  chr2:121101970-121102132
  hyper
ccagagcggcagccgccggcggagcctgcctctggcatcccaggccgcgccgcaccccgctcgcctcgccaggctcggccgcgagggagcgccccgggagggccgggggcggccacggcggcgggagtcgcctctgctggttggggagggcggcagctggga

SEQ ID NO: 280175 - DNA, 133 bp, Homo sapiens
  chr2:121103355-121103488
  hyper
ccgccggccgaaccgccgctcccactgacgctgctttcgcttcacccgaaccggggctgcggggcccccgacgcggaaaggatggggagaaggctgcagatgccgaggcgccccgagacgcccgtgcggcagt

SEQ ID NO: 280176 - DNA, 33 bp, Homo sapiens
  chr2:121105241-121105274
  hyper
agcctcggtggggggagcggttgtgcccctggc

SEQ ID NO: 280177 - DNA, 332 bp, Homo sapiens; identical to SEQ ID NO: 198415
  chr2:121199617-121199949
  hyper

SEQ ID NO: 280178 - DNA, 260 bp, Homo sapiens
  chr2:121200130-121200390
  hyper
aatgattcggcctttggaggagttcggagggctgggggtggcagcaggaggctggggcgcagcgcagcgccaggggcgcgggacccagccaagctccccactctgcccccactgggacagagaggcgcaagagtccaccaacccctgccacttgtggcctttcctgactgcccagggcttccaacaatgtagaagagtgacagtaaatgtccaggtccctgcatataggtgtttctttaatctgcacaccaggccggaaa

SEQ ID NO: 280179 - DNA, 241 bp, Homo sapiens; identical to SEQ ID NO: 198417
  chr2:121200454-121200695
  hyper

SEQ ID NO: 280180 - DNA, 68 bp, Homo sapiens; identical to SEQ ID NO: 198418
  chr2:121200731-121200799
  hyper

SEQ ID NO: 280181 - DNA, 213 bp, Homo sapiens
  chr2:121493196-121493409
  hyper
tctaaaaaaagtgtcggagattggcgcgtcctttggttcctttctcgaactttccttgtaggtgcgttttctttccttggtgctgggtggggagagtccctgtgctccccctttcccctccccccgccccggcggcgttcgggtccccctgcgtcccccggcagggagcgggcgggctggctggcgggttcttggggcccgggtgtgcccgca

SEQ ID NO: 280182 - DNA, 698 bp, Homo sapiens
  chr2:121494270-121494968
  hyper
gagcgtgtctgcgggcgtactgagcgcggaggggctgcagccagccacttgagaacttcgaactccacttctccgcgctgcgcgtcccggagccctgcctttctttcttccttcctcaatccttcctccccctcgcccggcccggccgccccctccccctctgctgggctctcctcctcggccccccctctttgcctctcttctcctcctctcctgccctcggccctgagatccgcttgacttcccaaagggatccgcacgtaatcctttgccgggtcctccggttcccccttccacctcactttcatccctgcccccctactcatcgtctctccccacccccgacaatctctcaacaagtatatttgctgaggaatttgaaaaatccactactgcaacttgatctgtatgtgatggatggggagaggcgcggagagagttgggcgccaatcctattaagggtttagagaggggagtcttttccccggacggggcgggggcggggagctgggagggagcgtgtgcttgcgtgtgtgagtgtgagcgcgcccgccgcgctggagagctgggagtccacccagctcggcgccttttcagcccggcggtaactgctgtcatttcctaggaaacccgacttttaccgcgcggggagctggggatggagcccgtgcgcctcaccctgggtgatcggtcgctga

SEQ ID NO: 280183 - DNA, 240 bp, Homo sapiens; identical to SEQ ID NO: 198420
  chr2:121495008-121495248
  hyper

SEQ ID NO: 280184 - DNA, 266 bp, Homo sapiens
  chr2:121499189-121499455
  hyper
ctcctccccgcccccgccgtctggaccttcctctccctccgcgccggcttttccgccacgcggagcgctggctggcgaggccgcgtgtccgagcggcgccgaccgtgccgcggccgggggacattccgtgccccgagcgccccgggcccgcggctgcggccctcccacctgcgcgccggcctggtttgcagctcccaaacaatggccacattgtcgcagccgcacaccggccgccgccggcgagtggcgggaggccggactctgct

SEQ ID NO: 280185 - DNA, 51 bp, Homo sapiens; identical to SEQ ID NO: 37970
  chr2:121499643-121499694
  hyper

SEQ ID NO: 280186 - DNA, 182 bp, Homo sapiens; identical to SEQ ID NO: 228660
  chr2:121834574-121834756
  hyper

SEQ ID NO: 280187 - DNA, 55 bp, Homo sapiens
  chr2:122042061-122042116
  hyper
aaccacgcgggcctcgggcgaacacgcgcaagaccatcgcgggaagtggggcggc

SEQ ID NO: 280188 - DNA, 286 bp, Homo sapiens; identical to SEQ ID NO: 198421
  chr2:122042359-122042645
  hyper

SEQ ID NO: 280189 - DNA, 131 bp, Homo sapiens
  chr2:122042982-122043113
  hyper
aactccgatgtggggctcaggtgacccttgccgcccccaacccgctccacacggcccctctggcctctgctccccactctacgcccagggccggtctccagagcggctccgagatttccagcctaggccct

SEQ ID NO: 280190 - DNA, 111 bp, Homo sapiens; identical to SEQ ID NO: 228662
  chr2:122288274-122288385
  hyper

SEQ ID NO: 280191 - DNA, 108 bp, Homo sapiens; identical to SEQ ID NO: 228663
  chr2:122407190-122407298
  hyper

SEQ ID NO: 280192 - DNA, 265 bp, Homo sapiens; identical to SEQ ID NO: 228664
  chr2:122408113-122408378
  hyper

SEQ ID NO: 280193 - DNA, 217 bp, Homo sapiens; identical to SEQ ID NO: 228665
  chr2:122512896-122513113
  hyper

SEQ ID NO: 280194 - DNA, 208 bp, Homo sapiens; identical to SEQ ID NO: 228667
  chr2:126339277-126339485
  hyper

SEQ ID NO: 280195 - DNA, 381 bp, Homo sapiens
  chr2:127413347-127413728
  hyper
cgcccagctatccagcggccgcgcagccagccaagatttcaacacaggtctgccctatttggtcaccatccccgacagtgctgggccaggccatcatgtcacattggggagttttccctgcactccagggggaattctcaaccacaacctctgtatccggtagtggcagatggaaagagaaacggttagaaaagcgtggttcttgcgcaggaaagttggagcaaagaagagttcagaagtgggcgggtgtgtgtttaaaaaaaaaaaagggggtggaaaccccaccagccaagtctgcagaaaaaaaataaatgaagtctgcctatctccgggccagagcccctcccctcggcccgcgcgggaggagtgtgacccaggtgc

SEQ ID NO: 280196 - DNA, 266 bp, Homo sapiens; identical to SEQ ID NO: 37981
  chr2:127414108-127414374
  hyper

SEQ ID NO: 280197 - DNA, 51 bp, Homo sapiens; identical to SEQ ID NO: 198424
  chr2:127643929-127643980
  hyper

SEQ ID NO: 280198 - DNA, 68 bp, Homo sapiens; identical to SEQ ID NO: 198425
  chr2:127782975-127783043
  hyper

SEQ ID NO: 280199 - DNA, 126 bp, Homo sapiens
  chr2:127863362-127863488
  hyper
ccacccggcggccgcgcagcgggtgggagagggggcaggcctggccgcggggcactggggggccaccctggcagaaacacagattctgcaatctcagatttcagagttggagtcgtcaggggaagt

SEQ ID NO: 280200 - DNA, 425 bp, Homo sapiens
  chr2:127863878-127864303
  hyper
aatccctccttcggcccacggagaacgaaagtggagaagcagtgggaaggaaggaactgtgggtgccggttcgagaagcagccttgggagtccgggggaatagtgtccccaggggcagagggacatactccctctcgccccgagcgccggcccagcctaggttgcctgcatgggcctggagagctgagggtcaccacctggcctcccagcctcccggcccttggcctccaaagcggggtagcctggagcgcgcgcctgagaagagcctggagcagggccggccactgctgtgcagccgagccacgaaggtgcaaagcggggccctgtcctgccccggccgggtgtggggagacagaggacgcaaacctaagagggcacccagagcgccggggaacgcagcctggggacctcgaagcccctcgaaa

SEQ ID NO: 280201 - DNA, 58 bp, Homo sapiens; identical to SEQ ID NO: 198427
  chr2:127865204-127865262
  hyper

SEQ ID NO: 280202 - DNA, 558 bp, Homo sapiens
  chr2:127976826-127977384
  hyper
gcccccctcagccccaactccgcgggtcccgccagctctccactcccaggccccggcggcgtccaccaggcgcccgctgcccctccccaagtctcctcctccgggacctcagccctggtgccctccccgcagtcccattcctggtttcccttcgcggcgccccctccccaggttccccaaccaggcaatccctgcctgggtccctccccgggaccagtccctggagaccctgcccgccgcctctctcgggctaccactctccgaaactccatccctgactcccctccccgctacctcctccccaggggtcccggctggggcccctccaggggacccctccctgccgccacctcccgagacacccatttcccccgcctcttcccagccgttcctttctggccccgttcctcagctccctctgcctgctgcccctctccggggtccgcttcccgaagacccctccccaacgcccccgccccgctcccggttcctgcctcctccaccccggatcgcctttccggcgtcctctccccagcgccccttcctgcgaaccttaac

SEQ ID NO: 280203 - DNA, 278 bp, Homo sapiens; identical to SEQ ID NO: 106645
  chr2:127977421-127977699
  hyper

SEQ ID NO: 280204 - DNA, 47 bp, Homo sapiens; identical to SEQ ID NO: 228675
  chr2:128051796-128051843
  hyper

SEQ ID NO: 280205 - DNA, 217 bp, Homo sapiens; identical to SEQ ID NO: 198428
  chr2:128165843-128166060
  hyper

SEQ ID NO: 280206 - DNA, 578 bp, Homo sapiens; identical to SEQ ID NO: 198429
  chr2:128173487-128174065
  hyper

SEQ ID NO: 280207 - DNA, 164 bp, Homo sapiens; identical to SEQ ID NO: 228678
  chr2:128284009-128284173
  hyper

SEQ ID NO: 280208 - DNA, 168 bp, Homo sapiens; identical to SEQ ID NO: 228679
  chr2:128284484-128284652
  hyper

SEQ ID NO: 280209 - DNA, 64 bp, Homo sapiens; identical to SEQ ID NO: 198430
  chr2:128421745-128421809
  hyper

SEQ ID NO: 280210 - DNA, 105 bp, Homo sapiens; identical to SEQ ID NO: 198431
  chr2:128459399-128459504
  hyper

SEQ ID NO: 280211 - DNA, 71 bp, Homo sapiens; identical to SEQ ID NO: 198432
  chr2:128848514-128848585
  hyper

SEQ ID NO: 280212 - DNA, 362 bp, Homo sapiens; identical to SEQ ID NO: 228683
  chr2:130635073-130635435
  hyper

SEQ ID NO: 280213 - DNA, 300 bp, Homo sapiens; identical to SEQ ID NO: 228685
  chr2:131099730-131100030
  hyper

SEQ ID NO: 280214 - DNA, 209 bp, Homo sapiens; identical to SEQ ID NO: 221870
  chr2:131113001-131113210
  hyper

SEQ ID NO: 280215 - DNA, 162 bp, Homo sapiens
  chr2:131114254-131114416
  hyper
tccgggcccgaatccgcttcccgtcccgaatccgcgtcccggccatccgcgtgtggtccaggcggtctacctggcccctctgacctcggcttctcccttggtgaaatggggacatgaatgaccaaactggtctaaggattaaatgatgtgggtgaaaagcac

SEQ ID NO: 280216 - DNA, 246 bp, Homo sapiens; identical to SEQ ID NO: 228686
  chr2:131129984-131130230
  hyper

SEQ ID NO: 280217 - DNA, 45 bp, Homo sapiens
  chr2:131484802-131484847
  hyper
ggattgtcatttaacgagtttccctctcccagggaatctgcattc

SEQ ID NO: 280218 - DNA, 135 bp, Homo sapiens; identical to SEQ ID NO: 198433
  chr2:131792037-131792172
  hyper

SEQ ID NO: 280219 - DNA, 224 bp, Homo sapiens; identical to SEQ ID NO: 228695
  chr2:132250191-132250415
  hyper

SEQ ID NO: 280220 - DNA, 155 bp, Homo sapiens; identical to SEQ ID NO: 228696
  chr2:132439907-132440062
  hyper

SEQ ID NO: 280221 - DNA, 105 bp, Homo sapiens
  chr2:132767530-132767635
  hyper
ggcggcaggggcaaaaagccgtggcttcgggggcaaaaagccacagcagcaaaaaccctcagcggcgggggcaaaaagctgtaaaaagccgcggcggcgggggca

SEQ ID NO: 280222 - DNA, 120 bp, Homo sapiens; identical to SEQ ID NO: 198435
  chr2:132795464-132795584
  hyper

SEQ ID NO: 280223 - DNA, 100 bp, Homo sapiens; identical to SEQ ID NO: 198436
  chr2:132796304-132796404
  hyper

SEQ ID NO: 280224 - DNA, 450 bp, Homo sapiens
  chr2:133173628-133174078
  hyper
cctgcgcagaacaccggcaggctctggggaaaggcagggattctatagtgaatcctgcaagcctgcttggggccgacttcctggagcagcggctgcaagcagcgcagagcccagctgtccttggcaaacaccccacagaggaggcgagggcttgctggctcctctgggacgccccggtcaagccaccaccaaacgggccgtgacctcgccttcgaagggggcccccagggcagcggtggacgtgggggcagtgcgggcgagaggaagtttgtctttctcccagctcgggagggtcgccagcttccccggggctgcacctccttgggacgcttgtcgggttggagcgccgcagctgcctctgcggctgccgcctgggtgacggagggtggggcgggggtgggtcgctcgtagctcgagagccacgatctgatttcagggaccgtgcctatg

SEQ ID NO: 280225 - DNA, 212 bp, Homo sapiens; identical to SEQ ID NO: 198438
  chr2:133174170-133174382
  hyper

SEQ ID NO: 280226 - DNA, 95 bp, Homo sapiens
  chr2:133426128-133426223
  hyper
cgggttcagatccggcccccacagagcccaccccggaaatcacgaccatcccacgcctcagagccaggcggctcccagcctctggcaggcttaga

SEQ ID NO: 280227 - DNA, 270 bp, Homo sapiens; identical to SEQ ID NO: 198439
  chr2:133426367-133426637
  hyper

SEQ ID NO: 280228 - DNA, 209 bp, Homo sapiens; identical to SEQ ID NO: 198440
  chr2:133427262-133427471
  hyper

SEQ ID NO: 280229 - DNA, 233 bp, Homo sapiens
  chr2:133427652-133427885
  hyper
ccgcaggtgccgctcgcggagcctgcatcgcccgcgctcgggctcccggctgcgggtctctgctcctcccgctcgcgctcccgggccgagcaccgcgcctccggagttggcggctgagactgaaggaactactggcgatcgggagcacccacaaaagtctcgccttttctccccacctcccactccaggcatcacgtgacggctgccgagttggggtgggggtggcgggcggg

SEQ ID NO: 280230 - DNA, 196 bp, Homo sapiens
  chr2:133428106-133428302
  hyper
acataggaaggcagcctccccactccacgtcctctgcgccttccaggactggtcggtaccccagcgactgggtccagcccacacaactgaggctgtcccgctgcgggccgcgggagcctggcgccccgggaggctgacaggaagggcgcgcgttcccgtgcgcctggcaaagttccacgcccgcaggctccgtagg

SEQ ID NO: 280231 - DNA, 395 bp, Homo sapiens
  chr2:134023959-134024354
  hyper
aagcatacagtctgcggggacaaggactgaacggggtagtgggagccaggtgccgaagggctggggctagggtggcggcgcgcagggggcgcgcctgggcggggagtgggctggcgtctccttacctggccttcggtggagcatgctgctgcgggctgggggcggggtgggcgctgcgtccccaggggttgactccgcagcgccttcacttcgggggcagcaaggcgcgcgctgcagagccgggagttgccaaacttgccatgtccagagcgcggaggcagcctgggccacgcgctcaccgcagcccgggcacctcgcgctcctccgctttgttgtgttccgccgccagtccccctgcgcctgcctgccagtgtccccgagccctctcctgccgc

SEQ ID NO: 280232 - DNA, 294 bp, Homo sapiens
  chr2:134024401-134024695
  hyper
actttcctcctggaggcgcgcgttaaagatctgcctgggagcgcccggcgggcggctcggcttgcgctctgatgaggaggctggggcccatcgattcccaccccctacccactccccctcccctcccctccgccgggcccccccatcagaagctgcttaggatcggcgctgtcaaatccagcccatctgctgcaatcataatcagtctcaaccgaacggttctgacaaatctccgcctggagctggagttggagaagctggagagtgaggggcggggaagggaggtgggggtga

SEQ ID NO: 280233 - DNA, 43 bp, Homo sapiens
  chr2:134024729-134024772
  hyper
cctggagccttctattgtctgcccctaacggaggaactgaaaa

SEQ ID NO: 280234 - DNA, 166 bp, Homo sapiens; identical to SEQ ID NO: 198444
  chr2:134325852-134326018
  hyper

SEQ ID NO: 280235 - DNA, 353 bp, Homo sapiens; identical to SEQ ID NO: 198445
  chr2:135476396-135476749
  hyper

SEQ ID NO: 280236 - DNA, 225 bp, Homo sapiens; identical to SEQ ID NO: 228705
  chr2:135809730-135809955
  hyper

SEQ ID NO: 280237 - DNA, 88 bp, Homo sapiens; identical to SEQ ID NO: 198446
  chr2:136288366-136288454
  hyper

SEQ ID NO: 280238 - DNA, 325 bp, Homo sapiens; identical to SEQ ID NO: 228706
  chr2:136289442-136289767
  hyper

SEQ ID NO: 280239 - DNA, 134 bp, Homo sapiens; identical to SEQ ID NO: 228707
  chr2:136499398-136499532
  hyper

SEQ ID NO: 280240 - DNA, 139 bp, Homo sapiens; identical to SEQ ID NO: 198447
  chr2:136873851-136873990
  hyper

SEQ ID NO: 280241 - DNA, 912 bp, Homo sapiens; identical to SEQ ID NO: 198448
  chr2:136874020-136874932
  hyper

SEQ ID NO: 280242 - DNA, 482 bp, Homo sapiens; identical to SEQ ID NO: 198449
  chr2:136875399-136875881
  hyper

SEQ ID NO: 280243 - DNA, 217 bp, Homo sapiens; identical to SEQ ID NO: 198450
  chr2:136876145-136876362
  hyper

SEQ ID NO: 280244 - DNA, 304 bp, Homo sapiens; identical to SEQ ID NO: 198451
  chr2:137522037-137522341
  hyper

SEQ ID NO: 280245 - DNA, 60 bp, Homo sapiens; identical to SEQ ID NO: 198452
  chr2:137523039-137523099
  hyper

SEQ ID NO: 280246 - DNA, 149 bp, Homo sapiens; identical to SEQ ID NO: 198453
  chr2:137523676-137523825
  hyper

SEQ ID NO: 280247 - DNA, 265 bp, Homo sapiens
  chr2:137523855-137524120
  hyper
aggctgtagcaacagtttacatttcccctgtccctgcgagtggctaggggcaagctgggctcggacgtgatatcctgctgtttgtggagaggaaactgggaacggggcttgagagtgaggggcagggagggggggacaggcatattttctactgcatcgcccatctgcacctgtcccctttgctgtcttacatgtcccatagtattaaagttatttgaataagcaaatgaaccccgctctttggtgaccgcgtattttgaagttg

SEQ ID NO: 280248 - DNA, 70 bp, Homo sapiens
  chr2:139538166-139538236
  hyper
ggcggcggctcgggcgcttgggtgatgggttcagtgcgaggctgccctccagatccgatcccgccgggcg

SEQ ID NO: 280249 - DNA, 142 bp, Homo sapiens; identical to SEQ ID NO: 198455
  chr2:142887729-142887871
  hyper

SEQ ID NO: 280250 - DNA, 406 bp, Homo sapiens
  chr2:142888566-142888972
  hyper
ttcaatgcagggtacgtctgatcttacatcacgcaagaggggcagtgagagatgccagcggatgggaattcactgattaatcaccgaatccaccacacaccccttcgtcgttcacataaatcacatctattacttaataagaggcatttaacacaacaggaaaataccaccgcgaacggagagcgccacaaatcacaattattttaatccccttgaagggaaagtaactcgaagctggttctgtggggatttgggtctttggagaagggagagacttctgcattggcctgagccagccaggcgcctacaatgctccgcagttcacagccagctgagaaccctcagccgagcacagggctgcttctgcaggcaaaacaaagcttctcccttcgttcctcggaagctt

SEQ ID NO: 280251 - DNA, 33 bp, Homo sapiens; identical to SEQ ID NO: 198457
  chr2:145090080-145090113
  hyper

SEQ ID NO: 280252 - DNA, 49 bp, Homo sapiens; identical to SEQ ID NO: 198458
  chr2:145275891-145275940
  hyper

SEQ ID NO: 280253 - DNA, 76 bp, Homo sapiens
  chr2:148601211-148601287
  hyper
taaacaagtatttgcgcacctattacgtgcaaaacagttttcaacacaatgctttgtgtgtaaaaggaacggcggg

SEQ ID NO: 280254 - DNA, 1170 bp, Homo sapiens
  chr2:148601349-148602519
  hyper
tcctccgtgagttttttctttttcttttctagtcaccaagacagcacgcgtgtgcagaagctgcagcggtgggacgcagtgctaagtctgggggcgcacacaccagctcgcgcgtcgcgagctcgcctgggcagctcggcgggcgcggcgaaacagctcccacgtccgccttccaccgactcctcggtatcagagcggacgaggcgtccccccagaggaaagactgggcgccgcagacgccccttggagaagtccctggccactcgccccacctcggggtcctcttcctcttgggcttctcctgaccctttgggtgggcgctccagacaggcccgtcggacgcgatttggaaacgggtcgtgcccggcctagcccgcatctactcgcccggccacagcccagccacagcttagggactttgaggcgcccgcgcccctttgtcgcggtatctctagcccaagcaggccggacgccgaggcctcgcggtatcgagcctccgtccgccccgcctcctcgccctccactccgccccgccctcgctctctcacccctcccccgctcccgcctcgcttccccgacaatctcctcgcgctcccggcccggcacgcgcgctgcgcccggccgccgctgccgccgccgccgccgccgccgctgccgccgagcgttcctccgctgcgcctggcttccagcttcgggccggaaccggaagtttggggggcggagcccggcggaggccaggagaccgaaaacgcggccgagcccggagcccggagctggagccagagcctggaccagaacttggccgccgcctgcaccgccgccgccgctgccgcccgccgccccttccccgcgccgcagccgcctcgccgccaccgccgcgagctcggccgccagtggtcctcggactttaggtgtctgggttgaaggtcggtccggacatcggacccagtcagttcccagactgtccgggcggcagcggacgccgctgccgccgccgcctcttcgtcgcctcagcctggcgttttgttccgagagacgggagaggcgagcggagctgacagtgattttgacagtgatttaaacccgcttttgttgttgttggcttttcgttgtttggttttgtgtgttgtgcgtgtgtgtggcggtttttcccccgtggtgcattttatt

SEQ ID NO: 280255 - DNA, 215 bp, Homo sapiens; identical to SEQ ID NO: 198460
  chr2:148602728-148602943
  hyper

SEQ ID NO: 280256 - DNA, 266 bp, Homo sapiens; identical to SEQ ID NO: 228726
  chr2:149267061-149267327
  hyper

SEQ ID NO: 280257 - DNA, 142 bp, Homo sapiens; identical to SEQ ID NO: 228727
  chr2:149402958-149403100
  hyper

SEQ ID NO: 280258 - DNA, 57 bp, Homo sapiens; identical to SEQ ID NO: 198461
  chr2:149632585-149632642
  hyper

SEQ ID NO: 280259 - DNA, 547 bp, Homo sapiens
  chr2:149634146-149634693
  hyper
cccctccctctctatctcccttccccaccttttctcccccaccccctccccctacttagctccctctctgcagctggggctgctggtagggggagggaacaccaatggattgtagttcttaaaggaatctgtcagatgaaacaaaccagctcggtcccccgccccttccccgcccgctgtccgtagcgtgtgtggctgatggtgccccctttgtatgcgagccgcgtggggagggaccgagttaatgggagcctcccggtccccgctgacacgttcctggcagcctgctccaggctgctgatgcagccttcccgtccccagcattgattaagtgatgtcatcctgatcactgagcatgctccgactaaccccctcctccccttcctccagtggctggtgtatttaggtcaagtgattgacaggtgacagtttaccgagggtattgcaggagtccgcctggcctttctcaagcgccagaggccgacgttttccagcccgggcggtccccagcatctttgccaaggttgtctgccgcagtcgcagcgaa

SEQ ID NO: 280260 - DNA, 112 bp, Homo sapiens; identical to SEQ ID NO: 198463
  chr2:149645384-149645496
  hyper

SEQ ID NO: 280261 - DNA, 85 bp, Homo sapiens; identical to SEQ ID NO: 198464
  chr2:149645987-149646072
  hyper

SEQ ID NO: 280262 - DNA, 173 bp, Homo sapiens; identical to SEQ ID NO: 198465
  chr2:149894865-149895038
  hyper

SEQ ID NO: 280263 - DNA, 36 bp, Homo sapiens; identical to SEQ ID NO: 198466
  chr2:150061862-150061898
  hyper

SEQ ID NO: 280264 - DNA, 56 bp, Homo sapiens; identical to SEQ ID NO: 198467
  chr2:150061932-150061988
  hyper

SEQ ID NO: 280265 - DNA, 734 bp, Homo sapiens
  chr2:150186117-150186851
  hyper
tggggaggctggttccgagtttccgggcatatccgtggagtccttccagaccttcctggggaccttccccggtcaccccggctccccgccggccccccgcgctgctcaggggagagtaggactatgacccacttccactctaaggctctagatcgaaccgtccaggggggtcaaacacgatttacaacaaggaagagaaaaaccaatacgtcccaagagggctgcaggggctttaactggaggaagggttgggcagagggtggcagtattatgccctggacttttttgcaccaaacccataaccggattcccacttcctaagacctgccttcctggctcttcccaccgcctccatgctccgccccgcagcttaggtcttttactgcaaacgtcaagtggtctccgccttccctgggttcggagcttcacttgctcttgagctctgcggtccggcggatttcgcggggcccaggggatggcggggagtgagatttggccagggtcatttcacactgccgggcctgcagccacgcacgcagctgctggcccggctgaggctggcggctagggagaggcgccagggggtcgcgcacaggaaggtatcggtgcaccctgagcaaacactgctcgcttccaacgctcactgggaacaggcttcccgggaaggtcccaaatctctccagttccgctcaccctgcgggcgggagcgcggcgcccgggtgccccacctgcgc

SEQ ID NO: 280266 - DNA, 699 bp, Homo sapiens
  chr2:150186988-150187687
  hyper
cgcggccctcgaggccgggccggccgcggctgcgggcggcggccagtgcccggcgcgagtgggagtggcgcgcgcgcccctagccgccccccgcctctccccgctgcgctccctcgctccttccctgagctcccgggctccggcagcgggctggcggggcgccgcattgcacactctgggggcgccgcagtgttcgtgggatggggcagcgggctgcagctggcggccggaatccgcgcgcagcccgggtgagtagaggcgggcttcccgggagagcacaaaagaacaggggattggtgccagcggccccggcttaggcggggcctggccaaggcagggagtgcgctgagtccctggaactacccgatgctagggcagtcccctggggccagaggaactggggtcccggcctccggcgttttgcccctagtgggcagagagccccgcgagtagcctggacgggtccagaggggcgtgtgtactcgtgtgtgttgggctggcgcgtggagggtgggatggaaaggtcaggagctgccaagttcaaggctggaggaacctttcccaggagtaattcagcatcttctcacggcccaacatgcgtccaccaggaactccagccggagggagttcctgggcggcggactggcagcaccccacatgttgctgcggggcggggggcagtggcggtagcccggctgc

SEQ ID NO: 280267 - DNA, 942 bp, Homo sapiens
  chr2:151341765-151342707
  hyper
agaggcgctcgctcgtgcgagacttctcgcttgcctttgtgctgggactgcctctggcgaccctgtcagtctggttccttcctcttgctctctgaacccccgcgtccctcgggggctccagcggttcaagcccagcggttctgtgggaagctcacagaaacacctccacgaggccactccccgctgggcgcggctccacctcggggcctccccgcctaacagcaaacctgcttgttggcacttgcgcgttcctcctcgccagtttcacccggatttggctcggtccgccagcaacccagctccttgctaaattcccagccctaagcgcaggggcctttacccagccttcccagtgggtcctgcttttccatagccgacacccttcttggaaacaaactcgctagacaccgctggttagggcggcgggtgcctatgtcccagcccaagacctcagatggtgcccccctgccactccccggcctttgacctggcctaaacccctaactcagccggggggccggatgccttcccaccgggagggtacctagccctccctaccaccgcgcgccaggtaggtgggtgggcgcatgggaaagcaataacccggccttgaacctcagacccatgaatataacccaccgcggcgccaataattcaagtagactggaaggtcaaaggcgaatagtgttgcccgcggccttggaggcaagccgagtgggggatgcaatagaggtcaggaggggctggtgtggtgaaggggaaacggacgtgatcactgggatggagtgggggaaaaagggaaaagctcggtacaggtgggcaccgaggcaccgcgggcggccggcagcgcgaagaggaggttcagctgctgcccggcccctgcgccaccagcgcattcctgggtgtaggcgtcacgggcgccgcggctgcctgcgctcagtt

SEQ ID NO: 280268 - DNA, 166 bp, Homo sapiens; identical to SEQ ID NO: 198470
  chr2:151342737-151342903
  hyper

SEQ ID NO: 280269 - DNA, 313 bp, Homo sapiens; identical to SEQ ID NO: 198471
  chr2:151343277-151343590
  hyper

SEQ ID NO: 280270 - DNA, 196 bp, Homo sapiens; identical to SEQ ID NO: 198472
  chr2:151343637-151343833
  hyper

SEQ ID NO: 280271 - DNA, 304 bp, Homo sapiens; identical to SEQ ID NO: 228736
  chr2:151344062-151344366
  hyper

SEQ ID NO: 280272 - DNA, 215 bp, Homo sapiens
  chr2:152118445-152118660
  hyper
gtgctgttgccagcgcctgcccagacgccctccgtagttttgcaacttgtggaagcactctggagagaggccgagaggattcctcgacaggaaatttgggaattctctgggtgatgcatcagtgattgcaattttgtttttacccgttttgctaagcagcagcaacaacggcagagttgatttaaaaaaagaaaaaacgcaaaaagggaaaacac

SEQ ID NO: 280273 - DNA, 109 bp, Homo sapiens; identical to SEQ ID NO: 228738
  chr2:152685152-152685261
  hyper

SEQ ID NO: 280274 - DNA, 151 bp, Homo sapiens
  chr2:152954361-152954512
  hyper
tgaccggagcttgacgatctctcccaagatccagacagataagagtattcaaattaggacaaaacagaagaaaccactaaatctcaactcgaatcaaaccaggtccccggccccgaggggtctggttactctaggtcgagttatacgaatt

SEQ ID NO: 280275 - DNA, 249 bp, Homo sapiens
  chr2:152955492-152955741
  hyper
ggtcccgttcttggcgtaggaggaggaggacatcgttcagagccgccgcatggccagcccgtgtgcggtgggcggagggggctggcccccgaggctgggctgcggacggagggggagggcgcaggacttccccacccggctccaggacccgcgccggcgcccaggctccctgcccgcacttcggagagcgcggcaccttaaagggaccgaggcgcttcccccgcgctcgcggcggggtcccggggaggg

SEQ ID NO: 280276 - DNA, 100 bp, Homo sapiens; identical to SEQ ID NO: 198475
  chr2:152956050-152956150
  hyper

SEQ ID NO: 280277 - DNA, 52 bp, Homo sapiens; identical to SEQ ID NO: 228741
  chr2:153032646-153032698
  hyper

SEQ ID NO: 280278 - DNA, 327 bp, Homo sapiens; identical to SEQ ID NO: 228742
  chr2:153191510-153191837
  hyper

SEQ ID NO: 280279 - DNA, 598 bp, Homo sapiens
  chr2:153192137-153192735
  hyper
ggattcgcagcagaccgatttcagggcgcacaacgtgcctttgaagctgccgatgccagagccaggtgaactggaggagcgatttgccatcgtgctggtaagtgcgcggcggcggtcgggcgcggggacccggggccccgggccgggcggcgcagctgacccccgcccctccccttcaccccgtgccgggagcgagcctccattcccgagggggaggctcccgctttcccctttgtggccccccagcactcctcttcacccccctggcagtcccccgcgctcagtctctcggggtcccgggatggggatgggggctcagggccggctgcccaaccagcctcgaacccattgtctggctggagaggcacctcacggcgcgtgtgcccgggaggtgcggcgtgggcgtgaagagaaggtggcgcgggctgggaggaggaggtggcgagccgcttaggctttttttttaaaaaaaacaaaacaaaacaaaacaaaacaaaacaccctgagcccctgcggaccatccctcgggcggccagcccgggacctgcgaagtccccggcagatggggcgcatgtggccggccgcgggcgccgcgccg

SEQ ID NO: 280280 - DNA, 94 bp, Homo sapiens
  chr2:153192765-153192859
  hyper
cacgtcgcggcttggccaaggggagcttccccgaaagggaaagcggagacccacagcagtgcggcgccccggcccttggcgaggagcaggggca

SEQ ID NO: 280281 - DNA, 392 bp, Homo sapiens; identical to SEQ ID NO: 228745
  chr2:153573952-153574344
  hyper

SEQ ID NO: 280282 - DNA, 130 bp, Homo sapiens
  chr2:154335663-154335793
  hyper
ctgcccccctgacctctgggcgaatggaaagtggcgatgaatcgcaggtgccagatggtgccggctgaggcacccgcccactgcctgtgcttgactccgactcgcctgcgttggatttctagtggagtgg

SEQ ID NO: 280283 - DNA, 49 bp, Homo sapiens; identical to SEQ ID NO: 198479
  chr2:154729267-154729316
  hyper

SEQ ID NO: 280284 - DNA, 142 bp, Homo sapiens; identical to SEQ ID NO: 198480
  chr2:154729379-154729521
  hyper

SEQ ID NO: 280285 - DNA, 111 bp, Homo sapiens; identical to SEQ ID NO: 198481
  chr2:154730061-154730172
  hyper

SEQ ID NO: 280286 - DNA, 80 bp, Homo sapiens; identical to SEQ ID NO: 198482
  chr2:155553936-155554016
  hyper

SEQ ID NO: 280287 - DNA, 612 bp, Homo sapiens; identical to SEQ ID NO: 198483
  chr2:155554076-155554688
  hyper

SEQ ID NO: 280288 - DNA, 349 bp, Homo sapiens; identical to SEQ ID NO: 198484
  chr2:155554689-155555038
  hyper

SEQ ID NO: 280289 - DNA, 31 bp, Homo sapiens; identical to SEQ ID NO: 198485
  chr2:157188949-157188980
  hyper

SEQ ID NO: 280290 - DNA, 405 bp, Homo sapiens
  chr2:157189365-157189770
  hyper
cgtcacgagcagggccgattttaaggtgggaaccgctctgcgttcaccttggtagccagcttgggtggtttttggtgttttttttcttttctttttttttttccgaaagaggtgtgacctctcccaggtctgcgcagcccgcagcgtcgcgacacttcactttccccgaagcccctgcgcccgcgcagcggctcggccgctcacatgtggggagggtgcaacaaaagcaccggcggaaggcaaggccggcgtggccaggtagtacgcacctggagccgcacggaatgggatgtgccttgcagcgccctaacctctcccacccaccttcgtcacccccttagcggaagagcgtacagatgtcccatgacacgagacgctcagagggctcacgcagttcgggtggga

SEQ ID NO: 280291 - DNA, 232 bp, Homo sapiens; identical to SEQ ID NO: 228755
  chr2:157190094-157190326
  hyper

SEQ ID NO: 280292 - DNA, 63 bp, Homo sapiens; identical to SEQ ID NO: 228756
  chr2:157198322-157198385
  hyper

SEQ ID NO: 280293 - DNA, 459 bp, Homo sapiens; identical to SEQ ID NO: 221907
  chr2:157292163-157292622
  hyper

SEQ ID NO: 280294 - DNA, 425 bp, Homo sapiens
  chr2:158484494-158484919
  hyper
taaagatcgtacctcgaaagcaatgtgcgttgcaaaccacacagatttaagctcccactctcgcctccatagcttggcatctgcggcttttggggtattccccgcctcctaaaactcagactaaatcaccacctcccaccaccaccatgccaccatccttgagcagctctcaggggcttagcacagagcgcgtccgacgcatacctgcagccctccaggtccctgcagggtgaacccagctcccagccatgcgcgcacccacaaacgctctcctattttctccgctgcaaactgcccacaaattagtcacccacctcacccctactacttattcccccacgtccctgctgccttttccctcttccgggcggcttcgtccccaacacacctgtctacccctacggctgccagacgtcaggtgccca

SEQ ID NO: 280295 - DNA, 349 bp, Homo sapiens; identical to SEQ ID NO: 38109
  chr2:158484949-158485298
  hyper

SEQ ID NO: 280296 - DNA, 378 bp, Homo sapiens; identical to SEQ ID NO: 228758
  chr2:158485512-158485890
  hyper

SEQ ID NO: 280297 - DNA, 1840 bp, Homo sapiens; identical to SEQ ID NO: 198490
  chr2:159313054-159314894
  hyper

SEQ ID NO: 280298 - DNA, 686 bp, Homo sapiens; identical to SEQ ID NO: 198491
  chr2:159825050-159825736
  hyper

SEQ ID NO: 280299 - DNA, 655 bp, Homo sapiens
  chr2:159825962-159826617
  hyper
tttaggggtggggcgctgagaagagcggtaattgtcaagattgtgagcccccttgttcttggatgcagagtggtcattttcgggggacgatatcagggcactggcttcctggaggactttggggtgcgggcgcgcagcgctgtgggtgtgcggggctcccggctttggcgcggcggctttccggaacgcctggctgggaaggaagctctaggcattgtgtggtgtgtttgcagacagaaaggtccctggaccggtgttctcaaaacttactggacttattgtgtaaagctccgggaggaaatgtggcgttggccaggtagaaacgcggcgctgcggccaaggggcggaggacgccaggctcggcaacggccttctcccagccccctcctgccagctccagatccgcgtgcctccagtgttgggaccgttctcagtggcgttgttccctgctggagttaacttgggaggtgaggagggaactttcatcttgaacttgaccccagaagcagcgtcgtccgtacaggttacaaggtaaatggaagctgagtcttaacgtgggttggaccgcaaactctggctggcgcggaaaggaagttcctggttcagaatctttgaggaaagggctcaagattgctgagatcgctcgctctggaaa

SEQ ID NO: 280300 - DNA, 506 bp, Homo sapiens; identical to SEQ ID NO: 198493
  chr2:160142449-160142955
  hyper

SEQ ID NO: 280301 - DNA, 323 bp, Homo sapiens
  chr2:160472081-160472404
  hyper
tggcagacgcagctcgtcagtccgacagggaagagggggcggaggcaaaaaagggcagcaggaggcggacgggggtggggggtgatccagaaactaccccggcagggagtgggggagcagcggatattccggggtaggaacggccatcgcaacgctgacagaggttgttttttaagaagcaaaactgttggcggcgacctgagcgctggaagccgaaggggaagaggaaggagacgcgaagccagggcggccggcacaaaggcggcggactcgcggcggcagcgcctgcccggccgggagcacaacccacggccctactccag

SEQ ID NO: 280302 - DNA, 363 bp, Homo sapiens; identical to SEQ ID NO: 106813
  chr2:160472575-160472938
  hyper

SEQ ID NO: 280303 - DNA, 138 bp, Homo sapiens; identical to SEQ ID NO: 198494
  chr2:160569034-160569172
  hyper

SEQ ID NO: 280304 - DNA, 678 bp, Homo sapiens
  chr2:160654215-160654893
  hyper
cagcaaccccactccggccgcgcaccagcaggggaaatcgccaccaacgtccccgcttctcatttcagcccgaaattgccctgaaacggcgcccgtcgtgcgactccaagtccctcagttctccggccaactggcctaatttgggggttccctccccgcggagtggggtctgcggtgaggatgtggactccgaggaagacagagccctcccttattctcggccacctcccctccccgagggcaggcgggtgagaggtgacccggagccaggacccacgggggacgggcgtgcagggaagggcgggatggccggccgggtgttgcgtctgcgggccgccctcgggtgcgcggggacgaagagcgtgcgttgggaagggggcgaaggcggtcgcgcacggtcccggcgagggactacgtaagggcttacccgcgacggcagcagcggcgaggcccagcaacggcagcaggagcgcgggcagcgcggcccggagcatgacggcgggtgcgggtgggcggcagcggctgcgcggccggagaggagcggggcggggcgggagcgggggcggtgcttctcgcgtgcgagtttaatcccccccccgggcggaacgtgaacggcactgggggctcccaccaggagaacccgggtgtcccgtcccgcaggagcggctggcgcgcggc

SEQ ID NO: 280305 - DNA, 340 bp, Homo sapiens; identical to SEQ ID NO: 198496
  chr2:160919062-160919402
  hyper

SEQ ID NO: 280306 - DNA, 657 bp, Homo sapiens
  chr2:161126281-161126938
  hyper
agtctctcagagtcgcataaaacaaccgaattctttaattcaaagccacgttttcaattctgagcagcccagagacctgccatcgctttctcgcgccgagtcacgtggtctggcaaggcgcgcggtttcctccctagccgcccccagctgccctgaaccttcaaagtcacatttcagtcactccccagtctgaccaacaacgctcacaatgagggcgctgccagcacaggcgacggcctgcgctccagtcttacgaggaaccccaaattcaagacccctgtgacccaggcctgtgtgccccgacaggctaaacctccgcccaggggcttcccgatgtcggctgcagcgggtctgggttttcggcctgcagagctcgcgtctgacggctgaggaacaaaacaccctccctctagcggctcaagcgcacacaccctcttgccttccgcagccaccgagcgagtcacgggagacactctggagccattttgcggggctggaattccttcgcccggcggagctcggcgcgcacccgtcagctgtgccgaggaccctgcgcccggggggccccgcggccacgtgacccccatctggctctcggcctggactgagggggctgagctcatcgcgttgctattcgaggggcagagactgcctggc

SEQ ID NO: 280307 - DNA, 126 bp, Homo sapiens
  chr2:161263704-161263830
  hyper
cccccggcccggcgcgcttctgccctcgccggctctccgctcctgcccctgccccttcctccacttcccaccctgcccggcccgggcggcggcggcgagggcatctcccctgctcaggtcgccggc

SEQ ID NO: 280308 - DNA, 270 bp, Homo sapiens; identical to SEQ ID NO: 198497
  chr2:161263896-161264166
  hyper

SEQ ID NO: 280309 - DNA, 203 bp, Homo sapiens; identical to SEQ ID NO: 198498
  chr2:161264419-161264622
  hyper

SEQ ID NO: 280310 - DNA, 42 bp, Homo sapiens; identical to SEQ ID NO: 228767
  chr2:161349352-161349394
  hyper

SEQ ID NO: 280311 - DNA, 227 bp, Homo sapiens; identical to SEQ ID NO: 228768
  chr2:161349623-161349850
  hyper

SEQ ID NO: 280312 - DNA, 211 bp, Homo sapiens; identical to SEQ ID NO: 228769
  chr2:161350274-161350485
  hyper

SEQ ID NO: 280313 - DNA, 97 bp, Homo sapiens; identical to SEQ ID NO: 198499
  chr2:161560616-161560713
  hyper

SEQ ID NO: 280314 - DNA, 111 bp, Homo sapiens
  chr2:162094180-162094291
  hyper
gaggtgaatgtcctcgggagggcccccccggtgcagctttccccggaggctgaggctgctgccagcggggacatctgctttcttacactccagcctggctcaccccgcccc

SEQ ID NO: 280315 - DNA, 258 bp, Homo sapiens
  chr2:162094357-162094615
  hyper
ggggtggatagaagcttagaagattttcttcccactccccccacgtcccctcctttcgtcacatcttttaaccttcaaggtaaagacttaaggaaacaataagcgtgtccgctggctcgcaggcccgccggggttctcgggcgcggggccttgcccctctccatcctccctgagtccttccccgagtcgggccgtgcttcggcggttcggctgggcgcaggggccggccgggcgcgcccagcctgtggcgcctcctct

SEQ ID NO: 280316 - DNA, 126 bp, Homo sapiens; identical to SEQ ID NO: 228772
  chr2:162164662-162164788
  hyper

SEQ ID NO: 280317 - DNA, 63 bp, Homo sapiens; identical to SEQ ID NO: 228773
  chr2:162165218-162165281
  hyper

SEQ ID NO: 280318 - DNA, 623 bp, Homo sapiens
  chr2:162271679-162272302
  hyper
tacacacacacacacgttttcagtagcgattactgtgttgacaccacttccactctgtctccccagatcagcgcttctgacgagcccatttgcacggggactcggccctctcttttcctggcgaggcttttgaacctgtcgccaagccagtacctcagagagaaggaaatgcagagggacgagaaggatgcatggcgcctgcccccagttagatgttcttcagataatctgcaaccaagtgcgctgataaaatatttaataaagagccggtaaacatcactgcaaatacattaaggcatttcagcccgacagcttatgattatttcaaaacttaaaaaggagatcatagattgtcactgtttctgtactcaaccaagaaaccgaaccttcctgaggtgggtggattggtgggtgagttgctgcttttcgccccctctcctccccccttctgcttgtcgctgtggctctcagcagcagggatttatttatttatgtttgcagtttaaaaggtgggggtgggggcgccgaggacatgtaggatctgctcacaaagcaccagctcaggtgttgtgtgcttttgtattagctggaaaagacagactctggaacttttacagggcgag

SEQ ID NO: 280319 - DNA, 112 bp, Homo sapiens
  chr2:162272334-162272446
  hyper
gcacttgaaatcgttacattcaactgaatatttggctcattcagatccgaaaagtctcctagcatcgtcgaattccctcctccgcccctccgctctaaaggggggaaggggg

SEQ ID NO: 280320 - DNA, 39 bp, Homo sapiens; identical to SEQ ID NO: 228780
  chr2:162281107-162281146
  hyper

SEQ ID NO: 280321 - DNA, 43 bp, Homo sapiens; identical to SEQ ID NO: 228781
  chr2:162283133-162283176
  hyper

SEQ ID NO: 280322 - DNA, 60 bp, Homo sapiens; identical to SEQ ID NO: 198500
  chr2:162284265-162284325
  hyper

SEQ ID NO: 280323 - DNA, 114 bp, Homo sapiens; identical to SEQ ID NO: 198501
  chr2:162930082-162930196
  hyper

SEQ ID NO: 280324 - DNA, 262 bp, Homo sapiens; identical to SEQ ID NO: 198502
  chr2:162930659-162930921
  hyper

SEQ ID NO: 280325 - DNA, 34 bp, Homo sapiens; identical to SEQ ID NO: 228787
  chr2:163174877-163174911
  hyper

SEQ ID NO: 280326 - DNA, 89 bp, Homo sapiens
  chr2:163694782-163694871
  hyper
taatatcagaagaacactcccgctgccattcgaacctcctggctcggtttcacagcctcttaagttgacagagcctggagttgccggtc

SEQ ID NO: 280327 - DNA, 93 bp, Homo sapiens
  chr2:163695560-163695653
  hyper
cctctccccctaacacacacacacacacacacacacacacacacacacacacacacacacacacacacgctctctttatcttggtagcttggg

SEQ ID NO: 280328 - DNA, 152 bp, Homo sapiens; identical to SEQ ID NO: 228789
  chr2:163695927-163696079
  hyper

SEQ ID NO: 280329 - DNA, 76 bp, Homo sapiens
  chr2:164592553-164592629
  hyper
gcgcaggcgcagagcgccgcagagccaaattcaaatcactttcacactaagagccaaagatcagttttcaaaggag

SEQ ID NO: 280330 - DNA, 101 bp, Homo sapiens; identical to SEQ ID NO: 198503
  chr2:164593412-164593513
  hyper

SEQ ID NO: 280331 - DNA, 129 bp, Homo sapiens
  chr2:165477434-165477563
  hyper
gctatttataaggcgctgtgagatcgcaatgtcctgctgatccggtaggagccagctcaaaggggattgtcttcagagacttttacaaacttggcccagctctgggcacatggctcaccccctaggacc

SEQ ID NO: 280332 - DNA, 574 bp, Homo sapiens
  chr2:165477596-165478170
  hyper
gacactcccccgcgccctccagggttgcctacctgtctgcagcacagccgcgggtcccgtccggaaggggcaggagcgctcgcgcgtgcagccagggggccggcgccaggtcgtgggcgtcgcccctcccctgggcagcgccacacacctgggcggccagcggcgaatcccgggcagccgccctgctcgcggcgctctgcccatcttgcagggaagtggtcattgtcgccggccggggggctcgggcgtcatgggagactcggcgcgtggggagaaggggtttgcgcggcgggaggcgaggtgccggctaggcagcccgagcgctctgcaggtgtggtggcctcgccgcctgcgctcggggccccggcggctgagacgcgcggccgagctatctgcgaggcggcgggggaggggagggggcggaggaggagggtggggagaggggaggagcggccggtgggtgggggccgcgggcggcgaggcaaggcgcggagggggcggggagggcgcgagagcggctggccggccccgcgcgtggcccggggcgctcggggccactggcattgctcccgcg

SEQ ID NO: 280333 - DNA, 1524 bp, Homo sapiens
  chr2:165697145-165698669
  hyper
agaggcgcgcaccccgctcgctcccggaactgtcatgcgggctgacagctggcacaccctcctgtcgccctccacccgcctgcagaaagcccactccctacagtcaccttgacattgctcacctgcctgggcctcagcccatgaccaaggaaacttttgccctccctccccaggagctcacttacaggtatcgtccaccgctcccccagagcccaaacaagggtccctttgttacaatttttgctcccggactcctcacccaattcctggcattcagctggcctgtagcaacccagggcagccccggtaggaaggcaaccaaaaacgacccgagccctccgcccgggcggcctccgagaaggccgggaggaagcagcctccccggccgcgtggaggacagtcagtgagtcaggccgccggcagggcagcgagttgccagccaggtgaaacggccgaggcctcgctgtcctcgccggcctcgccctccccggtgagaggcggcgcggcgctctgggcttacctggctggggcgtcctgcgggcgcggggttcggccgtccatcgccctgcggggcgctgcgcgggctccagctcccaggcggcgcgtcactgctggggtgggagaggccggcgggtcagggcgggacgcgcgccttcccgaggccggagcgaagctggctgagcgtcaagagcccgcccgagccgctccagccccggccggcccgcctcccgggtgcgcttccacctgcgggccccggctcccagcccgcgggcgccgccgccgtctctacaaggtctagcgggcgcccagagcacggcggaggaggcggtggcgctgcagcccccgccccgtggggtttactgggtagccatttggcgcctctcggagggagaggagccgccggggctggaaaaggaggaggagcggggccgggcgcacgggcaccgctgccacgccggcagcgcactcccaggctcctccggccgagtttgcacaaacaaaacgccctaggaaaacttttcccgaagagaagttgggagggctgatctctcttttcccacccaaggctcctacgttcttttccaaaggagacagtagctcgcctgttctccctcgcggcttcctctcctactcttcccttccccggcccgcgctcttgccgctcggctctcaagccaggacttgaatggagaagcggcaacccctgcgaggctcagcccagcgcgggcagggccgactcagcacctcccctgtcccgcgggcggggtgcgggcgctggctgggcgctgggggcctcgctggagcccgctctctcactcaccctgccccatttccctgcccggagtccgggagctcgccgccgcctctgcagcacggccgcacataagtggggaccagctcggcggcattggagcgagggaagcagcgagccggagagaggaacggggcgggggtgggccgggagcaagttggaatttccttcccccagggcttcgggtctttggggtccggctggggaagctg

SEQ ID NO: 280334 - DNA, 246 bp, Homo sapiens; identical to SEQ ID NO: 198507
  chr2:165873393-165873639
  hyper

SEQ ID NO: 280335 - DNA, 134 bp, Homo sapiens; identical to SEQ ID NO: 198508
  chr2:166649934-166650068
  hyper

SEQ ID NO: 280336 - DNA, 37 bp, Homo sapiens; identical to SEQ ID NO: 198509
  chr2:166650106-166650143
  hyper

SEQ ID NO: 280337 - DNA, 737 bp, Homo sapiens; identical to SEQ ID NO: 198510
  chr2:166650508-166651245
  hyper

SEQ ID NO: 280338 - DNA, 197 bp, Homo sapiens; identical to SEQ ID NO: 198511
  chr2:166810403-166810600
  hyper

SEQ ID NO: 280339 - DNA, 115 bp, Homo sapiens
  chr2:167232258-167232373
  hyper
tccaggagagggcgcgggcctctccttccccggcgctctctcagggctgcttctttttctctgggctcctgttgctcaggggacgcctgccgctagcagccactggcacccaggc

SEQ ID NO: 280340 - DNA, 257 bp, Homo sapiens
  chr2:167232453-167232710
  hyper
tgcgcccctcctgccagggcgcgcccgtggaggtagcagccccgcctccccgagggcagctgcgccgctttgcctcctccactcctcccagcgcgcccgggtccccaccccttgctccctccctccctccctctctccactcctgcgggcggcgcagggcggggacccagctaggggcgcggtggtggcgacgctgtagcctctgcaccatgcgctaatagaaggcggaggagggggttgcacgacctgccatccac

SEQ ID NO: 280341 - DNA, 33 bp, Homo sapiens
  chr2:167232955-167232988
  hyper
gagccagacaacaccgccaggccagcgcctccc

SEQ ID NO: 280342 - DNA, 114 bp, Homo sapiens
  chr2:168148857-168148971
  hyper
ggggaggtgaggggcgtttatttggagggaagacggggaaggtccactctgcctacaactccgacatttctccgtgtgcctctttgctagctggggacacttcgtggctgatta

SEQ ID NO: 280343 - DNA, 239 bp, Homo sapiens; identical to SEQ ID NO: 198512
  chr2:168149264-168149503
  hyper

SEQ ID NO: 280344 - DNA, 220 bp, Homo sapiens; identical to SEQ ID NO: 198513
  chr2:168149556-168149776
  hyper

SEQ ID NO: 280345 - DNA, 104 bp, Homo sapiens; identical to SEQ ID NO: 198514
  chr2:168150962-168151066
  hyper

SEQ ID NO: 280346 - DNA, 197 bp, Homo sapiens; identical to SEQ ID NO: 106874
  chr2:169104341-169104538
  hyper

SEQ ID NO: 280347 - DNA, 409 bp, Homo sapiens; identical to SEQ ID NO: 198515
  chr2:169312409-169312818
  hyper

SEQ ID NO: 280348 - DNA, 918 bp, Homo sapiens
  chr2:169312881-169313799
  hyper
gcgcatccccgggcgccctgcgcggtggagagcttggcgggctgcgggtgccgcaggacaggagtggacaaagcaagatggcagggatcttagcctggttctggaacgagaggttttggctcccgcacaatgtcacctgggcggacctgaagaacacggaggaggccaccttcccgcaggctgaggacctctatctcgcttttcccctggccttctgtatcttcatggtgcggctcatcttcgagaggtaagaagggctgaagcccctcctcccctccccctgcgcacacacacgcgcgcacacactcgcgcgctctctggcgcacgcccccgcgcccccaacgctcgcgttcacgcctcccaacctttgtgttcggggaggggttgctgacccccctgccccgctggctttctgggagccagaaagggtctggcttgccacggatttcctcccgggcgccggggaggagccgcggagcgttagggtcgccccctgccctcctcctgggccctgctctcctcccggcaagggcaggcgaacaaaggtgagcggtggtcgggctcaggacccgccgcattccgcggggctcgcccctctccgccggcgcgccacgcaaggctgccaggcagggcttcccgccggggcccgcgccacccacctgacagccaggaacgttccggacgcgcggcccggagggaggaggaaccgcgcacacttcaatctttatgctccggcacacggattgtaggggttgtgcttcaaaagaattcgccagggacttcctggcttctggtcgctgtttggtttttatccgtgaaactatcaggcccacagtcctggcaaataggggataatagcatttcaggttatcagcggtttctttaaaagaggatgtgacaggacgggtccacatcctg

SEQ ID NO: 280349 - DNA, 40 bp, Homo sapiens
  chr2:170218319-170218359
  hyper
tctgggggtcaccgcgggaccaagtttcgccggtggtggg

SEQ ID NO: 280350 - DNA, 268 bp, Homo sapiens; identical to SEQ ID NO: 198518
  chr2:170218861-170219129
  hyper

SEQ ID NO: 280351 - DNA, 204 bp, Homo sapiens; identical to SEQ ID NO: 198519
  chr2:170430256-170430460
  hyper

SEQ ID NO: 280352 - DNA, 87 bp, Homo sapiens; identical to SEQ ID NO: 228809
  chr2:170655249-170655336
  hyper

SEQ ID NO: 280353 - DNA, 85 bp, Homo sapiens; identical to SEQ ID NO: 228810
  chr2:170655875-170655960
  hyper

SEQ ID NO: 280354 - DNA, 364 bp, Homo sapiens
  chr2:171567967-171568331
  hyper
ctgcgattcagtgccgcattagcaccggggaaattctgtccccaccctcccagaacctttagtatagcaacgatttaactaggcagatatgggcaactgcaaaattgagtctccttggcaaggagtggggagatccagccgattaagcaacatcttactgtgaaaggccaaagcattaagaatttgctgaaatgatctaaataatatctagatttttaaaaaatctagcttgagaggggtgactctctggttggatttatgccagaggcatgcgtcccttctagctgcaagaaaatgcccgaggcgaggtaccaagcttgggctggaagtagcaacccctgacttaatcccagagcgcgcagag

SEQ ID NO: 280355 - DNA, 294 bp, Homo sapiens; identical to SEQ ID NO: 198521
  chr2:171568711-171569005
  hyper

SEQ ID NO: 280356 - DNA, 116 bp, Homo sapiens; identical to SEQ ID NO: 198522
  chr2:171569931-171570047
  hyper

SEQ ID NO: 280357 - DNA, 243 bp, Homo sapiens; identical to SEQ ID NO: 198523
  chr2:171570957-171571200
  hyper

SEQ ID NO: 280358 - DNA, 161 bp, Homo sapiens; identical to SEQ ID NO: 198524
  chr2:171571315-171571476
  hyper

SEQ ID NO: 280359 - DNA, 326 bp, Homo sapiens; identical to SEQ ID NO: 198525
  chr2:171571520-171571846
  hyper

SEQ ID NO: 280360 - DNA, 279 bp, Homo sapiens; identical to SEQ ID NO: 198526
  chr2:171572068-171572347
  hyper

SEQ ID NO: 280361 - DNA, 49 bp, Homo sapiens; identical to SEQ ID NO: 198527
  chr2:171627264-171627313
  hyper

SEQ ID NO: 280362 - DNA, 632 bp, Homo sapiens; identical to SEQ ID NO: 38182
  chr2:171627346-171627978
  hyper

SEQ ID NO: 280363 - DNA, 152 bp, Homo sapiens
  chr2:171670741-171670893
  hyper
cccaactaggcaaaacaaacagcagttactgtcaggagggaggagggctggggcgagtctggtgggttggcccatagctattggcggaagcaaacgaaacagaggcatggggaccagaaggacgggcgctgtccttcgtgctgaaagatcta

SEQ ID NO: 280364 - DNA, 193 bp, Homo sapiens
  chr2:171671978-171672171
  hyper
cccttatggaactctcggtaatttataatatttttgtgtgtgtttccattgtgttgtggtgaaaggcgataaggcattcaaagaaaacggacgggcctccgctgaaccagtgaggccccagacgtgcgcataaataacccctgcgtgctgcaccacctggggagagggggaggaccacggtaaataccagtaa

SEQ ID NO: 280365 - DNA, 779 bp, Homo sapiens
  chr2:171673094-171673873
  hyper
ttccctcctctcacccgacagcctgcctatttccaaaggaaaaaaaaaaagcgtgttgagtacgttctggattactcataagaccttttttttttccttccgggcgcaaaaccgtgagctggatttataatcgccctataaagctccagaggcggtcaggcacctgcagaggagccccgccgctccgccgactagctgcccccgcgagcaacggcctcgtgatttccccgccgatccggtccccgcctccccactctgcccccgcctaccccggagccgtgcagccgcctctccgaatctctctcttctcctggcgctcgcgtgcgagagggaactagcgagaacgaggaagcagctggaggtgacgccgggcagattacgcctgtcagggccgagccgagcggatcgctgggcgctgtgcagaggaaaggcgggagtgcccggctcgctgtcgcagagccgaggtgggtaagctagcgaccacctggacttcccagcgcccaaccgtggcttttcagccaggtcctctcctcccgcggcttctcaaccaaccccatcccagcgccggccacccaacctcccgaaatgagtgcttcctgcccgccctagtccctgctctccacgggtgcgctgcgcagggacccccccccccccgcctccctcgtcactcttcttatccctgccctccggattcacgccccggggaagcacggaggctgaggctctagttgaagtggggcaagagcgattttcccttgagcttccatgctgcgagcgcc

SEQ ID NO: 280366 - DNA, 152 bp, Homo sapiens; identical to SEQ ID NO: 198531
  chr2:171673939-171674091
  hyper

SEQ ID NO: 280367 - DNA, 369 bp, Homo sapiens; identical to SEQ ID NO: 198532
  chr2:171674329-171674698
  hyper

SEQ ID NO: 280368 - DNA, 250 bp, Homo sapiens; identical to SEQ ID NO: 228819
  chr2:171830079-171830329
  hyper

SEQ ID NO: 280369 - DNA, 32 bp, Homo sapiens; identical to SEQ ID NO: 228820
  chr2:172017402-172017434
  hyper

SEQ ID NO: 280370 - DNA, 75 bp, Homo sapiens; identical to SEQ ID NO: 198533
  chr2:172289937-172290012
  hyper

SEQ ID NO: 280371 - DNA, 158 bp, Homo sapiens; identical to SEQ ID NO: 228822
  chr2:172291205-172291363
  hyper

SEQ ID NO: 280372 - DNA, 35 bp, Homo sapiens; identical to SEQ ID NO: 198534
  chr2:172379091-172379126
  hyper

SEQ ID NO: 280373 - DNA, 193 bp, Homo sapiens
  chr2:172379339-172379532
  hyper
gtgctggaggatcgcggggcccggaggagtgcggtgaggagcgcgcgggaagccaagtcggctgggcgggagggaggctggctggctctggggcgggacagagctgcggttcaggaggatcgccgcgagcgcggggccgggggtgcgcggtggagacgcgctgctgggggcggcggagcggggccggccccac

SEQ ID NO: 280374 - DNA, 506 bp, Homo sapiens
  chr2:172379723-172380229
  hyper
ctgaacttgcttccaggctgcagatgaggaggggaaggcagcggggaaaagattgccggagcgagaatttgcccgtatttgtaacatcctcggccctgggtaaaggggctggccaaggggggcgagtgaagcatccgccctgggttcctctcctcctagagtgttaaactcagtcgagtccgggaagctgccaggacttccaagtgtgtttcgccgccctgcccagtcattggacggtcttgagcccgacttgtttatgtggcagaagagtggcgaaagttcccccgcggggcttcctattgggcactggcccagcactccgggtgggagatgcccggagagggcccgcggctgcctggcaccgagggatgcctctgctcgggatgcccccggcgcaagctgcgtccgtgtttggcccgcggcgagccagccccgggcctgcattctctgggctgaggctggcgcgggggaggggctcagcagtcgctggcaatgtttgttgtcat

SEQ ID NO: 280375 - DNA, 152 bp, Homo sapiens; identical to SEQ ID NO: 228825
  chr2:172543932-172544084
  hyper

SEQ ID NO: 280376 - DNA, 456 bp, Homo sapiens; identical to SEQ ID NO: 198536
  chr2:172750647-172751103
  hyper

SEQ ID NO: 280377 - DNA, 147 bp, Homo sapiens; identical to SEQ ID NO: 198537
  chr2:172947570-172947717
  hyper

SEQ ID NO: 280378 - DNA, 230 bp, Homo sapiens; identical to SEQ ID NO: 198538
  chr2:172950233-172950463
  hyper

SEQ ID NO: 280379 - DNA, 254 bp, Homo sapiens; identical to SEQ ID NO: 198539
  chr2:172950493-172950747
  hyper

SEQ ID NO: 280380 - DNA, 162 bp, Homo sapiens
  chr2:172950953-172951115
  hyper
ataaatcccagagcgtctcctggcactggctgggcctctgggcggctcggtgtgcagagcacacaatgccccgctggaaaacagaaacccacatgtgcacgtattagtctcggtaattatttattgcgtagcgctataaacaatgtatgcaattaagggtaa

SEQ ID NO: 280381 - DNA, 169 bp, Homo sapiens; identical to SEQ ID NO: 198540
  chr2:172951779-172951948
  hyper

SEQ ID NO: 280382 - DNA, 132 bp, Homo sapiens; identical to SEQ ID NO: 198541
  chr2:172955235-172955367
  hyper

SEQ ID NO: 280383 - DNA, 58 bp, Homo sapiens; identical to SEQ ID NO: 198542
  chr2:172955887-172955945
  hyper

SEQ ID NO: 280384 - DNA, 149 bp, Homo sapiens; identical to SEQ ID NO: 198543
  chr2:172958351-172958500
  hyper

SEQ ID NO: 280385 - DNA, 147 bp, Homo sapiens
  chr2:172959062-172959209
  hyper
aatccttttccccgcgtacctgctctccccagttgaatgcccgggaggccccgaggggctccccaccctaaaagcagcaactgagaaagtgactgaaccggataccccctcctgccacctcctcctttctttttctttcctgttccc

SEQ ID NO: 280386 - DNA, 254 bp, Homo sapiens
  chr2:172960505-172960759
  hyper
tcctgctagaggccgccagtccccgcaggacctagtgccctagcgccaaggctggaagtaacgcggcccccaggatagcgccccatcctacagcttctaggattcctggaccccaaagttgaattcgaagggaaaggacctatctgtatttttggaggaggagaggatctgtagcttaattctcaaaggagtctccgaccctaaacaggttaaagccactggtggtcgctgttccatggagggaaaggagcggg

SEQ ID NO: 280387 - DNA, 130 bp, Homo sapiens
  chr2:172962017-172962147
  hyper
tcagcccaccccggagctgggagctcccgccctcccgactcccaggcttggctcatgccaaggcctgttgcgtgattccaacttgggctgacattccctgccccgggctctccagcgtaggcctcttaat

SEQ ID NO: 280388 - DNA, 87 bp, Homo sapiens; identical to SEQ ID NO: 198544
  chr2:172964092-172964179
  hyper

SEQ ID NO: 280389 - DNA, 82 bp, Homo sapiens; identical to SEQ ID NO: 198545
  chr2:172964665-172964747
  hyper

SEQ ID NO: 280390 - DNA, 164 bp, Homo sapiens; identical to SEQ ID NO: 198546
  chr2:172967062-172967226
  hyper

SEQ ID NO: 280391 - DNA, 388 bp, Homo sapiens; identical to SEQ ID NO: 228841
  chr2:172967606-172967994
  hyper

SEQ ID NO: 280392 - DNA, 226 bp, Homo sapiens; identical to SEQ ID NO: 228842
  chr2:172968670-172968896
  hyper

SEQ ID NO: 280393 - DNA, 395 bp, Homo sapiens; identical to SEQ ID NO: 198548
  chr2:173037293-173037688
  hyper

SEQ ID NO: 280394 - DNA, 83 bp, Homo sapiens; identical to SEQ ID NO: 198549
  chr2:173099598-173099681
  hyper

SEQ ID NO: 280395 - DNA, 38 bp, Homo sapiens; identical to SEQ ID NO: 228848
  chr2:173292254-173292292
  hyper

SEQ ID NO: 280396 - DNA, 380 bp, Homo sapiens; identical to SEQ ID NO: 228849
  chr2:173292962-173293342
  hyper

SEQ ID NO: 280397 - DNA, 165 bp, Homo sapiens
  chr2:173600370-173600535
  hyper
ccggccaccggggtcgccacccccagtgtcccccagcagcgggaccgcggggtccccaccccggggcggaatccccacccacgggcgccgcagtgcagcggcgggcgggcgggcgactcggccctccccgcacccgcgtcccgccccccgggtcccctccctctc

SEQ ID NO: 280398 - DNA, 47 bp, Homo sapiens; identical to SEQ ID NO: 198550
  chr2:173601390-173601437
  hyper

SEQ ID NO: 280399 - DNA, 319 bp, Homo sapiens; identical to SEQ ID NO: 198551
  chr2:173940416-173940735
  hyper

SEQ ID NO: 280400 - DNA, 103 bp, Homo sapiens; identical to SEQ ID NO: 221936
  chr2:174147823-174147926
  hyper

SEQ ID NO: 280401 - DNA, 1062 bp, Homo sapiens; identical to SEQ ID NO: 106973
  chr2:174219326-174220388
  hyper

SEQ ID NO: 280402 - DNA, 217 bp, Homo sapiens; identical to SEQ ID NO: 198553
  chr2:174349951-174350168
  hyper

SEQ ID NO: 280403 - DNA, 42 bp, Homo sapiens; identical to SEQ ID NO: 198554
  chr2:175190729-175190771
  hyper

SEQ ID NO: 280404 - DNA, 71 bp, Homo sapiens; identical to SEQ ID NO: 198555
  chr2:175192823-175192894
  hyper

SEQ ID NO: 280405 - DNA, 650 bp, Homo sapiens; identical to SEQ ID NO: 198556
  chr2:175197265-175197915
  hyper

SEQ ID NO: 280406 - DNA, 454 bp, Homo sapiens; identical to SEQ ID NO: 198557
  chr2:175198064-175198518
  hyper

SEQ ID NO: 280407 - DNA, 350 bp, Homo sapiens
  chr2:175199018-175199368
  hyper
gtacagagaggcctatttcgctcctctcggaggagctgtcccttcgcgccccctccccagtataactgtgagagtgaaattgaatctagtggaataaggaattgggtagaagacacacgaaaatgataaaaatcacaagcaagaatgatagatacaagctgaagttgtgttctgtaggcaaaagcctggacacacaaagtgagggctcacatttccgtctccacttgggccctgctggtgcgggctgtgtctgggtgtctcctcccctcctgcctcctttcctacaagtggggagtcgagtaggactgtcagccctaacttgcaacatctcggggtggtttgtgtgtggg

SEQ ID NO: 280408 - DNA, 205 bp, Homo sapiens; identical to SEQ ID NO: 198560
  chr2:175199935-175200140
  hyper

SEQ ID NO: 280409 - DNA, 89 bp, Homo sapiens; identical to SEQ ID NO: 198561
  chr2:175203999-175204088
  hyper

SEQ ID NO: 280410 - DNA, 323 bp, Homo sapiens; identical to SEQ ID NO: 198562
  chr2:175206394-175206717
  hyper

SEQ ID NO: 280411 - DNA, 318 bp, Homo sapiens; identical to SEQ ID NO: 198563
  chr2:175260398-175260716
  hyper

SEQ ID NO: 280412 - DNA, 91 bp, Homo sapiens; identical to SEQ ID NO: 228862
  chr2:175351635-175351726
  hyper

SEQ ID NO: 280413 - DNA, 90 bp, Homo sapiens; identical to SEQ ID NO: 198564
  chr2:175546698-175546788
  hyper

SEQ ID NO: 280414 - DNA, 231 bp, Homo sapiens; identical to SEQ ID NO: 228865
  chr2:175870274-175870505
  hyper

SEQ ID NO: 280415 - DNA, 571 bp, Homo sapiens; identical to SEQ ID NO: 228866
  chr2:176937678-176938249
  hyper

SEQ ID NO: 280416 - DNA, 94 bp, Homo sapiens
  chr2:176943767-176943861
  hyper
cgaggagagaaggggacgagggacatagagagttctaacttagaaaagtgtctaaggaaatgctttaggataatattaatatatctagagattc

SEQ ID NO: 280417 - DNA, 170 bp, Homo sapiens
  chr2:176943902-176944072
  hyper
tgagctgaaaacgcctctccaaatactacagcgatctatcagtcttacccctaccccaactcccttcctttcccttccctggccgtggcaacctcttttgccatcactttttgcataaaatatgcaagatgcttccattccatcagcactgaaaccaaagaccaaaagag

SEQ ID NO: 280418 - DNA, 280 bp, Homo sapiens
  chr2:176950481-176950761
  hyper
cttagacccgttgggggcgcatcaggaatgtaaggggaagcgaggtgtgaagtatatttatatacatatatacacacatatagtcaatgccaaaagtttatcttctgttcccctcggcgccaacttatttcaacaacgcgagctttgcttagaaaatcaattccacatctttaaggtaataaacggaaagctcgataggcaggcggtgcctgggggaacggggaaccggcggggaacgcagagtgggcatccagcgcaccgggactgggacttgacccag

SEQ ID NO: 280419 - DNA, 189 bp, Homo sapiens; identical to SEQ ID NO: 228873
  chr2:176951108-176951297
  hyper

SEQ ID NO: 280420 - DNA, 49 bp, Homo sapiens
  chr2:176952675-176952724
  hyper
gcaggtaataaaaatctgtccgggctgcccgaggggaggggcgccggta

SEQ ID NO: 280421 - DNA, 48 bp, Homo sapiens
  chr2:176953310-176953358
  hyper
tcctcaccttcatccctttgccctgccggtaaggacaatgtggattcc

SEQ ID NO: 280422 - DNA, 146 bp, Homo sapiens
  chr2:176961517-176961663
  hyper
tcatatcttactggcgaccgtggacagctaacttcgattttgagggggagggacagagacagagaaacagagagagatatgatcgcgattcaatctttgcagaagaaataacccgtgcacaaggggccacaccatcccccacctta

SEQ ID NO: 280423 - DNA, 145 bp, Homo sapiens
  chr2:176961693-176961838
  hyper
ggtttttctcaaaagatgtgttttcatcagaaacgggcacatttttcctttctcctaatcgccaacttcccctccattttttgtgagtcccacactccggagcttcactccatttcccctgtctatttctcgggtttcccatcgt

SEQ ID NO: 280424 - DNA, 221 bp, Homo sapiens
  chr2:176965522-176965743
  hyper
cttttggacagaggccttgtttggggagggggatctggggctaaggctaaggcttttccttcggttccttctctgctggccccagaagccaccaagagatttacagaccaggccagttgggcctccttgctttcctcagtccctgagaagcccgtgagaaacgtgcggaagtaccagtgcaactctggctggccttaaggcttccacgttgggggactgag

SEQ ID NO: 280425 - DNA, 185 bp, Homo sapiens
  chr2:176968750-176968935
  hyper
tggaagagaaatctggaaccgttgtaaatattcatgtggggggatgccccttcacccttcacccgcctctcccagctgcattcccccctcagtgatagtgggggagggcaaggcgactgccccactgtccttagacaaaggtgatctccccatatttttgttctccagtcgcttgacttaagaag

SEQ ID NO: 280426 - DNA, 171 bp, Homo sapiens
  chr2:176969908-176970079
  hyper
tgggcctgggatggagatggggaggcagataagtgtgctgggggtctgggttgaggagaagaatgtcagctggaatctgggcgggggtgccagctgcggggagggagcacacaagatgggcagttctagttgggggaggctcgatgccctccagtcgccacagacctattt

SEQ ID NO: 280427 - DNA, 192 bp, Homo sapiens
  chr2:176971436-176971628
  hyper
aacaagctcccaggcgggtgagctgcagagggtggcagagtcgcgggggagggagcggctgcagtaaggggggtggggttcggaacctcacaccctcacacctagttcctagcttctagggagcctggagccggggcttccccccctctgctcgctgcttctctcccttcccccttcctccccctcttcccc

SEQ ID NO: 280428 - DNA, 273 bp, Homo sapiens; identical to SEQ ID NO: 198569
  chr2:176972103-176972376
  hyper

SEQ ID NO: 280429 - DNA, 92 bp, Homo sapiens; identical to SEQ ID NO: 228884
  chr2:176973290-176973382
  hyper

SEQ ID NO: 280430 - DNA, 123 bp, Homo sapiens
  chr2:176973442-176973565
  hyper
gtccacgcccgcactctctcctgtgcccgcccatatatcatcccccacgacgcaggcagggcctttcggccgcggcagagaacgtccccaacggggccagggcctggccctcgctcagtggcc

SEQ ID NO: 280431 - DNA, 116 bp, Homo sapiens; identical to SEQ ID NO: 107053
  chr2:176973598-176973714
  hyper

SEQ ID NO: 280432 - DNA, 73 bp, Homo sapiens
  chr2:176974112-176974185
  hyper
ttaccgccagtgtgctgtcgttccccctccccctctccgagtcctcgtggggacacggcggggtctgtaggaa

SEQ ID NO: 280433 - DNA, 114 bp, Homo sapiens; identical to SEQ ID NO: 198570
  chr2:176975915-176976029
  hyper

SEQ ID NO: 280434 - DNA, 72 bp, Homo sapiens; identical to SEQ ID NO: 198571
  chr2:176976744-176976816
  hyper

SEQ ID NO: 280435 - DNA, 60 bp, Homo sapiens; identical to SEQ ID NO: 198572
  chr2:176980658-176980718
  hyper

SEQ ID NO: 280436 - DNA, 174 bp, Homo sapiens
  chr2:176982119-176982293
  hyper
aagccgcagctctccgctgcccagctgcagatggaaaagaagatgaacgagcccgtgagcggccaggagcccaccaaagtctcccaggtggagagccccgaggccaaaggcggccttcccgaagagaggagctgcctggctgaggtctccgtgtccagtcccgaagtgcaggag

SEQ ID NO: 280437 - DNA, 195 bp, Homo sapiens; identical to SEQ ID NO: 198574
  chr2:176983836-176984031
  hyper

SEQ ID NO: 280438 - DNA, 33 bp, Homo sapiens; identical to SEQ ID NO: 198575
  chr2:176986465-176986498
  hyper

SEQ ID NO: 280439 - DNA, 125 bp, Homo sapiens; identical to SEQ ID NO: 198576
  chr2:176993339-176993464
  hyper

SEQ ID NO: 280440 - DNA, 75 bp, Homo sapiens; identical to SEQ ID NO: 198577
  chr2:176995668-176995743
  hyper

SEQ ID NO: 280441 - DNA, 41 bp, Homo sapiens; identical to SEQ ID NO: 198578
  chr2:177001061-177001102
  hyper

SEQ ID NO: 280442 - DNA, 55 bp, Homo sapiens; identical to SEQ ID NO: 198579
  chr2:177005679-177005734
  hyper

SEQ ID NO: 280443 - DNA, 71 bp, Homo sapiens
  chr2:177017375-177017446
  hyper
aacggcctacacccggcagcaagtcctagaactggaaaaagaatttcattttaacaggtatctgacaaggc

SEQ ID NO: 280444 - DNA, 104 bp, Homo sapiens
  chr2:177022459-177022563
  hyper
gtgtgtgtgcgaggcgctagggtgccagggggcgaggggtgaggggcgaggtgcacgcgggctgctccaagacaacaggagttgtaaaaaaccggcccggctgg

SEQ ID NO: 280445 - DNA, 60 bp, Homo sapiens; identical to SEQ ID NO: 198580
  chr2:177042472-177042532
  hyper

SEQ ID NO: 280446 - DNA, 219 bp, Homo sapiens
  chr2:177052744-177052963
  hyper
tagtcaaaaagtgaaaattttgtcccgccctaggcacacagcactcacagcataagatgtagttccatgagtcctaggaaagggggaagaaaggaaaaaaccaaacatctgctctaggtttagaagagggataacatcagcgccaagcaaaccgaaagcgcagaggactcagaagaggggaagaggaataactttatctgtcctggaggtgggcgaaga

SEQ ID NO: 280447 - DNA, 368 bp, Homo sapiens; identical to SEQ ID NO: 228904
  chr2:177133916-177134284
  hyper

SEQ ID NO: 280448 - DNA, 75 bp, Homo sapiens; identical to SEQ ID NO: 198582
  chr2:177502150-177502225
  hyper

SEQ ID NO: 280449 - DNA, 60 bp, Homo sapiens; identical to SEQ ID NO: 198583
  chr2:177502920-177502980
  hyper

SEQ ID NO: 280450 - DNA, 51 bp, Homo sapiens; identical to SEQ ID NO: 198584
  chr2:177503135-177503186
  hyper

SEQ ID NO: 280451 - DNA, 250 bp, Homo sapiens; identical to SEQ ID NO: 228905
  chr2:178076955-178077205
  hyper

SEQ ID NO: 280452 - DNA, 39 bp, Homo sapiens; identical to SEQ ID NO: 228906
  chr2:178128653-178128692
  hyper

SEQ ID NO: 280453 - DNA, 816 bp, Homo sapiens; identical to SEQ ID NO: 221948
  chr2:178257219-178258035
  hyper

SEQ ID NO: 280454 - DNA, 388 bp, Homo sapiens; identical to SEQ ID NO: 228907
  chr2:178417525-178417913
  hyper

SEQ ID NO: 280455 - DNA, 354 bp, Homo sapiens; identical to SEQ ID NO: 228908
  chr2:178483338-178483692
  hyper

SEQ ID NO: 280456 - DNA, 502 bp, Homo sapiens; identical to SEQ ID NO: 228909
  chr2:178937351-178937853
  hyper

SEQ ID NO: 280457 - DNA, 41 bp, Homo sapiens; identical to SEQ ID NO: 228910
  chr2:179059426-179059467
  hyper

SEQ ID NO: 280458 - DNA, 640 bp, Homo sapiens; identical to SEQ ID NO: 221949
  chr2:179316084-179316724
  hyper

SEQ ID NO: 280459 - DNA, 509 bp, Homo sapiens; identical to SEQ ID NO: 228912
  chr2:179343485-179343994
  hyper

SEQ ID NO: 280460 - DNA, 85 bp, Homo sapiens; identical to SEQ ID NO: 198592
  chr2:180129611-180129696
  hyper

SEQ ID NO: 280461 - DNA, 32 bp, Homo sapiens; identical to SEQ ID NO: 198593
  chr2:180725140-180725172
  hyper

SEQ ID NO: 280462 - DNA, 58 bp, Homo sapiens; identical to SEQ ID NO: 228914
  chr2:180871766-180871824
  hyper

SEQ ID NO: 280463 - DNA, 48 bp, Homo sapiens; identical to SEQ ID NO: 198594
  chr2:182323095-182323143
  hyper

SEQ ID NO: 280464 - DNA, 64 bp, Homo sapiens; identical to SEQ ID NO: 198595
  chr2:182521311-182521375
  hyper

SEQ ID NO: 280465 - DNA, 301 bp, Homo sapiens; identical to SEQ ID NO: 198596
  chr2:182521646-182521947
  hyper

SEQ ID NO: 280466 - DNA, 218 bp, Homo sapiens
  chr2:182542630-182542848
  hyper
tgagaagattgatccgtggctttgggcccctgccagtgtcgctgcaggatagtgcatggtaaaggcataatttttctcaaactcggcggacggttcgtgtttgaaagagaagttgccattgatgctgagcggcgggctgaggggtccatcaaaggaagggctggtgcaatcagtcagagggctttcaaagaagggctccagcgctgcgctgtaggcgt

SEQ ID NO: 280467 - DNA, 97 bp, Homo sapiens
  chr2:182544331-182544428
  hyper
ggcgcggcgcagagcgctctcccacgcgccggggatcaggtgcggaaggctcctctctaataaacagcccattgaaagggccgcccgctctttattg

SEQ ID NO: 280468 - DNA, 207 bp, Homo sapiens
  chr2:182546085-182546292
  hyper
ccttcagtacagaaaagttgtacctgccattctatccctaccatacgtgcaattcttcatgtcctgaccttcagctacgactgttcctccagaccctctcactacgtcagtccccacctccatccccaggatcttgtcctcaaagcgagctagttctcgcgaggaggccttggttccattggcctttgcgctctcttatgtgggagc

SEQ ID NO: 280469 - DNA, 292 bp, Homo sapiens; identical to SEQ ID NO: 228925
  chr2:182607563-182607855
  hyper

SEQ ID NO: 280470 - DNA, 204 bp, Homo sapiens; identical to SEQ ID NO: 228926
  chr2:182756163-182756367
  hyper

SEQ ID NO: 280471 - DNA, 168 bp, Homo sapiens; identical to SEQ ID NO: 198597
  chr2:182757468-182757636
  hyper

SEQ ID NO: 280472 - DNA, 85 bp, Homo sapiens; identical to SEQ ID NO: 198598
  chr2:182818945-182819030
  hyper

SEQ ID NO: 280473 - DNA, 138 bp, Homo sapiens; identical to SEQ ID NO: 228929
  chr2:183580827-183580965
  hyper

SEQ ID NO: 280474 - DNA, 81 bp, Homo sapiens
  chr2:183732106-183732187
  hyper
gaacccgtctttggccccagaaacgagcccctagcccctcactgaagagcccaccccaattccctacggaaaagtccccct

SEQ ID NO: 280475 - DNA, 105 bp, Homo sapiens; identical to SEQ ID NO: 198599
  chr2:183902297-183902402
  hyper

SEQ ID NO: 280476 - DNA, 568 bp, Homo sapiens; identical to SEQ ID NO: 198600
  chr2:183902442-183903010
  hyper

SEQ ID NO: 280477 - DNA, 601 bp, Homo sapiens; identical to SEQ ID NO: 38374
  chr2:183903037-183903638
  hyper

SEQ ID NO: 280478 - DNA, 163 bp, Homo sapiens; identical to SEQ ID NO: 198602
  chr2:183988919-183989082
  hyper

SEQ ID NO: 280479 - DNA, 365 bp, Homo sapiens
  chr2:185462255-185462620
  hyper
gggagggcacagccgggctgatggctgccttggacccttgaaaaccaaccagaaagtctgtctccagggaatgctgcagacccggttccctactttccgtgacaaacccattagttcgtgtgcagatttttccattcaggtcgcttctagggcgaacgcttttgttcgctaccactctgtagtgcgagaggaactagagaggcatgtaaagcaagcttgaggcagcagcgcctttgccgcaaagcatccctttcccctcagctttagcaatttaggaagaactgaggttctcaggggaggtggggtgagaggattgccaggaggagggacatataaatcaggagtccctgcttttaccctctact

SEQ ID NO: 280480 - DNA, 391 bp, Homo sapiens; identical to SEQ ID NO: 228935
  chr2:187350702-187351093
  hyper

SEQ ID NO: 280481 - DNA, 284 bp, Homo sapiens; identical to SEQ ID NO: 198604
  chr2:187454990-187455274
  hyper

SEQ ID NO: 280482 - DNA, 232 bp, Homo sapiens; identical to SEQ ID NO: 198605
  chr2:189156402-189156634
  hyper

SEQ ID NO: 280483 - DNA, 583 bp, Homo sapiens; identical to SEQ ID NO: 198606
  chr2:189156844-189157427
  hyper

SEQ ID NO: 280484 - DNA, 42 bp, Homo sapiens; identical to SEQ ID NO: 198607
  chr2:189157688-189157730
  hyper

SEQ ID NO: 280485 - DNA, 132 bp, Homo sapiens; identical to SEQ ID NO: 228938
  chr2:190305689-190305821
  hyper

SEQ ID NO: 280486 - DNA, 111 bp, Homo sapiens; identical to SEQ ID NO: 198608
  chr2:190306062-190306173
  hyper

SEQ ID NO: 280487 - DNA, 120 bp, Homo sapiens; identical to SEQ ID NO: 198609
  chr2:190445060-190445180
  hyper

SEQ ID NO: 280488 - DNA, 819 bp, Homo sapiens; identical to SEQ ID NO: 198610
  chr2:190445255-190446074
  hyper

SEQ ID NO: 280489 - DNA, 287 bp, Homo sapiens; identical to SEQ ID NO: 198611
  chr2:190446109-190446396
  hyper

SEQ ID NO: 280490 - DNA, 313 bp, Homo sapiens; identical to SEQ ID NO: 228941
  chr2:190526051-190526364
  hyper

SEQ ID NO: 280491 - DNA, 322 bp, Homo sapiens; identical to SEQ ID NO: 228942
  chr2:190649067-190649389
  hyper

SEQ ID NO: 280492 - DNA, 82 bp, Homo sapiens; identical to SEQ ID NO: 198612
  chr2:191044992-191045074
  hyper

SEQ ID NO: 280493 - DNA, 516 bp, Homo sapiens; identical to SEQ ID NO: 198613
  chr2:191045505-191046021
  hyper

SEQ ID NO: 280494 - DNA, 183 bp, Homo sapiens; identical to SEQ ID NO: 198614
  chr2:191208157-191208340
  hyper

SEQ ID NO: 280495 - DNA, 93 bp, Homo sapiens; identical to SEQ ID NO: 228944
  chr2:191273656-191273749
  hyper

SEQ ID NO: 280496 - DNA, 139 bp, Homo sapiens; identical to SEQ ID NO: 198615
  chr2:191512982-191513121
  hyper

SEQ ID NO: 280497 - DNA, 248 bp, Homo sapiens; identical to SEQ ID NO: 228945
  chr2:191514202-191514450
  hyper

SEQ ID NO: 280498 - DNA, 390 bp, Homo sapiens; identical to SEQ ID NO: 228946
  chr2:191514824-191515214
  hyper

SEQ ID NO: 280499 - DNA, 84 bp, Homo sapiens; identical to SEQ ID NO: 198617
  chr2:191745041-191745125
  hyper

SEQ ID NO: 280500 - DNA, 413 bp, Homo sapiens; identical to SEQ ID NO: 2097
  chr2:191745184-191745597
  hyper

SEQ ID NO: 280501 - DNA, 436 bp, Homo sapiens; identical to SEQ ID NO: 198619
  chr2:191745657-191746093
  hyper

SEQ ID NO: 280502 - DNA, 80 bp, Homo sapiens; identical to SEQ ID NO: 198620
  chr2:191746519-191746599
  hyper

SEQ ID NO: 280503 - DNA, 252 bp, Homo sapiens; identical to SEQ ID NO: 228950
  chr2:191878927-191879179
  hyper

SEQ ID NO: 280504 - DNA, 301 bp, Homo sapiens
  chr2:192015070-192015371
  hyper
catgaaaactgtgacgttgcttctgaaaactcagtgcctgtctgtcctttttgcgtgcatttcctagaagatcccactaaaggggcattttgtcccaccgtctgtgagctggtggtgccgctttggctctgtggcctgtagcttgcaaaaggagatgacctgccctaaaatgtcactcgcgcccatcaaagccacagtcaccggctgccgtagctgcaagcttttttctgaaatccaggtacgctaatctaaagtcagacatcacagctctagagaagctggctaagaaagtgaagagggg

SEQ ID NO: 280505 - DNA, 251 bp, Homo sapiens; identical to SEQ ID NO: 198622
  chr2:192015426-192015677
  hyper

SEQ ID NO: 280506 - DNA, 254 bp, Homo sapiens
  chr2:192015678-192015932
  hyper
ctctctcagcacaggtcccaggcagtgctcaagtccaaagtcagaagcgcccctcacagtccctaggagaaagccgctgacgccatcatcagtaggggatttgcatttctcctcccacttgaggctttcctgtgcgtcagtgttcgagtctctgggactttacttgggtcagttcccacccactctattctagaaatgctaacacgcagaaactgccaggctggagccccttcaccgggcgtcctcttccctct

SEQ ID NO: 280507 - DNA, 460 bp, Homo sapiens
  chr2:192109717-192110177
  hyper
tcccactgtttgccggaatgtgaccccaggctggcttcgagttgtcaaatgttgtatttctcattttatgtcagtgagtctggaagcaaaaaaggtagaaagactgccttccgtgggggccgcgacgatcgcccctccttccctcaagcctcgtcccatccaggctcgccccgggtgcggagggtcgggccgcaaacccgcaaggcgcggaggccgccgcgacgctcaccggggggcgctgtgaagccggcaccgggcggacagaggtgagtcggctcggaggcggtggctcccgttcctgcccgcgcgccgaggggcgaatcccaggcagcgaggtcgccgcccccgcccctcggccggcccctccgccagcgggcgagaggggagtggccgggctcctcccgccgccgctgagcactccgcagctgggtgcgcacgggagcctcaaccgcggcgcgtg

SEQ ID NO: 280508 - DNA, 253 bp, Homo sapiens; identical to SEQ ID NO: 198625
  chr2:192110303-192110556
  hyper

SEQ ID NO: 280509 - DNA, 444 bp, Homo sapiens; identical to SEQ ID NO: 107187
  chr2:192110584-192111028
  hyper

SEQ ID NO: 280510 - DNA, 54 bp, Homo sapiens; identical to SEQ ID NO: 228953
  chr2:192542863-192542917
  hyper

SEQ ID NO: 280511 - DNA, 36 bp, Homo sapiens; identical to SEQ ID NO: 198627
  chr2:193058975-193059011
  hyper

SEQ ID NO: 280512 - DNA, 386 bp, Homo sapiens; identical to SEQ ID NO: 198628
  chr2:197035576-197035962
  hyper

SEQ ID NO: 280513 - DNA, 34 bp, Homo sapiens; identical to SEQ ID NO: 198629
  chr2:197458535-197458569
  hyper

SEQ ID NO: 280514 - DNA, 90 bp, Homo sapiens; identical to SEQ ID NO: 228957
  chr2:197664294-197664384
  hyper

SEQ ID NO: 280515 - DNA, 520 bp, Homo sapiens
  chr2:198174828-198175348
  hyper
agcccggccacacaagagccgcattctgggcaggactcctgctaggtttggggaggggtcccagtctgcgatcctttctccctcttcgtgcagcgtcctcctccccggggcccgggccggcggcgcccacgcaacgcggcgcggtgcgagtcccgagagcacctcgagcccccggccccctccccagccccgccgggcccgcggccgccgcactcccgcacgccggctgcccagcgcccacgggccctgccccagactcgggcgcgcagttccgacggcccagggcggggacggcgcggcggaggggagctgccgccgcgggctctcggaggcaccggcggccgcacacagtcctccccttcgccgcgagtaaacagctcgcgggcgcgctccagccgcgcccccatccccccgccgggctccgcgccgccccgcgcccgcgcgtcccgcccgccggcgccgccgcccgctacctggtcggtgagtttgagcactgccattcttccgctccttcgcgcgc

SEQ ID NO: 280516 - DNA, 121 bp, Homo sapiens; identical to SEQ ID NO: 198630
  chr2:198175715-198175836
  hyper

SEQ ID NO: 280517 - DNA, 121 bp, Homo sapiens; identical to SEQ ID NO: 198631
  chr2:198257786-198257907
  hyper

SEQ ID NO: 280518 - DNA, 106 bp, Homo sapiens; identical to SEQ ID NO: 198632
  chr2:198262740-198262846
  hyper

SEQ ID NO: 280519 - DNA, 148 bp, Homo sapiens; identical to SEQ ID NO: 198633
  chr2:198265015-198265163
  hyper

SEQ ID NO: 280520 - DNA, 178 bp, Homo sapiens; identical to SEQ ID NO: 198634
  chr2:198265429-198265607
  hyper

SEQ ID NO: 280521 - DNA, 341 bp, Homo sapiens; identical to SEQ ID NO: 198635
  chr2:198266479-198266820
  hyper

SEQ ID NO: 280522 - DNA, 376 bp, Homo sapiens; identical to SEQ ID NO: 198636
  chr2:198267374-198267750
  hyper

SEQ ID NO: 280523 - DNA, 70 bp, Homo sapiens; identical to SEQ ID NO: 198637
  chr2:198268366-198268436
  hyper

SEQ ID NO: 280524 - DNA, 93 bp, Homo sapiens; identical to SEQ ID NO: 198638
  chr2:198269812-198269905
  hyper

SEQ ID NO: 280525 - DNA, 81 bp, Homo sapiens; identical to SEQ ID NO: 198639
  chr2:198272718-198272799
  hyper

SEQ ID NO: 280526 - DNA, 147 bp, Homo sapiens; identical to SEQ ID NO: 198640
  chr2:198273117-198273264
  hyper

SEQ ID NO: 280527 - DNA, 414 bp, Homo sapiens; identical to SEQ ID NO: 228960
  chr2:198299572-198299986
  hyper

SEQ ID NO: 280528 - DNA, 297 bp, Homo sapiens; identical to SEQ ID NO: 228961
  chr2:198364582-198364879
  hyper

SEQ ID NO: 280529 - DNA, 62 bp, Homo sapiens
  chr2:198569898-198569960
  hyper
ttttctggcaagccgccgtccattggcggcctctggcgccgcggctttcggcgtgcggacgg

SEQ ID NO: 280530 - DNA, 106 bp, Homo sapiens
  chr2:198569977-198570083
  hyper
cggggccgggcggggagggcggtgagggccggcgctcggggccgcgtttcattggctttccggccggaagctgcggcgcgacccggctgcgcatgcgcctctcaca

SEQ ID NO: 280531 - DNA, 1110 bp, Homo sapiens
  chr2:198669112-198670222
  hyper
cgggtacaccctggctcgagtacattagccccgctgggccggctcccagttgcagaacacattccattcttcgcgctcgggcacacccctccgcagtgaggattggtcgggccgagccccctcggcgaggcgaggctcctaagaggcccagacgcctgccaatccccaagggctgtcaaaacaagtctccctccctgtcacaacagagctgagtggaggccgccgccgccgccgcacttcctgggaccgctgcgccgcagtccgcgggcaggtggcgggtgcgcccggccgcagtcgcccggctctggcccctatcgggccgccggcgtccgggctccagaggccgcctggctgggcgcccggtgccttttgtctggcgcagggccggcgtttgcatcacatttcggatacctccctctctttttcgcctctccttctgcctcccgctcacatcgcctccccactcccgccaccgtcccccgccggactgctagcctcctagaccgaagcccgaggacgtctctgcccgagcgatgtcccctctccagaaagttgccgccgccgccgccgccgccgccactgccgccgctgggcggtgaaacaaagtctggcggggccgcctcccggtgcaggagcgcaccggtgcctagcggctggactccgctgccgggcgtcccgctttcccccggggagccctaaacgctccaggccatggccgagggcgcggccggcagggaggatccggcgccgcccgacgcggcggggggcgaagacgacccccgagtgggcccggatgccgccggggactgcgtgacggcggcctctgggggccggatgagggaccgtcgcagcggggtcgcactgccaggcgccgcggggaccccagcggacagcgaggcgggcctcctggaggcagcacgggcgaccccccggcgcagcagcatcatcaaggtaagcaaagccgcgccgcaccgggagcgtggctgtgggtgatgggtgggtcagggacccgggcaggatgtgcggtgtccggaggcatccgggctcagcattgttttctcccacctccttcaacgccaaaccttccttccttatccggaggttcccaga

SEQ ID NO: 280532 - DNA, 155 bp, Homo sapiens
  chr2:198670257-198670412
  hyper
ttctccccactgacggcagaggaaaagttccgctctgcgtctttgcgttctgatggatgctttccctcattttctctgcaagcttcactaaaccgttgatggagggaggaagggagaactctggataaatgcagacccaccggatggttgtgcat

SEQ ID NO: 280533 - DNA, 928 bp, Homo sapiens
  chr2:200320441-200321369
  hyper
agatgagaggcgacgggggcattatttggcaacctggaattcacttcctgtaatcctacaccgcgacagcgcctaatcaacctgaaccctgacacccgggccattatcactgggccgcgggctgcgcgcctccctgctccgggctgttacctcccacggccttggccacggcgccgttgggcctcccgcgggctcccatggggctgccgttctgctccagccgggccaccttcactgggggaggccccttgacgtccgggctgccgctccgccggtcggggctgtcccgcagacacgggctctcgctccgccgctccatgctgctccgactcggagacaaagttcccaccggcaggtcgcaataaaacgcacagggacctagggagggggtggggggaggaagggggagggagaaaaaagagggaaaaccgctcatacacgtgatagacgttcaggccagtggcagagcgctgcaccacagccacacaaacttcctcccacgctgcccgaggggcccgagccgggaagccggtcccaaccttacactgggcggcccccaggaagcccagcgcctcggttcggcgactctgcccagtcgcagctccccagaagtcagccctcggggtcgcggccggggttggcacccaggggcgcctagaagtggtccattcattgggacggggttggcataaaccgttcctgggtgctacagcctagcccgtcccggggtcagggttgcggaataagtgaacttcagaaaaagacgttccacccacatgggaagggagttgggggtgtgcgcaagtccataaccgaattaaccacccggtaaatgcgctgtgaatggccaggcaggagccaaaggccgggcgaaagaaccccttgaatacccgctttttacctatacggagcaagtcctgagataagc

SEQ ID NO: 280534 - DNA, 222 bp, Homo sapiens
  chr2:200321661-200321883
  hyper
gaagccgcaggtctcgacacccctggattgggggggtgggggggggcggggaaggaggggaaacacctgatgaaacggcgctcgcgttgtcactgacacccgcaagaagcaagaccccggcaccgtactgcgtgcgcgctgggaatcctcgtgggcgctctggccgcgcgagcagtgtcggcgccacgggtcaaggagacaaggtgggggtggcagggggag

SEQ ID NO: 280535 - DNA, 52 bp, Homo sapiens
  chr2:200321998-200322050
  hyper
gttggccctgggcttccccgaactcccgagcgcggcgcgggagccctcgccc

SEQ ID NO: 280536 - DNA, 41 bp, Homo sapiens; identical to SEQ ID NO: 198643
  chr2:200322457-200322498
  hyper

SEQ ID NO: 280537 - DNA, 59 bp, Homo sapiens; identical to SEQ ID NO: 198644
  chr2:200322611-200322670
  hyper

SEQ ID NO: 280538 - DNA, 781 bp, Homo sapiens; identical to SEQ ID NO: 221975
  chr2:200323016-200323797
  hyper

SEQ ID NO: 280539 - DNA, 582 bp, Homo sapiens; identical to SEQ ID NO: 221976
  chr2:200324029-200324611
  hyper

SEQ ID NO: 280540 - DNA, 133 bp, Homo sapiens
  chr2:200326735-200326868
  hyper
ggctctcgcctgggccatcccgggctctgagggcccggcatccatccccaaggtccatggctttcaagttcggtcacccaggcagagagaccctgccttttaaagagccctggaaagttgcgccgcgttttcc

SEQ ID NO: 280541 - DNA, 279 bp, Homo sapiens
  chr2:200326960-200327239
  hyper
ccctggagcttgccctcctgggggcgggaggagggcgggagggaatcatttctttcaaatgaagcccacgccagctctgaagccaatttccgccgcggactgtccgtggagagttggcgaccaacactttctcggacggcataaccgcgaggggcttagactggaaatcagatgcgccaagaggacaagagccaggggccagaataccccagtgggggacgcgccttggaggacggttcgcccagggtgggcttcagccctttcccagagtgctccggg

SEQ ID NO: 280542 - DNA, 377 bp, Homo sapiens
  chr2:200327794-200328171
  hyper
tggtgtcccttcggcggccgcgggccgggggaccggggaagacggagggtcctgcggcctggagcaccaccctaccacaccaggcaacgccccccggggcgcccttcattcttttgcagagcccagaacttaataggtgggtccccttctgcaaccacgctgcgagagaatgactgccctgctaatctagtttacttgtagaaatcgactgtaaaccgggacaacaaggcaagggtgggggaagaaaaggaagcgccgaaggagccgccgctgcgtccccgcccccagctcggagctgccggggttggggccccgggtggcgctcccgacccgccgcgttttccttagggaaacaccgagtgaggcagaggatctca

SEQ ID NO: 280543 - DNA, 274 bp, Homo sapiens
  chr2:200328393-200328667
  hyper
gcgggggatgggcaggtccctggcccagggtaccaccgggccactcaacacaaaaacgccctggcgcgtgcaaaatacgaacgcccacagtttgtcccaaccccttgaaatgaaaagtacacctggaaagcccaagatagcacccggtccgcaccccaaatttcaggcaggccagcaggcgtccagaaatccgctcccacccctcgtaggggcaggcaagctcaggcagccgggtgcaagggggcccaaaccgcagttgcctcccgaacgcttt

SEQ ID NO: 280544 - DNA, 218 bp, Homo sapiens; identical to SEQ ID NO: 198648
  chr2:200329745-200329963
  hyper

SEQ ID NO: 280545 - DNA, 70 bp, Homo sapiens; identical to SEQ ID NO: 198649
  chr2:200331853-200331923
  hyper

SEQ ID NO: 280546 - DNA, 442 bp, Homo sapiens
  chr2:200331953-200332395
  hyper
caggtggataacttctgcggattcggctttcaggctgctggagctctccccagcccgaggccttagcccagcgcaatcccttgtccagaccggccagtttccgcgtggcgaaaaagggggaggcaagtgtgtcttttccaaggagcttttatccaacagcctcccctccccccaactctcagccttaggtgccgggcttcagccgaagcgtttttcaaatttgtcatcattggaaacctcggacaagtggagtgtaaaattttgagggtttccaggtaggctctgacttcaggcattcaatgaaaggggaagagggctgagggcgggggagagagacaagcacagagggctccctgtagtcggcaggaattccctccctctgcagcccagctgcacccactagcacacactagtcttgccttctcccggctttggaagaatc

SEQ ID NO: 280547 - DNA, 304 bp, Homo sapiens
  chr2:200333430-200333734
  hyper
actgctctacccctcgcaggcccgcctctgggcaggcctgaggtggccctggagccccgccagcagcccccgcccctcaggccaagctctggccctggcaatctctgcactttgtcatcacgcccgagtatttgacattcgcaattatctgcaaataccctgatcagtttgtatatgaaacactttttttcctgccttaaggttggaatctggtaagtttcagacaagtggttgcagggggagatgacccaggggaccgtgcgggacagggccggtgaacccgattccgcgaggcgggcgtctc

SEQ ID NO: 280548 - DNA, 315 bp, Homo sapiens
  chr2:200333834-200334149
  hyper
tccttgaaaagagcaccccctaatcccggaggaagggagggtgaaggaggaggggagagcccactacaggcaaggcaggaaggttaatcattttgttaaccggaaagggtgctgccccgcctggccgtcgtcaccgagcgtgtcagtcacccgctctcgatttcgccgcagaattacctgctcaaagagccaccccaagaagccctcagctccgaggtcttcccgcccgtcgtctgcgggaagtaaacggcgtcctccctccaaagaagtggatgccccttcgactctcctccgccccccggcggttcctaaatc

SEQ ID NO: 280549 - DNA, 95 bp, Homo sapiens; identical to SEQ ID NO: 107244
  chr2:200334504-200334599
  hyper

SEQ ID NO: 280550 - DNA, 77 bp, Homo sapiens
  chr2:200334887-200334964
  hyper
agctggagaaggtcgtcacagtctcccgtggaatcttgttgcctgagagccccataacggaaagggctaagacgact

SEQ ID NO: 280551 - DNA, 108 bp, Homo sapiens
  chr2:200336426-200336534
  hyper
agagctcgggaggactccacctgctctccagataaggcgccatgagcagagaagggaacagacggccaagctccctcctaattccccgttgttgcagagcaaagaaga

SEQ ID NO: 280552 - DNA, 79 bp, Homo sapiens; identical to SEQ ID NO: 198652
  chr2:200604747-200604826
  hyper

SEQ ID NO: 280553 - DNA, 566 bp, Homo sapiens; identical to SEQ ID NO: 198653
  chr2:200715514-200716080
  hyper

SEQ ID NO: 280554 - DNA, 111 bp, Homo sapiens; identical to SEQ ID NO: 198654
  chr2:200820437-200820548
  hyper

SEQ ID NO: 280555 - DNA, 178 bp, Homo sapiens; identical to SEQ ID NO: 228978
  chr2:201170705-201170883
  hyper

SEQ ID NO: 280556 - DNA, 1349 bp, Homo sapiens; identical to SEQ ID NO: 198655
  chr2:201171095-201172444
  hyper

SEQ ID NO: 280557 - DNA, 119 bp, Homo sapiens; identical to SEQ ID NO: 198656
  chr2:201172480-201172599
  hyper

SEQ ID NO: 280558 - DNA, 166 bp, Homo sapiens; identical to SEQ ID NO: 228980
  chr2:201374886-201375052
  hyper

SEQ ID NO: 280559 - DNA, 34 bp, Homo sapiens; identical to SEQ ID NO: 228981
  chr2:201390687-201390721
  hyper

SEQ ID NO: 280560 - DNA, 140 bp, Homo sapiens; identical to SEQ ID NO: 198657
  chr2:201727376-201727516
  hyper

SEQ ID NO: 280561 - DNA, 250 bp, Homo sapiens; identical to SEQ ID NO: 228984
  chr2:201729265-201729515
  hyper

SEQ ID NO: 280562 - DNA, 149 bp, Homo sapiens; identical to SEQ ID NO: 198659
  chr2:201828571-201828720
  hyper

SEQ ID NO: 280563 - DNA, 233 bp, Homo sapiens; identical to SEQ ID NO: 228986
  chr2:201936491-201936724
  hyper

SEQ ID NO: 280564 - DNA, 42 bp, Homo sapiens; identical to SEQ ID NO: 228987
  chr2:201980840-201980882
  hyper

SEQ ID NO: 280565 - DNA, 249 bp, Homo sapiens; identical to SEQ ID NO: 228988
  chr2:201983185-201983434
  hyper

SEQ ID NO: 280566 - DNA, 79 bp, Homo sapiens; identical to SEQ ID NO: 228989
  chr2:202315793-202315872
  hyper

SEQ ID NO: 280567 - DNA, 162 bp, Homo sapiens
  chr2:202316090-202316252
  hyper
tctgtcgtccgcccgcgcttcctcaggaagcccctaatgcagcggcagcctgaaagcagcagccgaagctgctgccgctgctcccactgccagcaaccgcccgggcgtggcagggacaggcgggcgacttcacaacatcatcactcggcgacctcggttctg

SEQ ID NO: 280568 - DNA, 204 bp, Homo sapiens; identical to SEQ ID NO: 221978
  chr2:202644945-202645149
  hyper

SEQ ID NO: 280569 - DNA, 42 bp, Homo sapiens
  chr2:202897429-202897471
  hyper
cgagaacaaaagaacgtttgccaatcagaaaacgctacccga

SEQ ID NO: 280570 - DNA, 595 bp, Homo sapiens
  chr2:202897603-202898198
  hyper
gaaagggcacacgccgcagaaccaaggcacacggggccactgagacgcccggcgcgtcgtacagagtgttcctgggcgctcggtctcaggttacttctagaaccagtctccccaacgccgtcttcgtttccttaaaacctcgctagagtcaccccagttccccagactccaggccgtgcgcgcgggcggggtggcctgagcccgggttccccgctctccctgcttcgggcccttcctccgaggggtccttcctcccgccgtcactcggccccctccgcccgactcgggtttctcctcggaggcggcccctcctcctttttataactcgggggaggggagaggggactgtggcctcgcgtggactctttgggtccggggggaaagaggcgatccgcaaggcgcacccccttctcgtcccgtcccaaaccccacattgaggacccggcgacccgaaagccccgccagagccagcctttgcagtcctaacgcgactcctggtcacgtctctccccgaaggggcgctgcgcggtcctcgctcccctcaaacgccgctggcgaaggcgcccctgctcaggaatgcgcatctgagtgcacc

SEQ ID NO: 280571 - DNA, 726 bp, Homo sapiens; identical to SEQ ID NO: 198661
  chr2:202898961-202899687
  hyper

SEQ ID NO: 280572 - DNA, 34 bp, Homo sapiens; identical to SEQ ID NO: 198662
  chr2:202900077-202900111
  hyper

SEQ ID NO: 280573 - DNA, 216 bp, Homo sapiens; identical to SEQ ID NO: 228993
  chr2:203131608-203131824
  hyper

SEQ ID NO: 280574 - DNA, 104 bp, Homo sapiens; identical to SEQ ID NO: 221980
  chr2:203242328-203242432
  hyper

SEQ ID NO: 280575 - DNA, 223 bp, Homo sapiens; identical to SEQ ID NO: 228994
  chr2:203776773-203776996
  hyper

SEQ ID NO: 280576 - DNA, 123 bp, Homo sapiens; identical to SEQ ID NO: 228995
  chr2:203879447-203879570
  hyper

SEQ ID NO: 280577 - DNA, 74 bp, Homo sapiens; identical to SEQ ID NO: 228996
  chr2:204192792-204192866
  hyper

SEQ ID NO: 280578 - DNA, 195 bp, Homo sapiens; identical to SEQ ID NO: 198663
  chr2:204399768-204399963
  hyper

SEQ ID NO: 280579 - DNA, 188 bp, Homo sapiens; identical to SEQ ID NO: 198664
  chr2:205409782-205409970
  hyper

SEQ ID NO: 280580 - DNA, 898 bp, Homo sapiens; identical to SEQ ID NO: 38498
  chr2:205410026-205410924
  hyper

SEQ ID NO: 280581 - DNA, 106 bp, Homo sapiens
  chr2:206546583-206546689
  hyper
caaaggatctgagtagtaaacgcagcgagtgtttggggttttattcagaccgggctgacggtgtgtgtcgccgccacgcaccgctgcctgttcgaacgcatggctg

SEQ ID NO: 280582 - DNA, 476 bp, Homo sapiens
  chr2:206546770-206547246
  hyper
ggttctgcgtgtgtggcatcggagtcgtggaatttagggggaacaaggcttttccccccgtccccccggggtctcccttgggtgggggcgacacggccaaggcggcgcgccctgggggtgcccgggggcgcttcttccccagggcgttacgcaccggcggcccggcgcggaggtgcgcgggggcgatcgggagatgcggggcgggcgaggggtggtgggatgggcgccgccttaacttcgatcctgcggcggcccgagagaagccgtcgccgccccgcccgagctgggtgccgcggcactctgctctgcgccgcgcgtctccgcggctgcctctttaatcaggaacacagaaggggcgggccctgagccggcgcgtaatcggatagctctgccgcggctctgacatccacatgctgctcggcctgaaaaggcagtggggagccggaggggaggcagagatcgcgagcgaggcacca

SEQ ID NO: 280583 - DNA, 71 bp, Homo sapiens
  chr2:206549958-206550029
  hyper
gttcggggcaacctcggacccggggtgggatctcagggtgggattcgaagctgggacctgccagggacctc

SEQ ID NO: 280584 - DNA, 33 bp, Homo sapiens
  chr2:206551480-206551513
  hyper
taaaagataggagatccacgctcaggtttattg

SEQ ID NO: 280585 - DNA, 188 bp, Homo sapiens; identical to SEQ ID NO: 198666
  chr2:206750390-206750578
  hyper

SEQ ID NO: 280586 - DNA, 265 bp, Homo sapiens; identical to SEQ ID NO: 229002
  chr2:206948632-206948897
  hyper

SEQ ID NO: 280587 - DNA, 224 bp, Homo sapiens; identical to SEQ ID NO: 229003
  chr2:206949799-206950023
  hyper

SEQ ID NO: 280588 - DNA, 152 bp, Homo sapiens; identical to SEQ ID NO: 229004
  chr2:206950964-206951116
  hyper

SEQ ID NO: 280589 - DNA, 71 bp, Homo sapiens; identical to SEQ ID NO: 198668
  chr2:207307392-207307463
  hyper

SEQ ID NO: 280590 - DNA, 239 bp, Homo sapiens; identical to SEQ ID NO: 198669
  chr2:207308960-207309199
  hyper

SEQ ID NO: 280591 - DNA, 104 bp, Homo sapiens
  chr2:207507310-207507414
  hyper
gtggggcccaaaggacagagtgggtccctggcagctccgccctgcggagggtgaggctgcgcaatcaagtgcggggccgagactcagcgcggggctcgtagcgg

SEQ ID NO: 280592 - DNA, 168 bp, Homo sapiens; identical to SEQ ID NO: 229008
  chr2:207629920-207630088
  hyper

SEQ ID NO: 280593 - DNA, 37 bp, Homo sapiens; identical to SEQ ID NO: 229009
  chr2:207630392-207630429
  hyper

SEQ ID NO: 280594 - DNA, 1182 bp, Homo sapiens
  chr2:208030651-208031833
  hyper
atctatttctgcagcgctgttcgctcctaatgcaatctttgctctttattttgggaggttgcatttttttctctcgcgatcgcttctcttccccccccttcccttccctccccaccccccaccccatccttgctagtttgtagtcttccccctcccttttctcctcctcctgctcttccccctccccaaactccctccctccgttcggttctccgcgcagccgtgggatctcgaggagggcgtccattaggccgcgtgtgaccatgtaaggtaaacagggggctcatgaagtcactgaggaccaatggggagcccggagcagagcctggggcggggcttggccctggcggcgggcgcggattggcacgctgcggatctccctgctgccttacaaggcggtgcgaggcgagctatttttagagggctatataagggggctgaggcggccgcccggcggccgggcagcgcgagcgcaagggacagggagggtcgtggcgacactcgcgccagctcccgggacggctgggctcgggctggtcgccgacctccgaccctccactagatgcctggcagagcccggcgcgtccggagcccgcgcccctcagagggaaggggtcgcgcgtcgccgcggcggccctgaggctgacggtcgggaggtgaaaggccggagtgcggggtcaggacgcctcctggagggggcgcggcgcagggggccgcggggaagccgccgagggcgcggagcgggaaggaaggacagtggccaccccgcctccgcctgggcacggggcagggacccgcgcgaggcggtgccggggaggtcctcacgtactcaaaaacaagcagaaaaggcatccagggccccttcccgaactccccacgggctgccagggtgcagagaagaagcgcctgaggaggaagtgccacacaatgggagagaacaaaggggagcggagcgagaccgcggcctgcgcccgccccccgcttgcgcacagtccccgccccgccccgcgggcgccgccgccgccgccctccctcccgcgcctccttctgaccccgagcgagagacctggtcgggagtccggcggctagagttgattgcaaggggcctgttgctcgactgtgcgttaaagaggctagagggagcctaggtagacgtggggcgcaagctggagccggcagctt

SEQ ID NO: 280595 - DNA, 71 bp, Homo sapiens; identical to SEQ ID NO: 198670
  chr2:208031939-208032010
  hyper

SEQ ID NO: 280596 - DNA, 469 bp, Homo sapiens; identical to SEQ ID NO: 229012
  chr2:208575825-208576294
  hyper

SEQ ID NO: 280597 - DNA, 226 bp, Homo sapiens; identical to SEQ ID NO: 198671
  chr2:208633317-208633543
  hyper

SEQ ID NO: 280598 - DNA, 101 bp, Homo sapiens; identical to SEQ ID NO: 198672
  chr2:208633756-208633857
  hyper

SEQ ID NO: 280599 - DNA, 90 bp, Homo sapiens
  chr2:208635444-208635534
  hyper
ggattacaggtgtgagccaccgcgcccggcccgtttacatcttaagacaagatctcactccttacaacaattctgaggcaggtacttcct

SEQ ID NO: 280600 - DNA, 78 bp, Homo sapiens; identical to SEQ ID NO: 198673
  chr2:209108240-209108318
  hyper

SEQ ID NO: 280601 - DNA, 261 bp, Homo sapiens; identical to SEQ ID NO: 198674
  chr2:209113128-209113389
  hyper

SEQ ID NO: 280602 - DNA, 211 bp, Homo sapiens; identical to SEQ ID NO: 198675
  chr2:209118761-209118972
  hyper

SEQ ID NO: 280603 - DNA, 243 bp, Homo sapiens; identical to SEQ ID NO: 229016
  chr2:209120080-209120323
  hyper

SEQ ID NO: 280604 - DNA, 118 bp, Homo sapiens; identical to SEQ ID NO: 229017
  chr2:209130875-209130993
  hyper

SEQ ID NO: 280605 - DNA, 47 bp, Homo sapiens; identical to SEQ ID NO: 198676
  chr2:210637062-210637109
  hyper

SEQ ID NO: 280606 - DNA, 235 bp, Homo sapiens; identical to SEQ ID NO: 229019
  chr2:210867113-210867348
  hyper

SEQ ID NO: 280607 - DNA, 96 bp, Homo sapiens; identical to SEQ ID NO: 198678
  chr2:211035494-211035590
  hyper

SEQ ID NO: 280608 - DNA, 271 bp, Homo sapiens; identical to SEQ ID NO: 198679
  chr2:211090073-211090344
  hyper

SEQ ID NO: 280609 - DNA, 92 bp, Homo sapiens; identical to SEQ ID NO: 198680
  chr2:211341442-211341534
  hyper

SEQ ID NO: 280610 - DNA, 137 bp, Homo sapiens; identical to SEQ ID NO: 198681
  chr2:213401042-213401179
  hyper

SEQ ID NO: 280611 - DNA, 598 bp, Homo sapiens; identical to SEQ ID NO: 198682
  chr2:213402010-213402608
  hyper

SEQ ID NO: 280612 - DNA, 208 bp, Homo sapiens
  chr2:214148842-214149050
  hyper
ggtaattcagagacgacaacgaagtgggaaagaaattacagggtcaaagcgaaagaaaaccaagctgcttgggtaggaaggtgcaatgcaagccaattgtttactgtatcttgtccgctcccagagctgcgcccgagctctcgcgttaactaggcaacatcgttgccacggtaactgggaggcgcgggagggcgacagctccctggac

SEQ ID NO: 280613 - DNA, 311 bp, Homo sapiens
  chr2:214149129-214149440
  hyper
gccgttgggtagcgtcttcgctgttgcccttagggacggctgtgggcctgctgggggtgggggcccgaagcgccagagatggctgctcagcgagggatgcccagctccgccgtgagggtcctggaagaggcgttgggcatgggtttgacggcagccggggacgcgagggacacggcggacgcggtggcggctgagggcgcctactacctggaacgtatccttcccgtggaggcgcggcccgctgcgctggcgggtaatgggtgttgggacgaaggcgagggcctcccactggcggcgccttttgagccttg

SEQ ID NO: 280614 - DNA, 53 bp, Homo sapiens; identical to SEQ ID NO: 229025
  chr2:216176512-216176565
  hyper

SEQ ID NO: 280615 - DNA, 245 bp, Homo sapiens
  chr2:216301172-216301417
  hyper
tttcttttttattgggggtggtggtagtgtttgaggacattgcgtcacctctcttcggggtggagggggggaatctctgcttataggagtgtattttgtgaggaagaaaacccataaaatatccacgaccttgcagctgttaagaatccagacttttcagtcccagggcggggctgcctttccccccatcccgctccctttctttggactaaagggtactgactcgggactcccttattttgtct

SEQ ID NO: 280616 - DNA, 445 bp, Homo sapiens; identical to SEQ ID NO: 229028
  chr2:216946187-216946632
  hyper

SEQ ID NO: 280617 - DNA, 41 bp, Homo sapiens; identical to SEQ ID NO: 198684
  chr2:217008385-217008426
  hyper

SEQ ID NO: 280618 - DNA, 310 bp, Homo sapiens
  chr2:217236253-217236563
  hyper
cgggggctgctccggctcgtcctctggctgctgcccgccgtccggcgcggtcgcgactccggccttcatgatcctcctcctcctcccccttccctgggggccagccctgagcccccgcgcccgggcagcgctgccatgcaaccagaggcgaggccggcgtgggggtgggggcggctggggagtgaggagggggagtaataaaaaatgaaataatactagtggaataattcggttctcaggcaagagtgcttctggagggtgggggcggaggagggcggctgccgggtctgctcggcagctctgcccccgc

SEQ ID NO: 280619 - DNA, 339 bp, Homo sapiens; identical to SEQ ID NO: 198686
  chr2:217236604-217236943
  hyper

SEQ ID NO: 280620 - DNA, 40 bp, Homo sapiens; identical to SEQ ID NO: 229030
  chr2:217277057-217277097
  hyper

SEQ ID NO: 280621 - DNA, 41 bp, Homo sapiens; identical to SEQ ID NO: 229031
  chr2:217363378-217363419
  hyper

SEQ ID NO: 280622 - DNA, 416 bp, Homo sapiens
  chr2:217498487-217498903
  hyper
agccgggctgcggctgctgctcggtgtgcgcccggctggagggcgaggcgtgcggcgtctacaccccgcgctgcggccaggggctgcgctgctatccccacccgggctccgagctgcccctgcaggcgctggtcatgggcgagggcacttgtgagaagcgccgggacgccgagtatggcgccagcccggagcaggttgcaggtaacgcggtctggaacaagtagttgggagaaacttggagggcagcggagaagcccgacgggcggctggaccttacggacggttttaggggcggcagagccgagaccttggaccaaatcaagggggactgttgctagcgggacgcggaagtcaggcccggggaggggaactggagttagagcaagtggaagagccctggcgactcatttggtggg

SEQ ID NO: 280623 - DNA, 87 bp, Homo sapiens; identical to SEQ ID NO: 229034
  chr2:217499272-217499359
  hyper

SEQ ID NO: 280624 - DNA, 174 bp, Homo sapiens
  chr2:217556788-217556962
  hyper
actttttggggacccgcccagtggttgtccggctaaaacgccctttccaggagcgcccactcccatcccatctgttcgggaagaagatgtcggcaccagcagcggtggagcgccgccaacccgcaacagcagccggccgggcacctgccttcggcggggtggagtcggagagga

SEQ ID NO: 280625 - DNA, 239 bp, Homo sapiens; identical to SEQ ID NO: 198687
  chr2:217557011-217557250
  hyper

SEQ ID NO: 280626 - DNA, 468 bp, Homo sapiens
  chr2:217557321-217557789
  hyper
tgttttccttctccgctaggcttttccaaatccacatcccccaagatgaaggcgggcaggaccgcctttgaaaagtggatcttaataaaaataatctcacaagccggtctctggggttcccagagcctgcacatcctccccttttcctctttttgcaggctgcaacctgcaaaaagatcgactttttgcaggtttggagatcgactacctcttgcaaagctagaggggctggcccctgcgccactcaaaccctgcagggtttgcggggactgaggctgaacacaggaagctctccggcctcctggcaagcgcggacgcactcctctcctgcactatagtgactgaaatttgcacttcagaaaactcatgttagggtgctcgtgagtaacggaaagggacagggagggagaaggggattgcccccgtaactaaactgtctccgtaactaaactacgccaaataaacatt

SEQ ID NO: 280627 - DNA, 104 bp, Homo sapiens; identical to SEQ ID NO: 229036
  chr2:217558008-217558112
  hyper

SEQ ID NO: 280628 - DNA, 52 bp, Homo sapiens; identical to SEQ ID NO: 198688
  chr2:217558852-217558904
  hyper

SEQ ID NO: 280629 - DNA, 410 bp, Homo sapiens
  chr2:217559556-217559966
  hyper
aaaggggccaagagggcccccggagatttttttgtttttgtttttgttttaaaatttctggcaggtagagcaggtgccctcccccagacacttgcaaaaatgtagagagaggtggagggctggggtgcctgcgagcaggtcccagttgcaagaattaaagccttgcaacaggttgggggaagcagggcagcgccaggtgcacgcagtgagcggaggccggagaaaccctcaagcctgagcgggtcagaattataggggaaaaaaagccacaaaattgttcacccccaagcaaccaccgaaataatgagatcggatgcagtggagatggcgttgggggtgggagagaaaaatggatttatctttaaaatttttgcttaaaatctaaaatacaccccgctttctaaccctca

SEQ ID NO: 280630 - DNA, 241 bp, Homo sapiens; identical to SEQ ID NO: 229039
  chr2:218767428-218767669
  hyper

SEQ ID NO: 280631 - DNA, 334 bp, Homo sapiens; identical to SEQ ID NO: 229040
  chr2:218899131-218899465
  hyper

SEQ ID NO: 280632 - DNA, 63 bp, Homo sapiens; identical to SEQ ID NO: 229041
  chr2:219157359-219157422
  hyper

SEQ ID NO: 280633 - DNA, 324 bp, Homo sapiens
  chr2:219232221-219232545
  hyper
cgaagttcctggaccggaaggtgaggggaggctccaccagcctggggttcccattcccccatgggccttaaattcattactgatctctgcacctgattgaaatgcacacccgtaggggctagaaggctccagcgccccttagctctccttggagcgagcggctgggggctcctggggcgcgggggtcccgtccggctgaggctcgggctctgtcccctgccaggaggagctccggctcggccacgccagctatctgcggcagcaccccgaagcccacgcgctcatctccgacttcctgctcttcctgctgctgcgccagccgga

SEQ ID NO: 280634 - DNA, 31 bp, Homo sapiens; identical to SEQ ID NO: 198690
  chr2:219232859-219232890
  hyper

SEQ ID NO: 280635 - DNA, 40 bp, Homo sapiens; identical to SEQ ID NO: 229043
  chr2:219261657-219261697
  hyper

SEQ ID NO: 280636 - DNA, 241 bp, Homo sapiens; identical to SEQ ID NO: 221992
  chr2:219262922-219263163
  hyper

SEQ ID NO: 280637 - DNA, 989 bp, Homo sapiens
  chr2:219263453-219264442
  hyper
gaggggtgtttgtcgggcttggcattattaatttttaaatggtgaacttacaaaatagtaacgacgagtgaaaagaacttcataaacgaggaaaaagaccaacccgcagacccacggcgcgcaccacggaggggcttgcagcgagaagacagggacctccgttcccaagtgcccagcactgcgccacaggccgggtggaacgggccttgagggcctctggtttgaggtcccccacggtcgggctttgggcccaccgcgtgcggcgccgtgctgggctcctaggatcggcagcgagtccagtgactcccaccgcacccccagtaatcacagggcggccgtcgaccgcgggcaggggagggggtctgggaaggcccctggagaaggtggcatttcctcgaggtcggtggaatttggctacgcgaaaggaacagcgcgtacgaaaacttcaggcgggaacgcgcggtggcccgtgcgcggcgggtagacgtgcggggccccgggtggggccgtggggagaggtcggcagggggctttcccagggcagagagttagaatttcacgtcctacagaccgggggcacctcgccctggggctgcggggggcggcgaccgtcccattcaagagcgtgattctgaggtttgcacagctgtttcgggccagcagagccttcgctggctcttgacgtccttgcgaggtgatctctgcgaccaccagacaggagagaagacccattttacagatgaggtagtgctatctccaagtcctcaacgaggaaaccgagaagcctctagtcccgggtcttcagaaaacgcagaggtggagccgcgccgcactcgggcactccccggcgtgggcgctcccggcgggcgggccttggccgagggcgctcggcggcctggaacggtgagccgggtgccgggcctgccacgcagccgcagagactcagccccgccggcgggcggcaggaagggaggcgacgccccctggag

SEQ ID NO: 280638 - DNA, 222 bp, Homo sapiens; identical to SEQ ID NO: 229045
  chr2:219523966-219524188
  hyper

SEQ ID NO: 280639 - DNA, 432 bp, Homo sapiens
  chr2:219723487-219723919
  hyper
tgcccactgccagccgaatggcatgatgaatggagctgtccctcttccccacggagcctttgatctccccctcgtggggagggggccaggggcatcaaagacatttttgtggcattagaaaatctgataaacgccatctcacctgcagctggctctcccaccccttctacccgggccaggttgggggaggaactcgaggcagggactcttggacacgcgaggccgggctaaagcgaattctgacccctcgatctcttgaaagtctgcgacctccattctcccgctcgcttacaagtgccagcgcttgcgcgcacgccctggagcggctactcttgccctctcatttcccccacctccccgccctagaacgcgggcttgagaggtgggatggctgggggagcgagagcggaggcccagggcttcctcccttct

SEQ ID NO: 280640 - DNA, 551 bp, Homo sapiens
  chr2:219724171-219724722
  hyper
ccgtcccccattcctcagctcctctttctcccccctcacccctctctactcttcttcccagcccttccttgcccccgactccaggcggccgcgagcggcggggggctccaagtccgagagaggcgaggcgagggggcgaagcgggcgggtcccacagcccgaagcgcgctggggccccgccccggcaccccgctcccgccctccgctgcgctccgcgccagccgccccggggcgcacggctcgctcccgagagtcccgctgcctgactgtcgcaactgccacctccctccggccccctgccccccgcccccgcctcggccccgctcccctcccacctccgcccccggctctgatttcttctcccgagcgagctccgcaggagacacaggcgctggctgccccgtccgctctccgcctccgccgcgccctcctcgcccgggatgggcccccccgccgccgccggatccctcgcctcccggccgccgccgttgcgctcgccgcgctcgcactgaagcccgggccctcgcgcgccgcggttcgccccgcagcct

SEQ ID NO: 280641 - DNA, 38 bp, Homo sapiens; identical to SEQ ID NO: 229048
  chr2:219725693-219725731
  hyper

SEQ ID NO: 280642 - DNA, 143 bp, Homo sapiens; identical to SEQ ID NO: 198695
  chr2:219735642-219735785
  hyper

SEQ ID NO: 280643 - DNA, 85 bp, Homo sapiens; identical to SEQ ID NO: 229052
  chr2:219744551-219744636
  hyper

SEQ ID NO: 280644 - DNA, 427 bp, Homo sapiens
  chr2:219748349-219748776
  hyper
tggcggcatgcagccgcgaactaatccccgcgggccgcggcagacggctcccggccccagccgcgccgctctcagagggcaaccccctccctgccccgctctcccgccccctcccgccccaccgccgcccgggcccctccagccgtccagaagcggctgcccgggacccccgggtcctgcccagctcgggccacacgctcctccctgtcccgccgcctgcgcgccgacacgaacggacgggcctctgcaccattcatgccccggctgggccgggccggcgctcaccgccgccgcgggcccgctcctaccctcgggtttctaggtcgtccgcgctgcccgcagccgcgtttcccttcggggccctcgggtaccccatgaggactccgtagccctggctttggtttctgcccgccggggactgggatag

SEQ ID NO: 280645 - DNA, 614 bp, Homo sapiens; identical to SEQ ID NO: 198696
  chr2:219757351-219757965
  hyper

SEQ ID NO: 280646 - DNA, 85 bp, Homo sapiens; identical to SEQ ID NO: 198697
  chr2:219758014-219758099
  hyper

SEQ ID NO: 280647 - DNA, 255 bp, Homo sapiens; identical to SEQ ID NO: 229056
  chr2:219761613-219761868
  hyper

SEQ ID NO: 280648 - DNA, 232 bp, Homo sapiens; identical to SEQ ID NO: 229057
  chr2:219762326-219762558
  hyper

SEQ ID NO: 280649 - DNA, 183 bp, Homo sapiens; identical to SEQ ID NO: 229058
  chr2:219763162-219763345
  hyper

SEQ ID NO: 280650 - DNA, 55 bp, Homo sapiens
  chr2:219773632-219773687
  hyper
ggacttaaaggagccggtggccttaagagtccagtcgatgctgccacgtgatggg

SEQ ID NO: 280651 - DNA, 150 bp, Homo sapiens
  chr2:219773917-219774067
  hyper
ggtcgctgtcctttctgggaaccaagcaggggtcgcaggagggcggggatgggtcagcggggatctctgagtggggttcggctgagagaggccacagtttcatctttgggaagctaccctgggccggccacgcgccgtgagccggactgg

SEQ ID NO: 280652 - DNA, 31 bp, Homo sapiens; identical to SEQ ID NO: 229060
  chr2:219824037-219824068
  hyper

SEQ ID NO: 280653 - DNA, 334 bp, Homo sapiens
  chr2:219824452-219824786
  hyper
ccccccaccgccgggtcccccggggctgcagtagcagcggcgccgcccgcggctcccgctggggcctgggcgccggccccgctctgcaggatgggcacagtgctgtctctttcgcctgcctcctcggccaagggccggaggcccggcgggctgcccgaggagaagaagaaggcgccgcccgcgggggacgaggcgctggggggctacggggcgccgccagtgggcaagggcggcaaaggcgagagccgactcaagcggccgtccgtgctcatctcggcgctcacctggaagcgcctggtggccgcgtccgccaagaagaagaaaggcagcaaga

SEQ ID NO: 280654 - DNA, 42 bp, Homo sapiens
  chr2:219825939-219825981
  hyper
cccttcagcccattccccctcggttttatccatttccttgcc

SEQ ID NO: 280655 - DNA, 166 bp, Homo sapiens; identical to SEQ ID NO: 198699
  chr2:219827883-219828049
  hyper

SEQ ID NO: 280656 - DNA, 68 bp, Homo sapiens; identical to SEQ ID NO: 198700
  chr2:219828117-219828185
  hyper

SEQ ID NO: 280657 - DNA, 846 bp, Homo sapiens
  chr2:219845551-219846397
  hyper
gggtgaagggcaaccggaagggagtgaggtgagctggggtcgcctggcagggtgggtatgaggcaaggcggctccctcgggctgagcccaccatccaggcctctcgctgcctgcgggcggcgcccaagcccgcgccaccctccttctcgggacgttttccttggcagttctctgctcaggcccgagatgagcctctccctgctttcccctaaccacgggttctggcgcagcaaagaacagagagagaggaggcagcggagagctcaggagctttaatggggctgaaagggtcagaaacacaccgggagtttctcctgggagtgtggggacaggaggaagggggccgtgtgtcacggaggacggtggctttcaccaaacctgctcaggtcccaggaaggaggaccgtgagaggcctccacgtgctgaggtgggagcagttccttggggaagagcaaaagtgggaaaagatttggcactcgttaaagagtagtgatattgaatggggcttctaggagccaggcggaaatgcactggagtggtggggagacaagagaggtccacaaatcccctccgggacctggagacctagaagaaaaaaagtgaaagagggcgcacatcgccctcctcaggggactgcggggtgggacaggagcaaatctagtaccagacaaggattgagggagcttcggtcccgtccccctgctaagtgcggcaggtggagtaaactctggattagaggacggttgacggaggctcccgggccctccccgggatgccgatgggatcgggcgagactctaggcgtgcgggcgaggccgcaggcacccgaccgccccgtctagtggta

SEQ ID NO: 280658 - DNA, 218 bp, Homo sapiens
  chr2:219847616-219847834
  hyper
cgaacagtggccccctatacgtgacaggaggggcaagctctcatgggctcactatcctagccaccttcgggtgcgcaggcctctgcgctggccctgagaatttggcctcttattttcggaacaggcgggattccctgcctacgaaggtgccatagttctcggggcctgatgaacaactctgaggaggggaacggaccgagcagctgttgtgcttggct

SEQ ID NO: 280659 - DNA, 114 bp, Homo sapiens; identical to SEQ ID NO: 229069
  chr2:219856513-219856627
  hyper

SEQ ID NO: 280660 - DNA, 61 bp, Homo sapiens; identical to SEQ ID NO: 198703
  chr2:219857662-219857723
  hyper

SEQ ID NO: 280661 - DNA, 247 bp, Homo sapiens; identical to SEQ ID NO: 198704
  chr2:219858468-219858715
  hyper

SEQ ID NO: 280662 - DNA, 175 bp, Homo sapiens; identical to SEQ ID NO: 198705
  chr2:219858751-219858926
  hyper

SEQ ID NO: 280663 - DNA, 969 bp, Homo sapiens
  chr2:219866613-219867582
  hyper
agccaccctccgcccggctttcctggcccctccgcccggcccagcctagcttggcttcgtccccagcccacgccttggagcttgtcccggagcccgggctccgtgtgctcttatactgcctgttcagtccccgcccccagacacacacactcacacctgtccaggcgcccgtttgctcggggcaaatattgactcatggaggcggagcgctcccccctcccccgcccgggctctgagaccggagcttctccgaggccttggtggcgggggcggaggggagggtgctggggaccctgggcgcctctggaacaacaccagatgtcacttttccacccacctgcctctgggagggaggagccgagaagcagaggacagaagctcccgggcgggggttaggaggaaccgagaggtgggtatccatcctcgtctgaggactgattcacagtgggagtcgcttagcagggtctgtggcccgaaatccagtggtgacctcgacccgccccagcctagttcctggccctccgcggcgtgcctcagttcttcctccccagcctcttgggcactcggagctcggcaaatgctaaggggctggccctgggggtgctaagcctccgagcaggcgcggcgcggaaaggtgaggggtggccgccctgcccagtggacacctgcttcgctggccaggcctggcactcagttactgtgcaccaaggtgcgctggggcaaaggccagccaggccccgtccggagcgccctccactggccagacccggtccagcggccggcagctagcggccaggtctcagtccagctgcagtgtgggcggagaggtgcatcctcccgggccctaagttcccgccgcgcctctgcagtccgcccgggctgctccctgccatccttccctctcagagctcgcgcgcgcgttccccctcgtcggggaaataaagtcaaggtagatacagaaaaaagact

SEQ ID NO: 280664 - DNA, 198 bp, Homo sapiens; identical to SEQ ID NO: 198707
  chr2:219906102-219906300
  hyper

SEQ ID NO: 280665 - DNA, 379 bp, Homo sapiens
  chr2:219922758-219923137
  hyper
cacctttcagcgcccggtccctctgtgcctccaaggcaggagggccagccagcggccgggagggaggagtggcagcagagccgactgcctgcggccggcctgcgaggcgtgcaaggcccgaggtgcccagtaggtgtcaccgcagcctcagggctgaggcctggggacgacaggctctggaggcgcggcaggtgcagagcgtctcggtagcttcagggggtgtgttggaggggaatcgccggcctgcctggatccctcgagcaccaccgaggattcccgccgggaccctcttataatcttaaaccggcccacaaccccgccagagatgacagggccagggaaccagaaaccggcggattagcgccagggccgcccaatg

SEQ ID NO: 280666 - DNA, 656 bp, Homo sapiens
  chr2:219923737-219924393
  hyper
ttccccgcctctctccctcactgccaccgccccctctcgggtccagagcccgggcgtgcgctgtcaatgattgcccagcccgtggcccggatccttatctgcattcctcggcgcccggcccggcccggccaccagccaaccttcggccccgacactggccggccagccccggcgccagggtgcatgctgagggccctgagtctagctgctcttcccaacggatctagaaagccaggggcctgctttcagggggaagcctcgggagaccccgaaggaagggggtgaaggtctctcccctcgcggacctggctgctgggaaggaatttgcgcctctaagcttgggtggagcgcgggtcctactccagcatgcagagactagcgtcagccctggtccctgcctccctcggcatctcagcccctcttttccactccttcccgtccccaccaccaagcccaggaatcccctaagctcagtcccagagcccgaaggccccaataacccacccttccaccgcagtagcacccctcagctctccggacagacacgtgggctcgctgggcaggttccttttcccacctccgcctcccgattcaactcttcctcgctgttcttaaccccagacccagccgggacgctgctcctggaaggggcagcc

SEQ ID NO: 280667 - DNA, 128 bp, Homo sapiens
  chr2:219924438-219924566
  hyper
cgcacccagagattctttgcctcaggggtgccgaaaagtttcaaaatgaaaggggcacagctgtgcagaaggttaggccgggagggactgcgtgggtcctggaggcgcaggaggcagccgggtagagg

SEQ ID NO: 280668 - DNA, 552 bp, Homo sapiens
  chr2:219924596-219925148
  hyper
ccagtactttggggcagaggagccgccgccaacctgctgggctgtggggcttggcagcggggagctcttctagcagtctcctccgggcttggggatgccgacactcctgcctggacccctggccagcccatcttgggcaggaggcagcggggcttggcgagaggggcaggtgccagggagcgtgccagccagtcgagaaaatgtgccagggggtgggtagggccgggcaggtggccgtgcttcggtggcggcgcgctggtagggcggatcgcgctcacctgggtcatgaggcggtcggcgcctgtgttctcctcgtccttgaagatgatgtctggattgtaattgggggtgagctccttgaagcgctcggagctgcgagcgatcttgccttcatagcgtccgctggcgcccagggtcttctcgggcacattggggctgaactgcttgtaggcgagcggcacgagtttgcgtggcggtcgccggcggctgcccaccacccgacccggcccgcagccccatgccgccggcaccaccagcagcagcaacaggacc

SEQ ID NO: 280669 - DNA, 215 bp, Homo sapiens; identical to SEQ ID NO: 198710
  chr2:219925613-219925828
  hyper

SEQ ID NO: 280670 - DNA, 36 bp, Homo sapiens; identical to SEQ ID NO: 229075
  chr2:220025698-220025734
  hyper

SEQ ID NO: 280671 - DNA, 138 bp, Homo sapiens; identical to SEQ ID NO: 229076
  chr2:220042082-220042220
  hyper

SEQ ID NO: 280672 - DNA, 53 bp, Homo sapiens; identical to SEQ ID NO: 229077
  chr2:220042710-220042763
  hyper

SEQ ID NO: 280673 - DNA, 112 bp, Homo sapiens; identical to SEQ ID NO: 229078
  chr2:220093844-220093956
  hyper

SEQ ID NO: 280674 - DNA, 327 bp, Homo sapiens; identical to SEQ ID NO: 229079
  chr2:220094205-220094532
  hyper

SEQ ID NO: 280675 - DNA, 34 bp, Homo sapiens; identical to SEQ ID NO: 198712
  chr2:220118641-220118675
  hyper

SEQ ID NO: 280676 - DNA, 101 bp, Homo sapiens; identical to SEQ ID NO: 229081
  chr2:220143826-220143927
  hyper

SEQ ID NO: 280677 - DNA, 134 bp, Homo sapiens; identical to SEQ ID NO: 198713
  chr2:220173086-220173220
  hyper

SEQ ID NO: 280678 - DNA, 63 bp, Homo sapiens; identical to SEQ ID NO: 107484
  chr2:220223794-220223857
  hyper

SEQ ID NO: 280679 - DNA, 399 bp, Homo sapiens
  chr2:220348585-220348984
  hyper
gtgaggcggagccccggggccggcaccgccgagcgggggcgcccctcgagatccccgtggccaggcttggggcccgtaggctacaggagtctccttccctgtctgccctcagcgaggcccagccatccagccctgcacggcccagcgcccccaaacccagtacccctaagtctgcagaaccttctgccaccacacctagtgatgctccgcagccccccgcaccccagcctgcccaagacaaggctccagagcccaggccagaaccagtccgagcctccaagcctgcaccacccccccaggccctgcaaaccctagcgctgcccctcacaccctatgctcagatcattcagtccctccagctgtcaggccacgcccagggcccctcgcagggccctgccg

SEQ ID NO: 280680 - DNA, 182 bp, Homo sapiens; identical to SEQ ID NO: 198715
  chr2:220361644-220361826
  hyper

SEQ ID NO: 280681 - DNA, 51 bp, Homo sapiens
  chr2:220362349-220362400
  hyper
ctgtatttagtgccgggtattagccggtgaggtgatgccctgcctcatctc

SEQ ID NO: 280682 - DNA, 109 bp, Homo sapiens
  chr2:220362444-220362553
  hyper
cgacgaagattcaaaagggacccgacaacactaaggcgcgcaaaggcaccaccgtgacgctgactgcggagatcctgggagagcctgcgcccgacgtaggctggaccaa

SEQ ID NO: 280683 - DNA, 261 bp, Homo sapiens; identical to SEQ ID NO: 198716
  chr2:220377745-220378006
  hyper

SEQ ID NO: 280684 - DNA, 111 bp, Homo sapiens; identical to SEQ ID NO: 198717
  chr2:220378982-220379093
  hyper

SEQ ID NO: 280685 - DNA, 199 bp, Homo sapiens; identical to SEQ ID NO: 198718
  chr2:220407985-220408184
  hyper

SEQ ID NO: 280686 - DNA, 56 bp, Homo sapiens; identical to SEQ ID NO: 198719
  chr2:220408723-220408779
  hyper

SEQ ID NO: 280687 - DNA, 56 bp, Homo sapiens; identical to SEQ ID NO: 198720
  chr2:220417712-220417768
  hyper

SEQ ID NO: 280688 - DNA, 80 bp, Homo sapiens; identical to SEQ ID NO: 198721
  chr2:220435309-220435389
  hyper

SEQ ID NO: 280689 - DNA, 110 bp, Homo sapiens; identical to SEQ ID NO: 198722
  chr2:220436254-220436364
  hyper

SEQ ID NO: 280690 - DNA, 441 bp, Homo sapiens; identical to SEQ ID NO: 229096
  chr2:220462404-220462845
  hyper

SEQ ID NO: 280691 - DNA, 237 bp, Homo sapiens
  chr2:220492470-220492707
  hyper
ccgcggggcggggcacgccgggcagggcgggggacccgggctgtcccgggcgtggctgggcctcggaggggcgcttgggccgggagcgtgcatccggctcccgggtggggggcgccagcgcaaggaacctgaccccgccctcctcccccagggctccccgctaggccccctcagtggcccctccttctcacctgggtctcgggtcccctagtgagcgagagcgtccccagccgccta

SEQ ID NO: 280692 - DNA, 273 bp, Homo sapiens; identical to SEQ ID NO: 229098
  chr2:222435182-222435455
  hyper

SEQ ID NO: 280693 - DNA, 138 bp, Homo sapiens; identical to SEQ ID NO: 198724
  chr2:222435635-222435773
  hyper

SEQ ID NO: 280694 - DNA, 406 bp, Homo sapiens; identical to SEQ ID NO: 198725
  chr2:222436961-222437367
  hyper

SEQ ID NO: 280695 - DNA, 827 bp, Homo sapiens; identical to SEQ ID NO: 198726
  chr2:222437421-222438248
  hyper

SEQ ID NO: 280696 - DNA, 377 bp, Homo sapiens
  chr2:222438480-222438857
  hyper
gcaatccgcaaccccgcagagaggtggtgcgtgcgtttgggcgagcttttcagccaccgccaagtctcgtgcactagggctactcctaccgtggggctgcggacagcgctcaagaggtcctggagtctgtcgtgactctcgcctgctggatttcaaaagatggaatcggaaagcgtttcaaggagaaactcctaacaaaccttccgggggttgcctgagtggctgctctcggaaaagcggatcctaaataaagcgggagggttatagggcgacgtcgaggagaggacaggtctcgagtcactgctacagtttcaggtcactgggctccgcagcagatcgtgttttctcccgtggctcgagagctgcgctggtttctc

SEQ ID NO: 280697 - DNA, 52 bp, Homo sapiens
  chr2:222438887-222438939
  hyper
agcaacttttacttttacacaagatgagcacgcgtgccgaggcgctgggcgg

SEQ ID NO: 280698 - DNA, 134 bp, Homo sapiens
  chr2:223104740-223104874
  hyper
gccgtctcacagcacgaggtcattagaaggaaaataagctcctgccaggttggggctaatcaaaatagcacaaataaaccctgacactcaacaactccccgagtgcctgctgccctgggaggagagtacagatt

SEQ ID NO: 280699 - DNA, 34 bp, Homo sapiens
  chr2:223104910-223104944
  hyper
agggcctggccgtgtgctccgttgctccggagtt

SEQ ID NO: 280700 - DNA, 426 bp, Homo sapiens
  chr2:223154494-223154920
  hyper
taaatagaacacggcgtggtgttctaatagaattcaagttctgatacttccaatattttttaaatggatgatatttctttgctgagttttgcaaggacttcagaaaatatgaagttttctctatagaatcgaaacgacattgaagtcaaattcgtgatcctaacaaatggacttggaaagtgggctggtctgtccacttgaataaaggatccgatgccataaacctatgatcttatacccaatgattttaatctatgggaaagttcgtcccccgccttcccctcctcccaaccttggaccaaaatggcccttcctgctcactaaccgggaaagaaacggcccttcgttttccttgatttcagcagtcccttaatgataagagtgctcttttcatgatttcactggaaataaaatactccaaatacc

SEQ ID NO: 280701 - DNA, 304 bp, Homo sapiens; identical to SEQ ID NO: 198729
  chr2:223166850-223167154
  hyper

SEQ ID NO: 280702 - DNA, 199 bp, Homo sapiens
  chr2:223168006-223168205
  hyper
gaagacagattcttcggtaactgctctttggtgtgtgtattcggggtgtgtgtattcggggtgtgtgtattcggggtgtgtgtatgtgtgtgtgtgaaagaatctggtgtgtgtgaaaggggtaagggttgaaggaccttatttagctgggggaccgtcttgtattgggagcgggcagcctaggccttggaaagaccag

SEQ ID NO: 280703 - DNA, 60 bp, Homo sapiens; identical to SEQ ID NO: 198731
  chr2:223170211-223170271
  hyper

SEQ ID NO: 280704 - DNA, 284 bp, Homo sapiens; identical to SEQ ID NO: 198732
  chr2:223171556-223171840
  hyper

SEQ ID NO: 280705 - DNA, 146 bp, Homo sapiens; identical to SEQ ID NO: 198733
  chr2:223177678-223177824
  hyper

SEQ ID NO: 280706 - DNA, 1262 bp, Homo sapiens
  chr2:223183522-223184784
  hyper
agtttccctctctggcccagcgcgaagggcgaggggcgacagaagcccgagggacagaaaaccgaggctcctcagtggccgagttgggagagagtgtgagtccaggagagcccgggggcagcagggagagggtgcagaagctcgagcgcaccgagccagaggccccctcttctcccgccacgcggggctggaggtgcaggcgccggttccgcggcgtggcccggctatgtgtcgctcctccgcgcgccgcccgccgcagcccgtgccctcgggccgccgccgccgccgctgccccccgtcgagcccgcggccgcaccctcgggccgatacttgagccagcagatgacccaggtgacaacgaccgagaagagtgccaggatgctggccaccgacaggcagatgggccccacgggcgagggcgagggcgacccggtggccggtgcctcgccagggggcgccccgcctccgggggttcccccgccgccgtagtggttgacgaagatgaggccggtgaagagcagcaccaccatggagaggaaggagaagaccacgcacacgcagccagcggtgagcgccgcgcgcttgcagttctggcagctgtcgtaggcgcccggggcgcgcaggccggggcgggctcgaggcccgggggccgcgtcctcggcaggcggcggcggcggcggctgcggtggggcgggggagggcggcggtggcggggccggggtgggcggcggggcagcagcgggcgcgggcaggcgcgcgggcagcggcgggaggcggtcctggggcagcgggtcgtgcgctgcgcgcaaagccagcgggaaggcctcggctagcttggtgttgttgggcaggccgtgcacgcggctgtcgggcagcggcgtgcggtggcggcacaccgggcacgcgatggcgccgggcgggcagagccagggcggcgggcgcggcgggcgctcaggcgcggcggcagcggcggcggcggcggcggcgcggagctgcagctggctcaggcactcctggcagaaggtgtgcaagcacgccagcagcttgggcgcgcgccggtccgcgtcgaagtagttgtagcagattttgcactcgtagtcctcaagcggagggaggccggagaccgtctccgctgcgtcccgggctcctgcgtctccgcagtccggggctcccttcgcggcgaccccagctccctcccggctcccggggctgctgcttgggctctgctggctgccgccgctgtcgctcgccggcgctgccat

SEQ ID NO: 280707 - DNA, 95 bp, Homo sapiens
  chr2:223185035-223185130
  hyper
tcggccttctcaacgcagctttcccagcagcttaggatatcggtttttgttggacttgaaattgggagttgagggcggcctggaggcgctcggga

SEQ ID NO: 280708 - DNA, 1345 bp, Homo sapiens; identical to SEQ ID NO: 229121
  chr2:223288951-223290296
  hyper

SEQ ID NO: 280709 - DNA, 361 bp, Homo sapiens; identical to SEQ ID NO: 229122
  chr2:223520612-223520973
  hyper

SEQ ID NO: 280710 - DNA, 79 bp, Homo sapiens; identical to SEQ ID NO: 198734
  chr2:223536121-223536200
  hyper

SEQ ID NO: 280711 - DNA, 106 bp, Homo sapiens
  chr2:223536673-223536779
  hyper
gcatagaaccttccaaccctcgttcccctgtcggccagagcaggcaggtcaaagagggcatttggagctaacgtggactctggtttcctcacgagaacctcatcgc

SEQ ID NO: 280712 - DNA, 136 bp, Homo sapiens; identical to SEQ ID NO: 198736
  chr2:223725610-223725746
  hyper

SEQ ID NO: 280713 - DNA, 171 bp, Homo sapiens; identical to SEQ ID NO: 198737
  chr2:224702620-224702791
  hyper

SEQ ID NO: 280714 - DNA, 383 bp, Homo sapiens; identical to SEQ ID NO: 222018
  chr2:224808915-224809298
  hyper

SEQ ID NO: 280715 - DNA, 244 bp, Homo sapiens; identical to SEQ ID NO: 229126
  chr2:224821706-224821950
  hyper

SEQ ID NO: 280716 - DNA, 53 bp, Homo sapiens
  chr2:224903207-224903260
  hyper
tgcagtcactcatccgcctcgcaactcccgtttctacagatgatgaaaatagc

SEQ ID NO: 280717 - DNA, 250 bp, Homo sapiens
  chr2:224903440-224903690
  hyper
ctcaggttcagggtcagggccggctcggatggccgggcaggagccacgccggccccggtgctcccagctgcgggtatcactggacgccaccccggggcggccccgccttgccctgcccgggtcccgctcggggctcccggcgggcgggaccgggatgcccggcgagcacccagccccggccaaggcggcccgcgggaggctgagaaagttctctgctccccgacgtcggcgccccagggtcccgctggcc

SEQ ID NO: 280718 - DNA, 353 bp, Homo sapiens
  chr2:224903755-224904108
  hyper
cgtcccccgccgagggcagcgccggccgcgcccgggactcaccgcgcagcctgtactcaccgcgctcgctggatccccagggggcggccgcggagggcggtgcggccgcaaccggagcgggagcctggtctcggcggcgcggggagtcggaggacgcagccaagcggcggcggcgaggagggtcacagccggaaagaggcagcggtggcgcctgcagacgccgcgcagcccgggcagccccacagcgcaagctggctgccgcggcggcgggggctttatcggcggcgccgcgcgggcccccgccccttcctgccgcccccgcccccggcccgccttgccccgccttcccgccg

SEQ ID NO: 280719 - DNA, 404 bp, Homo sapiens
  chr2:224904237-224904641
  hyper
ggggagacgcgcagaccccgaggtgcggcgccagcccgggcccagctgcacgtgggtctcccggatgggggtgtgtgaggtggcggggggaataccagggctcgtaccgcgtccctgagacgcagggcatgtcgtcttggctgccccctggaagagacagagggcgccctgagacagcgctcagtcctccgggtgatggggaaacggtgccaggacgcggccgggaaggggcagataacccctcgaggcgttttgcagggtgtcctagagctgacttctccctgcctaggggacagaggaacggcggcaagtcgccttaggcaaatacagacgaggggaaccagaaaactggattcccggctatggtgatagcatgaggtacccgcagcgtcctgggaacccag

SEQ ID NO: 280720 - DNA, 53 bp, Homo sapiens; identical to SEQ ID NO: 229129
  chr2:225450598-225450651
  hyper

SEQ ID NO: 280721 - DNA, 236 bp, Homo sapiens; identical to SEQ ID NO: 198740
  chr2:225906168-225906404
  hyper

SEQ ID NO: 280722 - DNA, 152 bp, Homo sapiens; identical to SEQ ID NO: 229131
  chr2:226895456-226895608
  hyper

SEQ ID NO: 280723 - DNA, 228 bp, Homo sapiens; identical to SEQ ID NO: 229133
  chr2:227700355-227700583
  hyper

SEQ ID NO: 280724 - DNA, 573 bp, Homo sapiens
  chr2:228028700-228029273
  hyper
gccccacctatgggcgccttacctgtggggacgcccgcagcgccaggagctgccgccttgccaccccacgggacgcgcacctccagccccaatccacccgcgccccgctgcctcttcgcggcgctctcgcagccaagcccggcggccgcaagttggaggcgggctggaggcggggaacgcggaccgccgcgggcgcggggaacaagcggggcctcccgagtgcagacgcccggcgcgcctcccgcttaatctgggcagggccgctggccactccctccaccctgcgcagccacctccccaccgcgcagccacctccccaccgcacacccccaaacgccccacctccgaccgcaccccacttccccgcctgggcccccggaccttgggagcatcacctccttaaccccttaccctggatccgcgcccacctgcccctcaggcgcccagccctttctcgcctcctgggcacgatgcccgggtagaagggacactgcctggtaagttgggagggagggggtatgagggcgggacctgagccacgtcttccctcccttgaagccacaaccaaaaagc

SEQ ID NO: 280725 - DNA, 122 bp, Homo sapiens
  chr2:228029622-228029744
  hyper
gtggagcggctgccgggctagtggcgaggctgagggcttcacgcaggtcccgggacaggcagcgagcggaagggagcaagcggggatgccccggaacaggtggaatgcgcggggctggggga

SEQ ID NO: 280726 - DNA, 98 bp, Homo sapiens
  chr2:229044816-229044914
  hyper
aaatggaaagacagcggtggtcctttgaccctgttccgctggggcagggatcgggagggtggggattgagacttcacttaagagctgcttcaaggagt

SEQ ID NO: 280727 - DNA, 163 bp, Homo sapiens; identical to SEQ ID NO: 198741
  chr2:229045944-229046107
  hyper

SEQ ID NO: 280728 - DNA, 315 bp, Homo sapiens
  chr2:230135850-230136165
  hyper
gtcggtgtccgcgggatgtgcgtcctggcgctggccaccgccgccgggtgggcgtagggggctgcgagcaggaggaggcgcggcgctcagctgccggcaacttgtgggcacggccgcgcgccggctgtcctggcgcagctgcgagaggactgcgcagctccgcccgggcccggcgagcgcgcggcggcggcgggggcggccgctccctcctcccccgccgccgccgcccggacctgcgcgctctgagcatgcccggggcgggcgcccaggggccgcgcggggcgggagtgcagcgcggccgactctaaatcctag

SEQ ID NO: 280729 - DNA, 80 bp, Homo sapiens
  chr2:230579415-230579495
  hyper
gggttgcaggaagacgatgcgggaccccatcccccaggagtgggtcgaagtcacgggtgtgtccagaagcagccctggta

SEQ ID NO: 280730 - DNA, 91 bp, Homo sapiens; identical to SEQ ID NO: 229142
  chr2:230786754-230786845
  hyper

SEQ ID NO: 280731 - DNA, 357 bp, Homo sapiens; identical to SEQ ID NO: 198742
  chr2:230932490-230932847
  hyper

SEQ ID NO: 280732 - DNA, 146 bp, Homo sapiens
  chr2:230933064-230933210
  hyper
cccgcggcggccttggcactaccacctgccccggcacagtctcgccctccaccgcccgggcagcctttcccgagcctgccttgggctggggctgccccttcccgggggtccctgggggtgcagcggccatctgaaacctaggctcc

SEQ ID NO: 280733 - DNA, 37 bp, Homo sapiens; identical to SEQ ID NO: 198743
  chr2:231191894-231191931
  hyper

SEQ ID NO: 280734 - DNA, 237 bp, Homo sapiens; identical to SEQ ID NO: 198744
  chr2:231692871-231693108
  hyper

SEQ ID NO: 280735 - DNA, 458 bp, Homo sapiens; identical to SEQ ID NO: 198745
  chr2:231902081-231902539
  hyper

SEQ ID NO: 280736 - DNA, 163 bp, Homo sapiens; identical to SEQ ID NO: 198746
  chr2:231902830-231902993
  hyper

SEQ ID NO: 280737 - DNA, 153 bp, Homo sapiens; identical to SEQ ID NO: 229149
  chr2:231921281-231921434
  hyper

SEQ ID NO: 280738 - DNA, 239 bp, Homo sapiens; identical to SEQ ID NO: 229150
  chr2:232063175-232063414
  hyper

SEQ ID NO: 280739 - DNA, 172 bp, Homo sapiens
  chr2:232260770-232260942
  hyper
ctccccggccccgcggccctggacaccgctccaggaccctggcggctgggaccccaggtcttgccggcagctgggtcccctctcccttccagacccctgagggccccctgcgtccgggccactctcctcctctcggggcttccttccgcgggacctcggaccgccgcccgcc

SEQ ID NO: 280740 - DNA, 38 bp, Homo sapiens; identical to SEQ ID NO: 38715
  chr2:232260984-232261022
  hyper

SEQ ID NO: 280741 - DNA, 44 bp, Homo sapiens; identical to SEQ ID NO: 229152
  chr2:232329225-232329269
  hyper

SEQ ID NO: 280742 - DNA, 135 bp, Homo sapiens; identical to SEQ ID NO: 229153
  chr2:232379208-232379343
  hyper

SEQ ID NO: 280743 - DNA, 121 bp, Homo sapiens; identical to SEQ ID NO: 198749
  chr2:232478346-232478467
  hyper

SEQ ID NO: 280744 - DNA, 104 bp, Homo sapiens
  chr2:232479181-232479285
  hyper
cgagccgcctccccgcccccagcctcccctgccccggctgcccccgagtcctgtttcagggatcctagccctctctccagacgcgctgctctgtccactgtccc

SEQ ID NO: 280745 - DNA, 236 bp, Homo sapiens
  chr2:232479454-232479690
  hyper
cttcacgttttcaccaaggggcagatggggcagtaggggccctgggaggcctggtccaccaaggagggggaacccgcgcgcgcgcgcgcacgcacgtggcccggcgcgcccgggagacctccgtgtgatcaccgcgcgcagcagctcccgggcggaaacacctcccccctccacgggaaagtgggctcaaccgggggcggaaagcgacacggctgggggacgactacgtgctccct

SEQ ID NO: 280746 - DNA, 129 bp, Homo sapiens
  chr2:232527239-232527368
  hyper
ttccgcgtgatggacgcccggaagccggcacaacaaatgcccaagcgccagggcttcgctgtctgcaggtccttccgctgcccgcggagcgaagatggcgcctagagcttgcagcgttgcccaaatatg

SEQ ID NO: 280747 - DNA, 551 bp, Homo sapiens; identical to SEQ ID NO: 222027
  chr2:232545577-232546128
  hyper

SEQ ID NO: 280748 - DNA, 48 bp, Homo sapiens; identical to SEQ ID NO: 229157
  chr2:232571124-232571172
  hyper

SEQ ID NO: 280749 - DNA, 309 bp, Homo sapiens; identical to SEQ ID NO: 229158
  chr2:232572332-232572641
  hyper

SEQ ID NO: 280750 - DNA, 177 bp, Homo sapiens; identical to SEQ ID NO: 229159
  chr2:232573066-232573243
  hyper

SEQ ID NO: 280751 - DNA, 234 bp, Homo sapiens; identical to SEQ ID NO: 229160
  chr2:232646071-232646305
  hyper

SEQ ID NO: 280752 - DNA, 62 bp, Homo sapiens; identical to SEQ ID NO: 229161
  chr2:232651383-232651445
  hyper

SEQ ID NO: 280753 - DNA, 637 bp, Homo sapiens
  chr2:232790016-232790653
  hyper
aacttgagcaaaggcggctcgcgcgcctccgaaggccggctgggcggcgggcggtcccgggccgggctggggctgggcgtcgggtgggccgtactcaccgccgccagggggcgccgcactaacatcccaggccgctcatggagccgattcggtccagcttgaggccgaagcagcccttggacaagcccttcttgttggctcctttgtatttgcgcgcgttggggtgctcttgcagaaggcgagcccacgctgcccgcgacttggtgtccacgcgcaggtcccggagcagtcgcgaccggtcgcccttgagattggcgcccccgcccccgggagccttgtcgcccttcttctgaccgccgcccgcagcctgcggctcggccagctcctctgccggcggggttcgcgggacctgtccgaggaaagagcgggcaggtgaagggacacgcggctgcagcacgggggactctgatgctccagccccacgcgcccgccggcgcggggtgtccctcccaagcccagagccgcccccaccgatgccggccagcttggccccgcatccacctgccacgcggccgccttcgccgctccctccggaagccccctgccctccctttgctgctcgccgggcaggccacac

SEQ ID NO: 280754 - DNA, 263 bp, Homo sapiens
  chr2:232790784-232791047
  hyper
tctcctgggtcctgcgcgccgcattctccaagcccccagcctcccacgcctctcccaggctcggcgtccccacgacagcacccaccttcggcggcgccccgggcttggcttcggagggccggagggagagcagcgtgagcagcagggcgcaggccagcagctgggagagatgcatggtgccgctggggtcgaggggcgcacacgggcggcagcgagggcgcgcaggtcggcgggcagaccagcagggggatgcggagcaggct

SEQ ID NO: 280755 - DNA, 390 bp, Homo sapiens
  chr2:232791140-232791530
  hyper
acctgccgctgatgtcatcctcccgcccaccgggccgcccgggccaatgacaccacgcacgcggccgcgccgagggccgggagggggccgcgggggctcccctcccttatcccaccccggagggatcccgcggctcggcgggctcgctccaggctgcacttggagctgcagagctgagcgcacaggggaactccatttgcagcgagcgcgcgccctggcctgccgagcatcggtgcgcctggtgccctgtgcacccactaggtcctcatcgcactcactctacctggaagggatacgtagccctctttgcaggtgcaaagacaggctcagaggaatgaagtcacttgcccaaagtcatacaggcataaagttggcgctgcccgaaatcca

SEQ ID NO: 280756 - DNA, 78 bp, Homo sapiens; identical to SEQ ID NO: 222030
  chr2:233251508-233251586
  hyper

SEQ ID NO: 280757 - DNA, 262 bp, Homo sapiens
  chr2:233283897-233284159
  hyper
cccaggtcccagcccccgcagtcctccatgacctctagcatgggccgaggactcagtagctctatctcgcgcatgtcgaggcacgaacggaaaaaggcgctcaccttgcactgggccgcgccgccgggcccatccctgggccgtgccagcaggcgcctcaggcgctcctctttctgctcgccgaaggccgcgatggtgccataggtgagcttttcgttgggggtggcatggcgcttcagtcagcagccgcagacgaaaaagt

SEQ ID NO: 280758 - DNA, 82 bp, Homo sapiens; identical to SEQ ID NO: 222033
  chr2:233284387-233284469
  hyper

SEQ ID NO: 280759 - DNA, 365 bp, Homo sapiens
  chr2:233284687-233285052
  hyper
accgcgaggagagacgcaggcctgggtgcagaggccccagctgccggcctcattcactgcggaaaccagggacgaggagagtctggcggggccaccatccccgcgtgcacagtggagtcttctcccctgtcctcctccctgcacacacgtgtcggatgctggattgggaggcctcttatgggaagggggaggcgctgggcacggggcctggcacgtagggggccttcattgcatctctcttcccttcgcctttcttgtccacgacctgtcctagccaaggccaagtggggtgggggaaggagcagaggctggagtgaggaggtgcggtcaggggcgcgtctatgcggcactttcagctctccgag

SEQ ID NO: 280760 - DNA, 238 bp, Homo sapiens
  chr2:233285131-233285369
  hyper
caaacccgctcgctggctccttctgctcggtggcccgacggcccacccgccccttcccaaggggaacgcactattgctccagggtcgcggatacacaacccaccccctgcacggcagtgatggggaacccgagacctgtccgtctctatcccctttccgctccactcctggcttcaacaggttctccctagaacccacacttgcgcgaagtttcacccacgctggggcgcgagctggc

SEQ ID NO: 280761 - DNA, 141 bp, Homo sapiens
  chr2:233285625-233285766
  hyper
ggtgtctccccgctcccgctgccttctctgccgccgccccagcccgccgcccgcctgcctgcctgcccgagggagaggacgcgccggtggctccaccctcctccgcccgtcccgcgctcccttccttcctcctgcgaccct

SEQ ID NO: 280762 - DNA, 235 bp, Homo sapiens
  chr2:233286008-233286243
  hyper
cacagccctggagcaccacccagggaggactcctcctaaggattgagagggcgctgacggagtgcctgggctgcccgcacagcgcctgcgcagagctcaccttcaccagggagcttcctttacctcctcggaacccctgtccgggatcagctctccccggggtgtctgggcttctggttgtctcgcccccttcccccagcctctgatccacggagagcaacgcagagccctgcca

SEQ ID NO: 280763 - DNA, 88 bp, Homo sapiens
  chr2:233367696-233367784
  hyper
agggaggtttatccgtaggagtcagcccagttgggtcaaactaaggacccagtgcagaccccgaggcccagagacacaggtgtgcgca

SEQ ID NO: 280764 - DNA, 84 bp, Homo sapiens; identical to SEQ ID NO: 198757
  chr2:233414992-233415076
  hyper

SEQ ID NO: 280765 - DNA, 339 bp, Homo sapiens
  chr2:233497841-233498180
  hyper
gcgggcgcctcccactccctgaccccggggagggtgggcaccactcccagacgcgggggacgcgtgggtgtcgctcgggggcgctcgcctcccccacccagcctgtcccgggccgcgagcgcttccagtcgggttacttctgggggacaagaaaggcaccgtctgaacggtcgagacgctttttcccgctacggttttccccggagctgacaggggcagcaaggtcggagttgatccgagggtccctgcctggtcccggggggacggtcagcctcccgcccggagccgcggggagaggaagcaggtcggggtctccgggacgcgcagacacccagacac

SEQ ID NO: 280766 - DNA, 33 bp, Homo sapiens; identical to SEQ ID NO: 198759
  chr2:233499312-233499345
  hyper

SEQ ID NO: 280767 - DNA, 99 bp, Homo sapiens; identical to SEQ ID NO: 229175
  chr2:233562009-233562108
  hyper

SEQ ID NO: 280768 - DNA, 99 bp, Homo sapiens; identical to SEQ ID NO: 229176
  chr2:233562462-233562561
  hyper

SEQ ID NO: 280769 - DNA, 234 bp, Homo sapiens; identical to SEQ ID NO: 198760
  chr2:233740542-233740776
  hyper

SEQ ID NO: 280770 - DNA, 189 bp, Homo sapiens; identical to SEQ ID NO: 198761
  chr2:233741586-233741775
  hyper

SEQ ID NO: 280771 - DNA, 321 bp, Homo sapiens; identical to SEQ ID NO: 229178
  chr2:234159999-234160320
  hyper

SEQ ID NO: 280772 - DNA, 366 bp, Homo sapiens
  chr2:234474813-234475179
  hyper
aggggagcggagggcggggaagactgccactaaaattatcaagcctaaaggccttccagtatgtatccactaatcccatcgttagccctgggggcctaggtgacttccccaaggtttcacatcgagtgtggcggagggtcacttggagatgagaaacgtaaagcgcctagcataggtaccaaatgacaggaagcgctgaaatgcaattatttttcttttcctcagaagaaaactaaaaaaacacaactcgagagtctagcctcgagctcgttgtctgcattcctgaattcccaactcctacggccggccgaggccctccaagccaccacaggcccaggggcgcaaaaaggcagaggtccccgtggc

SEQ ID NO: 280773 - DNA, 104 bp, Homo sapiens; identical to SEQ ID NO: 198763
  chr2:234475503-234475607
  hyper

SEQ ID NO: 280774 - DNA, 90 bp, Homo sapiens; identical to SEQ ID NO: 229180
  chr2:234763372-234763462
  hyper

SEQ ID NO: 280775 - DNA, 166 bp, Homo sapiens
  chr2:235404971-235405137
  hyper
ccgtgcagcggctgtaggacttccacagcggccgcagcttctcctggccgcccacgtcccagaagtggcagctgatgcccttggccgtgccgttgctcagcttgatcttctcggtgttgaagccgatggtgggcaccgtgttcacgaactcgttgaacttgagccg

SEQ ID NO: 280776 - DNA, 592 bp, Homo sapiens; identical to SEQ ID NO: 198764
  chr2:235860154-235860746
  hyper

SEQ ID NO: 280777 - DNA, 84 bp, Homo sapiens; identical to SEQ ID NO: 198765
  chr2:235860808-235860892
  hyper

SEQ ID NO: 280778 - DNA, 438 bp, Homo sapiens; identical to SEQ ID NO: 198766
  chr2:235860951-235861389
  hyper

SEQ ID NO: 280779 - DNA, 134 bp, Homo sapiens
  chr2:235861533-235861667
  hyper
tcagttgggaccccaaccctgggtcccgcggctcctagcccggggcctgcggtgtagacgggggttggggacaggcccagctggccctgaccgggtgtcgggcgcccagagatgccgcgcgggaggagccgcgg

SEQ ID NO: 280780 - DNA, 297 bp, Homo sapiens; identical to SEQ ID NO: 198767
  chr2:236402404-236402701
  hyper

SEQ ID NO: 280781 - DNA, 138 bp, Homo sapiens; identical to SEQ ID NO: 198768
  chr2:236403013-236403151
  hyper

SEQ ID NO: 280782 - DNA, 118 bp, Homo sapiens; identical to SEQ ID NO: 198769
  chr2:236403736-236403854
  hyper

SEQ ID NO: 280783 - DNA, 216 bp, Homo sapiens; identical to SEQ ID NO: 198770
  chr2:236403941-236404157
  hyper

SEQ ID NO: 280784 - DNA, 307 bp, Homo sapiens; identical to SEQ ID NO: 198771
  chr2:236578055-236578362
  hyper

SEQ ID NO: 280785 - DNA, 350 bp, Homo sapiens
  chr2:236578677-236579027
  hyper
cttggcccggcgccctcccggcccgcgggctcgctggatgcggcggggccccagcgcgcgggcgacatgtacttgttggacggcagtggcgagcccgcgtcgccacccgcggacgcgatgccgcgcgggacgccccccagaaagactgtctaccgcatctccgtgaccatggtcaggaaggagcagctggccgcgccgggctccggcggcccggacccacgcccggttcggcggccccggcccgcgcgctccccggacgcgcccgggaggcttgaggaggaggccgaggaggcggagggcgccgaggaaccggagggtccccggccgcgcgcttgggatttccgcacctt

SEQ ID NO: 280786 - DNA, 45 bp, Homo sapiens
  chr2:236579248-236579293
  hyper
tgggcggcggaaggcgccacagcagctccgggagcctggcctggg

SEQ ID NO: 280787 - DNA, 96 bp, Homo sapiens
  chr2:237068294-237068390
  hyper
cgggccctttaggacgaaggcggccacaccagagacgcaccggcatgacaaaggccgccagggacccagtggctgtgaaataaagagatgaaggct

SEQ ID NO: 280788 - DNA, 247 bp, Homo sapiens
  chr2:237074883-237075130
  hyper
gctgcccgcggcgccgctgctcggcggggtctcctccagcgcgtggcccgggtcttcctccttgtgagctgcctggccagtcagattgtcatccgagctgtagtccacatcgctctccagcgagaagctctcctccttgcccttcgggtcgtcttccacctttgactcgtctttcccttgccctcggacagccccgactgaaagcaaaaccaaacggcattttattacatttcgcacactggccttc

SEQ ID NO: 280789 - DNA, 240 bp, Homo sapiens
  chr2:237075185-237075425
  hyper
agcggattgtctttctatgacattaacacattgtgatttcctggcctttgaggggtagaggaggggtggggggagcgtgagaaagctcaaaggagaggaggcagtacaggcgacggccctttgcccagaaccatcactcaaagggccgccatgcctcccccgcaccctcccagcctcggcagcgtcaggagaagtagcaggaggcgcgaggcccaagagattgcccgctttgtccctggg

SEQ ID NO: 280790 - DNA, 371 bp, Homo sapiens; identical to SEQ ID NO: 198773
  chr2:237076187-237076558
  hyper

SEQ ID NO: 280791 - DNA, 176 bp, Homo sapiens
  chr2:237076815-237076991
  hyper
gccccggagtggagagggcgcccgggccccgagggctcgccggagcccccgtccgccgcttgcccgtcggagcccgcgcgcttcgcgggtttggccctcggccccggtaagctgccgtccgtccgtccgtcccgccgtccgtcgcctcccgcgggccgctggggagcgcgcgaagc

SEQ ID NO: 280792 - DNA, 238 bp, Homo sapiens
  chr2:237077608-237077846
  hyper
ttcccccatcccgggctgggccctcccgtgagcgatcccgtctctcatttttcatgacattcttaatcatcgcacctatttacacactttgccagcgcgcaccaaaataacaaccacgataattatgataataaagagagtcctttatctgctccatcctcggggaggaaggggggagttgctgtgcctccagattgtataacgtgagattatcctgatgaaagctttatgatgtttg

SEQ ID NO: 280793 - DNA, 53 bp, Homo sapiens; identical to SEQ ID NO: 107679
  chr2:237078746-237078799
  hyper

SEQ ID NO: 280794 - DNA, 209 bp, Homo sapiens
  chr2:237079125-237079334
  hyper
ttgccactgacatgccgggggaagctgttattcattttacctaggcaggtttgccatgcactttgctatttcgccgcaaaaatattgttctagggacttttgtcgcctgattaccctctgagaggcagggattcctttgattattttggtgattattctacatttaaagttcagcaagaagatttaggtccgtcgaattatagctgcac

SEQ ID NO: 280795 - DNA, 214 bp, Homo sapiens; identical to SEQ ID NO: 229195
  chr2:237079604-237079818
  hyper

SEQ ID NO: 280796 - DNA, 119 bp, Homo sapiens; identical to SEQ ID NO: 198775
  chr2:237080431-237080550
  hyper

SEQ ID NO: 280797 - DNA, 352 bp, Homo sapiens
  chr2:237087070-237087422
  hyper
ctccggcggttttttttttttttttttttttttgaaaggagcaaacatccccagctttaatgcggcccaattatctcgtttgcacgacttaaaatgtttctctttaactcatttcaatctagtaaatatgcttcagcaagtagctaatttctcagggatggcttcgcctcgccatttgcatataaagcgcgtcggggcccggccccttctccgagtgcgcgagtcccttcttccggtgcgcgggtggcaggcagccaggcctcctagtccagggaggtcgcctaggtttggcctagggaaggcggagtctggggtccgcgacagtgcctggggaccagggtggcagggaggg

SEQ ID NO: 280798 - DNA, 393 bp, Homo sapiens
  chr2:237087618-237088011
  hyper
ggaaatctcagggctcagtcgagcaatctcctggctttaaattccgaataaaagtctcaaatattcccgggtcatgggggcactgtctcattaaaaccactctcgtcctgaaactgcaatgcagacattaaagtgcagtatttttcaattagagctgacgaattcaatcaaaattccatagattaggatgaaatgaggcatgggtcatttacaggggaatttaattgccgagccattagacaaatagtatatttgccattcccgcgttatccatcattttcgacatcaataccggggccgcatctccccgtcccgcggccgcccggcgtcggctgtaaacactcccttccctgtatcttctgattatatctgatttcatttagggccatgggg

SEQ ID NO: 280799 - DNA, 237 bp, Homo sapiens
  chr2:237088239-237088476
  hyper
gaacccctcttgctgccagcgggtctggggagggtggggctgggctccgcaggctgtcggaaccccctcccacgccgcgcagccgcggggcgctcgtgtccctgaagcctgagctgggcgtggaggacaggccccgcgtgttcgcggatcgcgagtgggggccagccccgcacctcccgtcccggccgggcgctgcgggtagggggagcggagcggagggggcgcctcccacctttg

SEQ ID NO: 280800 - DNA, 97 bp, Homo sapiens; identical to SEQ ID NO: 198778
  chr2:237436060-237436157
  hyper

SEQ ID NO: 280801 - DNA, 421 bp, Homo sapiens; identical to SEQ ID NO: 222045
  chr2:237476438-237476859
  hyper

SEQ ID NO: 280802 - DNA, 51 bp, Homo sapiens; identical to SEQ ID NO: 229204
  chr2:237994047-237994098
  hyper

SEQ ID NO: 280803 - DNA, 59 bp, Homo sapiens; identical to SEQ ID NO: 229205
  chr2:238200162-238200221
  hyper

SEQ ID NO: 280804 - DNA, 151 bp, Homo sapiens; identical to SEQ ID NO: 198779
  chr2:238384223-238384374
  hyper

SEQ ID NO: 280805 - DNA, 37 bp, Homo sapiens; identical to SEQ ID NO: 198780
  chr2:238395041-238395078
  hyper

SEQ ID NO: 280806 - DNA, 274 bp, Homo sapiens; identical to SEQ ID NO: 198781
  chr2:238395455-238395729
  hyper

SEQ ID NO: 280807 - DNA, 193 bp, Homo sapiens
  chr2:238395961-238396154
  hyper
cattatccagccttgccccggcgccctgacctgacgccctggcctgacgccctgcttcgtcgcctcctttctctcccaggtgctggaccagggactgagcgtcccccggagagggtccggtgagtgcactgagaagagggaacagcggggccagggtggcgcccaggactcggggcttaggctttggggggtg

SEQ ID NO: 280808 - DNA, 31 bp, Homo sapiens; identical to SEQ ID NO: 198783
  chr2:238536853-238536884
  hyper

SEQ ID NO: 280809 - DNA, 317 bp, Homo sapiens; identical to SEQ ID NO: 229208
  chr2:238583489-238583806
  hyper

SEQ ID NO: 280810 - DNA, 176 bp, Homo sapiens; identical to SEQ ID NO: 222048
  chr2:238599864-238600040
  hyper

SEQ ID NO: 280811 - DNA, 244 bp, Homo sapiens; identical to SEQ ID NO: 222049
  chr2:238617174-238617418
  hyper

SEQ ID NO: 280812 - DNA, 210 bp, Homo sapiens; identical to SEQ ID NO: 198784
  chr2:238876150-238876360
  hyper

SEQ ID NO: 280813 - DNA, 38 bp, Homo sapiens; identical to SEQ ID NO: 229211
  chr2:239112200-239112238
  hyper

SEQ ID NO: 280814 - DNA, 1056 bp, Homo sapiens
  chr2:239148240-239149296
  hyper
gcgcgctcccggacccgcccgcccgccccgcagccccacggcgcctgcccggccgccgcacctcggcgcccgccagcagcagccgcagctcctgcaggctctcgttgatccgcgcgcgccgcttcttctccaccaggggcttccgggcctgcggggagcggggcactgaatcccagccccgcacggcctcccgcccgcttgctcgcccatggccccggcccgcaccttgcggtcccctcgcgtctcccagccgtcctcatcctcacggcccacacggtcccggccaggcgccgcgggtggcgccatgcccgctccgccggggacgcggcaggggctaggagcagcggggacggggagcggcggggaccggagtgccggcgccctccgctgccccgcggccgcccagcagcagcccagccgtccgcgctcctcgcggcttccggcccgccgcggtcccgccccttttatagccgcttatttgcatctcaatgcgccgattggccgcgcgggcccggggcggccgaccgcgaggcgcgctgcagccaatcggggcagcgcgctttgtccggcccagcggctctggcggtcgggcagctggctgagctaggcggggcccccagcccggccttccctagacccccgcgggggcggcaccggggcggcgaccccgggtagctgcggccctgcccgcgcttgtttctctccgtctgctgctctaggaccactgatctgccgcgcgtgcgagcaggcgtccacccgtccgtccgtccgtccgtccactcattcattcacccattaattcattcatttccctccttcgccgatggcgcctccagagttgagcgctggggccactggccccaggagatgcgtccctggtgtgcagagccacagtcaagtccgcggtctctggacctagaggggtttcaggtcccggctggggtggctgccaagccccggggaggcagggtccattgggcagcggtggcggggcggcccctgagtttcttccggactcgtccagacgccgggccggacccccgacgccgccctccg

SEQ ID NO: 280815 - DNA, 149 bp, Homo sapiens; identical to SEQ ID NO: 229214
  chr2:239228861-239229010
  hyper

SEQ ID NO: 280816 - DNA, 148 bp, Homo sapiens
  chr2:239755506-239755654
  hyper
gcttgcctgacagcccggctcaggcccgggcctaattgagcccgggtcacctgggaataggttcaaaggcatcaaagccgtaaaaaccacctccaggcccagagccagagcggcctggcgaacaaagagccccccaaccacttcaaac

SEQ ID NO: 280817 - DNA, 42 bp, Homo sapiens
  chr2:239756024-239756066
  hyper
ggggccggggctccccagcaagccagggtaagaaatggtccc

SEQ ID NO: 280818 - DNA, 33 bp, Homo sapiens; identical to SEQ ID NO: 107727
  chr2:239756230-239756263
  hyper

SEQ ID NO: 280819 - DNA, 117 bp, Homo sapiens
  chr2:239756648-239756765
  hyper
caactatttagcaacccagcccagctagagtttccaaaaaagttagaataacttcctctcccggagacctcggttttgcacaagccggccttgaaatcagagcctttccagcaactc

SEQ ID NO: 280820 - DNA, 245 bp, Homo sapiens; identical to SEQ ID NO: 107730
  chr2:239756815-239757060
  hyper

SEQ ID NO: 280821 - DNA, 240 bp, Homo sapiens; identical to SEQ ID NO: 38818
  chr2:240294231-240294471
  hyper

SEQ ID NO: 280822 - DNA, 142 bp, Homo sapiens; identical to SEQ ID NO: 198787
  chr2:240402418-240402560
  hyper

SEQ ID NO: 280823 - DNA, 150 bp, Homo sapiens; identical to SEQ ID NO: 229219
  chr2:241172438-241172588
  hyper

SEQ ID NO: 280824 - DNA, 264 bp, Homo sapiens
  chr2:241306313-241306577
  hyper
tgcatacatgcacacgcacatgcacacatgaatgcacgcacaaatgcacacacgcacatgcacacgtgaatacacacacgtgaacgcacacacgaatatacacatgcacatgcacacaatgtgaatgcacacacgaatacacacatgcacatgcaaatgcacacacacgaatgcacacacgcacatgcacatgcaaatgcacacacacgaaggcacacgcacatgcacacacgaatacacacatgtgaacgcacacgcgaatgc

SEQ ID NO: 280825 - DNA, 218 bp, Homo sapiens
  chr2:241374397-241374615
  hyper
ggagaggtgaggtcgagtttcttggcgagtttcctgcgtgcagcccccacaccacaaaagcccccggtgcgagccggagcccagcgcgagacggctggaagggcgcggggagggagccgctgcggggtgcaggcggggagaggggcggcggctcgaggcgcggccggcgggcggagggtacggaggcgccgggagagcgttctcggggcgcgctgcca

SEQ ID NO: 280826 - DNA, 331 bp, Homo sapiens; identical to SEQ ID NO: 198789
  chr2:241375298-241375629
  hyper

SEQ ID NO: 280827 - DNA, 416 bp, Homo sapiens
  chr2:241375891-241376307
  hyper
cggggccggctgtcggggcgctgtggggctcggcgtggccgggctttcggggcgccgctgacggtggccgcggaccccttctgctctgtacagacctctctgggaggcgtctccggtcctgcccggggattctcgtagggtctccagcaaaggcagcctaggtgggttttataagctgaccccctcggggggtagtgcggaggggtggggagggagctgggcacttatccgcgggcggaacgccgccgcctcgtagagattcctgtcgaagaacttgtacgcgccggcccccgcctggcgcttgggcagcctcgtgccgcgagtccagctgcaggtggtcggcgcgttggatcccgcccaggggccgtgtcatttctttgtaagaacagcggccctcttggcgccccctaagccct

SEQ ID NO: 280828 - DNA, 110 bp, Homo sapiens
  chr2:241393469-241393579
  hyper
gaaatggtggcgggggggcttcgggcagacggcaggggtgtggggaggggagggaagcacgatggggtgagtctgggggccgtggatgccgttgacgaggagctgagatg

SEQ ID NO: 280829 - DNA, 168 bp, Homo sapiens; identical to SEQ ID NO: 198792
  chr2:241499837-241500005
  hyper

SEQ ID NO: 280830 - DNA, 47 bp, Homo sapiens; identical to SEQ ID NO: 198793
  chr2:241760796-241760843
  hyper

SEQ ID NO: 280831 - DNA, 205 bp, Homo sapiens; identical to SEQ ID NO: 198794
  chr2:241771771-241771976
  hyper

SEQ ID NO: 280832 - DNA, 35 bp, Homo sapiens; identical to SEQ ID NO: 229227
  chr2:242041821-242041856
  hyper

SEQ ID NO: 280833 - DNA, 162 bp, Homo sapiens; identical to SEQ ID NO: 198795
  chr2:242088871-242089033
  hyper

SEQ ID NO: 280834 - DNA, 214 bp, Homo sapiens; identical to SEQ ID NO: 229229
  chr2:242089533-242089747
  hyper

SEQ ID NO: 280835 - DNA, 334 bp, Homo sapiens; identical to SEQ ID NO: 198796
  chr2:242157713-242158047
  hyper

SEQ ID NO: 280836 - DNA, 84 bp, Homo sapiens; identical to SEQ ID NO: 198797
  chr2:242212408-242212492
  hyper

SEQ ID NO: 280837 - DNA, 53 bp, Homo sapiens; identical to SEQ ID NO: 229232
  chr2:242254481-242254534
  hyper

SEQ ID NO: 280838 - DNA, 125 bp, Homo sapiens
  chr2:242269445-242269570
  hyper
aagagaagttagtattattcctaattagacggggagtaaagcctttaaagaggagcctctactttttacatatacacgagctagacatggacatcttaattaaatcttaccgagtccagcaatat

SEQ ID NO: 280839 - DNA, 181 bp, Homo sapiens; identical to SEQ ID NO: 198799
  chr2:242448319-242448500
  hyper

SEQ ID NO: 280840 - DNA, 247 bp, Homo sapiens; identical to SEQ ID NO: 198800
  chr2:242498019-242498266
  hyper

SEQ ID NO: 280841 - DNA, 235 bp, Homo sapiens
  chr2:242498800-242499035
  hyper
gcccggcgccccgcgcgccccgttccccgcgccgcctccctccacccggctgagcgcttgtgcccgcaggtgcggcgccccccacccgcgtcgccgccatggaggtgctgcggcgctcctcggtcttcgccgccgagatcatggacgcctttgaccgctcgcccacagacaaggagctggtggcccaggccaaggcgctgggccgggagtacgtgcacgcgcggctgctgcgcgc

SEQ ID NO: 280842 - DNA, 172 bp, Homo sapiens
  chr2:242549677-242549849
  hyper
agcctccgccggccccgccccggaagcgcagccccgcctcaggcgccgcatctccgccctctcttgcgcctgcgggaccgggagggccgcgctcgccccccagcgccagggtcacgccaccgcgccctgtttggggagcggcagaggagtcagggcggaggctgggcggcgc

SEQ ID NO: 280843 - DNA, 50 bp, Homo sapiens
  chr2:242549957-242550007
  hyper
agaccacagcgaccgcgcccctcggcccggaggccccgccctccccactc

SEQ ID NO: 280844 - DNA, 203 bp, Homo sapiens; identical to SEQ ID NO: 198802
  chr2:242575608-242575811
  hyper

SEQ ID NO: 280845 - DNA, 43 bp, Homo sapiens; identical to SEQ ID NO: 229239
  chr2:242576795-242576838
  hyper

SEQ ID NO: 280846 - DNA, 184 bp, Homo sapiens; identical to SEQ ID NO: 229240
  chr2:242626705-242626889
  hyper

SEQ ID NO: 280847 - DNA, 113 bp, Homo sapiens; identical to SEQ ID NO: 107783
  chr2:242640751-242640864
  hyper

SEQ ID NO: 280848 - DNA, 123 bp, Homo sapiens; identical to SEQ ID NO: 198803
  chr3:2139586-2139709
  hyper

SEQ ID NO: 280849 - DNA, 54 bp, Homo sapiens; identical to SEQ ID NO: 198804
  chr3:2141396-2141450
  hyper

SEQ ID NO: 280850 - DNA, 258 bp, Homo sapiens; identical to SEQ ID NO: 107795
  chr3:2141539-2141797
  hyper

SEQ ID NO: 280851 - DNA, 459 bp, Homo sapiens; identical to SEQ ID NO: 229244
  chr3:3168311-3168770
  hyper

SEQ ID NO: 280852 - DNA, 201 bp, Homo sapiens
  chr3:3221330-3221531
  hyper
atgttgtgcgcagcgtcctgctgatctccttcgccggccatgtctgtttacccgcaaaggaggctgggacagggcggtgccgaagactccgagggagggcccgtgtcgcgcggctgccgcgcaccggggccacagcgccccctggcggccccaggggagcagacggcggcgcgtacccaagcctgaaagtgatggcctagg

SEQ ID NO: 280853 - DNA, 46 bp, Homo sapiens; identical to SEQ ID NO: 107798
  chr3:3221564-3221610
  hyper

SEQ ID NO: 280854 - DNA, 83 bp, Homo sapiens; identical to SEQ ID NO: 198805
  chr3:3840347-3840430
  hyper

SEQ ID NO: 280855 - DNA, 71 bp, Homo sapiens
  chr3:3842608-3842679
  hyper
gggcggccgccgactcggcgcttccccgccgcccgcccagggagtccctgcctggcaagctggggctcggg

SEQ ID NO: 280856 - DNA, 47 bp, Homo sapiens
  chr3:3842731-3842778
  hyper
ccgcgcggaaacgcggaccaggcgcttcggcccggatgccggatcca

SEQ ID NO: 280857 - DNA, 339 bp, Homo sapiens; identical to SEQ ID NO: 229249
  chr3:4344935-4345274
  hyper

SEQ ID NO: 280858 - DNA, 67 bp, Homo sapiens; identical to SEQ ID NO: 229250
  chr3:4508823-4508890
  hyper

SEQ ID NO: 280859 - DNA, 313 bp, Homo sapiens; identical to SEQ ID NO: 229251
  chr3:4534777-4535090
  hyper

SEQ ID NO: 280860 - DNA, 293 bp, Homo sapiens; identical to SEQ ID NO: 229252
  chr3:4535655-4535948
  hyper

SEQ ID NO: 280861 - DNA, 340 bp, Homo sapiens
  chr3:4909948-4910288
  hyper
cagccctatgttcccgcggcctttgaggggaaagggccagggcctagacgttcccctcccgcgtggttttcccgtcagcagctttcgtctgcaagggaaagcggcggccccacccgcagacagctgcgaggcaccgcgccaagcgtatgcgcctgttcccaggcactccctcctccgccttcacccttttgccacctccgccctccacccagccccgccgtgcgcctgcgcgccccggcccgtgggccagcgggcagtctactcacgtgggcctccgcatggcccagcgccgccaagggcaaggcggagcctcgcgatcgccccgccccctccgtgcccc

SEQ ID NO: 280862 - DNA, 224 bp, Homo sapiens; identical to SEQ ID NO: 198807
  chr3:4910550-4910774
  hyper

SEQ ID NO: 280863 - DNA, 234 bp, Homo sapiens
  chr3:5018751-5018985
  hyper
aaccgtggttttgacgcagccgtgacagcccttcatccttattaaaatcacacaatgaagcaggtcgcccaagattgaaagcgcgtttccagggcggaccccggtccccgcctttggccagcaaaagtacattctggcagggagggatctctgagccccgaagtgaggtcatgccagttagcagttagaaaaggaggcatttctcacacttgctaaagagtttgacgcttgtga

SEQ ID NO: 280864 - DNA, 157 bp, Homo sapiens; identical to SEQ ID NO: 198809
  chr3:5019132-5019289
  hyper

SEQ ID NO: 280865 - DNA, 293 bp, Homo sapiens; identical to SEQ ID NO: 229257
  chr3:5028396-5028689
  hyper

SEQ ID NO: 280866 - DNA, 206 bp, Homo sapiens
  chr3:5137573-5137779
  hyper
gcgttttatttggacgctctgaatccgttttcccctagcacatcggcagagcagaccgcctgcctcggccttgtcaacgccaagggtgttttggacggatgtgtctatcctgaaagcttccagcctggctttgaacttgacttggcaacggatgaaaacctcggcgagcatccccagacaaccccgctgcgcgtcagagcgctgct

SEQ ID NO: 280867 - DNA, 140 bp, Homo sapiens; identical to SEQ ID NO: 229259
  chr3:5163864-5164004
  hyper

SEQ ID NO: 280868 - DNA, 190 bp, Homo sapiens
  chr3:6902672-6902862
  hyper
cagtggggagggctggcgctgggaagggtggggagagaaggagagccagcgagggagggagggagtgggaggaggaggagagggagccgaacgaccatttaaagcgatagcagtccctgccctctccccagtgctgggctgttggagagagcgagcagcaagccggtgagcgcgagcgcggcgcgccggc

SEQ ID NO: 280869 - DNA, 40 bp, Homo sapiens
  chr3:6902929-6902969
  hyper
cgcccctccccggattcccccaccctccgtgcctgcagga

SEQ ID NO: 280870 - DNA, 237 bp, Homo sapiens
  chr3:6903188-6903425
  hyper
cgccccgcactcaatccggatcgagggggacgtcaccctcggggggctgttccccgtgcacgccaagggtcccagcggagtgccctgcggcgacatcaagagggaaaacgggatccacaggctggaagcgatgctctacgccctggaccagatcaacagtgatcccaacctactgcccaacgtgacgctgggcgcgcggatcctggacacttgttccagggacacttacgcgctcga

SEQ ID NO: 280871 - DNA, 125 bp, Homo sapiens
  chr3:6903463-6903588
  hyper
acacctccgacgtgcgctgcaccaacggcgaaccgccggttttcgtcaagccggagaaagtagttggagtgattggggcttcggggagttcggtctccatcatggtagccaacatcctgaggctc

SEQ ID NO: 280872 - DNA, 235 bp, Homo sapiens; identical to SEQ ID NO: 198810
  chr3:6903907-6904142
  hyper

SEQ ID NO: 280873 - DNA, 89 bp, Homo sapiens; identical to SEQ ID NO: 107827
  chr3:6904532-6904621
  hyper

SEQ ID NO: 280874 - DNA, 185 bp, Homo sapiens; identical to SEQ ID NO: 229266
  chr3:9005099-9005284
  hyper

SEQ ID NO: 280875 - DNA, 67 bp, Homo sapiens; identical to SEQ ID NO: 229267
  chr3:9291320-9291387
  hyper

SEQ ID NO: 280876 - DNA, 212 bp, Homo sapiens; identical to SEQ ID NO: 229269
  chr3:9691035-9691247
  hyper

SEQ ID NO: 280877 - DNA, 251 bp, Homo sapiens
  chr3:9745823-9746074
  hyper
gcaggggctagacccccggggagaggcgaaattggctggaaaatcacagctgatgacagggcgagtagctggtgggatcgagaagcggggggtcttgggcagccccaccccgaaaaaagggctcagcctgcgggttcagggggtgggtcgcagatatccggtaggagctcggccccaggaggacaaagttctggggcgagccctctttcctgggcccttggagacagtgtgggtgcgttcgcgtccagtcc

SEQ ID NO: 280878 - DNA, 204 bp, Homo sapiens; identical to SEQ ID NO: 229271
  chr3:9773215-9773419
  hyper

SEQ ID NO: 280879 - DNA, 49 bp, Homo sapiens; identical to SEQ ID NO: 229272
  chr3:9791601-9791650
  hyper

SEQ ID NO: 280880 - DNA, 64 bp, Homo sapiens; identical to SEQ ID NO: 198812
  chr3:9811685-9811749
  hyper

SEQ ID NO: 280881 - DNA, 91 bp, Homo sapiens; identical to SEQ ID NO: 198813
  chr3:9812389-9812480
  hyper

SEQ ID NO: 280882 - DNA, 33 bp, Homo sapiens; identical to SEQ ID NO: 229275
  chr3:9834430-9834463
  hyper

SEQ ID NO: 280883 - DNA, 124 bp, Homo sapiens; identical to SEQ ID NO: 198814
  chr3:9851463-9851587
  hyper

SEQ ID NO: 280884 - DNA, 55 bp, Homo sapiens; identical to SEQ ID NO: 229277
  chr3:9885761-9885816
  hyper

SEQ ID NO: 280885 - DNA, 275 bp, Homo sapiens; identical to SEQ ID NO: 229279
  chr3:9932166-9932441
  hyper

SEQ ID NO: 280886 - DNA, 226 bp, Homo sapiens; identical to SEQ ID NO: 229281
  chr3:9975322-9975548
  hyper

SEQ ID NO: 280887 - DNA, 137 bp, Homo sapiens; identical to SEQ ID NO: 198815
  chr3:10052429-10052566
  hyper

SEQ ID NO: 280888 - DNA, 33 bp, Homo sapiens; identical to SEQ ID NO: 198816
  chr3:10052882-10052915
  hyper

SEQ ID NO: 280889 - DNA, 71 bp, Homo sapiens
  chr3:10067934-10068005
  hyper
tgcttctctctgacgtcgcctctgggccttctctcgcccctatgcccggctagcacagaactctgctgcag

SEQ ID NO: 280890 - DNA, 99 bp, Homo sapiens; identical to SEQ ID NO: 107873
  chr3:10068058-10068157
  hyper

SEQ ID NO: 280891 - DNA, 98 bp, Homo sapiens; identical to SEQ ID NO: 229287
  chr3:10157072-10157170
  hyper

SEQ ID NO: 280892 - DNA, 233 bp, Homo sapiens
  chr3:10183473-10183706
  hyper
cgcgtccgacccgcggatcccgcggcgtccggcccgggtggtctggatcgcggagggaatgccccggagggcggagaactgggacgaggccgaggtaggcgcggaggaggcaggcgtcgaagagtacggccctgaagaagacggcggggaggagtcgggcgccgaggagtccggcccggaagagtccggcccggaggaactgggcgccgaggaggagatggaggccgggcggc

SEQ ID NO: 280893 - DNA, 197 bp, Homo sapiens
  chr3:10183782-10183979
  hyper
gctgcccgtatggctcaacttcgacggcgagccgcagccctacccaacgctgccgcctggcacgggccgccgcatccacagctaccgaggtacgggcccggcgcttaggcccgacccagcagggacgatagcacggtctgaagcccctctaccgccccggggtccattttgcagacggggaactgaggccccttgag

SEQ ID NO: 280894 - DNA, 478 bp, Homo sapiens; identical to SEQ ID NO: 198817
  chr3:10206277-10206755
  hyper

SEQ ID NO: 280895 - DNA, 132 bp, Homo sapiens; identical to SEQ ID NO: 229290
  chr3:10289896-10290028
  hyper

SEQ ID NO: 280896 - DNA, 70 bp, Homo sapiens; identical to SEQ ID NO: 198818
  chr3:11035434-11035504
  hyper

SEQ ID NO: 280897 - DNA, 39 bp, Homo sapiens; identical to SEQ ID NO: 229294
  chr3:11313876-11313915
  hyper

SEQ ID NO: 280898 - DNA, 902 bp, Homo sapiens; identical to SEQ ID NO: 229295
  chr3:11684048-11684950
  hyper

SEQ ID NO: 280899 - DNA, 214 bp, Homo sapiens
  chr3:12045467-12045681
  hyper
gggatgactcctttcgttctcacctccgcatagggaggctgacacctcttatccttccaaaaggagtggggtcggtttccttcgcctccatttcagctgggacacggctctttttctctccaaccaaaaagatggtggggcctctggttccttttccttcccctggggagaaggcctggctcccacgccctccccgcatagtcacgctcaggtt

SEQ ID NO: 280900 - DNA, 441 bp, Homo sapiens; identical to SEQ ID NO: 198820
  chr3:12329041-12329482
  hyper

SEQ ID NO: 280901 - DNA, 205 bp, Homo sapiens; identical to SEQ ID NO: 198821
  chr3:12330025-12330230
  hyper

SEQ ID NO: 280902 - DNA, 101 bp, Homo sapiens; identical to SEQ ID NO: 2394
  chr3:12330283-12330384
  hyper

SEQ ID NO: 280903 - DNA, 191 bp, Homo sapiens
  chr3:12525530-12525721
  hyper
cttgcaagttccccgcatgctgcagcgtacacaggtgcgctgctgtgatcctctttctacattgagaaagatgagatcagtttcctcagggccatttaataaagtcctgtcggtcgcctcaaacatcccatccaccgagggccgaagattctaggtctctcccacctcccacgtgactatgtgacatttga

SEQ ID NO: 280904 - DNA, 50 bp, Homo sapiens; identical to SEQ ID NO: 229299
  chr3:12598378-12598428
  hyper

SEQ ID NO: 280905 - DNA, 48 bp, Homo sapiens; identical to SEQ ID NO: 198823
  chr3:12851562-12851610
  hyper

SEQ ID NO: 280906 - DNA, 223 bp, Homo sapiens
  chr3:12851692-12851915
  hyper
cctcttcgtcgagctcgctgaccacctactggaccggctgcccggcccgcgggtgcccaccagcccgactgccatccgcaccctgatccaatgtttgggcagcgtcggccgccaggccggccaccgcctcggtaagggggcagggggcggggcctgggctggcatggtgggcggagcttagggtgagccaatgactcggtaaaggggcggagcttgggccgca

SEQ ID NO: 280907 - DNA, 335 bp, Homo sapiens; identical to SEQ ID NO: 229301
  chr3:12883131-12883466
  hyper

SEQ ID NO: 280908 - DNA, 218 bp, Homo sapiens; identical to SEQ ID NO: 198825
  chr3:13008720-13008938
  hyper

SEQ ID NO: 280909 - DNA, 124 bp, Homo sapiens
  chr3:13009023-13009147
  hyper
gcgagccgccggatcccggggccgacacccggccacccggagacccgaccacccgccacgcgatcacgtcggggctcctggtccagcgtccgccggctcccgcggctccggccccaagtccgag

SEQ ID NO: 280910 - DNA, 96 bp, Homo sapiens
  chr3:13009357-13009453
  hyper
tggccacacggcgccgcggaagaagcacagggggcggggggtcaggggcggggcgtcaggggcggggctacgcgcaggggcggggccgagccgagg

SEQ ID NO: 280911 - DNA, 50 bp, Homo sapiens
  chr3:13009475-13009525
  hyper
cggagtcccagacactgcatccaggtcccagcgcgcgaagcctctgttct

SEQ ID NO: 280912 - DNA, 102 bp, Homo sapiens; identical to SEQ ID NO: 198826
  chr3:13323321-13323423
  hyper

SEQ ID NO: 280913 - DNA, 1317 bp, Homo sapiens; identical to SEQ ID NO: 229306
  chr3:13460980-13462297
  hyper

SEQ ID NO: 280914 - DNA, 198 bp, Homo sapiens; identical to SEQ ID NO: 229307
  chr3:13521510-13521708
  hyper

SEQ ID NO: 280915 - DNA, 156 bp, Homo sapiens; identical to SEQ ID NO: 198828
  chr3:13692028-13692184
  hyper

SEQ ID NO: 280916 - DNA, 113 bp, Homo sapiens; identical to SEQ ID NO: 229310
  chr3:13697028-13697141
  hyper

SEQ ID NO: 280917 - DNA, 201 bp, Homo sapiens; identical to SEQ ID NO: 198829
  chr3:13920779-13920980
  hyper

SEQ ID NO: 280918 - DNA, 578 bp, Homo sapiens
  chr3:13921903-13922481
  hyper
agactcggccgagaggcctagtgccttggtctgctgccctgctccctccagcccggaacagggagctggggctgacagggcacaccccagttccccaaccccagcttcaggggagggcgccccctttcgcggagcgacgggctgactggctcagtgtatttcttccctactcccacctattcgagagtggcggcagggggtgcccaggttgggcagcctcctctgggatcctgctgttagccgacagactgagtcgggctgaggcccagttgccccgcgcggaacagcagtggggcgcctgagccgcgggagcgtgaggggcgcagctggccgctcagagcgcgctcgcggcgtcaccaggcggacgcggcgggtggtgcacctcggcctcgctcccgggaacagaatgctttgagtgccctggccgacccgagggggctaacacccttctttggtgtacacctcatccagtgagctagggggagtctaaccgtccctggaaattgggtggtgccaagactccgagcggcagtttatgtttttgccagcgaatgtccatcctccgggtacctgttccc

SEQ ID NO: 280919 - DNA, 482 bp, Homo sapiens
  chr3:13936738-13937220
  hyper
tacccgacgcaacccgctgtgggccgaaacgggagctaagccagatggaacaaacgacccccaacccgagcccggcggggcgaacaggacatcccgcgttgttccacctgccaaagagggcgagcgcgcgggccgatcggagcagagcgagagggcggggccaagcggagcggatggggccaagtggacgagccgagggagtggggcgcagccgaaagtagccgagtgaagccgaacagagacgaggcgcgggtcgggtggtgccaagcggaaatgagtggggccgagcggggcagggtggagccgagcggagccgggtggagccgagcggagccgagcgagtgagaagccggaggccgagagggccgggccgacttgaagaggtggggattgctgagggctggtctgtcggctctggaaatcctgtcatactgtcacttttggattccgccgtttccgtcccaacggaaaactggggctcc

SEQ ID NO: 280920 - DNA, 130 bp, Homo sapiens
  chr3:13937250-13937380
  hyper
gacgagaatctttttcactggcggcctcggcgtcggcattttataaaatgagagcggggagggcggccgaagacgagtgtgcggagccttaggccccccgctcgggtccgcttttcgtatattcgggtag

SEQ ID NO: 280921 - DNA, 357 bp, Homo sapiens; identical to SEQ ID NO: 229312
  chr3:14166221-14166578
  hyper

SEQ ID NO: 280922 - DNA, 520 bp, Homo sapiens; identical to SEQ ID NO: 229313
  chr3:14219841-14220361
  hyper

SEQ ID NO: 280923 - DNA, 105 bp, Homo sapiens; identical to SEQ ID NO: 222074
  chr3:14443833-14443938
  hyper

SEQ ID NO: 280924 - DNA, 600 bp, Homo sapiens; identical to SEQ ID NO: 222075
  chr3:14443998-14444598
  hyper

SEQ ID NO: 280925 - DNA, 105 bp, Homo sapiens; identical to SEQ ID NO: 222076
  chr3:14444658-14444763
  hyper

SEQ ID NO: 280926 - DNA, 46 bp, Homo sapiens
  chr3:14643706-14643752
  hyper
gcaggacccaggcgcgggtcctccttcctcctcccgccccctcgcg

SEQ ID NO: 280927 - DNA, 78 bp, Homo sapiens
  chr3:14644635-14644713
  hyper
cggggcggccgccaggcgctccgctccggctcccgagcccgcggctgagcagctacgcttttcgagcgcgcgctttcc

SEQ ID NO: 280928 - DNA, 55 bp, Homo sapiens; identical to SEQ ID NO: 107940
  chr3:14644749-14644804
  hyper

SEQ ID NO: 280929 - DNA, 79 bp, Homo sapiens; identical to SEQ ID NO: 229315
  chr3:14693107-14693186
  hyper

SEQ ID NO: 280930 - DNA, 35 bp, Homo sapiens; identical to SEQ ID NO: 229318
  chr3:14988815-14988850
  hyper

SEQ ID NO: 280931 - DNA, 221 bp, Homo sapiens; identical to SEQ ID NO: 229319
  chr3:15140593-15140814
  hyper

SEQ ID NO: 280932 - DNA, 155 bp, Homo sapiens; identical to SEQ ID NO: 229320
  chr3:15248302-15248457
  hyper

SEQ ID NO: 280933 - DNA, 242 bp, Homo sapiens; identical to SEQ ID NO: 229321
  chr3:15468806-15469048
  hyper

SEQ ID NO: 280934 - DNA, 372 bp, Homo sapiens; identical to SEQ ID NO: 229322
  chr3:15642964-15643336
  hyper

SEQ ID NO: 280935 - DNA, 340 bp, Homo sapiens; identical to SEQ ID NO: 229324
  chr3:15901941-15902281
  hyper

SEQ ID NO: 280936 - DNA, 218 bp, Homo sapiens; identical to SEQ ID NO: 229325
  chr3:16306495-16306713
  hyper

SEQ ID NO: 280937 - DNA, 384 bp, Homo sapiens; identical to SEQ ID NO: 198832
  chr3:16553594-16553978
  hyper

SEQ ID NO: 280938 - DNA, 92 bp, Homo sapiens; identical to SEQ ID NO: 198833
  chr3:16555426-16555518
  hyper

SEQ ID NO: 280939 - DNA, 106 bp, Homo sapiens
  chr3:16925426-16925532
  hyper
gagatcctgagccccgggacccttgttccgggccccgaggcctacttggtagttgcccctcggggttccgggtgggtgactgacagttgcagcagctctggggagg

SEQ ID NO: 280940 - DNA, 73 bp, Homo sapiens
  chr3:16925583-16925656
  hyper
cgcggcccgatgacccggcctcggtgacagcagccgcgacggcggcaatctcgacagggagctaggcggctca

SEQ ID NO: 280941 - DNA, 230 bp, Homo sapiens
  chr3:16925705-16925935
  hyper
agcgccgagctcgggaggagacagcagccggcgggtggggtgggtctgggctgccccctccgggagctgccccggggccgcacggcgattgtcatacccggccgcccctgcccgccgtgggcttcctctcggcgccgcgggccttaacggggctctgaggggacgtgacagagctcggcacgcggcagcctctggggagttagggtccggagagacccacgcgtcgcccc

SEQ ID NO: 280942 - DNA, 255 bp, Homo sapiens
  chr3:16925965-16926220
  hyper
agccgcctccgcgtgtccagagagtgtcggggcggccgccacttcccctcgcccttcgccggaggtgggcgccttttcctgcgtggcgggtgctccgaccccagttgctctgagccccggggaagcgcgccccgagcccctgacgtgggcgccccgttacctcggggtgggtgcctggggcccctgaggtgggcgcgggttgccccggggtgggcgcccggcccgcgcgggttatttttggcgcccgcagaggcg

SEQ ID NO: 280943 - DNA, 92 bp, Homo sapiens; identical to SEQ ID NO: 38973
  chr3:16926261-16926353
  hyper

SEQ ID NO: 280944 - DNA, 352 bp, Homo sapiens
  chr3:16926666-16927018
  hyper
ccacgggcgggcgcgctatgacagcggcggggtttccaacggagactgcagcctcggcgtgtccggggacgaagcccgggctagccctaccaggggaccccgcggcgttgcgctcgccccgacccccagcgcggtcgtctgtaccctcccccgggagagcaagccgggcggcctgccccgccggagcagcatcatcaaggtaggtgggagaagggcgctcatcgcccaccctcagccgtccttggattctattttctccctgggggagtggtggtggaaggaggaagcccactgctaacaggaaccactggagcatgggtgcttggggtggttgagcggggattggatgcaa

SEQ ID NO: 280945 - DNA, 227 bp, Homo sapiens; identical to SEQ ID NO: 229330
  chr3:18465498-18465725
  hyper

SEQ ID NO: 280946 - DNA, 668 bp, Homo sapiens
  chr3:18485652-18486320
  hyper
caggcaccttactgcccgcccggctccagaacgcaccgagaggctccccttttccccatttgcttccttcggtcttttccactcccctttccttttctaaaaggggccataccggtgacctgaaggagtttgttcagccagggtctattgggcaggtgtggtggtgtgtccacacccagacagaaaacgaatggcatcttcaaatcccccatcccgaccgctctcccctactctaccagcccacccctccaaggtccgtctgcgtgagaaaaggggctcggaagaccgttgaagccctgcgcccacgagaggggagcccagccgccccaataggggacgaggagtgggtgctacggagaagtttggattgattccggaaaaagagggacagagataaaacagcaagagtagcaaggggaaaagggaggcaaaagagcagaactcactcaggcatggacgttgggggcggcggtggctgtcgagtgcgggcctgaaaccaagaacggctccccgggcgggcgcgccggcgtcggacttccgaggcggcggcttctgcctctcctgccgccgccgccgccgccggagctgcggctgccgcggaagttaattgcaacttgacttcaagttgtcctctttccccatacgaagtgggcgtttaaaggggagag

SEQ ID NO: 280947 - DNA, 33 bp, Homo sapiens
  chr3:18486937-18486970
  hyper
agtgtgggcgcttgggggtgcgcttggggtgcg

SEQ ID NO: 280948 - DNA, 190 bp, Homo sapiens; identical to SEQ ID NO: 229333
  chr3:19188895-19189085
  hyper

SEQ ID NO: 280949 - DNA, 104 bp, Homo sapiens; identical to SEQ ID NO: 198838
  chr3:19190216-19190320
  hyper

SEQ ID NO: 280950 - DNA, 369 bp, Homo sapiens; identical to SEQ ID NO: 229336
  chr3:19988326-19988695
  hyper

SEQ ID NO: 280951 - DNA, 37 bp, Homo sapiens; identical to SEQ ID NO: 229337
  chr3:20227787-20227824
  hyper

SEQ ID NO: 280952 - DNA, 224 bp, Homo sapiens; identical to SEQ ID NO: 198840
  chr3:22413369-22413593
  hyper

SEQ ID NO: 280953 - DNA, 215 bp, Homo sapiens; identical to SEQ ID NO: 198841
  chr3:22414323-22414538
  hyper

SEQ ID NO: 280954 - DNA, 43 bp, Homo sapiens; identical to SEQ ID NO: 229339
  chr3:23847466-23847509
  hyper

SEQ ID NO: 280955 - DNA, 284 bp, Homo sapiens; identical to SEQ ID NO: 222084
  chr3:23957824-23958108
  hyper

SEQ ID NO: 280956 - DNA, 56 bp, Homo sapiens; identical to SEQ ID NO: 229340
  chr3:23958863-23958919
  hyper

SEQ ID NO: 280957 - DNA, 69 bp, Homo sapiens; identical to SEQ ID NO: 198842
  chr3:23986035-23986104
  hyper

SEQ ID NO: 280958 - DNA, 204 bp, Homo sapiens; identical to SEQ ID NO: 198843
  chr3:23986746-23986950
  hyper

SEQ ID NO: 280959 - DNA, 103 bp, Homo sapiens
  chr3:24535351-24535454
  hyper
aagtgacaactgccgctaagaagggcaaaatccactaagaatgaaaattcccccaaatgagtccttctccgagggggtggaggtcacacagttggcacaattg

SEQ ID NO: 280960 - DNA, 254 bp, Homo sapiens
  chr3:24535595-24535849
  hyper
acggcgcacgccaacatccaggataattctcctttccaagcccgggagttccggggcaggcgaaaaaggggggatgggagacccacagtccctttaaccctcccccctggcctgccaaccttttccgaacccccatgtcacacaacttcctcatcatggaaacttccactgggttcggcgctgaggatgccaaactccatttcacaaggaacatgtcaacagctgggcttggggtttgaggaacagagccgctg

SEQ ID NO: 280961 - DNA, 1364 bp, Homo sapiens
  chr3:24535988-24537352
  hyper
aggctgatgacacccccaccacccacgctcacccgcctgcccgcccgcgcgcgctcggcttagccgcccgcacccctccgggttcttgcgacgctccgtcaccatcccgcccaccctgtggacagttggaactgtcgccccctcctcctctcaccccgctgcctccgcgcggtcctctagccaaattaccagtgccctggagccggttgggttgagcgcccctgcccggggaaggtagcctgcgggctcttgccccgagcccgcggagcaggaggtctcttttccaagcgcactcacattattcatgcaaagttaatccccgccgcgtcacggccgcccgcccgaggatgtgcgccttccttggccaagccccgcagtctccaccctcctccgccccctcctcccggcggcggggtcccggggagcgccggcgactgggcgtcgcgcgagtcctgcaaaatgtcaactccttgggcgaagagaggcggccgcagccagggccgcgccgcacctccccggtctctccacttttataggcgtaggaagctactgcggctggggcaccagagtccccgcctctccgggtcccccgcgtgcccggcccgccccggcccgcttcccgggcgctgtcttactccgggcccggggcgcctgctccgcgccgcgtctgcgaaccggtgacctggtttcccctccagccctcacggctgtccgacttgcgcggcggtggcggcggcggccaagagcaggcaaacccggctccgccaggggcgcagcgaggaaatggcctcctggcgcacaccccgccgccgccgccagccatcgccaccgccccgggctgcccagccggtacagacgccccctgccaggctccgggccagcgctccgacgcgctcacagcgcccggcttgccgaccccgaccccgaccccgagtcctacgcactcgaggtccccgggccggccgcctccgcacctgcctccccaggtgtgggcgctccccctcctcctaatcccggccgtgccctcccagggttggtgacggtgctgtgggtttggtggccgcgcgtccacccacccgattgcctgcgcgcataggtgcgggtttgggcgtcattactctagttggagaagaggaaagaatggggaacgagtgacaccgggaccggagggcgagtcttccaggagcacgtctcggccttctttgcccggcccgaccggcccgacccgtgccgcagcgctcctccctccgctcctaaaccacttgtggcgcgtgtcgggaatacagggcgctctggctcttcttggggcctccgctggtccgaccatctggcagctctcttaaccaccacggccaccccacgaa

SEQ ID NO: 280962 - DNA, 654 bp, Homo sapiens
  chr3:24562965-24563619
  hyper
aaggggccgcccagcgctctcagccggctcgtagagccagggccgggctcagggagcttcagagcaagaaacaccgaaggtgtaaagcccgagcgagcagctcgagtctcagtcctgcagcctaaggcagcccctccaagccgtgggcgccggccgtccgtctcctcaccgtggcgccctttactcggccacccggggcacagccaggggcttcaccgagccccgggtccaccgtggtcgcggccgccggtcgccgggagcccggagccgggacgcgagggttgggggttggggatgggtcccagtgtcgcgcgggagttcaaagcccggcactggcacggggctccgccgccgcagccgctggagccttgggctcccgccgcggggagagcgggggtagggcgcctgtcccggagtgacccggcggcggaggaagggcgggccgcaggcggcgggcccgggggaccttgagcgggcgggcgaggagcgggtgagaccgaggtcgacagagtgggggccccacgaggcccgcgcctggtcgggaagagagtaggagattcccccgcgagctcagacccggcactgagggaagagacactccgagtcctgcgtctccaagttttgctccaatgcccttgacattgaatgcatgtg

SEQ ID NO: 280963 - DNA, 41 bp, Homo sapiens; identical to SEQ ID NO: 198847
  chr3:24563737-24563778
  hyper

SEQ ID NO: 280964 - DNA, 158 bp, Homo sapiens
  chr3:24870844-24871002
  hyper
gcacagccagcgggcggcgcgccgcggactccaaggcagcccgccaaaaggtaaagccaggagagcgcgctggcgggtcttcctgttgggtggctgctgtccaagcccctagcgtccccggagccccaagctgggtctggaagaccagggcatttgca

SEQ ID NO: 280965 - DNA, 544 bp, Homo sapiens
  chr3:24871245-24871789
  hyper
cgtgaacccaggagtcgctggcaagttgcacctgccagccggatccgccccggctcccttcgcgtccctgccgggtccagcgctgtcctgcgcaccttagggctgggcacggcgaaacctggcgcccttgggagcagaggttctcgctccattcccctgtggggatctaagctccaggccggggtgtcggacctctgggttgcagcatgctttggggccgaagaaagggcgagaaaaagtttgagcattggctgggcctagggagcgggtagcgccaggctgcacatggcaggagttggagaagagtactaggggcttggcgccggacacagggacgcggccagggaccgagccctggaggctgaggctctaagcctggactgtcagccgcgaaggggttcttgctgtgtgcgcgctttggcaggaagaggctgtgtgtgattgtagagacgatgggcggaaaaacagagaagagagaggtacttggaatctatgtaattgcagtgtgccccagtgtgcacttttctccctccagatattttga

SEQ ID NO: 280966 - DNA, 60 bp, Homo sapiens; identical to SEQ ID NO: 198851
  chr3:24871886-24871946
  hyper

SEQ ID NO: 280967 - DNA, 221 bp, Homo sapiens; identical to SEQ ID NO: 198852
  chr3:25469458-25469679
  hyper

SEQ ID NO: 280968 - DNA, 151 bp, Homo sapiens; identical to SEQ ID NO: 198853
  chr3:25469874-25470025
  hyper

SEQ ID NO: 280969 - DNA, 121 bp, Homo sapiens; identical to SEQ ID NO: 198854
  chr3:25824793-25824914
  hyper

SEQ ID NO: 280970 - DNA, 144 bp, Homo sapiens; identical to SEQ ID NO: 229348
  chr3:25825435-25825579
  hyper

SEQ ID NO: 280971 - DNA, 161 bp, Homo sapiens
  chr3:26663871-26664032
  hyper
aacactcatttgtcgaattgattttaagcctccgcttttcccccaaggagggcaatcaatcccttgcacgttttgctcctttcaccagcttaattcagctctgatctcagtagttagaaaaataggagaaagaatggggccatagcctgctgcaagtagag

SEQ ID NO: 280972 - DNA, 219 bp, Homo sapiens; identical to SEQ ID NO: 198856
  chr3:26665682-26665901
  hyper

SEQ ID NO: 280973 - DNA, 228 bp, Homo sapiens; identical to SEQ ID NO: 198857
  chr3:27410377-27410605
  hyper

SEQ ID NO: 280974 - DNA, 82 bp, Homo sapiens; identical to SEQ ID NO: 198858
  chr3:27411079-27411161
  hyper

SEQ ID NO: 280975 - DNA, 672 bp, Homo sapiens
  chr3:27754928-27755600
  hyper
gcagaggagagggaagaccgtgagtctgctttcacctaggtttaaagcgaatcaaagacggctgtaaaaagggaaaccgggaccaaaaacagatttggagcctcgaaactctccattgaaggtttggaagatacgttgctgcagacttgaaaccggctccaaatccggcccaaacatgggctgaaaatatggcgcgctaatctgctgcttcccctcctcctcaagttctttctgactcttcccacctttcccagtttcccttccagacgtctgcggctccccactccacccccaggatagctactctacatcccgacaattcccagcttctacacccaggaggaggaattctggaaccacccagagcgaactcgtgccggggcggggtggggaccggaggaaggtcctgctccgaattctctccagagcagaaaagaattctagaggctacatgtgggctgctttccccccttcttccttttttccctcgcaaaccaacaaccaaaaagtgtttggtgatggaaagaacaccagtggaaaacggcaaataacagtatttccaactccgagtcaggtcctctttgcactgctttttcctgtttcattgcaatttattgattttattgtggttttttgtttatttggggcaagaacggagatgtgaaccaggac

SEQ ID NO: 280976 - DNA, 116 bp, Homo sapiens
  chr3:27755601-27755717
  hyper
agccagcagacccccgagccagtatctcctccctgggcagggaacaccgcctgcaccggtgcatactaggagaccctggcggagaatgtaaacaaaccgggcgccgagcccttgat

SEQ ID NO: 280977 - DNA, 132 bp, Homo sapiens; identical to SEQ ID NO: 198859
  chr3:27755955-27756087
  hyper

SEQ ID NO: 280978 - DNA, 411 bp, Homo sapiens
  chr3:27756242-27756653
  hyper
gttttgagtaggccgttcggaaacgcggagcaggagttcgagcccccaaggtcacgggtggcgcgggaagaactcgggccccagagggacggaggggaagggagacaggacagtcgaggtacaaggtcctggcggccttaattgggcgcagaaggggaggaggtctcggctgattgctcgcctcccagcagctaatcctcttagcagctgcatttccgcgctacacagttagcagaatgatcctcccagctagacctttaccccgggagggtccaggagggggctggaaaggtttgcaatctgggcctgaagccgtctgcagataagcctggcgggacgtctggctggggggacaaaggggaccctccaccccactctttggacctcccagggttcagccaggggatgggc

SEQ ID NO: 280979 - DNA, 441 bp, Homo sapiens; identical to SEQ ID NO: 198861
  chr3:27756715-27757156
  hyper

SEQ ID NO: 280980 - DNA, 224 bp, Homo sapiens
  chr3:27764674-27764898
  hyper
caaagcacaccttcctcttgtcgaaggcaaactccctggccttcaacgcacagaaccactttttgtttgttcccatccttttacccagtgggaaaggtttgtagagaggaaactcgcgctaagcttttgggattccggggacggccagagcacattgccatcctggaggacctaagctctcagcttctaaatcagaagcttggacagggtactggggacaggac

SEQ ID NO: 280981 - DNA, 275 bp, Homo sapiens
  chr3:27765542-27765817
  hyper
ctccgagaacgaggtccttaatgcacttagactctccagggcatttatcacggttttttttttcttttttgatgtgtgtgttcgcgcgctcgcgcgctcgcgtgtgtgtggtggtgaaacccaggagtgcgcgaagattttcagggtcaaggcacagccacaggggagggggcaagttgagactagtgggctggggcggtggccttgtaggtcctgggacagagtggccaggagcagatcgccagaaagctggtactgagcgcgttctgccctgc

SEQ ID NO: 280982 - DNA, 200 bp, Homo sapiens
  chr3:27772590-27772790
  hyper
tagttccttggagacgtcggagtttttgctagcttgacatcccgggctcacaactggcgggaaatagcttaaaaattatattgatgctttgaggcctttccttgcagctgcttgcgcccacaagctgcagtcctttccccggtcagcagccggctgtcccgcaccccccggcagagcgcagagggtcgaaagatttgcgc

SEQ ID NO: 280983 - DNA, 349 bp, Homo sapiens; identical to SEQ ID NO: 229358
  chr3:28282839-28283188
  hyper

SEQ ID NO: 280984 - DNA, 146 bp, Homo sapiens
  chr3:28616516-28616662
  hyper
agaatttccaaggctaccctcgccatctctatttaaatttatagacgcaacgcactgcctgccctggggtcaccaccgaagcctcctggtggagccctgccctgctgaggacgctcttccagcacagaactcaccaccaaaaagag

SEQ ID NO: 280985 - DNA, 214 bp, Homo sapiens; identical to SEQ ID NO: 198864
  chr3:28617983-28618197
  hyper

SEQ ID NO: 280986 - DNA, 154 bp, Homo sapiens
  chr3:29322328-29322482
  hyper
ccagcggcagcagcgttgctgcaaaaatcgcttgctattcgagatagccagcagagggaatcggaactttgcttgcagcaggggttgaagcagcctttttttttttttttcttggaggaaatactgcagccttctggactgcgtacgctgctcc

SEQ ID NO: 280987 - DNA, 354 bp, Homo sapiens; identical to SEQ ID NO: 229361
  chr3:30647759-30648113
  hyper

SEQ ID NO: 280988 - DNA, 261 bp, Homo sapiens; identical to SEQ ID NO: 222091
  chr3:30648804-30649065
  hyper

SEQ ID NO: 280989 - DNA, 276 bp, Homo sapiens; identical to SEQ ID NO: 229362
  chr3:31574048-31574324
  hyper

SEQ ID NO: 280990 - DNA, 42 bp, Homo sapiens; identical to SEQ ID NO: 229363
  chr3:32023042-32023084
  hyper

SEQ ID NO: 280991 - DNA, 160 bp, Homo sapiens; identical to SEQ ID NO: 198865
  chr3:32148437-32148597
  hyper

SEQ ID NO: 280992 - DNA, 182 bp, Homo sapiens; identical to SEQ ID NO: 108045
  chr3:32279558-32279740
  hyper

SEQ ID NO: 280993 - DNA, 565 bp, Homo sapiens; identical to SEQ ID NO: 198866
  chr3:32433047-32433612
  hyper

SEQ ID NO: 280994 - DNA, 200 bp, Homo sapiens; identical to SEQ ID NO: 198867
  chr3:32433665-32433865
  hyper

SEQ ID NO: 280995 - DNA, 82 bp, Homo sapiens; identical to SEQ ID NO: 198868
  chr3:32434068-32434150
  hyper

SEQ ID NO: 280996 - DNA, 137 bp, Homo sapiens; identical to SEQ ID NO: 198869
  chr3:32442878-32443015
  hyper

SEQ ID NO: 280997 - DNA, 55 bp, Homo sapiens; identical to SEQ ID NO: 198870
  chr3:32443510-32443565
  hyper

SEQ ID NO: 280998 - DNA, 329 bp, Homo sapiens
  chr3:32612447-32612776
  hyper
gtggctgcctggccggcgctgaggggctgagcgtacgcgggcggcggggtgggccgctatgctgcaactgaagcccagtgatctgacagtatggaagtgctttccttccgctcatccgcggccctgggctgcggcaggggggttgggtgtgtcaggtgaaaagtgctccctcccacccttcagacaggtccccaaaccctgcggcctgcgcggaattcctgcattgtcattgccggcccacccactgttcaggctgagagcggtcccccgcccaaaccggcgcttcgccggcgccaagatagaaatgggtcgcccggctggtaaagagg

SEQ ID NO: 280999 - DNA, 293 bp, Homo sapiens; identical to SEQ ID NO: 229368
  chr3:32726508-32726801
  hyper

SEQ ID NO: 281000 - DNA, 124 bp, Homo sapiens; identical to SEQ ID NO: 198873
  chr3:33137820-33137944
  hyper

SEQ ID NO: 281001 - DNA, 150 bp, Homo sapiens; identical to SEQ ID NO: 229371
  chr3:33138858-33139008
  hyper

SEQ ID NO: 281002 - DNA, 242 bp, Homo sapiens; identical to SEQ ID NO: 198874
  chr3:33155230-33155472
  hyper

SEQ ID NO: 281003 - DNA, 70 bp, Homo sapiens; identical to SEQ ID NO: 229376
  chr3:33759877-33759947
  hyper

SEQ ID NO: 281004 - DNA, 264 bp, Homo sapiens; identical to SEQ ID NO: 229377
  chr3:33839852-33840116
  hyper

SEQ ID NO: 281005 - DNA, 85 bp, Homo sapiens; identical to SEQ ID NO: 198875
  chr3:35681641-35681726
  hyper

SEQ ID NO: 281006 - DNA, 183 bp, Homo sapiens; identical to SEQ ID NO: 198876
  chr3:36421689-36421872
  hyper

SEQ ID NO: 281007 - DNA, 156 bp, Homo sapiens
  chr3:36421902-36422058
  hyper
cgcggcggggcggggcagggcgcactctcctccacgcccgcggaagtgccggggaggtgggcagggcggggagggagagggagcgaggctggaggagggcacgtcggcgcctcggcgaggatgggagtccccaggacccggagctgagcagcctgg

SEQ ID NO: 281008 - DNA, 106 bp, Homo sapiens
  chr3:36422076-36422182
  hyper
cgcaggacagaagcctcgctgttcctccgggagcccaacaccgttcccgcgcggccacgatgatccctccgagcagcccccgcgaggacggcgtggacgggctgcc

SEQ ID NO: 281009 - DNA, 251 bp, Homo sapiens
  chr3:36422223-36422474
  hyper
ccaccagcagccaggaatccaaggtaccgagcacgcttgcccccaagagaacacaaactcactctcctctcctgtcggtccagctttgtctctcctcctatctagcacgggcgtgggggtctgagacttgctagttagcccagggctgtaggacttgaacgtccggtaggacccgctgctcacgatgctggaccacgtccctgtggacccagccttcccgcccacacattcacacacgcaattcatggtgg

SEQ ID NO: 281010 - DNA, 73 bp, Homo sapiens
  chr3:36805377-36805450
  hyper
aggaagggcccccctgctggcgagggaaataaaatcagctccggagagcgttattcccctagaaagcaggttt

SEQ ID NO: 281011 - DNA, 254 bp, Homo sapiens
  chr3:36985557-36985811
  hyper
gagttgggaggaaacgcaacgcgcctcccaggcaacagactccgagctccggttcggaaacgctccgaggcagaagcaagggcttctaagggctccgcttcccagccttgggtccctactactaccttccccctagactcggtgagcccaggctgatggaccgtgcagtccagtttgagccagcccagcagccctcaatcgggcgggcagggaagaaggcctcctactgccgggaagaggccagcgcgctccaa

SEQ ID NO: 281012 - DNA, 250 bp, Homo sapiens; identical to SEQ ID NO: 198878
  chr3:36986413-36986663
  hyper

SEQ ID NO: 281013 - DNA, 1448 bp, Homo sapiens; identical to SEQ ID NO: 198879
  chr3:37033965-37035413
  hyper

SEQ ID NO: 281014 - DNA, 91 bp, Homo sapiens; identical to SEQ ID NO: 222102
  chr3:37038109-37038200
  hyper

SEQ ID NO: 281015 - DNA, 99 bp, Homo sapiens; identical to SEQ ID NO: 222103
  chr3:37042445-37042544
  hyper

SEQ ID NO: 281016 - DNA, 74 bp, Homo sapiens; identical to SEQ ID NO: 222104
  chr3:37045891-37045965
  hyper

SEQ ID NO: 281017 - DNA, 73 bp, Homo sapiens; identical to SEQ ID NO: 222105
  chr3:37048481-37048554
  hyper

SEQ ID NO: 281018 - DNA, 92 bp, Homo sapiens; identical to SEQ ID NO: 222106
  chr3:37050304-37050396
  hyper

SEQ ID NO: 281019 - DNA, 280 bp, Homo sapiens; identical to SEQ ID NO: 222107
  chr3:37053310-37053590
  hyper

SEQ ID NO: 281020 - DNA, 113 bp, Homo sapiens; identical to SEQ ID NO: 222108
  chr3:37055922-37056035
  hyper

SEQ ID NO: 281021 - DNA, 94 bp, Homo sapiens; identical to SEQ ID NO: 222109
  chr3:37058996-37059090
  hyper

SEQ ID NO: 281022 - DNA, 154 bp, Homo sapiens; identical to SEQ ID NO: 222110
  chr3:37061800-37061954
  hyper

SEQ ID NO: 281023 - DNA, 371 bp, Homo sapiens; identical to SEQ ID NO: 222111
  chr3:37067127-37067498
  hyper

SEQ ID NO: 281024 - DNA, 149 bp, Homo sapiens; identical to SEQ ID NO: 222112
  chr3:37070274-37070423
  hyper

SEQ ID NO: 281025 - DNA, 109 bp, Homo sapiens; identical to SEQ ID NO: 222113
  chr3:37081676-37081785
  hyper

SEQ ID NO: 281026 - DNA, 64 bp, Homo sapiens; identical to SEQ ID NO: 222114
  chr3:37083758-37083822
  hyper

SEQ ID NO: 281027 - DNA, 165 bp, Homo sapiens; identical to SEQ ID NO: 222115
  chr3:37089009-37089174
  hyper

SEQ ID NO: 281028 - DNA, 93 bp, Homo sapiens; identical to SEQ ID NO: 222116
  chr3:37090007-37090100
  hyper

SEQ ID NO: 281029 - DNA, 114 bp, Homo sapiens; identical to SEQ ID NO: 222117
  chr3:37090394-37090508
  hyper

SEQ ID NO: 281030 - DNA, 361 bp, Homo sapiens; identical to SEQ ID NO: 222118
  chr3:37091976-37092337
  hyper

SEQ ID NO: 281031 - DNA, 177 bp, Homo sapiens; identical to SEQ ID NO: 229387
  chr3:37284437-37284614
  hyper

SEQ ID NO: 281032 - DNA, 428 bp, Homo sapiens; identical to SEQ ID NO: 198880
  chr3:37493091-37493519
  hyper

SEQ ID NO: 281033 - DNA, 93 bp, Homo sapiens
  chr3:37901953-37902046
  hyper
gcgcgcgcaacctagcaggcggaggcaagcagctcttcgcctcaggccgcccactgaaccctgcccaccgacgtcgcgccctgtaggccctcc

SEQ ID NO: 281034 - DNA, 423 bp, Homo sapiens
  chr3:37902095-37902518
  hyper
cccgagcccgccctcctgcggcactaccccgcccccccggcttacggggctgcagagtgtggcctgcaagttggaagcgcaggacgcgggcgtccaaaggccccgacgctcccaggctgaggaggcactttgtcgtctctcccacgctctggccgtcgtcctaggcctgacagtggccagctgccttgcacaagcacagtccctgccagacttggtctgccaccagcgccttccgctcttctgccctcgacggactcccccggtccccttgctgcacagcacccgaaaatgcccactgcccaggcccctctcagtcacgacaccctcacgtgcaggaggttggtccttcaggacccgccgcccctcacgcgggctctggggccgaatgctgacgcgagtcccgccagcatccgaacaacctga

SEQ ID NO: 281035 - DNA, 254 bp, Homo sapiens
  chr3:37902584-37902838
  hyper
cccctcaagctggggagcgcagccctgggcctctccgaaccttccccacgctccccggtctccatcacagcagcgccgcgcccgggcccctctgcgggccgtctgggtgtcactaccgctcctgggcagcccccacttctgcacaccgcttccctccgcactcacgtcccaggcccctcggttccctcgcctggacgcccctcgcccagcaccttcccgagacaccctcacagcacctccgccagcacttcccg

SEQ ID NO: 281036 - DNA, 643 bp, Homo sapiens; identical to SEQ ID NO: 229391
  chr3:37903409-37904052
  hyper

SEQ ID NO: 281037 - DNA, 55 bp, Homo sapiens
  chr3:38070615-38070670
  hyper
aggagaattttggtcgttcttggatgctgtttccttccttcgccgcccctccgtg

SEQ ID NO: 281038 - DNA, 153 bp, Homo sapiens; identical to SEQ ID NO: 229394
  chr3:38178729-38178882
  hyper

SEQ ID NO: 281039 - DNA, 83 bp, Homo sapiens
  chr3:38179801-38179884
  hyper
cctcagattcctccgtggaagaactgtggctccaccagatcccaaaaagcaaggcccgtttcctacaacccccgaaggagggt

SEQ ID NO: 281040 - DNA, 147 bp, Homo sapiens; identical to SEQ ID NO: 39092
  chr3:38179984-38180131
  hyper

SEQ ID NO: 281041 - DNA, 129 bp, Homo sapiens; identical to SEQ ID NO: 198883
  chr3:38182655-38182784
  hyper

SEQ ID NO: 281042 - DNA, 45 bp, Homo sapiens; identical to SEQ ID NO: 229396
  chr3:38206259-38206304
  hyper

SEQ ID NO: 281043 - DNA, 183 bp, Homo sapiens; identical to SEQ ID NO: 108120
  chr3:38206942-38207125
  hyper

SEQ ID NO: 281044 - DNA, 78 bp, Homo sapiens; identical to SEQ ID NO: 198884
  chr3:38495097-38495175
  hyper

SEQ ID NO: 281045 - DNA, 52 bp, Homo sapiens; identical to SEQ ID NO: 39102
  chr3:38495213-38495265
  hyper

SEQ ID NO: 281046 - DNA, 101 bp, Homo sapiens; identical to SEQ ID NO: 198886
  chr3:38495679-38495780
  hyper

SEQ ID NO: 281047 - DNA, 1234 bp, Homo sapiens; identical to SEQ ID NO: 198887
  chr3:38496021-38497255
  hyper

SEQ ID NO: 281048 - DNA, 156 bp, Homo sapiens; identical to SEQ ID NO: 229401
  chr3:38537735-38537891
  hyper

SEQ ID NO: 281049 - DNA, 278 bp, Homo sapiens
  chr3:38690811-38691089
  hyper
ggataccctccagccgggcggatctgcgccccttctccccctccggctctctggggcactgatcggggagggagcggctgggcggacccggggcagggaggagcacgcagggactggaggcttcggccctcggggaggaaagttgggcggcggcaggcggagggggctccggccgggccagggctgccgggcgcgggggcactcgctcacctgctggtcccccggccgggccccggggtgggcggctgctgcttggcgcggactcggctcggcgcggg

SEQ ID NO: 281050 - DNA, 69 bp, Homo sapiens
  chr3:38691144-38691213
  hyper
acgggcgccgccgccgtctcggctccgcggctctgttcgggctcccgggctgggcaggcggcgcgggct

SEQ ID NO: 281051 - DNA, 211 bp, Homo sapiens; identical to SEQ ID NO: 229403
  chr3:39093354-39093565
  hyper

SEQ ID NO: 281052 - DNA, 277 bp, Homo sapiens; identical to SEQ ID NO: 222128
  chr3:39148232-39148509
  hyper

SEQ ID NO: 281053 - DNA, 251 bp, Homo sapiens; identical to SEQ ID NO: 229404
  chr3:39149006-39149257
  hyper

SEQ ID NO: 281054 - DNA, 75 bp, Homo sapiens; identical to SEQ ID NO: 229405
  chr3:39250104-39250179
  hyper

SEQ ID NO: 281055 - DNA, 227 bp, Homo sapiens; identical to SEQ ID NO: 229406
  chr3:39448005-39448232
  hyper

SEQ ID NO: 281056 - DNA, 822 bp, Homo sapiens
  chr3:39850413-39851235
  hyper
gttccgcagctgtgtttgggagacttgggggcgcattagcctggacagctccctgatcggtaacccctttgatgtgtgttgaatgaatgagcgtcgttagcgtagtagtaaatttatgggagaattaaagcaatccagataggggtcactacggagactttaattacccagggactgtgaagtggggaagagctgtctgtggaggagcgccacaccatgtcttagattcaggcaggccccggattctggtgacccattactctacggtcactgagggtccgggcccccaggactcagaggcaggagacaggaaaagcctgacttagaatcggggaaggacctggagtcgcacatgggggctcccgaaccgcggccccaatactgcactgcgccgcagggaagagccccgggaggggcgcgggtccccgccccgggcgcgcgcagccctgccccgcctcctcccggtgcgccccgcccctcccggcgcgtgccgcccgcgcgcccgaggtgctctggaggaaccggcccggcgggcaccccctgccccggcgcaggcgcgatcgcgggccgcccctcccgccgggcgccctgcacgcgcccccgccccgcctccgcaggctcccccgctccgggcgcctctgattggctctcggccgggccagcaggtgtcggcggtggctgcggccaggctggccctggctgcctgcggcgcgggcgcctccctcgcagccgctgctgccgacgccgctgcgctcccgcctcctgtcggttcccgggttcccgctgcggctgcggttctggcagccgagcccccgcggtgct

SEQ ID NO: 281057 - DNA, 116 bp, Homo sapiens; identical to SEQ ID NO: 198892
  chr3:40350787-40350903
  hyper

SEQ ID NO: 281058 - DNA, 168 bp, Homo sapiens; identical to SEQ ID NO: 229410
  chr3:40494719-40494887
  hyper

SEQ ID NO: 281059 - DNA, 396 bp, Homo sapiens; identical to SEQ ID NO: 229411
  chr3:40498461-40498857
  hyper

SEQ ID NO: 281060 - DNA, 227 bp, Homo sapiens; identical to SEQ ID NO: 229412
  chr3:40547354-40547581
  hyper

SEQ ID NO: 281061 - DNA, 178 bp, Homo sapiens; identical to SEQ ID NO: 229413
  chr3:40566234-40566412
  hyper

SEQ ID NO: 281062 - DNA, 182 bp, Homo sapiens; identical to SEQ ID NO: 222129
  chr3:41240161-41240343
  hyper

SEQ ID NO: 281063 - DNA, 91 bp, Homo sapiens; identical to SEQ ID NO: 198893
  chr3:41240629-41240720
  hyper

SEQ ID NO: 281064 - DNA, 54 bp, Homo sapiens; identical to SEQ ID NO: 229415
  chr3:41240948-41241002
  hyper

SEQ ID NO: 281065 - DNA, 46 bp, Homo sapiens; identical to SEQ ID NO: 229416
  chr3:42003539-42003585
  hyper

SEQ ID NO: 281066 - DNA, 161 bp, Homo sapiens; identical to SEQ ID NO: 198894
  chr3:42056668-42056829
  hyper

SEQ ID NO: 281067 - DNA, 51 bp, Homo sapiens; identical to SEQ ID NO: 198895
  chr3:42304893-42304944
  hyper

SEQ ID NO: 281068 - DNA, 172 bp, Homo sapiens
  chr3:42542855-42543027
  hyper
ctccttcaggtagccgcacattctgctcagggctctgggacccgctgccctctccgcctctccactgaactccgcctctccttctgtcacacggctccgccagccactctatcctgccgccgcgaccacatctccagcctcgattgtgcaggctcgagcccgtagaaagagg

SEQ ID NO: 281069 - DNA, 129 bp, Homo sapiens
  chr3:42543580-42543709
  hyper
ggttgttgaaaattgatcaaacaacccgatctctgtcagcgcctggacacttgctgggccccagctcgcagcctgggaagataagtggcacttcctgtctcgtaatcggatttgcgcgcacgaaccctc

SEQ ID NO: 281070 - DNA, 643 bp, Homo sapiens; identical to SEQ ID NO: 229420
  chr3:42623201-42623844
  hyper

SEQ ID NO: 281071 - DNA, 45 bp, Homo sapiens; identical to SEQ ID NO: 198896
  chr3:42641736-42641781
  hyper

SEQ ID NO: 281072 - DNA, 142 bp, Homo sapiens; identical to SEQ ID NO: 229422
  chr3:42642019-42642161
  hyper

SEQ ID NO: 281073 - DNA, 382 bp, Homo sapiens; identical to SEQ ID NO: 198897
  chr3:42696177-42696559
  hyper

SEQ ID NO: 281074 - DNA, 33 bp, Homo sapiens; identical to SEQ ID NO: 198898
  chr3:42845262-42845295
  hyper

SEQ ID NO: 281075 - DNA, 302 bp, Homo sapiens; identical to SEQ ID NO: 229426
  chr3:42845897-42846199
  hyper

SEQ ID NO: 281076 - DNA, 104 bp, Homo sapiens; identical to SEQ ID NO: 198900
  chr3:42922532-42922636
  hyper

SEQ ID NO: 281077 - DNA, 101 bp, Homo sapiens
  chr3:42947961-42948062
  hyper
gtcttggccctgccctgggttctaggcccggagacggggtggtgcggcggctgggaaatgggggtacaacccagagtgaggggcctcgagggacaggcagc

SEQ ID NO: 281078 - DNA, 207 bp, Homo sapiens
  chr3:43020689-43020896
  hyper
gaccagaagactgcggctggccgagcccccggcagggcttttattgtgaagggagcttccccctcccgcgctttcaggggaatggggaagctgggccgggacgcgcggcagggactttgcaaactctgcaaaagtcccgagtagaccgcagaggctcgcggccgcgggtaggctccctcagatccccgtagatctcagtagatccgg

SEQ ID NO: 281079 - DNA, 257 bp, Homo sapiens; identical to SEQ ID NO: 198901
  chr3:43147024-43147281
  hyper

SEQ ID NO: 281080 - DNA, 120 bp, Homo sapiens; identical to SEQ ID NO: 198902
  chr3:43147607-43147727
  hyper

SEQ ID NO: 281081 - DNA, 37 bp, Homo sapiens; identical to SEQ ID NO: 229432
  chr3:43662919-43662956
  hyper

SEQ ID NO: 281082 - DNA, 214 bp, Homo sapiens; identical to SEQ ID NO: 198903
  chr3:43663334-43663548
  hyper

SEQ ID NO: 281083 - DNA, 359 bp, Homo sapiens; identical to SEQ ID NO: 198904
  chr3:43731959-43732318
  hyper

SEQ ID NO: 281084 - DNA, 141 bp, Homo sapiens; identical to SEQ ID NO: 198905
  chr3:43935656-43935797
  hyper

SEQ ID NO: 281085 - DNA, 426 bp, Homo sapiens; identical to SEQ ID NO: 198906
  chr3:44038922-44039348
  hyper

SEQ ID NO: 281086 - DNA, 61 bp, Homo sapiens; identical to SEQ ID NO: 198907
  chr3:44063212-44063273
  hyper

SEQ ID NO: 281087 - DNA, 50 bp, Homo sapiens; identical to SEQ ID NO: 198908
  chr3:44379864-44379914
  hyper

SEQ ID NO: 281088 - DNA, 95 bp, Homo sapiens; identical to SEQ ID NO: 198909
  chr3:44481213-44481308
  hyper

SEQ ID NO: 281089 - DNA, 232 bp, Homo sapiens
  chr3:44518642-44518874
  hyper
taaaaagcaagagcacgctctcatttcgtaatatatatttatggatgtcagtgtgcagaattatgcacagatattttaaatgtcaggaggcctggagacagatttcaggattgcggctacttttacttttcttctactttcccgtgttatctaattgtctctgataaatacgctttatatgcagaattggatgaaacgagaaagcccggagaaacccgggctccagattctc

SEQ ID NO: 281090 - DNA, 92 bp, Homo sapiens; identical to SEQ ID NO: 198911
  chr3:44597031-44597123
  hyper

SEQ ID NO: 281091 - DNA, 162 bp, Homo sapiens; identical to SEQ ID NO: 198912
  chr3:44626179-44626341
  hyper

SEQ ID NO: 281092 - DNA, 565 bp, Homo sapiens; identical to SEQ ID NO: 229441
  chr3:44666348-44666913
  hyper

SEQ ID NO: 281093 - DNA, 66 bp, Homo sapiens; identical to SEQ ID NO: 198914
  chr3:44690079-44690145
  hyper

SEQ ID NO: 281094 - DNA, 255 bp, Homo sapiens; identical to SEQ ID NO: 198915
  chr3:44690175-44690430
  hyper

SEQ ID NO: 281095 - DNA, 213 bp, Homo sapiens
  chr3:44690489-44690702
  hyper
gctgctgcccacctggggcctggtccgggagaggatgcacacggaccggccaaggggccagataggtcccagggacagggccgcgaggagcctatacgtggaaagaatggattgccacgtttggaaatagagaaaggacgttgaaagggagcctttgatagagggccctgtgccgtctgggaccggaggtccgtcagaatctgatcagaagtc

SEQ ID NO: 281096 - DNA, 219 bp, Homo sapiens
  chr3:44754122-44754341
  hyper
accggccgcgccaccattcttccggtttcagaagttaaggctggtgtcctggccccagtccacctctgggagcgcctgcgccgctccgcggagagtccgtggatctcacagtgagcgagttgggacccagggaggggaaaagagaggaccccggcgagccattgctggggcggcgggctggagggttatctgggaagtcagccccggcctcggtcctct

SEQ ID NO: 281097 - DNA, 166 bp, Homo sapiens
  chr3:44771093-44771259
  hyper
tgacgtcacgccggctgggcgcgtccgggacttactcctttccgcagggcagcacccagggacctgagtgttgcaaggtgcgagaggggagcgccgcggggagcgccgcgggaagcgcatggtgagcggtttctgctgtgcccggctgccgcgggtcgattccagc

SEQ ID NO: 281098 - DNA, 805 bp, Homo sapiens; identical to SEQ ID NO: 222139
  chr3:44802848-44803653
  hyper

SEQ ID NO: 281099 - DNA, 188 bp, Homo sapiens; identical to SEQ ID NO: 229446
  chr3:45017826-45018014
  hyper

SEQ ID NO: 281100 - DNA, 379 bp, Homo sapiens
  chr3:45186917-45187296
  hyper
acaggtcactgggacgtgttggtcccttcccccaaccgaaacaactcgaaattcacacatatccccggaacaacagcctcctgccctcaaagtccactgccaaaaagtgcgaggggcgcgggaatgtccagtctctgcggtggcgcagatgcctggcggctttctctgggaccccctaaaagaaatccgggcgctttcatttttgcaccaacgctcttcaactttaggagagggggaatgcagcgtgcggacgggaaaaaggggatctagtgggaaatgcggacgtgaaagcactttttttgcaccttctctctggaccaggcgaggaggtagagggcgagcctggagaggaaagatctcttcccacaccctgcctggg

SEQ ID NO: 281101 - DNA, 32 bp, Homo sapiens; identical to SEQ ID NO: 229448
  chr3:45635676-45635708
  hyper

SEQ ID NO: 281102 - DNA, 88 bp, Homo sapiens
  chr3:45730475-45730563
  hyper
gcaaaacagacatcgcgagccagccaggagtcgaacctagaatcttctgatccgtagtcagacgcgttatccattgcgccactggccc

SEQ ID NO: 281103 - DNA, 78 bp, Homo sapiens; identical to SEQ ID NO: 108217
  chr3:45730623-45730701
  hyper

SEQ ID NO: 281104 - DNA, 72 bp, Homo sapiens; identical to SEQ ID NO: 229450
  chr3:45730961-45731033
  hyper

SEQ ID NO: 281105 - DNA, 68 bp, Homo sapiens; identical to SEQ ID NO: 229451
  chr3:46037443-46037511
  hyper

SEQ ID NO: 281106 - DNA, 87 bp, Homo sapiens; identical to SEQ ID NO: 229452
  chr3:46854159-46854246
  hyper

SEQ ID NO: 281107 - DNA, 500 bp, Homo sapiens; identical to SEQ ID NO: 229453
  chr3:46886710-46887210
  hyper

SEQ ID NO: 281108 - DNA, 216 bp, Homo sapiens
  chr3:46924277-46924493
  hyper
gccgctgcgcgcccgagccgcacaggcgcaagcggggctctggccaaggatggggaaggggtgcgggaggcggctgccgagggtctgggatctcaggaggccgaacggccgggggctggcggccggaacacctaagggctcagtgtggctgcaaagttgagatcgcaccccctaactgcacgccccgcgcggctcagaacgcgccccctgcccggc

SEQ ID NO: 281109 - DNA, 137 bp, Homo sapiens; identical to SEQ ID NO: 229456
  chr3:46933850-46933987
  hyper

SEQ ID NO: 281110 - DNA, 237 bp, Homo sapiens; identical to SEQ ID NO: 229457
  chr3:47018180-47018417
  hyper

SEQ ID NO: 281111 - DNA, 278 bp, Homo sapiens; identical to SEQ ID NO: 198920
  chr3:47020746-47021024
  hyper

SEQ ID NO: 281112 - DNA, 84 bp, Homo sapiens; identical to SEQ ID NO: 108235
  chr3:47021079-47021163
  hyper

SEQ ID NO: 281113 - DNA, 78 bp, Homo sapiens; identical to SEQ ID NO: 222142
  chr3:47050739-47050817
  hyper

SEQ ID NO: 281114 - DNA, 80 bp, Homo sapiens; identical to SEQ ID NO: 108238
  chr3:47051151-47051231
  hyper

SEQ ID NO: 281115 - DNA, 453 bp, Homo sapiens; identical to SEQ ID NO: 229460
  chr3:47205420-47205873
  hyper

SEQ ID NO: 281116 - DNA, 167 bp, Homo sapiens; identical to SEQ ID NO: 229461
  chr3:47323999-47324166
  hyper

SEQ ID NO: 281117 - DNA, 79 bp, Homo sapiens; identical to SEQ ID NO: 198922
  chr3:47324508-47324587
  hyper

SEQ ID NO: 281118 - DNA, 95 bp, Homo sapiens; identical to SEQ ID NO: 229463
  chr3:47422258-47422353
  hyper

SEQ ID NO: 281119 - DNA, 170 bp, Homo sapiens; identical to SEQ ID NO: 229464
  chr3:47844166-47844336
  hyper

SEQ ID NO: 281120 - DNA, 581 bp, Homo sapiens
  chr3:47890801-47891382
  hyper
gcgtgctgatggccggcctctaccccaacctcatccaggtgctgcctctgggagggaatggagttcaccaggtcccagcctccttccctgtctgcagctccttgctcagccccacccgtcttttcctccatccctgcaggtgaggcagggcaaggtcacccggcaggggaagttcaagcccaacagcgtcacatataggaccaaatcaggcaacatcctgctgcacaagtcgaccattaacaggtgagggcatgcaggcctggatggggcagctgggatggtccaaaagggtggcctcaccagccctgtgttccctagggaggccacacggttacggagccgatggctgacgtatttcatggcagtcaagtccaatggcagcgtcttcgtccgggactcctctcaggtgcacccgctagctgtgctgctgctgaccgacggggacgtgcacatccgtggtgggtgcctgcaggcctcccgcccaccccgctctgcagctgctcctccggggcctggcctcaccacagttccccaccatcttttccattccctcagatgacgggcgccgggccaccatctca

SEQ ID NO: 281121 - DNA, 87 bp, Homo sapiens; identical to SEQ ID NO: 198924
  chr3:48130785-48130872
  hyper

SEQ ID NO: 281122 - DNA, 196 bp, Homo sapiens; identical to SEQ ID NO: 229466
  chr3:48282460-48282656
  hyper

SEQ ID NO: 281123 - DNA, 540 bp, Homo sapiens; identical to SEQ ID NO: 229467
  chr3:48342985-48343525
  hyper

SEQ ID NO: 281124 - DNA, 218 bp, Homo sapiens; identical to SEQ ID NO: 229468
  chr3:48470350-48470568
  hyper

SEQ ID NO: 281125 - DNA, 71 bp, Homo sapiens; identical to SEQ ID NO: 229469
  chr3:48471202-48471273
  hyper

SEQ ID NO: 281126 - DNA, 332 bp, Homo sapiens; identical to SEQ ID NO: 229470
  chr3:48481454-48481786
  hyper

SEQ ID NO: 281127 - DNA, 213 bp, Homo sapiens; identical to SEQ ID NO: 229471
  chr3:48487961-48488174
  hyper

SEQ ID NO: 281128 - DNA, 157 bp, Homo sapiens; identical to SEQ ID NO: 229472
  chr3:48541365-48541522
  hyper

SEQ ID NO: 281129 - DNA, 312 bp, Homo sapiens; identical to SEQ ID NO: 229473
  chr3:48594205-48594517
  hyper

SEQ ID NO: 281130 - DNA, 39 bp, Homo sapiens; identical to SEQ ID NO: 229474
  chr3:48672961-48673000
  hyper

SEQ ID NO: 281131 - DNA, 257 bp, Homo sapiens; identical to SEQ ID NO: 198926
  chr3:48700956-48701213
  hyper

SEQ ID NO: 281132 - DNA, 212 bp, Homo sapiens; identical to SEQ ID NO: 198927
  chr3:48701259-48701471
  hyper

SEQ ID NO: 281133 - DNA, 111 bp, Homo sapiens; identical to SEQ ID NO: 198928
  chr3:48701576-48701687
  hyper

SEQ ID NO: 281134 - DNA, 56 bp, Homo sapiens; identical to SEQ ID NO: 229477
  chr3:48754857-48754913
  hyper

SEQ ID NO: 281135 - DNA, 47 bp, Homo sapiens; identical to SEQ ID NO: 198929
  chr3:48885300-48885347
  hyper

SEQ ID NO: 281136 - DNA, 391 bp, Homo sapiens; identical to SEQ ID NO: 229479
  chr3:48955804-48956195
  hyper

SEQ ID NO: 281137 - DNA, 202 bp, Homo sapiens; identical to SEQ ID NO: 229480
  chr3:48956726-48956928
  hyper

SEQ ID NO: 281138 - DNA, 497 bp, Homo sapiens; identical to SEQ ID NO: 229481
  chr3:49027049-49027546
  hyper

SEQ ID NO: 281139 - DNA, 394 bp, Homo sapiens; identical to SEQ ID NO: 229482
  chr3:49027803-49028197
  hyper

SEQ ID NO: 281140 - DNA, 293 bp, Homo sapiens; identical to SEQ ID NO: 229483
  chr3:49044449-49044742
  hyper

SEQ ID NO: 281141 - DNA, 137 bp, Homo sapiens; identical to SEQ ID NO: 229484
  chr3:49057921-49058058
  hyper

SEQ ID NO: 281142 - DNA, 31 bp, Homo sapiens; identical to SEQ ID NO: 229485
  chr3:49058561-49058592
  hyper

SEQ ID NO: 281143 - DNA, 68 bp, Homo sapiens; identical to SEQ ID NO: 198933
  chr3:49066685-49066753
  hyper

SEQ ID NO: 281144 - DNA, 204 bp, Homo sapiens; identical to SEQ ID NO: 229487
  chr3:49066962-49067166
  hyper

SEQ ID NO: 281145 - DNA, 286 bp, Homo sapiens; identical to SEQ ID NO: 229488
  chr3:49131391-49131677
  hyper

SEQ ID NO: 281146 - DNA, 274 bp, Homo sapiens; identical to SEQ ID NO: 229489
  chr3:49142031-49142305
  hyper

SEQ ID NO: 281147 - DNA, 38 bp, Homo sapiens; identical to SEQ ID NO: 229490
  chr3:49142558-49142596
  hyper

SEQ ID NO: 281148 - DNA, 188 bp, Homo sapiens; identical to SEQ ID NO: 198934
  chr3:49158289-49158477
  hyper

SEQ ID NO: 281149 - DNA, 187 bp, Homo sapiens; identical to SEQ ID NO: 198935
  chr3:49171171-49171358
  hyper

SEQ ID NO: 281150 - DNA, 243 bp, Homo sapiens; identical to SEQ ID NO: 229493
  chr3:49203302-49203545
  hyper

SEQ ID NO: 281151 - DNA, 310 bp, Homo sapiens; identical to SEQ ID NO: 229494
  chr3:49395159-49395469
  hyper

SEQ ID NO: 281152 - DNA, 239 bp, Homo sapiens; identical to SEQ ID NO: 229495
  chr3:49395700-49395939
  hyper

SEQ ID NO: 281153 - DNA, 104 bp, Homo sapiens
  chr3:49449335-49449439
  hyper
ctgaagaccagaccgtggactaacgagagaaccgacggaggaccgcgggcggcgggagggtagcgcgagagagcgagggcgggcggcggcgggagggcggggaa

SEQ ID NO: 281154 - DNA, 525 bp, Homo sapiens; identical to SEQ ID NO: 108317
  chr3:49449454-49449979
  hyper

SEQ ID NO: 281155 - DNA, 122 bp, Homo sapiens; identical to SEQ ID NO: 198938
  chr3:49507371-49507493
  hyper

SEQ ID NO: 281156 - DNA, 84 bp, Homo sapiens; identical to SEQ ID NO: 229498
  chr3:49577215-49577299
  hyper

SEQ ID NO: 281157 - DNA, 165 bp, Homo sapiens
  chr3:49591667-49591832
  hyper
gggctcagcgcgacgtcccagaggccgcttctagtggcaggtgcccctcctcacagggccctcgcagccccgccggcccccgcccggctccttctcagcatgatacaaccgcgtcggccctggacagcgcatgcgcgggcgccggcggctgtttcccagcgaccc

SEQ ID NO: 281158 - DNA, 368 bp, Homo sapiens
  chr3:49592076-49592444
  hyper
gccgctgccgcccggcggcgccggccccggcccgggccccggccccggccccggcgcaggaaagccgccttcagcaccggccggtggcggacagctccccgcggcgggagcagcgcggtcgaccgcggtaccaccggtccctggccccggccccggccccggtcccggccctggcccgggcaggtaagcgcgtgtctcggcgcccggggggcggtgagctgcagcctgaggccgggacccgggcccaggatcccgcgatctagtgtggacagcgaggttcgacgtccggccgcactctgaaccctgccggattggcgtgaactgggtggtcgcgggaagcggcccttcctttccagctgccccgcctt

SEQ ID NO: 281159 - DNA, 149 bp, Homo sapiens; identical to SEQ ID NO: 198939
  chr3:49711249-49711398
  hyper

SEQ ID NO: 281160 - DNA, 242 bp, Homo sapiens; identical to SEQ ID NO: 229501
  chr3:49761709-49761951
  hyper

SEQ ID NO: 281161 - DNA, 109 bp, Homo sapiens; identical to SEQ ID NO: 229502
  chr3:49841073-49841182
  hyper

SEQ ID NO: 281162 - DNA, 399 bp, Homo sapiens; identical to SEQ ID NO: 229504
  chr3:49893731-49894130
  hyper

SEQ ID NO: 281163 - DNA, 253 bp, Homo sapiens
  chr3:49906717-49906970
  hyper
tggagcttcctcccccaccccgcggcagccccgcccagccccctccgggttgtcgcccataaagaactctccgttgtcatggaaattagtgactgctaagcgggagggaaggggcccggggacagttgggaggggctggaggcggctctgggaacggggagggacggctcagctctcggcccctatcctcacgggggaccacgaatcttcgagggttaatcttttcacaattccgagccgcagaagcttcccc

SEQ ID NO: 281164 - DNA, 54 bp, Homo sapiens
  chr3:49907379-49907433
  hyper
gggcgggctgggggcggggcctcccaaccggccccgccccgaccctggcggagc

SEQ ID NO: 281165 - DNA, 67 bp, Homo sapiens; identical to SEQ ID NO: 229506
  chr3:49977376-49977443
  hyper

SEQ ID NO: 281166 - DNA, 39 bp, Homo sapiens; identical to SEQ ID NO: 198940
  chr3:50126252-50126291
  hyper

SEQ ID NO: 281167 - DNA, 172 bp, Homo sapiens; identical to SEQ ID NO: 229508
  chr3:50192568-50192740
  hyper

SEQ ID NO: 281168 - DNA, 114 bp, Homo sapiens; identical to SEQ ID NO: 198941
  chr3:50192966-50193080
  hyper

SEQ ID NO: 281169 - DNA, 92 bp, Homo sapiens; identical to SEQ ID NO: 198942
  chr3:50243562-50243654
  hyper

SEQ ID NO: 281170 - DNA, 365 bp, Homo sapiens; identical to SEQ ID NO: 198943
  chr3:50374290-50374655
  hyper

SEQ ID NO: 281171 - DNA, 233 bp, Homo sapiens
  chr3:50374684-50374917
  hyper
gcagtagccactgctcgtcgtgctgctccaggtcatttcgaaagaaggcgcctccgcctcgcccatagccgtacccgcccgtcccccagtcctgcgcgtccgtagccgccaaccaccgccccggtcgcgtgcgtgcgtgtacgcgtgtcagtgtgcgcgtgcgcccgggccagagccgcgccgcaaccgttaagactgaaacgtagatcgccgggatctagctcttgtctcat

SEQ ID NO: 281172 - DNA, 49 bp, Homo sapiens; identical to SEQ ID NO: 198945
  chr3:50374946-50374995
  hyper

SEQ ID NO: 281173 - DNA, 77 bp, Homo sapiens
  chr3:50377896-50377973
  hyper
gaccccctctgccgcgacttgacccgcggcgactgcgctgccccttggctgccccttccgctctcgtaggcgcgcgg

SEQ ID NO: 281174 - DNA, 165 bp, Homo sapiens; identical to SEQ ID NO: 198947
  chr3:50378002-50378167
  hyper

SEQ ID NO: 281175 - DNA, 618 bp, Homo sapiens; identical to SEQ ID NO: 229514
  chr3:50387962-50388580
  hyper

SEQ ID NO: 281176 - DNA, 754 bp, Homo sapiens
  chr3:50540628-50541382
  hyper
ggccggccgaggccacttacgtgtgctgctgggggaagctgtaggcagaggcgccgggggcggcgagcagcggtagaagcggcagcagcagccacagcgggcgcgggggcccggacgtcgggcgccgggtgccggggccagggtgggggccgcagccgggccaggggcgcgcagtccgcgctgggccgggccgagaggcgccgcaggtccgagccggcaccgccatgtttccattcaagatgcggcgccgcggggagggggggcagtggcggcggcggcggcggcggcggggttgggggggcgcgggcggcgggcggtaactcggcctctcctccgccgccgccttctccgcgaggggcctccggggctgcacgggccgcagcgcctctgcgggctgcgcgctgctatctccctgcagcgctggctccaagcgctctgagcgcccggcccgggacctgcgctcaaatagcagccgccgccaacctgccggcaccgccctcttctctccctccctccctctctcttcccgggctggcccgcccccgcgcgcccccgccgcggccacgcgcccacccgtgcccgcgcgcctctcgtccccgcgcagcccgaatcctgccctactggctcgggcgtcctgcgccccagctgctacccgagcgccccgggtgcgcccccgcccccacacctcagaccctgccgctcctccccaccccacccgcgggaagagtcccgggccccgcggcccaaggcagga

SEQ ID NO: 281177 - DNA, 38 bp, Homo sapiens
  chr3:50604943-50604981
  hyper
gactggcaggaggccggggcggggggaacccccaagcc

SEQ ID NO: 281178 - DNA, 256 bp, Homo sapiens; identical to SEQ ID NO: 229519
  chr3:50606623-50606879
  hyper

SEQ ID NO: 281179 - DNA, 201 bp, Homo sapiens; identical to SEQ ID NO: 229520
  chr3:50649440-50649641
  hyper

SEQ ID NO: 281180 - DNA, 59 bp, Homo sapiens; identical to SEQ ID NO: 198949
  chr3:50654360-50654419
  hyper

SEQ ID NO: 281181 - DNA, 643 bp, Homo sapiens
  chr3:50712377-50713020
  hyper
agccgcggcggcgccgggagccgggcggcggagctgtgaagaagcaagcggcggcacgggagcagcggcgacggacaggtggcgagccttcgcccgcgccgccaggggctgctgggccacccgcggagcctcgcggtccagacgtggcgggggtggcggcggcatcccggacggcctgtgagggatgcgccgcccactgccccgcgccgcctgaccgtccccgcctcgactcgcggtgcgccacagccgggcccgcggccgtccccgccgcgttgtcgcccggtcgccgcgcccgcggggccgcgcccggcacggccatgtggacccccacggaggaggagaaatacggcgtaggtaggtgaggctcaggcctggccgtggcgggggttctgggggacgcgcccagctcccggccccgcctggattcgcatcctcgtgcccccgccactgcccgcaggctgcgcggcctcggcgcggggcgagcgcggggtgggggcaggtgcgggtgcgggtgcgggtgcgggggtgggcgcgggtctctgtgcagagagggcggcagggggcgctggcggtgcggccttggcaggtgcggcccgcgggaggggtgggcaaggcccgggcagttgcccgaggtttctggtgt

SEQ ID NO: 281182 - DNA, 312 bp, Homo sapiens
  chr3:51975954-51976266
  hyper
cctggcaagaccccgcgtattgataggcttccaccgcccgccgggccccgcctcctactgctccattgggtccttctgcaggctctgccacgcccccaggcacccataggatgcacgcttgtagccccgcctcctgaagttcctaggctcccgcaccaggctcgagtaggaagcccgcatctccacggcgcttccggcctgatgctgtggcgcttgcgctctgctgctggcccacttcgaagtcggagcaagagccttctctgtgtttgcgccccttggccgctggggggcgccagagacgcggcgcccttt

SEQ ID NO: 281183 - DNA, 37 bp, Homo sapiens
  chr3:51989952-51989989
  hyper
cgccgctctgctgccggcctgcacgctcggggtggcc

SEQ ID NO: 281184 - DNA, 150 bp, Homo sapiens
  chr3:51990500-51990650
  hyper
tcgcctactcggccttcgcggctcaccccttcctgtacgggctgctgcagcgccccgtgcgcttggcactgggccgcctctctcgccgtgcactgcctggacctgtgcgggcctgcactccgcaagcctggcacccgcgggcactcttgc

SEQ ID NO: 281185 - DNA, 195 bp, Homo sapiens; identical to SEQ ID NO: 198950
  chr3:52001297-52001492
  hyper

SEQ ID NO: 281186 - DNA, 203 bp, Homo sapiens; identical to SEQ ID NO: 229526
  chr3:52001981-52002184
  hyper

SEQ ID NO: 281187 - DNA, 115 bp, Homo sapiens; identical to SEQ ID NO: 229527
  chr3:52008007-52008122
  hyper

SEQ ID NO: 281188 - DNA, 100 bp, Homo sapiens
  chr3:52009563-52009663
  hyper
tgtctacctgtctgcgtgtgtgcatttctgggggtttgtgtgtgtgtgcgtgtctgctttcctgtgcatgtgcctttcttgtgtgaatgtgtagtcttac

SEQ ID NO: 281189 - DNA, 485 bp, Homo sapiens
  chr3:52009693-52010178
  hyper
ctgaggatcagcctgtggttttcaaagtgtgcatctccatcagtctctctggcttcctgatgcctgactgtgtgcgtgatgtagagggtaccattacaagggattaattgcacacgggccagtgtgtgtgcaaagaggctgcatgtacatgcagggaatagcttgtgcaaaagaaaagcgtgtgggggcaagactcgtatttgtgcgtgtgtgcacctgtgtgtcattgtcaacgcatattccaatgacctaacccgggcacagtttaccctgccccccgcaaacccccgcaggcggccagctgcaggtccactacaatttcctagtactgcgggcaccctcggttgccaaggcaacagcctaagccccgcccttcccgctttggagaagcgcgggggcgccccgagtgggcagcaaggaaatgtccctcgcgcccggtgggaatctggactaacgcccagttagagacgcgcgtctgaggttgt

SEQ ID NO: 281190 - DNA, 210 bp, Homo sapiens; identical to SEQ ID NO: 229529
  chr3:52017371-52017581
  hyper

SEQ ID NO: 281191 - DNA, 188 bp, Homo sapiens; identical to SEQ ID NO: 229530
  chr3:52029759-52029947
  hyper

SEQ ID NO: 281192 - DNA, 103 bp, Homo sapiens; identical to SEQ ID NO: 198951
  chr3:52273293-52273396
  hyper

SEQ ID NO: 281193 - DNA, 131 bp, Homo sapiens; identical to SEQ ID NO: 198952
  chr3:52280023-52280154
  hyper

SEQ ID NO: 281194 - DNA, 139 bp, Homo sapiens; identical to SEQ ID NO: 229533
  chr3:52570462-52570601
  hyper

SEQ ID NO: 281195 - DNA, 321 bp, Homo sapiens; identical to SEQ ID NO: 229534
  chr3:52720017-52720338
  hyper

SEQ ID NO: 281196 - DNA, 225 bp, Homo sapiens; identical to SEQ ID NO: 229535
  chr3:52739477-52739702
  hyper

SEQ ID NO: 281197 - DNA, 122 bp, Homo sapiens; identical to SEQ ID NO: 229536
  chr3:52740139-52740261
  hyper

SEQ ID NO: 281198 - DNA, 322 bp, Homo sapiens; identical to SEQ ID NO: 229537
  chr3:52804893-52805215
  hyper

SEQ ID NO: 281199 - DNA, 198 bp, Homo sapiens; identical to SEQ ID NO: 229538
  chr3:52931643-52931841
  hyper

SEQ ID NO: 281200 - DNA, 303 bp, Homo sapiens; identical to SEQ ID NO: 229539
  chr3:53164409-53164712
  hyper

SEQ ID NO: 281201 - DNA, 147 bp, Homo sapiens; identical to SEQ ID NO: 222158
  chr3:53190592-53190739
  hyper

SEQ ID NO: 281202 - DNA, 226 bp, Homo sapiens; identical to SEQ ID NO: 198954
  chr3:53195774-53196000
  hyper

SEQ ID NO: 281203 - DNA, 264 bp, Homo sapiens; identical to SEQ ID NO: 229541
  chr3:53289956-53290220
  hyper

SEQ ID NO: 281204 - DNA, 302 bp, Homo sapiens; identical to SEQ ID NO: 229542
  chr3:53381571-53381873
  hyper

SEQ ID NO: 281205 - DNA, 581 bp, Homo sapiens
  chr3:53527819-53528400
  hyper
ttgaacaacacgagcggtttgaaagaccttggctttgacttccctgtacctgcctccaaacacacgtgggggcggggtggggtggggggagatattgccccccatccccgttgccttccgcgacgccaggccaggcgcagggcaggggagaagatggggggcgccctggattcgcggttccagctgcaggcagttacctggggtagtgagtgctctctacagacccgggctaccccaacccccccgattccagaaagggccggagaaaagcagggggcgcctgccccgctccggagcagccagggagcccggccgagccttgacgaggatgagctcggagaccgcagcagctaccgcccgctagcacctgagctcccagggggcggggcctcctccaggtgtgcgcagaggaggccggcgcggagtcggggccggcgcgggagcccgagctgtcccccagcccagaaatgcgcggggaggagcggttcatccgcaccccagcgccgcgggagacactggcgccgcctgcctcctccgggtcccggggggagagcgcaccgtgcggcgcggagggggttaac

SEQ ID NO: 281206 - DNA, 229 bp, Homo sapiens
  chr3:53528643-53528872
  hyper
ggcgtgcggcgcggcgcggcgggcgcggagcgagcgggcgggcgagcgcctccgtccccggatgtgagctccggctgcccgcggtcccgagccagcggcggcgcgggcggcggcggcgggcaccgggcaccgcggcgggcgggcagacgggcgggcatggggggagcgccgagcggccccggcggccgggccggcatcaccgcggcgtctctccgctagaggaggggac

SEQ ID NO: 281207 - DNA, 48 bp, Homo sapiens; identical to SEQ ID NO: 198956
  chr3:53879618-53879666
  hyper

SEQ ID NO: 281208 - DNA, 247 bp, Homo sapiens; identical to SEQ ID NO: 198957
  chr3:53879786-53880033
  hyper

SEQ ID NO: 281209 - DNA, 273 bp, Homo sapiens; identical to SEQ ID NO: 198958
  chr3:53925898-53926171
  hyper

SEQ ID NO: 281210 - DNA, 201 bp, Homo sapiens; identical to SEQ ID NO: 198959
  chr3:54156155-54156356
  hyper

SEQ ID NO: 281211 - DNA, 239 bp, Homo sapiens; identical to SEQ ID NO: 198960
  chr3:54157074-54157313
  hyper

SEQ ID NO: 281212 - DNA, 80 bp, Homo sapiens
  chr3:55518994-55519074
  hyper
gaggcctcctagggcgacactctccttcccaagcccagaagaagaggtaccaaccctgtgtccagctggccgagtcccat

SEQ ID NO: 281213 - DNA, 78 bp, Homo sapiens
  chr3:55519141-55519219
  hyper
gggggcctccgagggcccctgctgggagagtggggtctggtggtcgggagggatgaagggagcaggggtgggagggag

SEQ ID NO: 281214 - DNA, 263 bp, Homo sapiens
  chr3:55519253-55519516
  hyper
accgaggctcgcaggagtcctacctcaaggcggccaacagggggcagccggcaccgcaccgcggggaagaaaaggccgcggggatggctccgagttctgcgcgcatagtgctaaccccttgagcaccggagcgcacgggggaggggaggagaagacaggggactcttgggccgggcctcctggggagggtcttccgttgagagggtcggggggtggaggagacgaaggctactacgtcctggacccgagaacaactcccctac

SEQ ID NO: 281215 - DNA, 346 bp, Homo sapiens; identical to SEQ ID NO: 198961
  chr3:55521390-55521736
  hyper

SEQ ID NO: 281216 - DNA, 43 bp, Homo sapiens; identical to SEQ ID NO: 198962
  chr3:55522552-55522595
  hyper

SEQ ID NO: 281217 - DNA, 39 bp, Homo sapiens; identical to SEQ ID NO: 229552
  chr3:55523371-55523410
  hyper

SEQ ID NO: 281218 - DNA, 379 bp, Homo sapiens; identical to SEQ ID NO: 198963
  chr3:56501326-56501705
  hyper

SEQ ID NO: 281219 - DNA, 259 bp, Homo sapiens; identical to SEQ ID NO: 229554
  chr3:56590946-56591205
  hyper

SEQ ID NO: 281220 - DNA, 898 bp, Homo sapiens
  chr3:57112574-57113472
  hyper
ccgtctctggctgcgaggcacccacgctgaccttaaccccttggcgtcctccaccctggtgtcctatctcgggattttctggctgctcggtttacaagatgcagccgccgggacaagggcctcaggcaggctgggacggcgcccgccgcccggagcgccctgagcccggctcccccgccgcgaagtgacccgcggccctgtgagccgccaccagcagcgcccgacgcgacgctgacctgcgggtgccccgcggggctggagaagaaagttgagcgaaaggggcgcgtcccaggacaggtggcacctccctccccggaagtggctccgggaattttcgctcaaggggctacccggggaacagagtcagggtccccagcaggagcgacggctagtcgaggctggcggtggcactgcccacctgcgctgcgcccagtgcgcccccgtgcgctgggcataccccagaccagggagcgctcagggcccgccggggacgccgagacctagcagggtaactcggaggtgggagtgggggtccagctcggggaccagggcaaaggagggactagaccggaagacggtctcactccgggagacctagcgggggtgtcccgccaaaggggtgtctagccggggagggtctagcgcgggagcgggtttcccgactgcttcccgcactcacctcgacccccgcgctggttcggcctctccaggctggaaaactcaccgcggcggcggcggctgcggcggcggctcccctgggctgggcggggccgggggcggggaggccgggccggccacgtgggcgggaggcgggccggggacccccgcgggcgccggagccgggcgacgcaggacttggacgtggccacgcccggccaccgctcgacaccccagctcc

SEQ ID NO: 281221 - DNA, 179 bp, Homo sapiens; identical to SEQ ID NO: 198965
  chr3:57198370-57198549
  hyper

SEQ ID NO: 281222 - DNA, 567 bp, Homo sapiens
  chr3:57198581-57199148
  hyper
acgaagggctgaaccgggaggcgaagtttctcaggaggtcccggagtcagaggaggggtaggagtggggtgacggccccaggcgaggaggaacaaagctactagaagagcggggcgcatccctccccggtgctccaagtcccctctccggccgcccgggccttagcagggttgtggactgaaagtccgggagaatacccccttccctctccaaagcgcaacccggtccgggtggctcgggggatcccagcccgggacacgcagccctgggacgaaggaggtcccgggccaagaacaaagggtggggcgcccggcccagccccgccgcccctcacgcccgccctctgaatgggaccccggccggcggccgcacctcattagcaacacaaagccggggtcgggcagccgctttcatctcggccagggccggaggacacgcgtccggggagggaaaccaggaggatgcgcgggaggagtgagacccaggccggccgcggaccccgcgaagagcagacaggttggcgcgggctcgcctccccgcgagcacctgtgcgcgctgcgtcccccg

SEQ ID NO: 281223 - DNA, 126 bp, Homo sapiens
  chr3:57204028-57204154
  hyper
gcctggcctgggaccgccttgcctgggacgaaaggccccagactcagctgattcctccagactcttcctgtctaggacgccaaaaacatggccttcctaaacccagccttggcgcctcctgcacag

SEQ ID NO: 281224 - DNA, 336 bp, Homo sapiens
  chr3:57204208-57204544
  hyper
tgcgcccagaaatcccaggacgcccaccccatagttctggagcggtgcgtaccttggccactacacggaattcaccggcccacggccacttcccgtttcttttcccggaggaaaagaagagcggatgtctagtctccaaggtaaccgcgagggggcgcgcgcagtccaggtcggagaccgccgccccagactaccctgcactgcgaccgcacaacaagtctttctagatcaaagccgccagggcaggtgggagtactctgctgttattcagagctggtgctaagctttaggggaagtagagtccagggggtcgtaagaaaacggatcaaatgggtc

SEQ ID NO: 281225 - DNA, 218 bp, Homo sapiens
  chr3:57261348-57261566
  hyper
gggattaagactggacgcttcgagcggagttgggaatgttatcatctgaggaaactaaaaggcgccagcagtaggactttctccaaggtctctgacaaaatatgttgcgggaaaagtcaacccgccccaaattcccccgtgtggccctaactcgaggctctggctcctcgcgccggcaagctgaggaagagacggtcccctgcgatttagatacaaac

SEQ ID NO: 281226 - DNA, 174 bp, Homo sapiens; identical to SEQ ID NO: 229559
  chr3:57261815-57261989
  hyper

SEQ ID NO: 281227 - DNA, 139 bp, Homo sapiens; identical to SEQ ID NO: 229560
  chr3:57262340-57262479
  hyper

SEQ ID NO: 281228 - DNA, 196 bp, Homo sapiens; identical to SEQ ID NO: 229561
  chr3:57541812-57542008
  hyper

SEQ ID NO: 281229 - DNA, 305 bp, Homo sapiens; identical to SEQ ID NO: 229562
  chr3:57583320-57583625
  hyper

SEQ ID NO: 281230 - DNA, 41 bp, Homo sapiens; identical to SEQ ID NO: 229564
  chr3:57741912-57741953
  hyper

SEQ ID NO: 281231 - DNA, 62 bp, Homo sapiens; identical to SEQ ID NO: 229565
  chr3:57742969-57743031
  hyper

SEQ ID NO: 281232 - DNA, 622 bp, Homo sapiens; identical to SEQ ID NO: 198968
  chr3:57994558-57995180
  hyper

SEQ ID NO: 281233 - DNA, 166 bp, Homo sapiens; identical to SEQ ID NO: 229567
  chr3:58203325-58203491
  hyper

SEQ ID NO: 281234 - DNA, 48 bp, Homo sapiens; identical to SEQ ID NO: 198969
  chr3:58223132-58223180
  hyper

SEQ ID NO: 281235 - DNA, 179 bp, Homo sapiens; identical to SEQ ID NO: 198970
  chr3:58224037-58224216
  hyper

SEQ ID NO: 281236 - DNA, 144 bp, Homo sapiens; identical to SEQ ID NO: 229570
  chr3:58292072-58292216
  hyper

SEQ ID NO: 281237 - DNA, 64 bp, Homo sapiens; identical to SEQ ID NO: 229571
  chr3:58318385-58318449
  hyper

SEQ ID NO: 281238 - DNA, 484 bp, Homo sapiens; identical to SEQ ID NO: 229572
  chr3:58419468-58419952
  hyper

SEQ ID NO: 281239 - DNA, 62 bp, Homo sapiens
  chr3:58571201-58571263
  hyper
gatctcccccaggcggggcttaagcgggaagggcgagcagttccagagcgggccgcgcgggg

SEQ ID NO: 281240 - DNA, 63 bp, Homo sapiens
  chr3:58572571-58572634
  hyper
tgctcccacttacccgaccggagcagcacagcccggtagagcccggtggcatcggagggcccc

SEQ ID NO: 281241 - DNA, 494 bp, Homo sapiens; identical to SEQ ID NO: 229575
  chr3:59035464-59035958
  hyper

SEQ ID NO: 281242 - DNA, 578 bp, Homo sapiens; identical to SEQ ID NO: 229576
  chr3:61237049-61237627
  hyper

SEQ ID NO: 281243 - DNA, 1845 bp, Homo sapiens
  chr3:61546308-61548153
  hyper
cctagtcctcccatttcccccggacgcctctccccgattgctaaagaagcagccgctccccgggtagctgccaggaaatcagtccggccccgcggcgctgctttcaccctgcagggtgtaagaggcgcacttcctgcgccctccccgcggccaaaccggggtgcgggaaccttctccagagaagctgcgagttggggaaactccgccaccgatccatcgtggcgccgggaaaggggatgcggggctcggaagggctagatttcgcaatcctgggatcgacattcctcccctcccccactttccccagccttggactgggccaatgaaagcccgaaaaagaaaaaaaaaaaaaattaaatctcaatgtagccggagtgcaaaggccgctcggctttgtttcccggcgggggaatgcgctgtgttggaggcgcgaacaggagccgcagacggtgagcctcaccgctgcaaatgccagggcagtgaagccgaacagaaaaccccatcgctttaaaaaggcagctgtccgccctccccctttcccctcgccagggcgaggggcccctcaagtccgggatccgcgagctgcgcggaggatctcgccaaacccgagcaccgtgcggcgtcttttaagagctcgaacaacgggaatccagcaaaaaacaagccggccccagaaggcagcctccctcctctctccgcgcacgggctacaatcgcccccagtccccaaactgtcccagtagaggccgcgcggagagagcagagccgagggacccagcgcaaggcgggagccaagcgcggctgctttaagaacgcggagagcgcgcgcccgccgccagctggcccgggctgcgcgcccccgccgccaccgcgcgccccctgttcgctcgctccttcgctcgccggctttaaagtctctgccaggatccatgctcacatgttacttcctgtatggaggcatggccagtttccagccccgcgctcttcgttccttcccagcctgcgccggagccacaactttcaggagcatggactgaaggcgccctcgccccagcgcccctctgagatcctttgtgttttcctccgtttcctccggccgtttctattttggggggctctccgctccccctgcctctcccctccccttcccctctcgcaaacatgcctccttccttcccggggccctggaaggagctgcctgcctgaagcccggagacgccgcgccgcgctcagccccgccgccgcccgccggctctcgggctgtgctgcgctgccgactcaagttggggatcctcggctgctcgccgccgccgcccgcggtccctgcctgccccaggcccggggcatcgccgccggccgccgactccgcgccctgcccgatcggctctctcctttttaaacggaaagcagcctttctccgccgagaggatcgtccccagcgtggctctgcgttcccggtcactttttgagattttccggggggcgctcggcggcttcccggattccaaggggactcgggccgccgagcgcggggggcccgtggagcgggcgagccggggaagcgccccggcttagcggaggctcgcacggaggcaagaacttattcaacaagtttacctccctgctttcctcttttcgatgtgcgttttcggacatgcggaggttactggaaccgtgttggtggattttgttcctgaaaatcaccagttccgtgctccattatgtcgtgtgcttccccggtgagtgccggccgccgaggggatgcggccccggccggcgcgcgttggggatgcggagttgtcgcctgggcgcggagctccggcgcccgtccgggagaccctggaga

SEQ ID NO: 281244 - DNA, 704 bp, Homo sapiens
  chr3:61548213-61548917
  hyper
tgtttagggaggcaggctagtggtcgaggaaggtggaggcaggggctggccggggagggggctgggggacgcgggggtctgctcccgctcccttttgggggtcctggggagctggaatcgggagaaagggggacttgctttgctgactcgtcgccgatcgggagaactcgagttgtggggcggttggggagactgaggccatggaaaggatgcttctgtgggtttggggggcccgggatgagccccctcgctctggcgggtattgaaggaactcagaaggtgggggtttgctttgctgttctccatccctttgggagggctaggtttcggggaatggaagtcggaggctggctgcggaggactgaggatgtgtggggagcagcctgcgttctgggtcgggggcgtcctccctctctctgggggctggggcgcgggcagcacttcggtgccggcgtgaggcagcctccttgggcgcagtgagacggcagggcgcaggcggtttcggagagatccgtgtctcccctagccccggcccgtggccctttccctccgctgctctgctcgattggattgcctgggtctggacgcggggagggggcgggggcggtttcggcggccggggcggtttcggcggccgggttgctgttcgcgccggggctgatttttttcctgtctcgcgcgccctgcctaccttcatctttgcc

SEQ ID NO: 281245 - DNA, 51 bp, Homo sapiens
  chr3:61549008-61549059
  hyper
atcaccgcacgtaacggtgtgcggctcggcgaccctccacttccagctctc

SEQ ID NO: 281246 - DNA, 90 bp, Homo sapiens; identical to SEQ ID NO: 198973
  chr3:61656126-61656216
  hyper

SEQ ID NO: 281247 - DNA, 44 bp, Homo sapiens; identical to SEQ ID NO: 198974
  chr3:62254650-62254694
  hyper

SEQ ID NO: 281248 - DNA, 31 bp, Homo sapiens; identical to SEQ ID NO: 198975
  chr3:62254724-62254755
  hyper

SEQ ID NO: 281249 - DNA, 332 bp, Homo sapiens
  chr3:62304669-62305001
  hyper
taaggccccggcgtcggcgcagtagctggtgccttcccggaagggctcagaggcgggctcggtgagtggagtcggacagtgggtgggtgccctgactgcctgacggccgcgcagggccttgcaggaccgctggggaggatgttgttaacgtaaagagccaggctgatgaggaaggttcatgagtcctttgggtataagcgggagttggggcggccggagggcagatgactctgagaaggtgcggatcttcgattctaaggggagaatgtgatttggttttgtctaaagtgctgatagtgggcctcacagaaaagttaccatgaaccgacttt

SEQ ID NO: 281250 - DNA, 70 bp, Homo sapiens
  chr3:62305093-62305163
  hyper
gaaaatatctgtaatttagaccccggagggcgggcctgtgagcgattgctgtccgcggtgctgaaggaaa

SEQ ID NO: 281251 - DNA, 44 bp, Homo sapiens; identical to SEQ ID NO: 198976
  chr3:62358624-62358668
  hyper

SEQ ID NO: 281252 - DNA, 40 bp, Homo sapiens
  chr3:62360635-62360675
  hyper
ttgctagccagcttttgcaagaccacgagctttgtagccg

SEQ ID NO: 281253 - DNA, 269 bp, Homo sapiens; identical to SEQ ID NO: 198977
  chr3:62365154-62365423
  hyper

SEQ ID NO: 281254 - DNA, 444 bp, Homo sapiens
  chr3:62859447-62859891
  hyper
agccagaaggtggcggcgaagtcaccttgggaagaggagaatagggtcaaagacaggacggcggaggggctgacccggacggaaggaccagagggcgtgcccctgctctggggtcagtgaggaagggtcagggggactggtgagaactccagccataaggaagcagtgcccgaggacactttggcgacgctagtcggtgatcagctgacccgggcagggagaggagggtgcccttcgcagagtcacgggaagcttcgccttctgggcttgctttctcccgcctgcccctgcggttgctctctgccccagcgagcggagcgctgctccaagacgctcttctccctccacctcggcgcccccacctgccgttgcccccgcccgccgaacgcacgcccaggagggcgggcccggagttgagcgcagccgcccgccgctggagagcgc

SEQ ID NO: 281255 - DNA, 205 bp, Homo sapiens; identical to SEQ ID NO: 198979
  chr3:62859964-62860169
  hyper

SEQ ID NO: 281256 - DNA, 233 bp, Homo sapiens
  chr3:62861325-62861558
  hyper
tgggggagggagaaatccagaaaccagccgagcgggctgtttggagacgctaaatcgagaggtcttacttaggaggaggaagtccgtgagatcttatacgggaaagaaagggtccatctcctttccccaggcttctttacacctggggcgtggggggcgtgggggctgggcagcgtgtttgtcccacctgtgtaaactctgattccagcaacttattccgcatgcgcccagtc

SEQ ID NO: 281257 - DNA, 52 bp, Homo sapiens
  chr3:62861939-62861991
  hyper
taggccagtaaacctggtaaacgagggagctggccaacgtgctgaatgtaac

SEQ ID NO: 281258 - DNA, 77 bp, Homo sapiens; identical to SEQ ID NO: 198981
  chr3:63264062-63264139
  hyper

SEQ ID NO: 281259 - DNA, 85 bp, Homo sapiens; identical to SEQ ID NO: 198982
  chr3:63264169-63264254
  hyper

SEQ ID NO: 281260 - DNA, 152 bp, Homo sapiens; identical to SEQ ID NO: 198983
  chr3:63264840-63264992
  hyper

SEQ ID NO: 281261 - DNA, 40 bp, Homo sapiens; identical to SEQ ID NO: 229597
  chr3:63850067-63850107
  hyper

SEQ ID NO: 281262 - DNA, 395 bp, Homo sapiens
  chr3:64430905-64431300
  hyper
cacaggtgcgcagccgcggggcgcagtggggctgcgcgcgggcgctcgcggccggctggaggtgcccggcgatcggccccgctcgagcgggggacactcaccgagcggctggagagtcttttccgggagctccggctgaacatggccggacgcctcctgctcgcagcgccgtccgtcggtccgtccgcgccgcggccgggagggcgggtagcctgggcgggcaccctcggcggccgctggcctggctgtctccgccttgcagtccccggctcgctccggagcgcacgcctacccctcctcccttccctctgcctctccctccacgcccgcaggtccctccctctctcccggcatccccccgccctcccgggttcgccccgcggtccaccggctct

SEQ ID NO: 281263 - DNA, 354 bp, Homo sapiens; identical to SEQ ID NO: 198985
  chr3:64671301-64671655
  hyper

SEQ ID NO: 281264 - DNA, 306 bp, Homo sapiens; identical to SEQ ID NO: 198986
  chr3:64671732-64672038
  hyper

SEQ ID NO: 281265 - DNA, 211 bp, Homo sapiens; identical to SEQ ID NO: 198987
  chr3:64672413-64672624
  hyper

SEQ ID NO: 281266 - DNA, 138 bp, Homo sapiens
  chr3:64673125-64673263
  hyper
agaagcctccgctgcggggtgcccctgcccaggagcgaggaccgggaggcggcgtcggggccggcggggtcccgggggccggagcctggttaccttgcctcgggtgcagcctgtccttgcgcacggccgccgcggcgt

SEQ ID NO: 281267 - DNA, 519 bp, Homo sapiens; identical to SEQ ID NO: 198988
  chr3:64673419-64673938
  hyper

SEQ ID NO: 281268 - DNA, 187 bp, Homo sapiens; identical to SEQ ID NO: 198989
  chr3:66023466-66023653
  hyper

SEQ ID NO: 281269 - DNA, 1318 bp, Homo sapiens
  chr3:66024122-66025440
  hyper
cgctcccctgcacacgctcgcgcactcaagccatcataaaacaaactttctgggcttccccgcgagccccgcacaggcgcccgcgagctttgtttgcattccggtgcctctgggtccacgttccggcgcccgcccgtgctctcccggaccagagtccactctgcgccgctcgggttatttttttttccttccttcctttctctcttgccttttacaaatgcggtgcctcctctttgcctcccgcccggctcgcctctcctcgctggcaggctgttactgagggtgagggaagcccttccagccagttgccgggagccctgaagacgcggtggcggggcggcggggagcagggcgggaggtaagtgctcgcggcccctttaagcagatacaaaggctcggcttgttttgttacagttcattctattccgcgccgcggagcgcagcggccggcgacaggagacgcgcgcgcatgcgccccgcggccgccagccggccggcccacccctcccctcctccccgaagggagagattccaacgtgcttcccgatgggtcctaaaaccgacctgccgggagaaggcaactcccccccaacccttcctgaacccctatcctctctccttttctttcagtgccctggactccgcggattcctttggggctggagggccgcacacgtgttttactccaactgtttgcaacttttgaaacccgggcaatctggctttggcatttgaaaaccatttcaaacaggtgggggttggggaggctgccacactcaccctggcgctcacactcacgcacacgcgcacgcactcgcgccggccctaagcctcctaaccgccctcggccagtggctggccaggctgtcggtcacccagcccggctggttcgccgccccccttgccgcaggtcccactgaaacccccgagacccgccccggggcgctcgccgcctccctgcctgccctgcgcttgcgggttcgggtcctggcgcggggtctgccagggtctctgcgacccgggggagggggacggtgggatcctccggttccccaactgggatccctgtgcgggtcacacgcgctcttacacacacccgcatccttaaactttgggaccaactttttaggacacgggaaactacaggcaagagagagaagccatggtgctagtgtgggttcaggtattcaaccaaaaaagagatccctctagcttttcaactgccctgccagcagagactgctggacccagtcaatcatctgccccggcctcaagttcctggcagggccgagaagcctgcggacctactccggggcca

SEQ ID NO: 281270 - DNA, 62 bp, Homo sapiens
  chr3:66025506-66025568
  hyper
actcggaattcgcagcccgggggtagctgcggcctccggaggtcgcccgggggtgcggatgg

SEQ ID NO: 281271 - DNA, 1604 bp, Homo sapiens; identical to SEQ ID NO: 198991
  chr3:66550298-66551902
  hyper

SEQ ID NO: 281272 - DNA, 1093 bp, Homo sapiens
  chr3:67048277-67049370
  hyper
gcttgatttcataccggaagctagtcactggcaggaagtttacggaagaagaaaaaggtaaaaaaatgtgccgggggccaggagagaggcctaaaatggggaaattcgcacttgaagagctttccctaccccagcccctcagaatgacagttctcctccgccagaagactacctctcccggcaggcactgcgcgctcgacggccacaggctggccagctccctgctctccacctccatccgaatcagccaataggaattcccggcttgggcctccgcccgacccggaccacgcgggagccggggcaatcaaactacatttcccgacacgcatgtgctcgcgtcgtggccaatcagcgccaggaattcggaggctaggggtggagccagatgcacaggacaccccattggccaggggaagcttagaagagccggaacccgggagctagagaagcgaaatgacatttcctttttaaatagctggagtcggggccccatcgagaaatggccgcgtcggcaggtgggtcgtgtggtggccagggcggcgtggagggaggtgagggggaaggtgggccggggccggccacaggcagtgggatgaggacgtagcggtgcggagctagagggaaggatgaagcggtggaggggaatgagaagagggaggatgaatggtgcggagggcggtgggcggtccggcgggaccgggatggggaggctgggtacccgccggcgctgcgccccaggaggcagcgggaggcggcttgagggggcaccggcggccgccgttgttcgagcttccctcgtgaggctctgccctcggctctcggcggagtccgcgcagacgcctctcctgggctgcgagcgcgtttcctccgcgagcacgggtgccgggctcgccgggctccgcaggagcaggctggcctttgaacttgttccgccgatcgcgctccgccctctgtctcccagatccttaactcgcggtcccacgaggtcgtgcgtatatccacagacatttgtatatatcttgtagggggaaaaagcctagcaagcagacacacaaacagaaaaatcccgcgatgccgtaactggctcggc

SEQ ID NO: 281273 - DNA, 106 bp, Homo sapiens
  chr3:68056798-68056904
  hyper
ggggaccagttgcgcgcccaagtttctgatgctcagttctgaagtgctcccagccctccacccgcctctccaaatcccatcaatggcctcctccccccatccgtcg

SEQ ID NO: 281274 - DNA, 200 bp, Homo sapiens
  chr3:68057180-68057380
  hyper
ggctggcttgtgctaggggctgaggctgggggctgtttctgggccctgccaccctgtttcccccagccctggtctgacagggaaggcgagggggcgctggtgcccctgcaggtgggcagggaaaccgccctcttcaggacgcgcttgtatttctgcatcctgtgtcctgagcctggcgcgggaaccgccactcaaaccct

SEQ ID NO: 281275 - DNA, 158 bp, Homo sapiens; identical to SEQ ID NO: 198993
  chr3:69062098-69062256
  hyper

SEQ ID NO: 281276 - DNA, 241 bp, Homo sapiens; identical to SEQ ID NO: 198994
  chr3:69434906-69435147
  hyper

SEQ ID NO: 281277 - DNA, 800 bp, Homo sapiens; identical to SEQ ID NO: 222176
  chr3:69788414-69789214
  hyper

SEQ ID NO: 281278 - DNA, 1738 bp, Homo sapiens; identical to SEQ ID NO: 198997
  chr3:71113096-71114834
  hyper

SEQ ID NO: 281279 - DNA, 1334 bp, Homo sapiens
  chr3:71630565-71631899
  hyper
acattcctcgctcccggtgccttatcgctaggctcgcgccaccccggctggctctttggggacggagaacccctagtgccgcctggggctctccggtgtccctggaccccgcgcccgcggccgcctcgacttacccgcggagtccggggagggagtaggagcgccgccttcacgcccgcggaggaggcgccggcagcaccatggtccccggcgccgctgccgctgcccccggcccgctcgctcgctcgccgcgcgctctcttcctcttacaaactttcgggttctgcagtcgacaagaaaccggggcgaccctcagcaagtcttccccgtgcaggctggggggaactgaaggggacgggacgggtgagtaggccgaggggccaggacagagagggcagcgggctccgaggacccgcgagtgcgcgtggagggaagagaggatgcggctcagggaatccctgcaaggatccagagaccgggaaatcggcccgagccaaagtctcagcaccttccccaggatctcacaaagttgcaacaacaaaaaggaggggggaggaatagggagaagggggtgggatggggatacgatcacgggcgcaaggtttggagttacaactgtttatttagtccttattctcacagggggcgggagctgcgcgggaatggggggctgcaggcagcgatttcgaagcaaacacatgggaggggggcatgcgactttgtttccgggagcggagctccccagagcccgtgtgtgtcactgccagtctcccgggaccaaggcggagctcacaacaggtggggaggggggctcgtcgagggccaaaaagaagaaggaatctaagtttccgagcgcgacgttgtctgaaaaggagggaggcgggaggcgggggcgagggaaggcggaggcagcaaatgaccgcgaccccgcggcaactggcaaactcctcggctcccggcgccgccgccaccgccgtggtccccactcgaagcgcacgccgcctcggctcgctggctccagggagtcgtctcggcgggacaggaatagagcgcagggagctcgggaggaaggctgcgcgcaagcgagggacggagagccatcggccgccaggacagggccggagggacgaggcgacacgcgcgcgacgcaggacaaatcggagcttgggaaatctccccgtcccccaagcttcagaggggggtaaaatcagaaaatgtgtgtgatggtgggagagagatccgggcgcggcgactcctcgcagcgcatccggctcccgcacccacccgtggatctggccacggctgttgcggactcgtctcgggaaagcggaggc

SEQ ID NO: 281280 - DNA, 62 bp, Homo sapiens; identical to SEQ ID NO: 229614
  chr3:71633202-71633264
  hyper

SEQ ID NO: 281281 - DNA, 60 bp, Homo sapiens; identical to SEQ ID NO: 198999
  chr3:71802788-71802848
  hyper

SEQ ID NO: 281282 - DNA, 38 bp, Homo sapiens
  chr3:71833528-71833566
  hyper
gcgggggaaagccccggaacccagaaggaagctcccac

SEQ ID NO: 281283 - DNA, 225 bp, Homo sapiens
  chr3:71833751-71833976
  hyper
tccaaaagtacttgagaagactcagagagaaacttctttcagcctaacagaagaaaaatgcgaggagtgaggccgtgggtgatgagggagaagtaagcgggagaaggtggtaataaaggtggtgggcgacatccttgtcactgtttcttccaggacgcgcccagtgtccccagccgtctgctgcttttggatctgggtattttcccaagtgcaccaaggggcgac

SEQ ID NO: 281284 - DNA, 381 bp, Homo sapiens
  chr3:71834745-71835126
  hyper
ggggacacagcagcccctgaatccattcgtttgttcagcaggtctatactgggcgcccgctgcgtgccaggtactgccaccggctctctcctcacggtggaataacttaacagagaagacagacatcaatcaaataccctggaaacgtggaaggcaggggaaagaacaaagggagagcaaaatcgccccaatcccacatcacccgcgacgtgaaaggatttgtccttccagctgcgggactcctatttgtttatttcaagtcagaggccttccctttatgcccacatctgttcccgaccctctcctctgattttcctcacatgtatttcctcccctcttcagccccgcgccagctccaggcacagccgttcagggtgatgc

SEQ ID NO: 281285 - DNA, 166 bp, Homo sapiens; identical to SEQ ID NO: 199001
  chr3:72149792-72149958
  hyper

SEQ ID NO: 281286 - DNA, 117 bp, Homo sapiens; identical to SEQ ID NO: 199002
  chr3:72150077-72150194
  hyper

SEQ ID NO: 281287 - DNA, 272 bp, Homo sapiens; identical to SEQ ID NO: 222183
  chr3:72496511-72496783
  hyper

SEQ ID NO: 281288 - DNA, 174 bp, Homo sapiens; identical to SEQ ID NO: 199004
  chr3:72787765-72787939
  hyper

SEQ ID NO: 281289 - DNA, 254 bp, Homo sapiens; identical to SEQ ID NO: 229621
  chr3:72897526-72897780
  hyper

SEQ ID NO: 281290 - DNA, 391 bp, Homo sapiens; identical to SEQ ID NO: 222184
  chr3:73673262-73673653
  hyper

SEQ ID NO: 281291 - DNA, 308 bp, Homo sapiens; identical to SEQ ID NO: 199005
  chr3:73674224-73674532
  hyper

SEQ ID NO: 281292 - DNA, 448 bp, Homo sapiens
  chr3:74663366-74663814
  hyper
ccccagagcaagtccgatgagagaagcatcttttattctcgacccgtcaggtgcatttccctgcaaacaaacttcggggctgaggagccatgaagccagggcgtaaagtttgccctggcaggtggctcatccctgtggcccggccggcgccaggagtcgggcatcccggacttacctggtctctgcagctcgccagacgcccgccccgacggcccactcgccgccgccgccgccgccgccgccgccgccaccgccgccgccgcagttagtccgggcccggggggccgccgtgcgcgcccgcgtaagccgccgccgccgcaggcgcagcaccctcgtccgcacggttcccggcccagtccacggcgccagcccgcccgccgctgccaccgccgccgccgccaagcgccaggctgctgtggctgctgccggcgcctagcgagcactgccc

SEQ ID NO: 281293 - DNA, 72 bp, Homo sapiens; identical to SEQ ID NO: 199008
  chr3:75471467-75471539
  hyper

SEQ ID NO: 281294 - DNA, 339 bp, Homo sapiens; identical to SEQ ID NO: 229625
  chr3:77087670-77088009
  hyper

SEQ ID NO: 281295 - DNA, 360 bp, Homo sapiens; identical to SEQ ID NO: 229626
  chr3:79067251-79067611
  hyper

SEQ ID NO: 281296 - DNA, 320 bp, Homo sapiens
  chr3:79067817-79068137
  hyper
aggtttgtcttctccggccccaggatttccgaggaggctcagacactttcaagaaccatccaaagcgaacaacaaagagccgaggcagaagcgcagtagtgccgtttcctgcctccacggtcttgcggagcctcccggcgtgcgcccccacaatgtgcggccgagcgccgctgcgagggcaggcgcggcggcggcggcaaagttggggtgtgagagctgctgagggagggccaaaaagtgcttctccgtctcccggcgagcccagtcagcagcgggccacccgcggcggcggcgatagcagccaaagtagaagcagcagc

SEQ ID NO: 281297 - DNA, 215 bp, Homo sapiens
  chr3:79068331-79068546
  hyper
gcggcgcccaacatcgccctcggcccctcgccctctggggcgctcgcaggcacccctaaactacgcagaagcccaaacttcctgggggcagctgcctgcacccctggctcgtggaagctgtaaagaggcagctcccggctctccccggggtggcagagaagggcagagaggatgctgctgcgggtgggagagacggccgccgcggctcaccccag

SEQ ID NO: 281298 - DNA, 73 bp, Homo sapiens; identical to SEQ ID NO: 229628
  chr3:79068799-79068872
  hyper

SEQ ID NO: 281299 - DNA, 181 bp, Homo sapiens
  chr3:79815913-79816094
  hyper
ggggcagggagaaggagcaagaaggggccccagaagggcacggcgtttcatcaataatgcagaggctcctggacctccctgcaatacgttttccagctaaacgccaccaactggagcgcttcctggttcgtcccactcgtgtggtttttgtgtgtgaaagatgggacgcacctttttcatt

SEQ ID NO: 281300 - DNA, 370 bp, Homo sapiens
  chr3:79816408-79816778
  hyper
tcagcggcactgagattaggctgcaaagttgcccggccccagcccactacaccgctgatgctcgccgcatccctagagcaaattccgctgtgtgcccccaagaagccaaaagcggcacgaaacctactccaacaagggttagcccagccacacacacaacaaacaaattccaaaacttctttgttaagcagccgcagcctacctggaacggacactctgcacaactggcaaggaagaaacaaacatcgcatccctgcaggaaaacttgttgaatccctcccgatcgcaaggctgcaatttccgatttagcctgaaggtttttgattctaccccaaaacaccctggcgcatcagccacaatttctggataa

SEQ ID NO: 281301 - DNA, 201 bp, Homo sapiens
  chr3:79817015-79817216
  hyper
ttttaaacctaagagtggggaaatagggagagagtgaagtcgggtttcttctctgtatcagcaccctggaaaaattcaatccttcttcagtagagaattctttcaaacccgttatctgtattactattaatgcgcagagcagaaggcattgcatacaaataggtccaagtgtgcgcttctattggtggctgcggaggcccc

SEQ ID NO: 281302 - DNA, 125 bp, Homo sapiens; identical to SEQ ID NO: 229631
  chr3:81810245-81810370
  hyper

SEQ ID NO: 281303 - DNA, 83 bp, Homo sapiens; identical to SEQ ID NO: 229632
  chr3:81810985-81811068
  hyper

SEQ ID NO: 281304 - DNA, 91 bp, Homo sapiens; identical to SEQ ID NO: 229633
  chr3:84597195-84597286
  hyper

SEQ ID NO: 281305 - DNA, 417 bp, Homo sapiens
  chr3:85008817-85009234
  hyper
aggtaatccccgccccggcgcagggaacatcaacttctcgcccattccccatcttccccattccaccccatatttccactctcccctcccagtctccctgtccccagcgatttccaccccctccccctactctctggtgcggcagggggcagtggcagtttgcaccagcccctcgaatttctaacactggctcagccctgccttcccagcagtcagccccttacgcggcaccttttgccttctcattcacctgagcttccttcatctcactccattcccgccagcatccccctcccacgccttttggctggcaacttgtgcctctctgaacattccaccctcccgacaacccccaccagccacctcccacatcacgctcttgagcgaccctctccatctcttgtcatctctttaacc

SEQ ID NO: 281306 - DNA, 140 bp, Homo sapiens
  chr3:85010662-85010802
  hyper
ccgggtgtctgacacgttacttaggtttttaatccgcgctgagacaatctcacagagaccctacttcacctctcagtaacttgcatttctcagctctgctgtgtgtgtgtgtatgtgtgtgtgtgtgcgcgcgcgcgcgc

SEQ ID NO: 281307 - DNA, 60 bp, Homo sapiens; identical to SEQ ID NO: 199012
  chr3:87039596-87039656
  hyper

SEQ ID NO: 281308 - DNA, 206 bp, Homo sapiens; identical to SEQ ID NO: 199013
  chr3:87040548-87040754
  hyper

SEQ ID NO: 281309 - DNA, 65 bp, Homo sapiens; identical to SEQ ID NO: 199014
  chr3:87276369-87276434
  hyper

SEQ ID NO: 281310 - DNA, 266 bp, Homo sapiens
  chr3:87841792-87842058
  hyper
ggggcgtccgcccacccgcaggcgccccggacccgcaagggcggcgcaagacttccccagcgcgcagtcagcgtcgcggccccgaaagctggcgacaggcgctgctgtcttcccgccccgtggggtcgcccctgccctcccgcgccccggggctgggggcgccaccttgccagctccgactgctgcagggagcgccaggggtgagtgtgcggatcagcgctgagcccgggagtgcgggtcacgcccgcagctggcgcgcaggtggg

SEQ ID NO: 281311 - DNA, 313 bp, Homo sapiens
  chr3:87842412-87842725
  hyper
cagcggaaggaggggagagtcttcgaatccatctctcggtgggatcttgagaggattcgcgggggggacggtaagataaatctgaggagctggaagaagccgtagatcggaaatcgcttgcagttttccaactttatttcccgcgggtacgaaccattaaggtaaaagggtcagagagagcttctacctcgcggctgcagcttgcctagttgccgcaggtctgactcaaggtagggttgttggcgccttcctgtttggaggggcaatcaagcaaaagagaaagggggatccgagagaccggcggaatgagggt

SEQ ID NO: 281312 - DNA, 163 bp, Homo sapiens
  chr3:88198587-88198750
  hyper
tgagaggaaagtccgctggaaggcggccaggcacagtggattatctatttttaacttttcatactataatgttaaacaaaactaaattattttaatttacttaatttaaggaaccaaactaccggctcacccaactcagaagtggccgcagaagacattcaag

SEQ ID NO: 281313 - DNA, 147 bp, Homo sapiens; identical to SEQ ID NO: 229641
  chr3:88199142-88199289
  hyper

SEQ ID NO: 281314 - DNA, 432 bp, Homo sapiens
  chr3:89156623-89157055
  hyper
ccggtctccttcccgagcagctctgggctgcagagccagctgcgtgccatcccgctctgcttcagcgcacgctgaagacggcactaggacccagggaagtccccgagcggggttcgcggaaaggcagccagactcctccttatctccagtgtcaaacttgacatcagcctgcgagcggagcatggtaacttctccagcaatcagagcgctccccctcacatcagtggcatgcttcatggagatatgctcctctcactgccctctgcaccagcaacatggattgtcagctctccatcctcctccttctcagctgctctgttctcgacagcttcggggaactgattccgcagccttccaatgaaggtaagccaggtaccgcgacgcacggagctctgccccgcggggctcacgctcttcaaagcacgttctcac

SEQ ID NO: 281315 - DNA, 380 bp, Homo sapiens; identical to SEQ ID NO: 229643
  chr3:89163679-89164059
  hyper

SEQ ID NO: 281316 - DNA, 38 bp, Homo sapiens; identical to SEQ ID NO: 199017
  chr3:93692750-93692788
  hyper

SEQ ID NO: 281317 - DNA, 125 bp, Homo sapiens; identical to SEQ ID NO: 229645
  chr3:93698754-93698879
  hyper

SEQ ID NO: 281318 - DNA, 374 bp, Homo sapiens; identical to SEQ ID NO: 229646
  chr3:93781639-93782013
  hyper

SEQ ID NO: 281319 - DNA, 338 bp, Homo sapiens; identical to SEQ ID NO: 199018
  chr3:96531740-96532078
  hyper

SEQ ID NO: 281320 - DNA, 253 bp, Homo sapiens
  chr3:96533782-96534035
  hyper
caatttggtttcttcttgcctctgctgacagcgtggccaggcgactgcagtcacgtctccaacaaccaaggtaagggacggggcggaggagcgggagtgggtgggaggaggagggtgcttggagaaccagggtactggttgcctcctgcaggtaactttgtacaggggtcagagtctcctggctcgccacacgaggggatcgaggatgtccccttaccctagcgccctgtttacaccgcccgggacggtgact

SEQ ID NO: 281321 - DNA, 51 bp, Homo sapiens; identical to SEQ ID NO: 229648
  chr3:97483452-97483503
  hyper

SEQ ID NO: 281322 - DNA, 31 bp, Homo sapiens
  chr3:97483737-97483768
  hyper
cagatttccatcccggagaccgatacgagtg

SEQ ID NO: 281323 - DNA, 101 bp, Homo sapiens; identical to SEQ ID NO: 108591
  chr3:97483833-97483934
  hyper

SEQ ID NO: 281324 - DNA, 271 bp, Homo sapiens; identical to SEQ ID NO: 222186
  chr3:97690771-97691042
  hyper

SEQ ID NO: 281325 - DNA, 37 bp, Homo sapiens; identical to SEQ ID NO: 229650
  chr3:97691378-97691415
  hyper

SEQ ID NO: 281326 - DNA, 32 bp, Homo sapiens; identical to SEQ ID NO: 229651
  chr3:98241908-98241940
  hyper

SEQ ID NO: 281327 - DNA, 92 bp, Homo sapiens; identical to SEQ ID NO: 199021
  chr3:98311894-98311986
  hyper

SEQ ID NO: 281328 - DNA, 209 bp, Homo sapiens; identical to SEQ ID NO: 229653
  chr3:98312340-98312549
  hyper

SEQ ID NO: 281329 - DNA, 323 bp, Homo sapiens
  chr3:98451047-98451370
  hyper
ctctgaacactcctccccttctgatagggaccaaaccttctgctgagccttgtgtcacagtcagtccgcggcgccacaagcctcagtgtttacttctgccgcctgccagccgggcggggaaggggagtacccggccacccctcactttagctcctgcagctttccaaacaaaccagggcgggatgggagtgtcttcttggctgtggaaatcgatcctcctaccttgtcctgaagccacccgccgcctttcctcgtccctcccttcgcggtgattttccggtcccggcgcccggcgagggcgcgcggctggtgtccgccccgcc

SEQ ID NO: 281330 - DNA, 206 bp, Homo sapiens
  chr3:98451479-98451685
  hyper
ccaccgtgcaactggcgccagccgcggagcaggaggagcttcccgcgactccggaggcgctcggcgcagtcgcccgggattggggctggcgggagcctgagactccgggcagggctgctccctcctctgctcccccgccagatccgcggggaaggaatcgtgcccgcgccgcccctggcccgcgccaccttcctttggtttctgcc

SEQ ID NO: 281331 - DNA, 160 bp, Homo sapiens
  chr3:98452371-98452531
  hyper
ccctccacaatggaactagacctaacaaaacaagctccgaggcagtttaggagaaaggaggacggtgagtaaattgcagtgtttgggctgctgttaattttcaagataagggagaagcaacttgtcattttgaggccgccggctccggagatcccggcaa

SEQ ID NO: 281332 - DNA, 292 bp, Homo sapiens; identical to SEQ ID NO: 199024
  chr3:98619762-98620054
  hyper

SEQ ID NO: 281333 - DNA, 73 bp, Homo sapiens
  chr3:98621126-98621199
  hyper
gatgcagtgttcagtttttaatatatgtgttccctgttttctctgctctttttatggcggggggtgggggaca

SEQ ID NO: 281334 - DNA, 117 bp, Homo sapiens; identical to SEQ ID NO: 229656
  chr3:99536600-99536717
  hyper

SEQ ID NO: 281335 - DNA, 115 bp, Homo sapiens; identical to SEQ ID NO: 199025
  chr3:99594776-99594891
  hyper

SEQ ID NO: 281336 - DNA, 56 bp, Homo sapiens; identical to SEQ ID NO: 229657
  chr3:99787818-99787874
  hyper

SEQ ID NO: 281337 - DNA, 131 bp, Homo sapiens; identical to SEQ ID NO: 229658
  chr3:100053358-100053489
  hyper

SEQ ID NO: 281338 - DNA, 448 bp, Homo sapiens; identical to SEQ ID NO: 199026
  chr3:100120034-100120482
  hyper

SEQ ID NO: 281339 - DNA, 981 bp, Homo sapiens; identical to SEQ ID NO: 199027
  chr3:101231399-101232380
  hyper

SEQ ID NO: 281340 - DNA, 495 bp, Homo sapiens; identical to SEQ ID NO: 229661
  chr3:101280471-101280966
  hyper

SEQ ID NO: 281341 - DNA, 189 bp, Homo sapiens; identical to SEQ ID NO: 199028
  chr3:101292846-101293035
  hyper

SEQ ID NO: 281342 - DNA, 99 bp, Homo sapiens; identical to SEQ ID NO: 229663
  chr3:101395081-101395180
  hyper

SEQ ID NO: 281343 - DNA, 69 bp, Homo sapiens; identical to SEQ ID NO: 229664
  chr3:101396030-101396099
  hyper

SEQ ID NO: 281344 - DNA, 184 bp, Homo sapiens; identical to SEQ ID NO: 229665
  chr3:101405383-101405567
  hyper

SEQ ID NO: 281345 - DNA, 472 bp, Homo sapiens; identical to SEQ ID NO: 199029
  chr3:101443394-101443866
  hyper

SEQ ID NO: 281346 - DNA, 298 bp, Homo sapiens; identical to SEQ ID NO: 199030
  chr3:101497996-101498294
  hyper

SEQ ID NO: 281347 - DNA, 103 bp, Homo sapiens; identical to SEQ ID NO: 199031
  chr3:101498504-101498607
  hyper

SEQ ID NO: 281348 - DNA, 204 bp, Homo sapiens; identical to SEQ ID NO: 229667
  chr3:101546676-101546880
  hyper

SEQ ID NO: 281349 - DNA, 580 bp, Homo sapiens
  chr3:105087451-105088031
  hyper
atcccttcagctgtcggcaagctcaggtcacagaagaggtttgaaagcctctgaatctctcccaggaactggcggggagaggggtttgggggccagagcctgaggaagagattacaagtgtttgcgagctgctgctgctgctgccgttgctgtgtgtgtgggcgggaggagtgccctctccagatctctttattaaagttacatttctgggtgaggtaatgagctcacctgatgtttctgaggctgagggaaaaaaaaggcgtctgcgttctctgacaaatctcgggctctggggcggggactgtgaaaccatagttcaaccggatttaaagcaggtgtcctagtgtaacaacgctggggaggtaggtggaaaggcgagacccccttgggcctggcacagtgtggatttcactttttcgagattccactgtccgatggaggaaaggacactttggagccagggaatgagccaagaagggaggacaagggtgatgtcggtttgtaacatgcaaacgtccacacgcccacagttggttttccgattaaccccctcgagacttggagaatgtaatctcaccct

SEQ ID NO: 281350 - DNA, 474 bp, Homo sapiens; identical to SEQ ID NO: 108638
  chr3:105088087-105088561
  hyper

SEQ ID NO: 281351 - DNA, 40 bp, Homo sapiens; identical to SEQ ID NO: 199032
  chr3:105587995-105588035
  hyper

SEQ ID NO: 281352 - DNA, 236 bp, Homo sapiens; identical to SEQ ID NO: 229670
  chr3:106959643-106959879
  hyper

SEQ ID NO: 281353 - DNA, 241 bp, Homo sapiens
  chr3:107148755-107148996
  hyper
aagccccccccaggcgcccaggctgggaggcccaagtcccggcagctgctgcggtggacttagaggcagcagctcctgcttctgccccaaacgttcagtgtagtcggattcccggggacagcagggcagtctgcgcgcacatccccggggcatcgcaggacacctgctgccccctatcggtggtgagaacaataacccgaacccggttggaatcaactggaagaggccttttgaaaaaaag

SEQ ID NO: 281354 - DNA, 39 bp, Homo sapiens
  chr3:107149063-107149102
  hyper
ctgcctcgttttaatgcagtttttcgccattgtaggaga

SEQ ID NO: 281355 - DNA, 208 bp, Homo sapiens; identical to SEQ ID NO: 229673
  chr3:107243052-107243260
  hyper

SEQ ID NO: 281356 - DNA, 377 bp, Homo sapiens
  chr3:107244663-107245040
  hyper
ggagacggcagtggccgcccaggtctgaaaggctgagggcttcgatacctggacccgctgccgccgcggtggcacctcccgccgtctcctgggcaaggcgaggctcgggctgcctatcgatccctatgatttggttactggtgtgtttgtcctgggggcggtgatcacttgtgcaagttgatgaatgatcgcggtgtggtttttgcgtttgcagaatggatcaactttctgctttgtacatgtggggagtaggaagcgagggtacgggagataccctagaatgccagttgggttgccccccagcctctgccctttcaatacggggagcttctttgccttctgttcccacagttctccagtgtcggggggtggtagag

SEQ ID NO: 281357 - DNA, 393 bp, Homo sapiens; identical to SEQ ID NO: 229675
  chr3:107646510-107646903
  hyper

SEQ ID NO: 281358 - DNA, 708 bp, Homo sapiens; identical to SEQ ID NO: 229676
  chr3:107940770-107941478
  hyper

SEQ ID NO: 281359 - DNA, 34 bp, Homo sapiens; identical to SEQ ID NO: 229677
  chr3:108307932-108307966
  hyper

SEQ ID NO: 281360 - DNA, 99 bp, Homo sapiens; identical to SEQ ID NO: 229678
  chr3:108308519-108308618
  hyper

SEQ ID NO: 281361 - DNA, 907 bp, Homo sapiens
  chr3:110789734-110790641
  hyper
aaatccatggcctcctgttgccagtcgcccggcgcggaaagtggacagcccagcggccagtgagaagcaagagcaagaaagcaaaccttctgaagacccctctcctcgcccagctccgccgaccattctaccaagctgccctcccagaaaaaagagcaggaaaaatgcctgtgcaaacgtgccttggcgagcggggaataagtgggctgggaagaagggaaggattcggagagcacagctgtcccggggaacaggaaggaggagaaagtctctccctcccttcagtgccccgcgccccagcgaggaggaagattactagtccagcaggctgcgtccagcttcctacacaggaacctttagcatgggcaacggaagggcagccccctcctgccttcccctccccaccccaccccctcgtcccaggtccccgccacagggagagcgccgcccgggagaggagaaggccgagcgtgattgtcccgcagccctcgcctcagtcggcgccggggcccccgtggacccgcgaggggtggagtgggcgagaccattggaaaggcagggaaggggggaaaccaggcaggaacgaggggcggggccgactaacctattccagattttcctgtcccttttaaatctctgctgtgggagaaaccccgttatcaaagtggatgaaaagaatatttttttttgaaaggggaggagcatgtgtaggagggcggggtgggaggagacagggcttgcgcccggggatcagacgggaggtggagttgcgcggggagggcgggcgagtcgggcgcccgctctgagagtcggtttcttttccccctcttgcgtggggcggggtggtgcgttccgagttcccaggagttcgacgcgggcgggtgccgaggggaggggagtggcggcg

SEQ ID NO: 281362 - DNA, 649 bp, Homo sapiens
  chr3:110790671-110791320
  hyper
agtggcgtcggcgacggcggtgtcgaggcagccgccagcgttcggccaagtgtcagccggcagcgacggcgctagagctgggagctggggacgcgcgcgccggaccttccacagcctccgcccagagcctgaggcgccggggccgggggagccggggggcgggcgggcgagcgggccggggggagggtgggggatggcgcggaccctgcggccgtccccgctgtgtcctggaggcggcaaagcacaactttcctccgcttctctcctcggagccgggctcctgctgcagcccccgacgccacctccgctgctgctgctgctcttcccgctgctgctcttctccaggctctgtggtaggtgaacctcggcggccggcgtgggctgagggagccgccactgagggtgcgggcgccgcggccggctctgccagccgttctctggagcagcgaggcggttggttgtgcgagcgagtgccgaggactttggctggaaacttttcgccgcgcccggggcgaggccctggaagggccaggccagcgaatgctgagccggcggcccgctgccctcccccgcggccgcgcgggtcgccgtgcggatggccgagggttggcgatggtgcttcgtgcgccgaactccgggtttgctccgg

SEQ ID NO: 281363 - DNA, 123 bp, Homo sapiens; identical to SEQ ID NO: 199038
  chr3:111393432-111393555
  hyper

SEQ ID NO: 281364 - DNA, 1491 bp, Homo sapiens
  chr3:111578040-111579531
  hyper
tcatcaccctaggacgtaaaccctcccgcccttctttcagctcttaaaaaaagcctgccacgaaagtccctactgcgttgctgcgaacgtagctttgagaagctggcgcccagtgatggggcaaacagccatgcccttccagcagccgtgaaagccccaacagcaaactgcctgggagcggggcaggtcaccaacttcgttgctcgaactccctgggtgcccgccgcggtggttacaaagggggtcaagagtgccggacccagccgcgcggagcccaccattgcggcccgagggggacccgacgggggcccgacggtgtggcgtggcgcaaggagcgcgcctgccttctctcgccgccgggaacgggctgcaccaatggccaggtgaggaggcggcggtggtcgcccgggaggagggggtggtgccgactccgtgtgccaggagtgcgtcccggggacgctgcctcccccgcggccgagttggttgccgccggttgcgctgcggagggttgggggcggagaggaggcagtggctgcccgggccgaggaggggcgcgctgactgctcaccgcgagtcaggaggggccggcgggctcacggagggagacagggtgggcgggggcaaaggctaggcgctagggcggcggcgccagcgtagagcggcggtttggaggaaagatgagacggtgagtgggctccggggacacagagtttctttgcttctttacaggctgtagggacaaaagcccgggctggggtcggcagtgcccaggctgcgcagctgggtgggtgggggtggcgaaccccgttgtgcatgactctcggggggctgggtagatctccggttgaggggatcccggggagggagtgtctggtagggaagatgcttccagagtgattgtagaaaacaggcagaatgtgggggaactgggggcaactttttccagcaactctggaatgcacatggagagagggatggggatccttgggatagctccctgagaaagagaaggtccgctgctggatggtgtagggcgcgggattcagagaagactccctccccgcaaatatttggctagctgcgcttctagttccactttctttcaagagtgaacctacgagctttaaccgccaaaagcggctgatttcgatttggcctttgaccccccactgaaagtttacagtgtggccgtctcggcacccctagagatagcagctggaaggcttggggagtattttaaccctctgtttctccagctccctgcgcggcggaggcgcagctgaatcgtttgctggttcgcttaataacttagccctagcagtcatcacttattaaagcgccgaggacctggctaactcccgccaccaccaggaaattaaaaggctgacaggctgtccctcccagggttggggtttcctgtttgaaagagcttgagaagtcaaactgcttcgcggttcctcacttacctttcttatgtaaaagagggagcga

SEQ ID NO: 281365 - DNA, 249 bp, Homo sapiens; identical to SEQ ID NO: 229681
  chr3:111697740-111697989
  hyper

SEQ ID NO: 281366 - DNA, 432 bp, Homo sapiens; identical to SEQ ID NO: 229682
  chr3:111804991-111805423
  hyper

SEQ ID NO: 281367 - DNA, 347 bp, Homo sapiens; identical to SEQ ID NO: 199041
  chr3:112051794-112052141
  hyper

SEQ ID NO: 281368 - DNA, 79 bp, Homo sapiens; identical to SEQ ID NO: 199042
  chr3:112052419-112052498
  hyper

SEQ ID NO: 281369 - DNA, 35 bp, Homo sapiens; identical to SEQ ID NO: 229684
  chr3:112709773-112709808
  hyper

SEQ ID NO: 281370 - DNA, 103 bp, Homo sapiens; identical to SEQ ID NO: 199043
  chr3:112930511-112930614
  hyper

SEQ ID NO: 281371 - DNA, 151 bp, Homo sapiens; identical to SEQ ID NO: 199044
  chr3:112930655-112930806
  hyper

SEQ ID NO: 281372 - DNA, 292 bp, Homo sapiens
  chr3:112931274-112931566
  hyper
gcgccccggccccatgctccaggccgtggggggaacccgaggcgtggcggcaaatgcgtagagtcactcaacacgcactcggcctctttggagggtgagggtttctcatagttggcgtcttctaaaggaaaaacactaaaatgaggaactcagcggaccgggagcgacgcagcttgagggaagcatccctagctgttggcgcagaggggcgaggctgaagccgagtggcccgaggtgtctgaggggctggggcaaaggtgaaagaggtgtgtgtgtgtgtgagagagagagt

SEQ ID NO: 281373 - DNA, 93 bp, Homo sapiens; identical to SEQ ID NO: 229686
  chr3:113233979-113234072
  hyper

SEQ ID NO: 281374 - DNA, 1190 bp, Homo sapiens
  chr3:113251174-113252364
  hyper
agagaacgtgatgacgtgagactctccatggagagtaggaggtaataaagaaataaaacaggtgtctgaggagaggttctattagagaggggagaatagagagtaattatcgttcagacaggcaagagttctctgcaggtagcagcctgggaaagcgaactcgcgcaccctcttgggggacgggctcttttgctttctatttcttctcctgcagccagggtgcacacgtatttgaaacagaccgaatttcctcctcgatgtggcgtcaggttgacttttcgagactagcgggtatttctttttaatgactccaatgcctttttattattgctgttattgaggttgagggagaagagatcggtctaaattctggctgggtaagtggggggattctcggcgatgagaaacgggggacttagaagccggaggaaaatcagcagccccacatctccacttctccagtccgccctactctccacccgtgacctccagtggagaccccaggcggcagcatcagtatttgatcggcccttcgtcagcacgctgccagccctggccggctgggttcgccaggcatcacccgctcggctctgaagcggacgcctggccctgcaccgggctttggaaggaccctctctgcgctcgccccctccccagggtggctccgctttcgagcccgggcgcggtgcccaccatgcgcggctgcctgcggctcgcgctgctctgcgcgctgccctggctcctgctggcggcgtcgcccgggcacccggcgaaatcccccaggcagcccccggcaccgcgccgcgaccccttcgacgctgccaggggcgccgatttcgatcatgtctacagcggggtggtgaacctcagcaccgagaacatctactctttcaactacaccagccagcccgaccaggtaagacactcgctcccctcgctcgactcctagaacttgccagatctcagagccccgtcgctgctttggagtcccctgggaattgaccttgggagacttcggggaccaggggactttctttccctttctcctccgaagcaatcgctgccctgccctagctgcctcaacacgcctcggggacaactctgcttcgcctcgcgcctctcctggcctggtcaagggcattgctgggctttgcagaggcaccagttccccgcaccgtctgcgggtcctg

SEQ ID NO: 281375 - DNA, 217 bp, Homo sapiens; identical to SEQ ID NO: 229689
  chr3:113415721-113415938
  hyper

SEQ ID NO: 281376 - DNA, 252 bp, Homo sapiens
  chr3:113557555-113557807
  hyper
cttcaggctaacccggtaacacccatcgtcaggaatccttcacggccgccagagggcgcaaggagctgcggctggaagtactcggagggccggcggaggaggcgcgcggagcctgtaactcgcagcgcgcgctggaggtgggcgcggggcggtgcggtgcggtgcgcgcggggcggtgccgcggcggcggagggagccgcgatggagggcgctccgactgtccgtcaggtaagccgcgggcctcgctggggc

SEQ ID NO: 281377 - DNA, 84 bp, Homo sapiens; identical to SEQ ID NO: 229691
  chr3:113666356-113666440
  hyper

SEQ ID NO: 281378 - DNA, 377 bp, Homo sapiens; identical to SEQ ID NO: 229692
  chr3:113775219-113775596
  hyper

SEQ ID NO: 281379 - DNA, 241 bp, Homo sapiens; identical to SEQ ID NO: 229693
  chr3:114866221-114866462
  hyper

SEQ ID NO: 281380 - DNA, 62 bp, Homo sapiens; identical to SEQ ID NO: 199048
  chr3:115231423-115231485
  hyper

SEQ ID NO: 281381 - DNA, 351 bp, Homo sapiens
  chr3:115377288-115377639
  hyper
tttaggcgttccctcggcggctctgcagtgtgatctcatctctttgtttctccccggctgccgtcagtcaccggctctctgcgcccccacccgcgcgggctcgcggccgtgctgcgggcgtggcctcagccgctgagaccctggggaccgcagggcgtggcgcggcctccgcccgctgcacggagagccccccagaggcagcgacacggcgcttggggtccgcggggctcctcctccaactccgcagacctccggggaggcctcttgctccccgaacacccgggagttcgctttcatttttaacgaatctccacaatctcttgtttgggagataattgcttctttcagggg

SEQ ID NO: 281382 - DNA, 37 bp, Homo sapiens; identical to SEQ ID NO: 199050
  chr3:115377953-115377990
  hyper

SEQ ID NO: 281383 - DNA, 31 bp, Homo sapiens; identical to SEQ ID NO: 199051
  chr3:116163677-116163708
  hyper

SEQ ID NO: 281384 - DNA, 303 bp, Homo sapiens; identical to SEQ ID NO: 199052
  chr3:116163989-116164292
  hyper

SEQ ID NO: 281385 - DNA, 52 bp, Homo sapiens; identical to SEQ ID NO: 199053
  chr3:117715651-117715703
  hyper

SEQ ID NO: 281386 - DNA, 174 bp, Homo sapiens; identical to SEQ ID NO: 229698
  chr3:118959826-118960000
  hyper

SEQ ID NO: 281387 - DNA, 33 bp, Homo sapiens; identical to SEQ ID NO: 199054
  chr3:119041464-119041497
  hyper

SEQ ID NO: 281388 - DNA, 282 bp, Homo sapiens; identical to SEQ ID NO: 229700
  chr3:119182268-119182550
  hyper

SEQ ID NO: 281389 - DNA, 253 bp, Homo sapiens; identical to SEQ ID NO: 229701
  chr3:119187877-119188130
  hyper

SEQ ID NO: 281390 - DNA, 76 bp, Homo sapiens
  chr3:119298797-119298873
  hyper
ggagcgtgtcaaccgccccgtttctttccaaagccgggcatggcccggaagcagctgatcagatcttagttctgaa

SEQ ID NO: 281391 - DNA, 127 bp, Homo sapiens
  chr3:119422082-119422209
  hyper
cagaccttcctccgcgtccgtcgcctcctaggccaggtgggctcccagatggtgggacctggccaggggcatggcgaacgaaacacgaccctctggactgacctcttgcccacggttgtccttggtc

SEQ ID NO: 281392 - DNA, 224 bp, Homo sapiens; identical to SEQ ID NO: 229704
  chr3:119813913-119814137
  hyper

SEQ ID NO: 281393 - DNA, 160 bp, Homo sapiens
  chr3:120168944-120169104
  hyper
ttctcttacacttgcgcaacgttacagggaacacttgggaaaaggccgttacattgcccagatgataacacaaaacccgaggacacttcacaaagaagaaaatacatttcagagaatcatgatctcactttaaaagagagaaaggaaaattaattttgcc

SEQ ID NO: 281394 - DNA, 471 bp, Homo sapiens; identical to SEQ ID NO: 199057
  chr3:120169149-120169620
  hyper

SEQ ID NO: 281395 - DNA, 142 bp, Homo sapiens; identical to SEQ ID NO: 199058
  chr3:120626723-120626865
  hyper

SEQ ID NO: 281396 - DNA, 59 bp, Homo sapiens; identical to SEQ ID NO: 199059
  chr3:120627258-120627317
  hyper

SEQ ID NO: 281397 - DNA, 32 bp, Homo sapiens; identical to SEQ ID NO: 229710
  chr3:120628277-120628309
  hyper

SEQ ID NO: 281398 - DNA, 33 bp, Homo sapiens; identical to SEQ ID NO: 229711
  chr3:120628526-120628559
  hyper

SEQ ID NO: 281399 - DNA, 259 bp, Homo sapiens; identical to SEQ ID NO: 229712
  chr3:121264679-121264938
  hyper

SEQ ID NO: 281400 - DNA, 197 bp, Homo sapiens; identical to SEQ ID NO: 229713
  chr3:121468538-121468735
  hyper

SEQ ID NO: 281401 - DNA, 101 bp, Homo sapiens; identical to SEQ ID NO: 229714
  chr3:121553926-121554027
  hyper

SEQ ID NO: 281402 - DNA, 270 bp, Homo sapiens; identical to SEQ ID NO: 199060
  chr3:121741107-121741377
  hyper

SEQ ID NO: 281403 - DNA, 65 bp, Homo sapiens; identical to SEQ ID NO: 199061
  chr3:121902662-121902727
  hyper

SEQ ID NO: 281404 - DNA, 285 bp, Homo sapiens; identical to SEQ ID NO: 229717
  chr3:122101937-122102222
  hyper

SEQ ID NO: 281405 - DNA, 273 bp, Homo sapiens; identical to SEQ ID NO: 229718
  chr3:122134806-122135079
  hyper

SEQ ID NO: 281406 - DNA, 353 bp, Homo sapiens; identical to SEQ ID NO: 229719
  chr3:122282989-122283342
  hyper

SEQ ID NO: 281407 - DNA, 96 bp, Homo sapiens; identical to SEQ ID NO: 229720
  chr3:122399330-122399426
  hyper

SEQ ID NO: 281408 - DNA, 254 bp, Homo sapiens; identical to SEQ ID NO: 229721
  chr3:122399767-122400021
  hyper

SEQ ID NO: 281409 - DNA, 636 bp, Homo sapiens
  chr3:122513919-122514555
  hyper
cggaggccgagggcgaccacagcagcctccgcctcctgctgctcaggactattctgcgctgggctagtcggcggtgacccggactgcgcccggcagtggcttcgcgggcgacgcgtcgccatgggctctcgctggagcagcgaagaggagaggcagccgctgctggggcccgggctcgggcctgggctgggggcctcctggagaagccgggaggcggcggcggcggcgctgcccgcggcggtcccgggtcccgggcgggtatacgggcgccgctggctggtgctgctgctcttctcgctgctggcgttcgttcagggcctggtctggaacacctggggtcccatccagaactcggcgcgccaggcctacggcttctccagctgggacatcgcgctgctcgtgctgtgggggcccatcggcttcctgccctgcttcgcgttcatgtggctcctggacaagagaggtgaggggtcgcggagcgccagcccgcgctgtctctcctccgggagcaggcgcctgcccgcgctccaggcctgccagccgcctcccttggccccggcataggggttgtgtgaggtgatagagtgttgctagcattccatttctgacttaggaaccctccgtccccaaagcgac

SEQ ID NO: 281410 - DNA, 360 bp, Homo sapiens
  chr3:122746181-122746541
  hyper
ctacctggcttcaacttgccagagcccggacccctacctctctaccccgatacccacccgagttgctgaagtttgcaagttgcagccccaacccgcgcaggggaagcgcccggggctcccgggactcacctcccagaggcgggtgcaggtgcccggttccccgcggctcccgactcccgggcggcgcggagcggcgggagctaaccagatgggctggcggccggtctgggaatggggcggccgcgcaggaacggcctccagctctcagcgctccggtgcagtccccacccgggcccgcgcccgctgcgctcgggctcccagcagccgctggatgcgctgccgacccgcccggctcggcgg

SEQ ID NO: 281411 - DNA, 585 bp, Homo sapiens
  chr3:122746969-122747554
  hyper
cgagggccatcggcgcggcctgcccaccccaacactcagggcctgaggaagctcccccaaaccccactccggactcccacattccccagccccgtcagttcggaacgatcttcctgcctgtggatttgaaggggaagggacctcgtgtaaaacgggggagagccgttataacctgcagcggcagagagggaggctaggctgctgggctgggctggaaagccagaactggccggattagggttaaccttgcaaactgtacgataccgagcgaacctctccaagcctcagtttcctcagctgtaaactggggttagtaatacgcaccctacagaattgtgaagaacgagtaggggatacggggagtaaaataacatcaggaacagtgggagggcagccaagagatgagcgatccggggaggtggtggagcgttctcagctgaggacggaaggtttagcgcaatcacaaggagcgaggccgaattgtttacaagtttaagtgatctagtgtttctgatggctagaaggcgggagagaaagattcaaggggcaagcttcaaatcctagctgcccgggctgcaagaggga

SEQ ID NO: 281412 - DNA, 163 bp, Homo sapiens; identical to SEQ ID NO: 199063
  chr3:122785820-122785983
  hyper

SEQ ID NO: 281413 - DNA, 186 bp, Homo sapiens; identical to SEQ ID NO: 229725
  chr3:122920576-122920762
  hyper

SEQ ID NO: 281414 - DNA, 439 bp, Homo sapiens
  chr3:123168102-123168541
  hyper
tcgcggcgagagtggatgcgtggccccggcgaaagccgagccgagccttcggcgcgtccgcgcagggggcggggtccgggtcagggaccggctcctgcggtgcggcccttcccctctcgcctctccctttcccgcaaacggagcggggccggccgggacctgccggcccggagagctgtcgcgcccgcttcgcaagccccaagctcctcgtcgccggctgcgggcccaccgcggccggcgcggaacgactaggcggaggacggaatccggcgcagcgctgccgcggttctgccccgacgcaggcaggcttctcccggggagtaaggcatccagagatccagcgccggggctcagaagcagccggcccagaggggcccgcctgagagccgcggcgcccgagaggcgctccgggggggcccgcgggagcccggctcagggc

SEQ ID NO: 281415 - DNA, 184 bp, Homo sapiens
  chr3:123168908-123169092
  hyper
cgcccccagtcctagctcccctcttttgtatccccctttaatccccctccccccatttaacccaacttcagccccggcgctgcgccccccttccctggcccggctcgattggccgcttccggagctgtcagactacagtccggcgctcttattgggcgattctctggcccggcggctgtgccaa

SEQ ID NO: 281416 - DNA, 120 bp, Homo sapiens; identical to SEQ ID NO: 229730
  chr3:123680449-123680569
  hyper

SEQ ID NO: 281417 - DNA, 730 bp, Homo sapiens
  chr3:123751655-123752385
  hyper
ggaggaggtggccgcggggccgggaggagcaccggcggcgcgagcggagaagctgagcgcgcagcgcccgggccgcagagccccctggacaagcctggcgtgtgccctgcagccccgggctcgcccggcggccccgccccctccctggcccgggcttttcctgcggagctcaggaagccggcctagcacagcctcgaacaatagctcgggactcgggctccgctccccgggaggccggcgcggggccgctgggactgggggcgtaggcgccgccgggggcccgcagcgagccctcggccccggccggagcttcaattcagctcggcgctcccggggtcattgttggccgggactgagggagcgggagccgggggaggagctggggaggcggctgctgcggcggcggcggcggcgggagccagagggggagctagagagcgagcgagcgaaggagggaggtagcgagtgagcgagtgagcgagggagggaggaggtagggagacagggagggtgggagggaggaggaaaaataaagaggagagagcggagcagggctgaacaatagagacaggcagacgggcgagcaggagagccagctgccgctgctgggggacagcgggcgcccaggcagcccgcaccccggccccgggccccggccccagccagacagcaggcggccagcgccctggggaaggggtaccatgggggagctggcggcaggcacccccag

SEQ ID NO: 281418 - DNA, 247 bp, Homo sapiens; identical to SEQ ID NO: 199066
  chr3:123752573-123752820
  hyper

SEQ ID NO: 281419 - DNA, 102 bp, Homo sapiens; identical to SEQ ID NO: 199067
  chr3:123753162-123753264
  hyper

SEQ ID NO: 281420 - DNA, 523 bp, Homo sapiens
  chr3:124605380-124605903
  hyper
atccccccagcagcccgcccgctcccggccggccacaaggaccgctttgtgcccgccaacggagagcccgggccccaaggcagggctggcggcggtcctccccgtgccctgggcgcgggccctggcgggctaggtcagcaggccggccagcctgtttacacaggaagggaagctcctcctcagcccgggagggaacaggagactcacgacagcccggcggggctgcgcgcggggagcgccccgcggggctgtcccccagcgactggcccaccagggagtgccccgaaggcgccctccgccctcaggcaccgcctgcgctccccgcccctccgagacgcccgcccgcggctgagtgtgcgacaaagtttctctgggcgccgtgggcggcgcggcttacctgcgagccggggcaggagcgcgcagagccccaggaggcaggcgtacagcggcgccggggcccgcggcatggtggggcgcctccctcagcggcggcgcggtcgctgcactccgcgggggccggcgg

SEQ ID NO: 281421 - DNA, 98 bp, Homo sapiens
  chr3:124606487-124606585
  hyper
cccgttgcttagccgcccgtcgccacgggaaaggggcggggcacgctgtattaggcgagccgagattacttgggccaaaggcggttgctagactgcga

SEQ ID NO: 281422 - DNA, 453 bp, Homo sapiens; identical to SEQ ID NO: 199069
  chr3:124773932-124774385
  hyper

SEQ ID NO: 281423 - DNA, 441 bp, Homo sapiens; identical to SEQ ID NO: 108777
  chr3:125094185-125094626
  hyper

SEQ ID NO: 281424 - DNA, 33 bp, Homo sapiens; identical to SEQ ID NO: 229738
  chr3:125239049-125239082
  hyper

SEQ ID NO: 281425 - DNA, 71 bp, Homo sapiens; identical to SEQ ID NO: 229739
  chr3:125314510-125314581
  hyper

SEQ ID NO: 281426 - DNA, 178 bp, Homo sapiens; identical to SEQ ID NO: 39562
  chr3:125691029-125691207
  hyper

SEQ ID NO: 281427 - DNA, 191 bp, Homo sapiens
  chr3:125931775-125931966
  hyper
gaagcagcgaaccccgctgtgacggcttcaggccccggcctgtggagggtgggggagtcgcccttgggaggggctgggccccaccgccggctctgcttctcacggcaggggcgcccccaggaagggacaggacagggagctttgtcccgcagcgaacgggaacgcggaggcccggcctctcgcctccccac

SEQ ID NO: 281428 - DNA, 232 bp, Homo sapiens; identical to SEQ ID NO: 199072
  chr3:125932020-125932252
  hyper

SEQ ID NO: 281429 - DNA, 257 bp, Homo sapiens; identical to SEQ ID NO: 199073
  chr3:125986252-125986509
  hyper

SEQ ID NO: 281430 - DNA, 361 bp, Homo sapiens
  chr3:126074822-126075183
  hyper
gggacacgctgttccgggcacagtccccggctggccgccggactccgccccctcccctggcccggccaggcctgctgtttatcctcccggggacacagcggctgcaggaacaacatgtaattgataacaagcccagcgccggccaagggcttgccattgggtcagcgtgcaaatcacgggggtggcggcgggggctgtccttcaaaataagagtctccggtccctgagccgcccgcaggccccaaagtcgcagagtccgggcgtcctcacacctgtagggcggcagggtctccccaggggccacctggtccggggggacagggggaaggagatttgaggctctcaaacaattgttgatttt

SEQ ID NO: 281431 - DNA, 306 bp, Homo sapiens
  chr3:126075653-126075959
  hyper
cccgacactgctgcggtgaccgacagtaacccctccgtctccagcccctccgccccccaaccccgggctggccagcgcgtccgctctccccctcctctcaccaggccgcgccggtgcccaccatatgggagggccggcccgcaaggcgcgccacggaatcgcccggccaggcaccgaggcggcggcgcgggcctcagcaaagtgctggtgggcgaccggggcggggggggtcacctcccccgggccagtccgacccctgcccacctccgcgggggcccatcccgctcctccgacattcctccagca

SEQ ID NO: 281432 - DNA, 179 bp, Homo sapiens
  chr3:126076063-126076242
  hyper
gccgcgcctctcccacctgaacttggcgcacgccggaccggcggccaggccccggcggtcctgcggccgggcgggctgggctgggggcggcggctagactctcggtccggcggcggccgggggccgagccgcgggtcctgcgctggctcgatcgcccgccggcccgcgggtcgctgcgg

SEQ ID NO: 281433 - DNA, 318 bp, Homo sapiens
  chr3:126195083-126195401
  hyper
acctacgagggcgagcggcggggcacgggaccgacaggggacggggtgaggctcccaacgctgagcgattccttctcgttcccgctggcgtggaagacgaggcttgtcttgacttcgaatcgtattaatatttcagacacttaacaggcaacctctcgtaggcattgactgcgtcccaggggctgtacctgtccgagctgattaagcgtgcgcggtcacccaggggtgaggaaacagggacggcgagctcgagtcactcggcagccggcagatccaggattcgaacctgtccaacaggccggacgcctacccccagct

SEQ ID NO: 281434 - DNA, 70 bp, Homo sapiens
  chr3:126242791-126242861
  hyper
gtggggcacgccaccgcgacaatgcctcttggccttgggtggataatggcacccctgggcaaaccctagg

SEQ ID NO: 281435 - DNA, 327 bp, Homo sapiens
  chr3:126243058-126243385
  hyper
tgcgccgcgccgcgcgtcttggtaggcgctgcgctgccggggccgggtcctgggccagtgcaactccgcccccagccgtatccagcggactgtcctccgccgcgcgcccggcacagcatggggaggcgctgctgccggcggcgcgtgctggcggccgcctgtctgggcgccgcgctcctgctcctatgcgccgcgccccgctccctgcgcccgggtgagtgcccgccggccgagccgcgcacccccaaccaaacctggctcctcgcgctttccaccgcggcctgacccctcgacagcgcgggggacacctgttgtctccttcctggc

SEQ ID NO: 281436 - DNA, 176 bp, Homo sapiens
  chr3:126243461-126243637
  hyper
gctcctcctccggagttacctccccactcccagagcggtgactgttttgagtcccacagccggtgcctggagaccggggtcagttgtggggggtagaggacaattggccaatccgggaaggccatctcccttaccttcacccccttcccctgcgcaccccacggcccctggacatg

SEQ ID NO: 281437 - DNA, 48 bp, Homo sapiens; identical to SEQ ID NO: 199076
  chr3:126373704-126373752
  hyper

SEQ ID NO: 281438 - DNA, 326 bp, Homo sapiens
  chr3:126373824-126374150
  hyper
ccgctccagagtctcgctctcgctcctggcccggccgggcctgctcacaaaccgaaacgcaggcggctgcggcgccgggacggggcctgaggggcggcgaacgctgccctcgctggccactctcaccacccgcgcgaatccgcgaggcagccgctcgccccgccccccaacaccgccccgcgcatgcgaaattgggtcccccgcccgcccgcagcctaggtgtcacctgcccttcgcaaaggggcgggtaccaagcgcgagcctctttatctccaggttgtgcctgcgtccggagaccacccaatcttggcgatggcgctctgaga

SEQ ID NO: 281439 - DNA, 202 bp, Homo sapiens; identical to SEQ ID NO: 229749
  chr3:126422878-126423080
  hyper

SEQ ID NO: 281440 - DNA, 358 bp, Homo sapiens; identical to SEQ ID NO: 199078
  chr3:126701039-126701397
  hyper

SEQ ID NO: 281441 - DNA, 113 bp, Homo sapiens
  chr3:126854312-126854425
  hyper
ggggcccttgagcccgagccctccccgcccgcgctgtcaccagggccacggggctcgggttaactgatcgcagggaaaaacccattaagcgcctgcctctcccagtcatccgt

SEQ ID NO: 281442 - DNA, 140 bp, Homo sapiens; identical to SEQ ID NO: 229752
  chr3:127174691-127174831
  hyper

SEQ ID NO: 281443 - DNA, 90 bp, Homo sapiens
  chr3:127176067-127176157
  hyper
cccgccagccctgccggccgctgccctggagaaggagctgcagatggatccccagtgagtaggaggcagccgtgtgagtcaggcagcgga

SEQ ID NO: 281444 - DNA, 340 bp, Homo sapiens; identical to SEQ ID NO: 229755
  chr3:127309528-127309868
  hyper

SEQ ID NO: 281445 - DNA, 39 bp, Homo sapiens; identical to SEQ ID NO: 229756
  chr3:127316969-127317008
  hyper

SEQ ID NO: 281446 - DNA, 207 bp, Homo sapiens; identical to SEQ ID NO: 199079
  chr3:127348123-127348330
  hyper

SEQ ID NO: 281447 - DNA, 45 bp, Homo sapiens; identical to SEQ ID NO: 199080
  chr3:127451716-127451761
  hyper

SEQ ID NO: 281448 - DNA, 101 bp, Homo sapiens; identical to SEQ ID NO: 199081
  chr3:127634312-127634413
  hyper

SEQ ID NO: 281449 - DNA, 129 bp, Homo sapiens; identical to SEQ ID NO: 199082
  chr3:127794264-127794393
  hyper

SEQ ID NO: 281450 - DNA, 288 bp, Homo sapiens; identical to SEQ ID NO: 199083
  chr3:127794860-127795148
  hyper

SEQ ID NO: 281451 - DNA, 49 bp, Homo sapiens; identical to SEQ ID NO: 39590
  chr3:127795229-127795278
  hyper

SEQ ID NO: 281452 - DNA, 104 bp, Homo sapiens
  chr3:127795650-127795754
  hyper
taagtgcagcgtgccgtgtgcggcgtcccagcccgcaccccgcaccccaccatgtccctctgggtgcggggtccgcatgcccgcgccctccccgcagctgccgg

SEQ ID NO: 281453 - DNA, 313 bp, Homo sapiens; identical to SEQ ID NO: 229760
  chr3:127842608-127842921
  hyper

SEQ ID NO: 281454 - DNA, 84 bp, Homo sapiens; identical to SEQ ID NO: 229761
  chr3:127872078-127872162
  hyper

SEQ ID NO: 281455 - DNA, 334 bp, Homo sapiens
  chr3:128201959-128202293
  hyper
cccaaagcagggaacgatttaagcctcataaatcacttcgccctgaaaaaatatatttattattcttagcattttacgcattatttgcagagtggagggtattagaaatttcaaaacagcccagcgagaggcaggactgagctgaggagactctaaaaactcgcagagtccggaaacagatacacgaagtttccttatcttcaggctgcagatgtccggataggaaactccggcaggagatccgaaagggcatttttttaaaatcactcaaatgaaaatacacagtataggtgactccatggaaaaataataaagggcaggtttttttagtggc

SEQ ID NO: 281456 - DNA, 352 bp, Homo sapiens
  chr3:128202708-128203060
  hyper
tcgcttgggcttgatgagtggtcggttctgcccattcatcttgtggtagaggccacaggcattgcacaggtagtggccggtgccgtcccgccgccagagaggggtggctgtggccccacagttgacacactcccggccttctgcaggggaacagggagagacacgggggcctgcttaaccggcaagttctcgggagggagtccagggcaggaaagcagccagccgagcagtgccggtgcctctcaggcacacggttggcctgggcctggctgcaacagcctgggcaggaagagggacgagagggtctcccacatgggagggggcacaggtccagagtcgtttaaagccaaat

SEQ ID NO: 281457 - DNA, 350 bp, Homo sapiens
  chr3:128207363-128207713
  hyper
ttgacccagtggaggtggcccggccggtggctccagaaagggggagggggcacccctccccgggcgtggccttcgcaggccaacgggcccaattgcctggggcgaggccgtggagacccggactggcgccggcgccagctggagggagacgcccccgggcaagaggtggcattttttttcctccggggggggtccccgaggtggcctctggtgagggggaggcggtggtctgaggtctccgtcttctaagtcacctggaagtgctccccactcacttctagcccggagatcggctctatggttcgtgtgggccgggcgcacaagtcttcctccctcccattgtacagact

SEQ ID NO: 281458 - DNA, 337 bp, Homo sapiens; identical to SEQ ID NO: 199085
  chr3:128216309-128216646
  hyper

SEQ ID NO: 281459 - DNA, 392 bp, Homo sapiens
  chr3:128216713-128217105
  hyper
tccaggcaggtcaaacccaaagtcacacaacctgcgacgcgggccccgcccccactccccggccgcccctcccctgccccggccccggccccggccccagcccggcgacccccggctgctgcccaagcgcaggcgcagagcgccacctggcggcggcggggtctcgggtggggtccgcggagccggtgcccgtgcagaagaggtggggtgagggtctctacctccagaaggcgggctctctgggagcaggggctttgctttgtcactgctgttccccagggccagactaacacacagtaggtgctccataagtgtttcttgaaaggatgtttggagggatggatggatggatggatggatgggcaggaaattatagacgggggcaaactgcc

SEQ ID NO: 281460 - DNA, 627 bp, Homo sapiens; identical to SEQ ID NO: 229766
  chr3:128336499-128337126
  hyper

SEQ ID NO: 281461 - DNA, 136 bp, Homo sapiens; identical to SEQ ID NO: 229767
  chr3:128369739-128369875
  hyper

SEQ ID NO: 281462 - DNA, 46 bp, Homo sapiens
  chr3:128564768-128564814
  hyper
gggcggggccaggcggcaggggcggggtgcccaacagccaactgcc

SEQ ID NO: 281463 - DNA, 120 bp, Homo sapiens; identical to SEQ ID NO: 229769
  chr3:128598081-128598201
  hyper

SEQ ID NO: 281464 - DNA, 70 bp, Homo sapiens; identical to SEQ ID NO: 229770
  chr3:128713002-128713072
  hyper

SEQ ID NO: 281465 - DNA, 86 bp, Homo sapiens; identical to SEQ ID NO: 229773
  chr3:128839594-128839680
  hyper

SEQ ID NO: 281466 - DNA, 188 bp, Homo sapiens; identical to SEQ ID NO: 199087
  chr3:128840084-128840272
  hyper

SEQ ID NO: 281467 - DNA, 120 bp, Homo sapiens; identical to SEQ ID NO: 229775
  chr3:128968529-128968649
  hyper

SEQ ID NO: 281468 - DNA, 152 bp, Homo sapiens; identical to SEQ ID NO: 229776
  chr3:129118190-129118342
  hyper

SEQ ID NO: 281469 - DNA, 159 bp, Homo sapiens; identical to SEQ ID NO: 229777
  chr3:129158870-129159029
  hyper

SEQ ID NO: 281470 - DNA, 124 bp, Homo sapiens; identical to SEQ ID NO: 199088
  chr3:129324048-129324172
  hyper

SEQ ID NO: 281471 - DNA, 365 bp, Homo sapiens; identical to SEQ ID NO: 199089
  chr3:129324202-129324567
  hyper

SEQ ID NO: 281472 - DNA, 234 bp, Homo sapiens; identical to SEQ ID NO: 199090
  chr3:129324659-129324893
  hyper

SEQ ID NO: 281473 - DNA, 288 bp, Homo sapiens; identical to SEQ ID NO: 199091
  chr3:129325045-129325333
  hyper

SEQ ID NO: 281474 - DNA, 562 bp, Homo sapiens; identical to SEQ ID NO: 199092
  chr3:129345876-129346438
  hyper

SEQ ID NO: 281475 - DNA, 107 bp, Homo sapiens; identical to SEQ ID NO: 199093
  chr3:129346564-129346671
  hyper

SEQ ID NO: 281476 - DNA, 76 bp, Homo sapiens; identical to SEQ ID NO: 229780
  chr3:129611907-129611983
  hyper

SEQ ID NO: 281477 - DNA, 48 bp, Homo sapiens; identical to SEQ ID NO: 199094
  chr3:129694299-129694347
  hyper

SEQ ID NO: 281478 - DNA, 51 bp, Homo sapiens
  chr3:130064848-130064899
  hyper
gggcctgaggcaggcgggggaggaaacctcgagtagacaggtggatgtgag

SEQ ID NO: 281479 - DNA, 84 bp, Homo sapiens; identical to SEQ ID NO: 199095
  chr3:130235709-130235793
  hyper

SEQ ID NO: 281480 - DNA, 219 bp, Homo sapiens; identical to SEQ ID NO: 229783
  chr3:130465368-130465587
  hyper

SEQ ID NO: 281481 - DNA, 182 bp, Homo sapiens; identical to SEQ ID NO: 229784
  chr3:130613296-130613478
  hyper

SEQ ID NO: 281482 - DNA, 60 bp, Homo sapiens; identical to SEQ ID NO: 229785
  chr3:130745640-130745700
  hyper

SEQ ID NO: 281483 - DNA, 482 bp, Homo sapiens
  chr3:131080676-131081158
  hyper
gtgccttgcggcaccgcccacgctcggattggtccgaggtgagattcgcccttgtgccctcgtaggccttcggaacagcggaagagcagtgtcgggccatggccagggcccgcaggctggagctggccgaggccctggcgctggggccaggctagaggcatgcctgctatgcgctcctgcacgcgccggaccctggaattctctctggccgcctccctctgcgctacgccatactggtgaggagggcgcgcgcccggccactctccgctctggccttgcaccttccttgcggcgctactctcgggtgtccctgccaatcccagcttcctcctctctcagatgcagatgcgctttgatgggcgcctgggcttccctggcggattcgtggactcgcaagacagcagcctggaggacgggctgaaccgtggtctgctggaactgctgggcgaggcggcggccgccttccgcgtggagcgccctga

SEQ ID NO: 281484 - DNA, 428 bp, Homo sapiens; identical to SEQ ID NO: 229787
  chr3:131221628-131222056
  hyper

SEQ ID NO: 281485 - DNA, 228 bp, Homo sapiens
  chr3:131245722-131245950
  hyper
ggaccccgccctgccgcagcaagcggatcagcctggcctccggctttttcgcccgcctggtggagctgttctgtagccgggaggacagctctcgcccaagccgagcatgccccgggcccccgcctccttcccaggagcccctggccctggccatggagctgagccggcgcgtggccgagctgggggacacccgggccggactcagcgtagagcacgcgcacagcctca

SEQ ID NO: 281486 - DNA, 70 bp, Homo sapiens; identical to SEQ ID NO: 108890
  chr3:131246019-131246089
  hyper

SEQ ID NO: 281487 - DNA, 44 bp, Homo sapiens
  chr3:131752786-131752830
  hyper
ctggctactttattccatagaggaagaagcgctgaaggactacg

SEQ ID NO: 281488 - DNA, 816 bp, Homo sapiens; identical to SEQ ID NO: 199096
  chr3:131753156-131753972
  hyper

SEQ ID NO: 281489 - DNA, 84 bp, Homo sapiens; identical to SEQ ID NO: 199097
  chr3:131754152-131754236
  hyper

SEQ ID NO: 281490 - DNA, 42 bp, Homo sapiens; identical to SEQ ID NO: 229791
  chr3:132440491-132440533
  hyper

SEQ ID NO: 281491 - DNA, 281 bp, Homo sapiens; identical to SEQ ID NO: 229792
  chr3:132440593-132440874
  hyper

SEQ ID NO: 281492 - DNA, 210 bp, Homo sapiens
  chr3:132756102-132756312
  hyper
taagagcttggctacgctgaacgacaaaggttctagctggccagtccgaaaacactgagtccttaggtcaaatttgagaaatgacagggccagtgggagtcctaacttctagactctggaattactgacagaagaatatttggacagtttttaagaccctcaaggcatattattttacaacctctttagcttatgcctgaatttgtgctg

SEQ ID NO: 281493 - DNA, 60 bp, Homo sapiens
  chr3:132756477-132756537
  hyper
gattaacgtagacacagtgttctcttccatggccattccgtctccacttctggttccaca

SEQ ID NO: 281494 - DNA, 80 bp, Homo sapiens; identical to SEQ ID NO: 199098
  chr3:132757908-132757988
  hyper

SEQ ID NO: 281495 - DNA, 49 bp, Homo sapiens; identical to SEQ ID NO: 199099
  chr3:133276458-133276507
  hyper

SEQ ID NO: 281496 - DNA, 140 bp, Homo sapiens; identical to SEQ ID NO: 229796
  chr3:133292198-133292338
  hyper

SEQ ID NO: 281497 - DNA, 250 bp, Homo sapiens
  chr3:133465042-133465292
  hyper
tgtgctggactccttccactcgcgggtcgtctccagagctcagaaaatgaggtgatcagtgggacgagtaaggaaggggggttgggagaggggcgattgggcaacccggctgcacaaacacgggaggtcaaagattgcgcccagcccgcccaggccgggaatggaataaagggacgcggggcgccggaggctgcacagaagcgagtccgactgtgctcgctgctcagcgccgcacccggaagatgaggct

SEQ ID NO: 281498 - DNA, 385 bp, Homo sapiens; identical to SEQ ID NO: 229798
  chr3:133524471-133524856
  hyper

SEQ ID NO: 281499 - DNA, 134 bp, Homo sapiens
  chr3:133646157-133646291
  hyper
gccgtgtgttcccgcgggccctctcggtgcctcgtggcaccttactctctactcctcttgttctctaacgtgtttaatacactttcgtgcagaaaacataaatagactaaacggtgctttatcgcgggcagtca

SEQ ID NO: 281500 - DNA, 266 bp, Homo sapiens
  chr3:133646451-133646717
  hyper
gcgctgagccgggtggtggagtcccgcccggctggctgtggggccgcgggggcgtcccgtgggcgggctgggcgtggcgcctccgcgggtggcttccccgggccgcggcggaggggcggcgccccctggtggcggaatgcgactccagggcgcaaggggccgcccaccccgcctcgcccacccggcgggggcctccgcgccttttctgagaaagccagaggaaaggagccgagaccgcagtcccctgggcccgtttcctcgtctgt

SEQ ID NO: 281501 - DNA, 35 bp, Homo sapiens
  chr3:133748105-133748140
  hyper
cccccaaagcgcggggggtccccctggcacctcca

SEQ ID NO: 281502 - DNA, 74 bp, Homo sapiens
  chr3:133748245-133748319
  hyper
ctggagttgtccgagtaagcggtaagcaggtacttccactgtcccattacttagtccgatgaaggcgtgtgaac

SEQ ID NO: 281503 - DNA, 80 bp, Homo sapiens
  chr3:133748401-133748481
  hyper
cgcgtcgcccggggatgagatcggagcgcggcacaggagggagcccggggctcccggagcctcctggctccggcagacag

SEQ ID NO: 281504 - DNA, 72 bp, Homo sapiens
  chr3:133748576-133748648
  hyper
cacagcggccggctcggctagtagaggtgtcgctgccctgggacgcgccgagcttgggcaggagccccatgg

SEQ ID NO: 281505 - DNA, 257 bp, Homo sapiens
  chr3:133748694-133748951
  hyper
tcgggctggagcggccgggcgggtgagaggcgaccgcggcggcagtggccggaggagattcgcggagcggagactgagccagcgagtgcgcgcctagaagtttttataagtggccgccgccgatgatgaaacgcgctctccctcctccctcttttcctcgggtgtcaaaggcgctacgagcccccgccccgccgccgccgccgccgccgccccctcagacaggtgtgacgccgcagcgacccgcgaggcttgactgc

SEQ ID NO: 281506 - DNA, 52 bp, Homo sapiens; identical to SEQ ID NO: 199100
  chr3:133969907-133969959
  hyper

SEQ ID NO: 281507 - DNA, 61 bp, Homo sapiens; identical to SEQ ID NO: 199101
  chr3:134092503-134092564
  hyper

SEQ ID NO: 281508 - DNA, 475 bp, Homo sapiens; identical to SEQ ID NO: 199102
  chr3:134092643-134093118
  hyper

SEQ ID NO: 281509 - DNA, 404 bp, Homo sapiens; identical to SEQ ID NO: 199103
  chr3:134093148-134093552
  hyper

SEQ ID NO: 281510 - DNA, 239 bp, Homo sapiens; identical to SEQ ID NO: 39653
  chr3:134093626-134093865
  hyper

SEQ ID NO: 281511 - DNA, 72 bp, Homo sapiens
  chr3:134125148-134125220
  hyper
acccagcatcccaagaggcccggacaatgggtataaattcggaggatcagacgtgcaggcagacaaaaccaa

SEQ ID NO: 281512 - DNA, 366 bp, Homo sapiens; identical to SEQ ID NO: 229805
  chr3:134204740-134205106
  hyper

SEQ ID NO: 281513 - DNA, 60 bp, Homo sapiens
  chr3:134370196-134370256
  hyper
acggtctccggagggttctcgagagggctggagccgacctcccacgagaagcccctggca

SEQ ID NO: 281514 - DNA, 328 bp, Homo sapiens
  chr3:134513742-134514070
  hyper
gatgaacgaaggctcgtttgatcatttaaagcggatccagtcctgggtgggatgtaagggcacgaggcctccccagctccttcgctgggcaccctatggggggacagggtgagttgggcgggccgctgcggttctccgagagcaccacgagggggagcccggacccctcctagcgccttccgagccctcccgcacagccttgcaagcaaaagtttttcttaaactaacaatgccagtgtaaggaggtgctcgcgcctgattggccgggggaattttgcaggtttgattccttgattggacaggaggtgttaggggtggggagagagct

SEQ ID NO: 281515 - DNA, 78 bp, Homo sapiens
  chr3:134514788-134514866
  hyper
gcctcggtctcccgcagcccccgctcggagagctcggagcccgctgcattgcggtgcatgctccttagctctggggca

SEQ ID NO: 281516 - DNA, 140 bp, Homo sapiens
  chr3:134514895-134515035
  hyper
ggtgcctctggccatccggctcctggagtactggcgcccgtctgctcccaggcacggatacgcttctgagcagccgcgcgccacctccttttctccagctcgcagtccacgggctagtggactctgcttggcgtgcaagc

SEQ ID NO: 281517 - DNA, 294 bp, Homo sapiens; identical to SEQ ID NO: 199105
  chr3:135684610-135684904
  hyper

SEQ ID NO: 281518 - DNA, 278 bp, Homo sapiens; identical to SEQ ID NO: 229810
  chr3:135914741-135915019
  hyper

SEQ ID NO: 281519 - DNA, 64 bp, Homo sapiens; identical to SEQ ID NO: 199106
  chr3:136471113-136471177
  hyper

SEQ ID NO: 281520 - DNA, 406 bp, Homo sapiens
  chr3:136538179-136538585
  hyper
cctaaggggcacaacagtctttttgggtaagggccgggctgggggcgacgcgccccgcccgctttgcagacttcggggtgctctgcacgacgcctgaaaggccgcggggcccgcatttctctgtgctgccctcctggagaaccgggacacggggacgggagggccagcatcggctacggcccggtttcccgtttctttccgctgtcgcgtgtctgggccctcctgcagcgtccatgatgaaggccaggggctgttgctttcctctcgcccagtagccaacccaagcaaggggtgagtcactgtggcgtcatatgggatcaatttcaaatacaagttttaaaaaaggctggatgattttagaaatatggccaagaatttgtattttccattactctcttgtctcatg

SEQ ID NO: 281521 - DNA, 133 bp, Homo sapiens; identical to SEQ ID NO: 199107
  chr3:136538836-136538969
  hyper

SEQ ID NO: 281522 - DNA, 55 bp, Homo sapiens; identical to SEQ ID NO: 199108
  chr3:136751321-136751376
  hyper

SEQ ID NO: 281523 - DNA, 356 bp, Homo sapiens
  chr3:137480764-137481120
  hyper
gtcggggggtcagctggcgccctgcccaccatcgaacgcccttcgtatcactccgctcctcattgcgaattggactgcgcattggctgcgacccaaggctgaacacaagaagcttggagaggagctcgggcgtttgaggagaaggaaatatgaggaattgcaggaaggcgctcgcctgcccgaactgcctccgggcaactggaaaggattgtcctggaaactgagaggagagaaaggacgtaggaccttgtgccagatccccttgctgagtaatttccaagagcttggtttgcattaacccagaactttgggtgtgcgtttggtgtcccctggggggttctagagtgagagattgg

SEQ ID NO: 281524 - DNA, 70 bp, Homo sapiens
  chr3:137482183-137482253
  hyper
tgggaagaggcgcccagggacaaaccgaccctggttgcgatacaccgtgagactccgctgtagggccgct

SEQ ID NO: 281525 - DNA, 750 bp, Homo sapiens
  chr3:137482464-137483214
  hyper
ctgcattgcctgacgcgaggccttccaggagcaggtcagacaacattgctcagccacccagggtcccagcgctacgcccgggcgccgcatcctggggcaggggtggatgcctagttgcaggggcttcccgggagaacactgccaaagcaccgccgagggtggggcgcgaaaagtttatttcgcttttaccctgagcctgctatatgttatttttctcttccaaggatatttgacaagagggcaaagtgctgtccttgcatttcgcggcaaagctgtcctatttatcaacacaagctctcgcctcgctccctttgctgtcccttccccggcctttgtatttcaagccctaattctctttcacaaccgggaaaggaaacaggagacgcggaagagttttatttgttgacagtgcccgagacaatgtggaaccgaagtccccagtctagagctagcctctctgctctagccctctctctgcctctgtccctcacacctctccccgcccccaccagtcgcgctctctgtttcttgcaccggcgtgttggcaggtgcgccccctcggcttctctgctgctgattggcgcccaggttggggagtcgccgccccgcgcttatgtcagagtgcgtgcagtcccggcccacctcgcctttgaacttcgccgcttttggctctcgttcaccagcctccccgcattctcagccaggtgcagcgctaggcgcggcagctccgggaaagccacgggaaggggg

SEQ ID NO: 281526 - DNA, 69 bp, Homo sapiens
  chr3:137483244-137483313
  hyper
gggaactagagaaggcaaaggtggagagggggagaaggaggagcttcttgccctggctaaaaaattacc

SEQ ID NO: 281527 - DNA, 60 bp, Homo sapiens
  chr3:137483589-137483649
  hyper
tgcactccctacccccacccacctagccgccgggaccatgtccaaaccttcagaccacat

SEQ ID NO: 281528 - DNA, 37 bp, Homo sapiens
  chr3:137485832-137485869
  hyper
agggaaaaggaaggcgacattgtcatggctcaggcaa

SEQ ID NO: 281529 - DNA, 204 bp, Homo sapiens; identical to SEQ ID NO: 199112
  chr3:137487099-137487303
  hyper

SEQ ID NO: 281530 - DNA, 247 bp, Homo sapiens
  chr3:137488090-137488337
  hyper
cgccggcgcggcaggagcagagttgtttgggttttacctaggtttgctttcttaaaccttggctgccatctggctcaggggtacactggctacatcttcagagagatgtggaattcttgacccctttccgcctctggcctccctcattccgagaactccgtcagcctttcatgcacttctcggttttggatctgactccaaaaatctttgattcccttccagtttccgagtttttctatttaaatat

SEQ ID NO: 281531 - DNA, 738 bp, Homo sapiens; identical to SEQ ID NO: 108956
  chr3:137833932-137834670
  hyper

SEQ ID NO: 281532 - DNA, 260 bp, Homo sapiens; identical to SEQ ID NO: 229825
  chr3:137893550-137893810
  hyper

SEQ ID NO: 281533 - DNA, 158 bp, Homo sapiens; identical to SEQ ID NO: 229826
  chr3:137906199-137906357
  hyper

SEQ ID NO: 281534 - DNA, 130 bp, Homo sapiens; identical to SEQ ID NO: 229827
  chr3:138048356-138048486
  hyper

SEQ ID NO: 281535 - DNA, 121 bp, Homo sapiens; identical to SEQ ID NO: 229828
  chr3:138048732-138048853
  hyper

SEQ ID NO: 281536 - DNA, 33 bp, Homo sapiens
  chr3:138066747-138066780
  hyper
tcaaaaggtggaattttatggtgttgaattata

SEQ ID NO: 281537 - DNA, 703 bp, Homo sapiens; identical to SEQ ID NO: 199114
  chr3:138067014-138067717
  hyper

SEQ ID NO: 281538 - DNA, 115 bp, Homo sapiens
  chr3:138067747-138067862
  hyper
gaccggctgtgcgtggcgttttgcccccatcgcgggctcccgcgtaacggtgtgcgttcgtgaaatcggccacgaccaagaccccagtggggagggcctgcgcgccgctcagaga

SEQ ID NO: 281539 - DNA, 560 bp, Homo sapiens; identical to SEQ ID NO: 199116
  chr3:138153256-138153816
  hyper

SEQ ID NO: 281540 - DNA, 572 bp, Homo sapiens; identical to SEQ ID NO: 229831
  chr3:138312854-138313426
  hyper

SEQ ID NO: 281541 - DNA, 161 bp, Homo sapiens; identical to SEQ ID NO: 222238
  chr3:138327435-138327596
  hyper

SEQ ID NO: 281542 - DNA, 43 bp, Homo sapiens; identical to SEQ ID NO: 229832
  chr3:138553746-138553789
  hyper

SEQ ID NO: 281543 - DNA, 156 bp, Homo sapiens; identical to SEQ ID NO: 229833
  chr3:138634847-138635003
  hyper

SEQ ID NO: 281544 - DNA, 457 bp, Homo sapiens; identical to SEQ ID NO: 222239
  chr3:138654715-138655172
  hyper

SEQ ID NO: 281545 - DNA, 40 bp, Homo sapiens
  chr3:138656628-138656668
  hyper
gtgcacagtacacacgcgagcacgactgtctgtgcctgga

SEQ ID NO: 281546 - DNA, 246 bp, Homo sapiens
  chr3:138656946-138657192
  hyper
tcctcaggtcacacccccacttaaaataaagaagggtgcctgactcattcaggtcagggaagtcggcccccgggagcctcctgccctcacaagccatggtgaagggaggcgaagccagggtttgccacggcctgggagaaaatgcggctgcagggtctctttgggctgcagcgctggcccggggccccaagactgttaaggtgtgtgtgggaggcgcgcagtgtggctaccgaagagccctccatc

SEQ ID NO: 281547 - DNA, 192 bp, Homo sapiens
  chr3:138657222-138657414
  hyper
cctctcatgcttccaagggttctgagctgcgcagcactcgcatcacccagaagtgtctgtggagaaaacgacctcaggtgtaagcccaaggctgctgcctgcaaaggcaatgccgtggagactgggttccacagcgacctgggtttttaagtcaccgaaagctacagggcagggtcacaaacactctcccgc

SEQ ID NO: 281548 - DNA, 124 bp, Homo sapiens
  chr3:138662849-138662973
  hyper
ttctgctgacgttaaacagccgcaacgggccagtgatgacacagaaaacaaacaatcccaggaaaacaaagcagcagcgacagccacaaacgcctgccaccccggttgctctcaatctttgttt

SEQ ID NO: 281549 - DNA, 268 bp, Homo sapiens
  chr3:138668328-138668596
  hyper
atactgatttctgactgtcccgtagaggaacagaatccccagccctggtgaagaagaggatgcctgatgcgtgcaccctgggaagggctggaatcggtctccccaagatgtgccttcacatggctgtccggcattcgaaggctcagaaaacaggcaagaaaatgcgggcgggaaagctggcagaatgattactttcaggtcccctccaggcttctgcggaaaagccaggggcttcgggctggagatagaggaatctagggagagaaca

SEQ ID NO: 281550 - DNA, 254 bp, Homo sapiens; identical to SEQ ID NO: 229840
  chr3:139062831-139063085
  hyper

SEQ ID NO: 281551 - DNA, 270 bp, Homo sapiens; identical to SEQ ID NO: 199118
  chr3:139258672-139258942
  hyper

SEQ ID NO: 281552 - DNA, 90 bp, Homo sapiens
  chr3:139396866-139396956
  hyper
cccggccctggccccgcccagggtcctaagccccgccctctcccctgcccccgcccccgcccgctggctcccaaccgccaaggctctttt

SEQ ID NO: 281553 - DNA, 100 bp, Homo sapiens; identical to SEQ ID NO: 199119
  chr3:139655101-139655201
  hyper

SEQ ID NO: 281554 - DNA, 1525 bp, Homo sapiens; identical to SEQ ID NO: 199120
  chr3:140660223-140661748
  hyper

SEQ ID NO: 281555 - DNA, 237 bp, Homo sapiens; identical to SEQ ID NO: 229849
  chr3:140950012-140950249
  hyper

SEQ ID NO: 281556 - DNA, 175 bp, Homo sapiens; identical to SEQ ID NO: 229850
  chr3:140951287-140951462
  hyper

SEQ ID NO: 281557 - DNA, 110 bp, Homo sapiens
  chr3:141030361-141030471
  hyper
ggcgctgcccctgcgtccccatcatggaaactaccacctgctgcctaactgccagacgcaaaagtgcccaagcctgtctctcacgttccaccccataaaccttccccacc

SEQ ID NO: 281558 - DNA, 103 bp, Homo sapiens; identical to SEQ ID NO: 109000
  chr3:141030521-141030624
  hyper

SEQ ID NO: 281559 - DNA, 61 bp, Homo sapiens
  chr3:141379212-141379273
  hyper
ggacgcagggagagtgagagcgagtgagtgcgggcgcccggcggggcgggcaggggccgga

SEQ ID NO: 281560 - DNA, 78 bp, Homo sapiens; identical to SEQ ID NO: 199121
  chr3:141457301-141457379
  hyper

SEQ ID NO: 281561 - DNA, 230 bp, Homo sapiens; identical to SEQ ID NO: 229855
  chr3:141944304-141944534
  hyper

SEQ ID NO: 281562 - DNA, 33 bp, Homo sapiens; identical to SEQ ID NO: 229856
  chr3:142166775-142166808
  hyper

SEQ ID NO: 281563 - DNA, 428 bp, Homo sapiens
  chr3:142443118-142443546
  hyper
ggacgggcgcggaccggctcggccggggcgccggcggctggggaggggtcgctggccccggggccgcgcatgcgccgccaccaacttggggctgtcagtggagggcgagtgctggttctcaggggaggcgacgcccttcggggccaacgggcctcgagccgaggcagcagtgggaacgactcatcctttttccagccctggggcgtggctggggtcggggtcggggtcggggccggtgggggccccgcccccgtctcctggcctgcccccttcatgggccgcgatgatggcggccctgtacccgagcacggacctctcgggcgcctcctcctcctccctgccttcctctccatcctcttcctcgccgaacgaggtgatggcgctgaaggatgtgcgggaggtgaaggaggagaatacgctgaatgaga

SEQ ID NO: 281564 - DNA, 103 bp, Homo sapiens
  chr3:142443851-142443954
  hyper
gaccccagcgttttagcgccgcccttgctactgaccgcatgaatgacctggtcttctctctggctcgcagttcattccttccgggagtcgagaggctagtttc

SEQ ID NO: 281565 - DNA, 204 bp, Homo sapiens
  chr3:142607214-142607418
  hyper
agcggctccctaggcgccgcgccgctagggttgttccctagtttacgtctctgggcaaagcctctcggggaaggaaaaaaaacagcggtaaaccaaaatccacatatttgggccccagtgcttccctctggccccatagacacgaggagaggggagacacaagtcagattaagccccgccacgtggtggccaagccagctgcag

SEQ ID NO: 281566 - DNA, 359 bp, Homo sapiens
  chr3:142607884-142608243
  hyper
gcgcgcaccgccgcggggcggcccaggtagccgggggatacgcggccggcagggcggaggcacttttaaaggcgattatggtgccgtctgactcgacgcttagtttcccctgaggagctgctctggcagccacaggccactgctgaatatcccgtttgttctccggcggcaggaggggcggctccgaggccagagccgccccctctcgtggggcgggcgaacgtctcctcccggcaccccgggaccgacgggtcctctctcgtccagccctcagggaccccggggagaagaggaaccccttgcggagtggcaccccagcggcccgggccccgacgcccagagacgattctcagggaggg

SEQ ID NO: 281567 - DNA, 34 bp, Homo sapiens; identical to SEQ ID NO: 199122
  chr3:142837797-142837831
  hyper

SEQ ID NO: 281568 - DNA, 42 bp, Homo sapiens
  chr3:143566922-143566964
  hyper
tgagcacaagtctctaattacgctcaagcaacaagtttcaca

SEQ ID NO: 281569 - DNA, 72 bp, Homo sapiens; identical to SEQ ID NO: 199123
  chr3:145878417-145878489
  hyper

SEQ ID NO: 281570 - DNA, 112 bp, Homo sapiens; identical to SEQ ID NO: 199124
  chr3:145878553-145878665
  hyper

SEQ ID NO: 281571 - DNA, 173 bp, Homo sapiens
  chr3:145878695-145878868
  hyper
gtccgcacccagacagggattccaggggtggaggacgagcgccaggagcagcagctgaggcttcaccgtgcatccccccatattcggccctcgagggccgcgcgggctcaggcgcccacggccccgcagcgccgcgcttctcgcgagaacgcagagacccgggtccgccctga

SEQ ID NO: 281572 - DNA, 363 bp, Homo sapiens; identical to SEQ ID NO: 199127
  chr3:145878937-145879300
  hyper

SEQ ID NO: 281573 - DNA, 602 bp, Homo sapiens; identical to SEQ ID NO: 199128
  chr3:145968403-145969005
  hyper

SEQ ID NO: 281574 - DNA, 356 bp, Homo sapiens
  chr3:147074101-147074457
  hyper
tgacctggtgataccaggttgttagtaacgcttgatgtttggggagttcggcatatttgactctccctgcggctcctcctcctagcccacccccagcccccagatctgggccccttggaaacactctggcctccgcagaaaattttgaagaaaatgcaaagggagaactaatattgttttcctattattcgatttgcgttctctgggttcttaattccagcctttcctaggtgctattctgcgccaagaagagttaggttttgccaagcactcccacatccaggattcttgaccacacagagggatttagaaaacagaaaactcgttaattttgagcgattttttggaaaaaaagt

SEQ ID NO: 281575 - DNA, 131 bp, Homo sapiens
  chr3:147074487-147074618
  hyper
gaagaatcaagaatggaccggccttgccccgatgcaatcggcttcctaggatgggatggggggtaggggattgcatttctttaacccagatccacgtgcctccccacctgccccggcgctgggcggttaat

SEQ ID NO: 281576 - DNA, 144 bp, Homo sapiens
  chr3:147075091-147075235
  hyper
ttgccatcggatttgtcctcggcaaatgtctcaccaagctgtagatggatgaatggatagatacatgataggtagatcgatcgatagatagttagagaggtagacagacggatagatccccgaagcttgcggataaatgttctg

SEQ ID NO: 281577 - DNA, 41 bp, Homo sapiens; identical to SEQ ID NO: 229869
  chr3:147079786-147079827
  hyper

SEQ ID NO: 281578 - DNA, 399 bp, Homo sapiens
  chr3:147086645-147087044
  hyper
ggtgaataggcagtgtcacacggtagcatgctctcttgtcaagaccgattgtgttttaggcaaacatttgcgcaaacataaaggcaaaggtcaaggactgttcagtcccagtatgtgctaattcacctagcgaaccaatggggcaaaagttgcattttatatgctcgcccccgccagacccaaagcaggagtcgctcctgctaatgaacaaaatcgcctctgatcagctcccttgtcaatttctcttcggctctctgatccatttctctgggcttcctcagaaatacaactggtaaagacgtgtttgccaacatctggatcagctccgcccaatttctggggcagcacatgtttattccacgtttctggtagcagaaagctaataataataaataaaat

SEQ ID NO: 281579 - DNA, 60 bp, Homo sapiens
  chr3:147088567-147088627
  hyper
aaaaaaaaaaaaaaaaaaaaaaactcagggaaagtttgcttttgatgaattcaataaaag

SEQ ID NO: 281580 - DNA, 114 bp, Homo sapiens
  chr3:147088653-147088767
  hyper
gctaaaattatacagcatggggcagagtttaaaacagccagatggccaaaggtagagggaccctctcggtttcaaaccccagatatagaattccaccggcgagcctcttagttt

SEQ ID NO: 281581 - DNA, 206 bp, Homo sapiens
  chr3:147089099-147089305
  hyper
caacccctcccattccgtaccacaactggggaaaactagaagagcctggtcactctcaaccttgccccctcatggatccttccctctcctgtaatcgcaactgcagagccttgttattcccggtaaattcatcagcacttctccccataattttcttaggaatgaggaacacacaaactgaggtgatcaccgtggcttcccagact

SEQ ID NO: 281582 - DNA, 431 bp, Homo sapiens; identical to SEQ ID NO: 229873
  chr3:147095403-147095834
  hyper

SEQ ID NO: 281583 - DNA, 217 bp, Homo sapiens
  chr3:147098162-147098379
  hyper
cgtgatagcgccagttggccaggacgcgccccttttgttttcgggggacgatttatgtcctttataaaaatgtggtttggaaaaatagaaagggccttgaaaacgttgttacaatgaaaaagggacaaattagaagacattttccgtgatcaaaggagagcgggagagagcgcatgggcattcacaaagcttgacttattcacttccctcctttgca

SEQ ID NO: 281584 - DNA, 168 bp, Homo sapiens
  chr3:147102697-147102865
  hyper
ctaacctgtccgcgagacggaggaagggggccctttcgcgaaatgaacgggagggggcgctaactccagtgttaatgcccagggacctcctttctcagggacatgtcttggtttcccctcatggcctcctttatcacacctgcgcgtctctcgcgcgccgggatcctt

SEQ ID NO: 281585 - DNA, 96 bp, Homo sapiens; identical to SEQ ID NO: 229876
  chr3:147105108-147105204
  hyper

SEQ ID NO: 281586 - DNA, 43 bp, Homo sapiens; identical to SEQ ID NO: 199130
  chr3:147106268-147106311
  hyper

SEQ ID NO: 281587 - DNA, 129 bp, Homo sapiens; identical to SEQ ID NO: 229878
  chr3:147107635-147107764
  hyper

SEQ ID NO: 281588 - DNA, 155 bp, Homo sapiens
  chr3:147108611-147108766
  hyper
cctaataccggaggcggcggcggcagcagcagggccaggtggtagctcggggctgaggatcgcggcgggggcagccgctatggggcccaagccctgacacacgtaccattcgctcaagtcggcggtacgcgccgccaccgccgccgaggaggcca

SEQ ID NO: 281589 - DNA, 98 bp, Homo sapiens; identical to SEQ ID NO: 109063
  chr3:147111702-147111800
  hyper

SEQ ID NO: 281590 - DNA, 292 bp, Homo sapiens
  chr3:147112343-147112635
  hyper
agctcccggagtagcaggcctggggccaggattccagtgtgacctaccgccccttcccgaagctaaaacctctggtgagggggtgagatccatgcgacattgtgggaaaccctgaaaagaactcagggaaaccgtacacttccagacaagctttagaaataaagtgccaggctccaagtggactttggtctggtctccgcatgtgccagtgtccgggccatggaccttccccgggaagggagagtttggggagaagataggcgttagaacaactagccttaggaagttcttt

SEQ ID NO: 281591 - DNA, 40 bp, Homo sapiens; identical to SEQ ID NO: 199132
  chr3:147112665-147112705
  hyper

SEQ ID NO: 281592 - DNA, 360 bp, Homo sapiens
  chr3:147138408-147138768
  hyper
cctacccaaactcccgagtctccgagctcaataacgcaaggatggctgaagagcgtctgctccatgtctctttgccggactcaacgaccctcacccactgccaccgagtgctaggcccacagaggcctggcagaagccactcacccctcactactcatgactaggaagaaagtggccggggcatgagggttcgagttctgtcctaggtcccggaagccagggctcccagcgtctagtcaggggcgcagaaaccctcgttcctccaaacccccgccacagggaccactccagaagaaacccattcgtgatttgggtccctttgtgtttgagtattgtggggagtgggctatctagactcta

SEQ ID NO: 281593 - DNA, 214 bp, Homo sapiens; identical to SEQ ID NO: 199133
  chr3:148709993-148710207
  hyper

SEQ ID NO: 281594 - DNA, 342 bp, Homo sapiens
  chr3:148803822-148804164
  hyper
ttgttaaataaagcactggccgagatgctttaagccccaggccccccacagtcggtgacagagatttcccaagtccctaacacgggactcgccctaggagcccctactcgccagcgaagacaatgcatttatttctccggcggccacatatgcgaccaacagaacgaatacagctgcacaaatcgcccagggaacgcagaggaacgcggggaaggtcaggttcatttggggacgcctccaggccgttagaccgagcgccccaccccctccgcccccttcacctcttgaacatccaggacatggcgctgagtgggatgacaagaggagcgcctcggctcccct

SEQ ID NO: 281595 - DNA, 365 bp, Homo sapiens
  chr3:148804199-148804564
  hyper
caggccccgcagccctgaagccggggacaaattccgagcgccggatcaggagcgcacgactgaaaggtaagtcgccgcgagtccagtcagacgtcgacgccgtctccttctgcaacaatctgggagaccagcgtcgctctgtgactggcactaggaaagcccaatcacgaagaggagagtgcggagccaaaccagtcagagcacagaagggagggcaactccgccccgctgccattcaaagacggcggggggtccgggctgcaagggtggttccatccgggttcttccccgcccccaaggcgggcgcgcgggaaagccacgaggccccaggagtgcgactgcggtgcctgcggtgccggtgtttt

SEQ ID NO: 281596 - DNA, 590 bp, Homo sapiens; identical to SEQ ID NO: 199134
  chr3:149375406-149375996
  hyper

SEQ ID NO: 281597 - DNA, 44 bp, Homo sapiens
  chr3:149687759-149687803
  hyper
aactggggataaccgtatatcgatgaatctccatatgagaagag

SEQ ID NO: 281598 - DNA, 372 bp, Homo sapiens; identical to SEQ ID NO: 199135
  chr3:149689311-149689683
  hyper

SEQ ID NO: 281599 - DNA, 54 bp, Homo sapiens; identical to SEQ ID NO: 199136
  chr3:150126521-150126575
  hyper

SEQ ID NO: 281600 - DNA, 357 bp, Homo sapiens; identical to SEQ ID NO: 229893
  chr3:150264352-150264709
  hyper

SEQ ID NO: 281601 - DNA, 227 bp, Homo sapiens; identical to SEQ ID NO: 199137
  chr3:150320966-150321193
  hyper

SEQ ID NO: 281602 - DNA, 348 bp, Homo sapiens; identical to SEQ ID NO: 229894
  chr3:150421685-150422033
  hyper

SEQ ID NO: 281603 - DNA, 286 bp, Homo sapiens; identical to SEQ ID NO: 229895
  chr3:150481642-150481928
  hyper

SEQ ID NO: 281604 - DNA, 84 bp, Homo sapiens
  chr3:150802803-150802887
  hyper
gtgggttcaaattccgactcgtttcgtggctttcggcaagtgagtggtcctctctgagctggctcaatttctccatccataaaa

SEQ ID NO: 281605 - DNA, 91 bp, Homo sapiens; identical to SEQ ID NO: 199140
  chr3:150805097-150805188
  hyper

SEQ ID NO: 281606 - DNA, 37 bp, Homo sapiens; identical to SEQ ID NO: 229897
  chr3:151556892-151556929
  hyper

SEQ ID NO: 281607 - DNA, 108 bp, Homo sapiens; identical to SEQ ID NO: 229898
  chr3:151986596-151986704
  hyper

SEQ ID NO: 281608 - DNA, 174 bp, Homo sapiens; identical to SEQ ID NO: 229899
  chr3:152016858-152017032
  hyper

SEQ ID NO: 281609 - DNA, 95 bp, Homo sapiens; identical to SEQ ID NO: 199141
  chr3:152553725-152553820
  hyper

SEQ ID NO: 281610 - DNA, 187 bp, Homo sapiens
  chr3:152879615-152879802
  hyper
gctgagtgaatggcgtccttgggcctttgataacgggagttggcaagaccacagcctactccatccctgaggcggcccgccgcgcccacgtgcttctcgcagagccgccgcccttgtccaccactcccacagctgtaaaataaagcggcctgcatgcttcctacagcgctttcctcgctcccatata

SEQ ID NO: 281611 - DNA, 32 bp, Homo sapiens; identical to SEQ ID NO: 229902
  chr3:152880084-152880116
  hyper

SEQ ID NO: 281612 - DNA, 44 bp, Homo sapiens; identical to SEQ ID NO: 199143
  chr3:153838774-153838818
  hyper

SEQ ID NO: 281613 - DNA, 58 bp, Homo sapiens; identical to SEQ ID NO: 199144
  chr3:153839460-153839518
  hyper

SEQ ID NO: 281614 - DNA, 98 bp, Homo sapiens; identical to SEQ ID NO: 199145
  chr3:153840393-153840491
  hyper

SEQ ID NO: 281615 - DNA, 325 bp, Homo sapiens; identical to SEQ ID NO: 229904
  chr3:154042065-154042390
  hyper

SEQ ID NO: 281616 - DNA, 77 bp, Homo sapiens; identical to SEQ ID NO: 199147
  chr3:154797107-154797184
  hyper

SEQ ID NO: 281617 - DNA, 120 bp, Homo sapiens; identical to SEQ ID NO: 199148
  chr3:154797214-154797334
  hyper

SEQ ID NO: 281618 - DNA, 1286 bp, Homo sapiens; identical to SEQ ID NO: 229907
  chr3:155461744-155463030
  hyper

SEQ ID NO: 281619 - DNA, 90 bp, Homo sapiens; identical to SEQ ID NO: 229908
  chr3:155524159-155524249
  hyper

SEQ ID NO: 281620 - DNA, 352 bp, Homo sapiens; identical to SEQ ID NO: 229909
  chr3:155572031-155572383
  hyper

SEQ ID NO: 281621 - DNA, 41 bp, Homo sapiens; identical to SEQ ID NO: 199149
  chr3:155722292-155722333
  hyper

SEQ ID NO: 281622 - DNA, 65 bp, Homo sapiens; identical to SEQ ID NO: 229911
  chr3:156273035-156273100
  hyper

SEQ ID NO: 281623 - DNA, 34 bp, Homo sapiens; identical to SEQ ID NO: 229912
  chr3:156392398-156392432
  hyper

SEQ ID NO: 281624 - DNA, 133 bp, Homo sapiens
  chr3:156533965-156534098
  hyper
tttctcagccccgacggctgtggttactcaaactgatctcatcgcaggtcgtcacgacacgcgcttcccctcgcctgcacgcggcgtggcgtgagaggggccctggcagccggcgcgcccacccctgatcctt

SEQ ID NO: 281625 - DNA, 145 bp, Homo sapiens; identical to SEQ ID NO: 199151
  chr3:156534539-156534684
  hyper

SEQ ID NO: 281626 - DNA, 167 bp, Homo sapiens; identical to SEQ ID NO: 199152
  chr3:156799361-156799528
  hyper

SEQ ID NO: 281627 - DNA, 244 bp, Homo sapiens; identical to SEQ ID NO: 229914
  chr3:156877883-156878127
  hyper

SEQ ID NO: 281628 - DNA, 213 bp, Homo sapiens; identical to SEQ ID NO: 229915
  chr3:157154537-157154750
  hyper

SEQ ID NO: 281629 - DNA, 64 bp, Homo sapiens; identical to SEQ ID NO: 199153
  chr3:157155188-157155252
  hyper

SEQ ID NO: 281630 - DNA, 211 bp, Homo sapiens
  chr3:157155490-157155701
  hyper
ctcccgcagaggccaggctgaccagtgctctggacgagctgctgcaggcgacccgcgacgcgggccgcaggctggcgcgtatggagggcgcggaggcgcagcgcccagaggaggcggggcgcgccctggccgcggtgctagaggagctgcggcagacgcgagccgacctgcacgcggtgcagggctgggctgcccggagctggctgccggc

SEQ ID NO: 281631 - DNA, 204 bp, Homo sapiens
  chr3:157155778-157155982
  hyper
ggcaaccttctaggggaagctttcatgggaagcgcgcgcgcgcgcgcgcacacacacacacacacacacacacacacacacacccctatttctgcatgcgcggtcacagagctcaggcacaccatacaaggcgggaaaattggctttaaaaaagtattcctcagtcctaaggagccctaaagagagttgtggaggtaaccatca

SEQ ID NO: 281632 - DNA, 43 bp, Homo sapiens; identical to SEQ ID NO: 199155
  chr3:157217106-157217149
  hyper

SEQ ID NO: 281633 - DNA, 537 bp, Homo sapiens; identical to SEQ ID NO: 199156
  chr3:157217201-157217738
  hyper

SEQ ID NO: 281634 - DNA, 193 bp, Homo sapiens; identical to SEQ ID NO: 199157
  chr3:157260919-157261112
  hyper

SEQ ID NO: 281635 - DNA, 278 bp, Homo sapiens; identical to SEQ ID NO: 199158
  chr3:157815379-157815657
  hyper

SEQ ID NO: 281636 - DNA, 67 bp, Homo sapiens; identical to SEQ ID NO: 199159
  chr3:157815822-157815889
  hyper

SEQ ID NO: 281637 - DNA, 582 bp, Homo sapiens; identical to SEQ ID NO: 199160
  chr3:157815923-157816505
  hyper

SEQ ID NO: 281638 - DNA, 193 bp, Homo sapiens; identical to SEQ ID NO: 199161
  chr3:157821711-157821904
  hyper

SEQ ID NO: 281639 - DNA, 52 bp, Homo sapiens; identical to SEQ ID NO: 199162
  chr3:157824081-157824133
  hyper

SEQ ID NO: 281640 - DNA, 161 bp, Homo sapiens; identical to SEQ ID NO: 199163
  chr3:157825408-157825569
  hyper

SEQ ID NO: 281641 - DNA, 39 bp, Homo sapiens; identical to SEQ ID NO: 199164
  chr3:158288780-158288819
  hyper

SEQ ID NO: 281642 - DNA, 170 bp, Homo sapiens; identical to SEQ ID NO: 199165
  chr3:158289012-158289182
  hyper

SEQ ID NO: 281643 - DNA, 288 bp, Homo sapiens; identical to SEQ ID NO: 229926
  chr3:158362204-158362492
  hyper

SEQ ID NO: 281644 - DNA, 225 bp, Homo sapiens
  chr3:158449684-158449909
  hyper
ctcataaatgctggaaggaacgagccagatttctgcagacgctgtgcaccgaaggggccccttccacgccctgggatacttcaggggcgccaggcccagctgggatctccccgggcgtcgtgcgcactgcaccttccctggcggaccatccgttgggccggcaggcgcgcgtacccaggtgtcacctcccagcgccgtgcgcggacaggcaggcgcgtgccccgg

SEQ ID NO: 281645 - DNA, 209 bp, Homo sapiens
  chr3:158450199-158450408
  hyper
tgcatggacgcaggaaagttggctcggcacccgacagacacgggctcggagcgggcagtgccggcgctcgcggaaataaggccgtggtgggcccctcccctccgcccccagggcgaaggtctgtagcgagcccgggtccccatggggccactccttttccacgtttcccgcagcccctgggttctctctgcccctccccgctgcccggg

SEQ ID NO: 281646 - DNA, 160 bp, Homo sapiens; identical to SEQ ID NO: 229928
  chr3:158519500-158519660
  hyper

SEQ ID NO: 281647 - DNA, 75 bp, Homo sapiens; identical to SEQ ID NO: 199166
  chr3:159480856-159480931
  hyper

SEQ ID NO: 281648 - DNA, 958 bp, Homo sapiens; identical to SEQ ID NO: 199167
  chr3:159480975-159481933
  hyper

SEQ ID NO: 281649 - DNA, 414 bp, Homo sapiens
  chr3:159482434-159482848
  hyper
tgatgagtgggcgccggaggaggacggggaggaggaggaagaggaggacgagcgcgaccagcgagggtaccgggatgaccgctctccggcccgggaaccgggggacgtaagcgccaggacccgcagcggcggcggcgggggcaggagcgccaccaccgccatgccgcccccggtgcccaacggcaacctccaccagcacgacccccaggacctcaggcacaatggcaacgtggtggtggctggccggccgagctgttcccggggcccccgccgggcgatccaaaagccccagccggctgggggccggcgcagtggccgcggcccggcggctggggggctctgccttcagcccccagacggcgggacgtgcgtccccgaagagcccccggtgccacctatggattgggaggcgct

SEQ ID NO: 281650 - DNA, 364 bp, Homo sapiens
  chr3:159482906-159483270
  hyper
gcgaggaccaactccacctccgtaagttggccggggtgcgtgcccacgcgcgcacacacgcgtacacaccccgcgcacagcccgcacgccccctccctgcgctcccgcccgcccgcggccccattcattcttcctcgagggtgggggccaggccagagagcctgccgtctgctcccctggggataaggttgctcggtctgtgagctgtctgggtttgcaggatgggcggagaggaaggaggagcagccagagggcagcggaaagtcgggttagtggaaccggcgactcattttaatggaattacttatggagaccaggttgtgagtcacttgcctgaaaataaatccggggagattctggcacc

SEQ ID NO: 281651 - DNA, 211 bp, Homo sapiens; identical to SEQ ID NO: 222257
  chr3:159706814-159707025
  hyper

SEQ ID NO: 281652 - DNA, 104 bp, Homo sapiens; identical to SEQ ID NO: 199168
  chr3:159756932-159757036
  hyper

SEQ ID NO: 281653 - DNA, 279 bp, Homo sapiens
  chr3:159943210-159943489
  hyper
tagcagccgcctcccgcagcctccgcgcgccgcgggctcctcctcccgcccaagcgtggccaagtgaggactgctccggccgcaggtagctgaggcgcgggaggcggcgcgcgcgggacccgagcggagcgccggggaggggccgacggacgcgagggcggacggactccccagcctcccgtcccggacgttagccgaggtctgcgcgggccatgtggggacccggggtcactgctgagggcctgtcggtggctccggcgccgccgcctctgctgccgc

SEQ ID NO: 281654 - DNA, 83 bp, Homo sapiens; identical to SEQ ID NO: 229933
  chr3:160117326-160117409
  hyper

SEQ ID NO: 281655 - DNA, 35 bp, Homo sapiens; identical to SEQ ID NO: 199169
  chr3:160118170-160118205
  hyper

SEQ ID NO: 281656 - DNA, 69 bp, Homo sapiens; identical to SEQ ID NO: 199170
  chr3:160167183-160167252
  hyper

SEQ ID NO: 281657 - DNA, 1581 bp, Homo sapiens; identical to SEQ ID NO: 199171
  chr3:160472497-160474078
  hyper

SEQ ID NO: 281658 - DNA, 359 bp, Homo sapiens; identical to SEQ ID NO: 199172
  chr3:160822407-160822766
  hyper

SEQ ID NO: 281659 - DNA, 245 bp, Homo sapiens; identical to SEQ ID NO: 199173
  chr3:160822962-160823207
  hyper

SEQ ID NO: 281660 - DNA, 211 bp, Homo sapiens; identical to SEQ ID NO: 229938
  chr3:161089233-161089444
  hyper

SEQ ID NO: 281661 - DNA, 229 bp, Homo sapiens; identical to SEQ ID NO: 199175
  chr3:161090543-161090772
  hyper

SEQ ID NO: 281662 - DNA, 288 bp, Homo sapiens
  chr3:164911333-164911621
  hyper
tgaaagacttggaccgagtttctcctgcattttgcttcgatcccgttgcaccaggaattcttttgttgtgctgcaggtcaaagccttcgatagcccctggattcaacagcatttcttttcttccactttttaaaaacagagacaagccaattctctggaaggagatacagaccacttgggtaacaatggtacatttcacattgcgccaccgggaaagacctcgcgggattggggtggatttaaggatttggatgcttttgtccgttctttctctttcttattttttaa

SEQ ID NO: 281663 - DNA, 108 bp, Homo sapiens
  chr3:164912568-164912676
  hyper
tgttatttcttgaactaaaaccccttacgttctggacctgggctgtgtcctaaaggctatctcacctttttccttttctttagctcaggatagcgcgtctaaaggaca

SEQ ID NO: 281664 - DNA, 158 bp, Homo sapiens; identical to SEQ ID NO: 199176
  chr3:164914485-164914643
  hyper

SEQ ID NO: 281665 - DNA, 33 bp, Homo sapiens
  chr3:164914763-164914796
  hyper
ctctctctctctcgctttcgctgtccgcctttc

SEQ ID NO: 281666 - DNA, 157 bp, Homo sapiens; identical to SEQ ID NO: 199177
  chr3:164924661-164924818
  hyper

SEQ ID NO: 281667 - DNA, 46 bp, Homo sapiens; identical to SEQ ID NO: 199178
  chr3:167097866-167097912
  hyper

SEQ ID NO: 281668 - DNA, 101 bp, Homo sapiens; identical to SEQ ID NO: 199179
  chr3:167098187-167098288
  hyper

SEQ ID NO: 281669 - DNA, 351 bp, Homo sapiens; identical to SEQ ID NO: 229946
  chr3:167453720-167454071
  hyper

SEQ ID NO: 281670 - DNA, 115 bp, Homo sapiens
  chr3:167966491-167966606
  hyper
atttttattttcacgaaacagactccagaggtttgtggccttccagacaacagctggcaccgggcagaggcacagcctacggcctgagctgctggcgactgcatcgcgcttggcc

SEQ ID NO: 281671 - DNA, 200 bp, Homo sapiens
  chr3:167967246-167967446
  hyper
cgcccagcccccgccgcggctgggtgaagaggaggggtcgaggagggcgcagggcgtgggggacgcccagcagcgcctcaagcccgtggtggcggcggggctgtctctttaagcgctccggaggggctggggcgggagggcggcgagcgcgtttccatggcaccggggctgcgggggctgctgggccactgggctcactc

SEQ ID NO: 281672 - DNA, 377 bp, Homo sapiens
  chr3:167967560-167967937
  hyper
agctgctgccgttccctccgcagacagacgcgccgcgccagcctcacgagccctgcaccaacttctgcccgacaagcccaacttctgcgccgggttcggacttgcggagccggaacggcgcaccgcgcgcagcccgggcggcggccagggcggatcagcctcgccgagatgtcctcgcgactgtggctctggtgcttctgcctgggcggttgccggctggccgccaggaagcgccctacagctccggctgggcatgtaagtggcgcccgcgcgctccggaacgcttggagagagcagacaacagtatgccccgccccacctcggacctggtgcggacaccgcggcccgagcccgggaagggatggggggcaggaggt

SEQ ID NO: 281673 - DNA, 113 bp, Homo sapiens
  chr3:167968382-167968495
  hyper
gggagatgagtatatgaaggattgagtgctcggccacttagctgctagtccccttattagagaactgaagagttagtaggaaggtgactcaaacgcatcgtctcaggatgggc

SEQ ID NO: 281674 - DNA, 169 bp, Homo sapiens
  chr3:168863846-168864015
  hyper
taaaataaagtaacgacacatcttcagtcatttcatataacacactcctgtgtttttaaaagctgtcaacctccaaagatagcttaaaaaaaaaccgtttaggtagactttagagaaaggccctttcaaaaaaccaacagcaaaaggaaaaaaaaaaaaatccccacaa

SEQ ID NO: 281675 - DNA, 521 bp, Homo sapiens; identical to SEQ ID NO: 199181
  chr3:168864062-168864583
  hyper

SEQ ID NO: 281676 - DNA, 224 bp, Homo sapiens; identical to SEQ ID NO: 199182
  chr3:168864623-168864847
  hyper

SEQ ID NO: 281677 - DNA, 350 bp, Homo sapiens
  chr3:168865103-168865453
  hyper
tggaccctcacgggatcgtcccctttcgcaactccaagctcagccgccgggtttctatttcatgaactgtctctttaaagaggatctgctcggccatccagaaagaacccggggcgagggagaaagggagctatctcccgccgcccagagtgatctgatcggaagccagacgggctcctcttttaaatttttaaagtgacagcagcctcctctggcgggagaggtcacaaaaaggtcgccaagacccaagtcctatagggacagactgattatggatgcaccatcccccttaaacatgtagatttctccgggtaaacaaccaatggggagatctcgccaggcaggatttc

SEQ ID NO: 281678 - DNA, 234 bp, Homo sapiens; identical to SEQ ID NO: 229951
  chr3:168867255-168867489
  hyper

SEQ ID NO: 281679 - DNA, 292 bp, Homo sapiens; identical to SEQ ID NO: 199183
  chr3:169379645-169379937
  hyper

SEQ ID NO: 281680 - DNA, 53 bp, Homo sapiens; identical to SEQ ID NO: 222260
  chr3:169380561-169380614
  hyper

SEQ ID NO: 281681 - DNA, 87 bp, Homo sapiens; identical to SEQ ID NO: 222261
  chr3:169380983-169381070
  hyper

SEQ ID NO: 281682 - DNA, 262 bp, Homo sapiens
  chr3:169381408-169381670
  hyper
cctttctctcaatccacactcgctatctctccagcattgtcagtttggacaccttcgcacatgcgcgctagacgcccctccaacatctcagcgccgccaaaaaaagtttggagcgatttatcactttgatttggagatcttgtcagatggcaatcgccgaggaggcggagaaagggagccgcggggagggcggcggggggcggggagcgaacgcagggagccagaggggagcagacacctcgcccaaaaaaaggggaggggg

SEQ ID NO: 281683 - DNA, 519 bp, Homo sapiens; identical to SEQ ID NO: 199184
  chr3:169386025-169386544
  hyper

SEQ ID NO: 281684 - DNA, 73 bp, Homo sapiens; identical to SEQ ID NO: 199185
  chr3:169386633-169386706
  hyper

SEQ ID NO: 281685 - DNA, 322 bp, Homo sapiens; identical to SEQ ID NO: 229957
  chr3:169386973-169387295
  hyper

SEQ ID NO: 281686 - DNA, 247 bp, Homo sapiens; identical to SEQ ID NO: 199187
  chr3:169482162-169482409
  hyper

SEQ ID NO: 281687 - DNA, 241 bp, Homo sapiens; identical to SEQ ID NO: 199188
  chr3:169482439-169482680
  hyper

SEQ ID NO: 281688 - DNA, 270 bp, Homo sapiens
  chr3:169530401-169530671
  hyper
gcctgcttcgagtcccgctggctgtgcctgcccgggccctgaggcctcactgctaaggcagtgaccgcctactctgtggaggtcctttgtcaccctgccctggttaaaggcagcctgagggagggcgtcctggctcctttgcagggaggagttcccgaggtttgaggggctccgctgctgagctagggctggggctacaaagaagattatgacaaagcccgctcctacaaagtgtgcaccggcctgccgggccagcgaagaagcagagta

SEQ ID NO: 281689 - DNA, 315 bp, Homo sapiens; identical to SEQ ID NO: 229961
  chr3:169684381-169684696
  hyper

SEQ ID NO: 281690 - DNA, 405 bp, Homo sapiens; identical to SEQ ID NO: 229962
  chr3:169684928-169685333
  hyper

SEQ ID NO: 281691 - DNA, 182 bp, Homo sapiens; identical to SEQ ID NO: 229963
  chr3:169755581-169755763
  hyper

SEQ ID NO: 281692 - DNA, 56 bp, Homo sapiens; identical to SEQ ID NO: 229964
  chr3:169899556-169899612
  hyper

SEQ ID NO: 281693 - DNA, 67 bp, Homo sapiens; identical to SEQ ID NO: 229965
  chr3:169940144-169940211
  hyper

SEQ ID NO: 281694 - DNA, 32 bp, Homo sapiens; identical to SEQ ID NO: 199189
  chr3:170073884-170073916
  hyper

SEQ ID NO: 281695 - DNA, 254 bp, Homo sapiens; identical to SEQ ID NO: 199190
  chr3:170074116-170074370
  hyper

SEQ ID NO: 281696 - DNA, 77 bp, Homo sapiens; identical to SEQ ID NO: 199191
  chr3:170075432-170075509
  hyper

SEQ ID NO: 281697 - DNA, 172 bp, Homo sapiens
  chr3:170136455-170136627
  hyper
gttttactttgcatcgccggactgcgctgcggacggggtggggcggcccaatggcccccctggggttactctgctccccttcacgcttccctcccggccccgccccgcgattggccggcgcgccccggggctgccgccgattggtgctcgccggccggagccgcggggctta

SEQ ID NO: 281698 - DNA, 282 bp, Homo sapiens
  chr3:170626174-170626456
  hyper
ctgagccccggcgggtcccgcgctcgcctctgttcccccatccattctccttctttctctcggtcagcgctcagttctgggcgccttccccggccctgcctcactctggccccatccccaccagcttttccccaccagcttttccccaggtcttcacctttcagctggcaaagagcgcctttcgtctgcgcacccgcgctggtcccctacagcagcggcgccggcagcggcggtggcggccgcggcagttccaagagacggggcggggccgccacactttcc

SEQ ID NO: 281699 - DNA, 529 bp, Homo sapiens
  chr3:170626710-170627239
  hyper
aggtttgttgcgttcgggtcgcagtcgactttaatgggaaccaagcaaagcacccaatggcccctgccatcaggtgcgtggcagttatcacatgacgatcgtcagaactcgcgaggcgcgcagattcagcgagtgccagtgtggctggctgtgaagcgaactttgggttcgagcttctggttcagcttgcagcctttcttggggttcgaacctcctcctggtccttaaagaagaattcaggtgcagtattttattacccagctcggcaccgcaggtcctgaggaccccccattcaccccttggtgagatttttggcagcgactgccgccggatgcccctgtagagtcagcactgctccctggggtgggaactcccgaagcgtccgccagctaacaagccagcagtgaaatgaattaacccacttctcacaccaaaggctgttgggaagttgtggaggcgaagggtgtctgactcctacggcattgtgggtccagagaggtgttctgccgactcatccattctttcctcc

SEQ ID NO: 281700 - DNA, 349 bp, Homo sapiens; identical to SEQ ID NO: 199194
  chr3:170746074-170746423
  hyper

SEQ ID NO: 281701 - DNA, 59 bp, Homo sapiens; identical to SEQ ID NO: 229974
  chr3:170878716-170878775
  hyper

SEQ ID NO: 281702 - DNA, 60 bp, Homo sapiens; identical to SEQ ID NO: 229975
  chr3:171176895-171176955
  hyper

SEQ ID NO: 281703 - DNA, 284 bp, Homo sapiens; identical to SEQ ID NO: 229976
  chr3:171178162-171178446
  hyper

SEQ ID NO: 281704 - DNA, 375 bp, Homo sapiens; identical to SEQ ID NO: 199195
  chr3:171527555-171527930
  hyper

SEQ ID NO: 281705 - DNA, 79 bp, Homo sapiens; identical to SEQ ID NO: 199196
  chr3:171527971-171528050
  hyper

SEQ ID NO: 281706 - DNA, 216 bp, Homo sapiens; identical to SEQ ID NO: 199197
  chr3:171528333-171528549
  hyper

SEQ ID NO: 281707 - DNA, 196 bp, Homo sapiens; identical to SEQ ID NO: 199198
  chr3:171757155-171757351
  hyper

SEQ ID NO: 281708 - DNA, 154 bp, Homo sapiens; identical to SEQ ID NO: 199199
  chr3:171758579-171758733
  hyper

SEQ ID NO: 281709 - DNA, 52 bp, Homo sapiens; identical to SEQ ID NO: 199200
  chr3:172165380-172165432
  hyper

SEQ ID NO: 281710 - DNA, 287 bp, Homo sapiens; identical to SEQ ID NO: 199201
  chr3:172240998-172241285
  hyper

SEQ ID NO: 281711 - DNA, 162 bp, Homo sapiens; identical to SEQ ID NO: 229982
  chr3:172313933-172314095
  hyper

SEQ ID NO: 281712 - DNA, 230 bp, Homo sapiens; identical to SEQ ID NO: 229983
  chr3:172428841-172429071
  hyper

SEQ ID NO: 281713 - DNA, 120 bp, Homo sapiens; identical to SEQ ID NO: 229984
  chr3:172468995-172469115
  hyper

SEQ ID NO: 281714 - DNA, 243 bp, Homo sapiens
  chr3:173113694-173113937
  hyper
ctctgaggggggcaggattgggtctggaggatggtctggcttgattcagactcctgcacccgacaacgccacggagtgaggggagagggagagagagaaggtggcagtgtgtgtgcgcgcgtgtacgtgtgtgtgtgcgtgtctacaggtagcagtggcggcggcggcggcggcggcggggaccggagcaggggacgcatctgcagccacctccccgcctatgattttcggaggcgattgctc

SEQ ID NO: 281715 - DNA, 174 bp, Homo sapiens
  chr3:173114587-173114761
  hyper
ccacccacccttctctgctctctctcttctgtaaactcaacccttttccaatcccattggggtgggggtggggggtgctggaggtataatcgtctatttgagtttaaatgcgtctctctttcccaggctagtagctgagttttccaatagcctttctggcggttttaggaaatc

SEQ ID NO: 281716 - DNA, 263 bp, Homo sapiens; identical to SEQ ID NO: 199203
  chr3:173115694-173115957
  hyper

SEQ ID NO: 281717 - DNA, 196 bp, Homo sapiens
  chr3:173303225-173303421
  hyper
gatattttgcagggggaattggctgttttcatgttgtctcctcccccacccctctcttcctaccccttcccgcttcccgcttctctcaaccggacactaaagggttacagggtcactgcaccggatagagacagtagaagtgggtggctggccacacatgttgtcttgtaattcacttgcacgactttccataata

SEQ ID NO: 281718 - DNA, 912 bp, Homo sapiens
  chr3:174158358-174159270
  hyper
attcaagtaacttgcgtaagtcacgaagctataaccaggaatttggctctgcaagcaatgggctttaaaaattcttttaaaagttttattagattcaaagactatgtataaaatatatgcaaattataaacgaaacatatcttttgatgggcaccatgggggcaagtttccagttttgcccattaaaaaaaaaatccttcccaatttttgaggcttgtgccattgaacactgctgcccgcggctcttcttcccacttggctcgacaaacgcgtcttttattatgactcagcccagcccgttccttgccaagcggctgacgctcgcggcggaggcgccggggccgccgctcgggggcgagggttcgcgccgcggctcgcgcccgcttctcccgctttacggctgctgaaaatccggcctggcccggcagccgtaccgcagacgagcccgcgcccgcgccgctcaggtaatcggagtccttttcttttcaaagttttgccaaaacaagctccgcgctctgaggcggcgcggcctcggccgagcggtccgtgtctccttgctcctccgtcctacccaagctggcgcgactgagctgtgggccgcacccctgcgcggggcccggggcgccgacccggcgtgaagtacgggggccgaggggcgcccggccggcggcgggttctgagcgactccgcggggtggcgcgcggggcacctggctctggcagtccgcgaggcgcgctggccaaaggagctcccaacccgctccaaggcccccgcccacctcccgaagccgcttgtcttaggagaggagcgtagcagctccgagtccccgcttctgacacgttcacacacgtatgcagtgcacgccggccaggcagcccgacacggcgcgctagcggggcgcaggtaaagagc

SEQ ID NO: 281719 - DNA, 125 bp, Homo sapiens
  chr3:174159306-174159431
  hyper
cacagttccgcccccgcgcgtggaatgccgctccagtggacgcccaggatggctttcttaaggaagtttatgagaagccatggaaagagcagcctgggatcagagcctgcgctgctggttctacc

SEQ ID NO: 281720 - DNA, 90 bp, Homo sapiens; identical to SEQ ID NO: 199207
  chr3:176915778-176915868
  hyper

SEQ ID NO: 281721 - DNA, 159 bp, Homo sapiens; identical to SEQ ID NO: 199208
  chr3:178789082-178789241
  hyper

SEQ ID NO: 281722 - DNA, 321 bp, Homo sapiens; identical to SEQ ID NO: 229992
  chr3:178789520-178789841
  hyper

SEQ ID NO: 281723 - DNA, 157 bp, Homo sapiens; identical to SEQ ID NO: 229993
  chr3:178865536-178865693
  hyper

SEQ ID NO: 281724 - DNA, 176 bp, Homo sapiens; identical to SEQ ID NO: 199209
  chr3:178866990-178867166
  hyper

SEQ ID NO: 281725 - DNA, 40 bp, Homo sapiens; identical to SEQ ID NO: 199210
  chr3:179064154-179064194
  hyper

SEQ ID NO: 281726 - DNA, 444 bp, Homo sapiens; identical to SEQ ID NO: 229995
  chr3:179065418-179065862
  hyper

SEQ ID NO: 281727 - DNA, 147 bp, Homo sapiens; identical to SEQ ID NO: 199211
  chr3:179169640-179169787
  hyper

SEQ ID NO: 281728 - DNA, 116 bp, Homo sapiens; identical to SEQ ID NO: 229998
  chr3:179280318-179280434
  hyper

SEQ ID NO: 281729 - DNA, 127 bp, Homo sapiens; identical to SEQ ID NO: 229999
  chr3:179281448-179281575
  hyper

SEQ ID NO: 281730 - DNA, 253 bp, Homo sapiens; identical to SEQ ID NO: 230000
  chr3:179322630-179322883
  hyper

SEQ ID NO: 281731 - DNA, 79 bp, Homo sapiens; identical to SEQ ID NO: 230001
  chr3:179367505-179367584
  hyper

SEQ ID NO: 281732 - DNA, 35 bp, Homo sapiens; identical to SEQ ID NO: 230002
  chr3:179370451-179370486
  hyper

SEQ ID NO: 281733 - DNA, 100 bp, Homo sapiens; identical to SEQ ID NO: 199212
  chr3:179754078-179754178
  hyper

SEQ ID NO: 281734 - DNA, 134 bp, Homo sapiens
  chr3:180319921-180320055
  hyper
gtgctgtctgtgtacttccggcagcctccagacagtttcttccgcttcctgtaccacccggctcaagtagcggacacggaacagggaactatcagcccgtcggcctccgggccctgcattctctagccatggac

SEQ ID NO: 281735 - DNA, 169 bp, Homo sapiens
  chr3:180320087-180320256
  hyper
cgggtcgtctttgctctctctacttcggagcgaacagcaggacaatccacacttccgtagcctcctggggtcggccgccgagccagcccggggcccgccgccccagcacccgttgcagggcaggtaatgagacgttggtgccactgcgccacggaagaggggacgcagc

SEQ ID NO: 281736 - DNA, 112 bp, Homo sapiens
  chr3:180320294-180320406
  hyper
aggaagtggagccgcggccgtgagcacaggacgatcgcgcgctggtgtcttgggctgggtggacggggggcgctcctgggttgtgcaatgcgggatgcgggctgaacttttt

SEQ ID NO: 281737 - DNA, 53 bp, Homo sapiens; identical to SEQ ID NO: 222274
  chr3:180396751-180396804
  hyper

SEQ ID NO: 281738 - DNA, 226 bp, Homo sapiens; identical to SEQ ID NO: 199213
  chr3:180397084-180397310
  hyper

SEQ ID NO: 281739 - DNA, 190 bp, Homo sapiens; identical to SEQ ID NO: 230008
  chr3:180630143-180630333
  hyper

SEQ ID NO: 281740 - DNA, 39 bp, Homo sapiens; identical to SEQ ID NO: 230009
  chr3:180630766-180630805
  hyper

SEQ ID NO: 281741 - DNA, 55 bp, Homo sapiens; identical to SEQ ID NO: 199214
  chr3:181413014-181413069
  hyper

SEQ ID NO: 281742 - DNA, 236 bp, Homo sapiens; identical to SEQ ID NO: 230011
  chr3:181418234-181418470
  hyper

SEQ ID NO: 281743 - DNA, 95 bp, Homo sapiens; identical to SEQ ID NO: 230012
  chr3:181418702-181418797
  hyper

SEQ ID NO: 281744 - DNA, 104 bp, Homo sapiens; identical to SEQ ID NO: 199215
  chr3:181421145-181421249
  hyper

SEQ ID NO: 281745 - DNA, 64 bp, Homo sapiens; identical to SEQ ID NO: 199216
  chr3:181428196-181428260
  hyper

SEQ ID NO: 281746 - DNA, 326 bp, Homo sapiens
  chr3:181429281-181429607
  hyper
cgagttggacagccgccctgagccacccactgtgccctgccccacccccgcaccttagctgcttcccgcgtcccatcctcatttaagtaccctgcaccaaaaagtaaatcaatattaagtttaaagaaaaaaaaacccacgtagtcttagtgctgtttacccacttccttcgaaaaggcgtgtggtgtgacctgttgctgcgagaggggatacaaaggtttctcagtggctggcaggctggctctgggagcctcctccccctcctcgcctgccccctcctcccccggcctcccccgcgcggccggcggcgcgggaggccccgcccc

SEQ ID NO: 281747 - DNA, 336 bp, Homo sapiens
  chr3:181429718-181430054
  hyper
tgtctattaacttgttcaaaaaagtatcaggagttgtcaaggcagagaagagagtgtttgcaaaagggggaaagtagtttgctgcctctttaagactaggactgagagaaagaagaggagagagaaagaaagggagagaagtttgagccccaggcttaagcctttccaaaaaataataataacaatcatcggcggcggcaggatcggccagaggaggagggaagcgctttttttgatcctgattccagtttgcctctctctttttttcccccaaattattcttcgcctgattttcctcgcggagccctgcgctcccgacacccccgcccgcctccc

SEQ ID NO: 281748 - DNA, 36 bp, Homo sapiens; identical to SEQ ID NO: 199220
  chr3:181430331-181430367
  hyper

SEQ ID NO: 281749 - DNA, 252 bp, Homo sapiens; identical to SEQ ID NO: 199221
  chr3:181430443-181430695
  hyper

SEQ ID NO: 281750 - DNA, 209 bp, Homo sapiens; identical to SEQ ID NO: 199222
  chr3:181433437-181433646
  hyper

SEQ ID NO: 281751 - DNA, 47 bp, Homo sapiens; identical to SEQ ID NO: 199223
  chr3:181444767-181444814
  hyper

SEQ ID NO: 281752 - DNA, 331 bp, Homo sapiens; identical to SEQ ID NO: 230027
  chr3:182399999-182400330
  hyper

SEQ ID NO: 281753 - DNA, 292 bp, Homo sapiens; identical to SEQ ID NO: 199224
  chr3:182510867-182511159
  hyper

SEQ ID NO: 281754 - DNA, 170 bp, Homo sapiens; identical to SEQ ID NO: 199225
  chr3:182511623-182511793
  hyper

SEQ ID NO: 281755 - DNA, 36 bp, Homo sapiens; identical to SEQ ID NO: 230029
  chr3:182512112-182512148
  hyper

SEQ ID NO: 281756 - DNA, 192 bp, Homo sapiens; identical to SEQ ID NO: 199226
  chr3:182697832-182698024
  hyper

SEQ ID NO: 281757 - DNA, 145 bp, Homo sapiens; identical to SEQ ID NO: 199227
  chr3:182698591-182698736
  hyper

SEQ ID NO: 281758 - DNA, 290 bp, Homo sapiens
  chr3:182833877-182834167
  hyper
catgaaggactggccggcggccaatggggggctaaaggggcttgttgtcatgggagcgaggatgtgatctatatgctgcacctgcggctctcctgctcatgcgcactgactgcacccgctgttcccctgcccatgcgcactgactgcacccgctgttcccctgccggtgcagactggctgcacctgctgttcccctacccgtgcgcactggctgcacctgctgttcccctgcccgtgaggactggctgcacctgcttttcccctgcccgtgcggactggctgcgcctgct

SEQ ID NO: 281759 - DNA, 68 bp, Homo sapiens
  chr3:182834231-182834299
  hyper
tgctgttcccctgcccgtgcggactggctgcacctactgttcccctgcccgtgcgcactggctgcact

SEQ ID NO: 281760 - DNA, 445 bp, Homo sapiens; identical to SEQ ID NO: 230033
  chr3:182880264-182880709
  hyper

SEQ ID NO: 281761 - DNA, 47 bp, Homo sapiens; identical to SEQ ID NO: 199228
  chr3:182896564-182896611
  hyper

SEQ ID NO: 281762 - DNA, 214 bp, Homo sapiens; identical to SEQ ID NO: 199229
  chr3:182970889-182971103
  hyper

SEQ ID NO: 281763 - DNA, 585 bp, Homo sapiens; identical to SEQ ID NO: 199230
  chr3:182971342-182971927
  hyper

SEQ ID NO: 281764 - DNA, 86 bp, Homo sapiens; identical to SEQ ID NO: 199231
  chr3:182972458-182972544
  hyper

SEQ ID NO: 281765 - DNA, 313 bp, Homo sapiens
  chr3:183145618-183145931
  hyper
gccagatgaagcccagagaccatcctcacccgccattaataaaacgcaggaaaaattaaagcttcgtttaccgacatgagtgatcactgtggccagtcgccgggtgagctcctggggaggcatctcttcttttaagcaagacagcatttcactgaaaaaccattccgtataaataaagccaaacaaaactgtttctaccgctgcggtggatgattttttaaaggcatctccgcccaaggatgctctgccctcgccctcttcctggctctccaggcaagaaacgagagtccctcgcagcctaggccagctctcc

SEQ ID NO: 281766 - DNA, 372 bp, Homo sapiens
  chr3:183146025-183146397
  hyper
aggaagcaagtcgccaatctcgccggaaccgcgccccggctcctccggccgggcgagctccggggcttccagaatcgcggtcccggccgccaggtttccggcgccgcctccagggactgtagagtgagggatgctccgccaggtgcaggggaggcggcaggtggccgtggcttctctgcgccgccggccccacgccccagcgcccacctcgtccagcccacgggtggcgcccggggctctcggggaggcacgcacgctcccaagcgccgctcgttttggggtcgggaacgctgcgcacctttccctgcggggagcccgcgctccacccccggagtggagctccggtccttactcggaaccgtggggcgggga

SEQ ID NO: 281767 - DNA, 213 bp, Homo sapiens
  chr3:183146435-183146648
  hyper
atcatcagacgcgcgccggccaggtctccgcccctccttcttccgcgccgggtgtctgcggaggagccgcggagagaagggggctggcccggagagctgccgccatccggcaggacccggagcgggaggctgggtgaggcgccgctgcttgccccacctcctgaccccgggggcggctggcgtgtgttttcccccacttggggttgttccacg

SEQ ID NO: 281768 - DNA, 153 bp, Homo sapiens
  chr3:183146677-183146830
  hyper
cactgggagcccggcgcccgggctgcgctccgacaaggctgagcacgcgtgggcgcgctcaccccctatgtgggcgttttccttcgtgcagctgcgcccttgcctctgctccgtctgtcacctgtcaggcacgccagtgctaccttctggagg

SEQ ID NO: 281769 - DNA, 821 bp, Homo sapiens; identical to SEQ ID NO: 199234
  chr3:183165026-183165847
  hyper

SEQ ID NO: 281770 - DNA, 108 bp, Homo sapiens; identical to SEQ ID NO: 230040
  chr3:183353358-183353466
  hyper

SEQ ID NO: 281771 - DNA, 79 bp, Homo sapiens; identical to SEQ ID NO: 230041
  chr3:183415419-183415498
  hyper

SEQ ID NO: 281772 - DNA, 572 bp, Homo sapiens; identical to SEQ ID NO: 199235
  chr3:183542793-183543365
  hyper

SEQ ID NO: 281773 - DNA, 33 bp, Homo sapiens; identical to SEQ ID NO: 199236
  chr3:183543503-183543536
  hyper

SEQ ID NO: 281774 - DNA, 321 bp, Homo sapiens
  chr3:183602724-183603045
  hyper
gagcagtctagagcgcccccgcgcggctgagcggcagccgaaccagccacggtgcccggacgactggctggcgcccttctgtcccaccgcttcccctcccactgctcagctggctccgggagcgacctgcgagagtggcccggcctcccggcatttgcagatgaggaggatggggccagagcgaagagggacaactgtcattttttcgagtaacggcacataccaggcgctttgcctaagatcgcatttaatcgtcacagcactgctagaggtagatgtcatcactgtttcactttgcctctggtcagaggggataggact

SEQ ID NO: 281775 - DNA, 116 bp, Homo sapiens; identical to SEQ ID NO: 230044
  chr3:183736070-183736186
  hyper

SEQ ID NO: 281776 - DNA, 86 bp, Homo sapiens; identical to SEQ ID NO: 199238
  chr3:183851915-183852001
  hyper

SEQ ID NO: 281777 - DNA, 45 bp, Homo sapiens; identical to SEQ ID NO: 230045
  chr3:183852315-183852360
  hyper

SEQ ID NO: 281778 - DNA, 52 bp, Homo sapiens; identical to SEQ ID NO: 230046
  chr3:183892563-183892615
  hyper

SEQ ID NO: 281779 - DNA, 123 bp, Homo sapiens; identical to SEQ ID NO: 230047
  chr3:183904302-183904425
  hyper

SEQ ID NO: 281780 - DNA, 117 bp, Homo sapiens; identical to SEQ ID NO: 230048
  chr3:183967307-183967424
  hyper

SEQ ID NO: 281781 - DNA, 135 bp, Homo sapiens; identical to SEQ ID NO: 230049
  chr3:183979774-183979909
  hyper

SEQ ID NO: 281782 - DNA, 72 bp, Homo sapiens; identical to SEQ ID NO: 199239
  chr3:184053512-184053584
  hyper

SEQ ID NO: 281783 - DNA, 249 bp, Homo sapiens; identical to SEQ ID NO: 230052
  chr3:184080988-184081237
  hyper

SEQ ID NO: 281784 - DNA, 224 bp, Homo sapiens
  chr3:184097688-184097912
  hyper
acccgcgatccgggccgctgctgctgggtcggaccccccgggctcagcccggcccctcgccgagctgccgccgccgccccgtttgctgaggaggaggcccccggccggggcgtcgggcgcggggcataaaacgggccggagccggcgcccggggcagtagagccgcgtacggcccgggtcagcgcccgcccgcccgcgctcctcccggccgctcctcccgcccc

SEQ ID NO: 281785 - DNA, 280 bp, Homo sapiens; identical to SEQ ID NO: 222284
  chr3:184098372-184098652
  hyper

SEQ ID NO: 281786 - DNA, 86 bp, Homo sapiens
  chr3:184099331-184099417
  hyper
cgcgggacccggagcatcgcagttatagcgaccgcggggagccaggcgctgaggagcgggcccgtggtgacggccacacgggtagg

SEQ ID NO: 281787 - DNA, 34 bp, Homo sapiens
  chr3:184099446-184099480
  hyper
ggctgggccaccaaagcggcgtttgacagtgctc

SEQ ID NO: 281788 - DNA, 1017 bp, Homo sapiens; identical to SEQ ID NO: 199241
  chr3:184278877-184279894
  hyper

SEQ ID NO: 281789 - DNA, 242 bp, Homo sapiens; identical to SEQ ID NO: 199242
  chr3:184279929-184280171
  hyper

SEQ ID NO: 281790 - DNA, 68 bp, Homo sapiens
  chr3:184280222-184280290
  hyper
gattgagcgcacgtcggaggaggccccgccaccggcgcccgctccggggcccagggatggggtgggga

SEQ ID NO: 281791 - DNA, 69 bp, Homo sapiens; identical to SEQ ID NO: 230057
  chr3:184280320-184280389
  hyper

SEQ ID NO: 281792 - DNA, 213 bp, Homo sapiens
  chr3:184301275-184301488
  hyper
cgcgcggaggaggccgcgggcgaaggttgcagggtctgctgcgtggcgcactcccggccgcggaagccgacggcgatcggaggagcctgggagcggccctggcagcggccctggcacagctggcggcggcgcgggctcctcaggccgcccccgtccttcaccgcgcgctcccgcgctggggctgctcggcggcgcccgctccttagtattccc

SEQ ID NO: 281793 - DNA, 178 bp, Homo sapiens
  chr3:184319612-184319790
  hyper
gatctgcaaccttcagggggattaagagcctgagagcccccctccccggggtaccccgctccccaacgccctccctccgggctgacctcccagtctgccgcccgggccgggggccggctccgccgccggtggtccccgccgctcctggcggccgcacctccgggcaggccacttggat

SEQ ID NO: 281794 - DNA, 135 bp, Homo sapiens
  chr3:184320096-184320231
  hyper
ttgactgggttatctctgcggagatccgccgcccaccccaaaaaggagaaagaaaaggcttagcacacggtcccacccaccgcccctcgatcctccttgttgcccctcggtcctcctcgtcgcccctcactcttt

SEQ ID NO: 281795 - DNA, 256 bp, Homo sapiens
  chr3:184322331-184322587
  hyper
ggtctggcctggggggcgcctcccgccccctcttggggaaggtgctcggagactcccgggccctgggcggagagtgtggggaggctgggctaaaggcagagacccaggccgagggctctgacccacccaagaggaaatagctactaattagggacgggacgtttttatgctaatatgcacctggctgggcttttctggaggctgagaaagtgtggagtggaagggaagaagttccggagagcgggaaacttccgga

SEQ ID NO: 281796 - DNA, 155 bp, Homo sapiens; identical to SEQ ID NO: 230062
  chr3:184429620-184429775
  hyper

SEQ ID NO: 281797 - DNA, 63 bp, Homo sapiens; identical to SEQ ID NO: 230063
  chr3:184430244-184430307
  hyper

SEQ ID NO: 281798 - DNA, 229 bp, Homo sapiens; identical to SEQ ID NO: 230064
  chr3:184530229-184530458
  hyper

SEQ ID NO: 281799 - DNA, 301 bp, Homo sapiens; identical to SEQ ID NO: 199246
  chr3:184870307-184870608
  hyper

SEQ ID NO: 281800 - DNA, 165 bp, Homo sapiens; identical to SEQ ID NO: 230066
  chr3:185303809-185303974
  hyper

SEQ ID NO: 281801 - DNA, 372 bp, Homo sapiens; identical to SEQ ID NO: 230067
  chr3:185541060-185541432
  hyper

SEQ ID NO: 281802 - DNA, 137 bp, Homo sapiens; identical to SEQ ID NO: 230068
  chr3:185541795-185541932
  hyper

SEQ ID NO: 281803 - DNA, 236 bp, Homo sapiens; identical to SEQ ID NO: 199248
  chr3:185542334-185542570
  hyper

SEQ ID NO: 281804 - DNA, 360 bp, Homo sapiens
  chr3:185543197-185543557
  hyper
cggcagtggctgctcgggctccggccccgcgccaggcgggcggaagcgggtcgcggccccgggctggggctccgggcgccggaaccccgggcgggcgcggcgccgaggccgggcgagcggcggggcggggaaggcgcgccccgggcgcgggtgggagcgcgcgagggggcgacggggagccgcgggcgtgggagggagaggggctgcgagtgagcgcggagaggggtgtgcgcaaggtggaccggatgtgagtgcgctgctgccagggcaagcgggaaggtgtgtcccggaggtgagaggcgagggcaggctgggagacaacaactttcgcagcgacttggccggggctggcgccctgcg

SEQ ID NO: 281805 - DNA, 239 bp, Homo sapiens; identical to SEQ ID NO: 199250
  chr3:185543684-185543923
  hyper

SEQ ID NO: 281806 - DNA, 713 bp, Homo sapiens; identical to SEQ ID NO: 199251
  chr3:185825460-185826173
  hyper

SEQ ID NO: 281807 - DNA, 1075 bp, Homo sapiens; identical to SEQ ID NO: 199252
  chr3:185826425-185827500
  hyper

SEQ ID NO: 281808 - DNA, 53 bp, Homo sapiens; identical to SEQ ID NO: 230076
  chr3:185977470-185977523
  hyper

SEQ ID NO: 281809 - DNA, 290 bp, Homo sapiens; identical to SEQ ID NO: 199253
  chr3:186079331-186079621
  hyper

SEQ ID NO: 281810 - DNA, 164 bp, Homo sapiens; identical to SEQ ID NO: 230079
  chr3:186285249-186285413
  hyper

SEQ ID NO: 281811 - DNA, 81 bp, Homo sapiens; identical to SEQ ID NO: 230080
  chr3:186287892-186287973
  hyper

SEQ ID NO: 281812 - DNA, 48 bp, Homo sapiens; identical to SEQ ID NO: 230081
  chr3:186288738-186288786
  hyper

SEQ ID NO: 281813 - DNA, 130 bp, Homo sapiens; identical to SEQ ID NO: 230082
  chr3:186334979-186335109
  hyper

SEQ ID NO: 281814 - DNA, 138 bp, Homo sapiens; identical to SEQ ID NO: 230083
  chr3:186500725-186500863
  hyper

SEQ ID NO: 281815 - DNA, 40 bp, Homo sapiens; identical to SEQ ID NO: 230084
  chr3:186524286-186524326
  hyper

SEQ ID NO: 281816 - DNA, 47 bp, Homo sapiens; identical to SEQ ID NO: 199254
  chr3:186544979-186545026
  hyper

SEQ ID NO: 281817 - DNA, 342 bp, Homo sapiens; identical to SEQ ID NO: 230085
  chr3:186648468-186648810
  hyper

SEQ ID NO: 281818 - DNA, 442 bp, Homo sapiens
  chr3:186649397-186649839
  hyper
gctgggtgcactattgtccccgcactccggcgattgcctctgtggggatattttggtcgcctcctcagcctgcgggaagaatgtacgagtcgcccagtgcggtcttgctctttgcctctgaggcccgtgtccgtgtgcccagacaccccagatgtcactagccccttttggcttgttaatgcattttcgcaagcaaggccagccgagacctcgtattctagctggggacgtacaattttcagttctgagtttatttgaaagaaattccgaggtccggaaaaagagaactcttgtttgttttgctttttctttgcttacatatgctcagctcagctttgcagatgttaatcggacacgatctgcagcggggagatggtttcgcggtgaattggtctctgaggcgatggtgttggtgcaggttgtgggcgtgcagtgtgagcag

SEQ ID NO: 281819 - DNA, 65 bp, Homo sapiens; identical to SEQ ID NO: 199255
  chr3:187455277-187455342
  hyper

SEQ ID NO: 281820 - DNA, 446 bp, Homo sapiens; identical to SEQ ID NO: 199256
  chr3:187456666-187457112
  hyper

SEQ ID NO: 281821 - DNA, 523 bp, Homo sapiens; identical to SEQ ID NO: 199257
  chr3:187457654-187458177
  hyper

SEQ ID NO: 281822 - DNA, 1089 bp, Homo sapiens; identical to SEQ ID NO: 230091
  chr3:187458574-187459663
  hyper

SEQ ID NO: 281823 - DNA, 56 bp, Homo sapiens; identical to SEQ ID NO: 230092
  chr3:187461961-187462017
  hyper

SEQ ID NO: 281824 - DNA, 367 bp, Homo sapiens; identical to SEQ ID NO: 199260
  chr3:187462445-187462812
  hyper

SEQ ID NO: 281825 - DNA, 227 bp, Homo sapiens
  chr3:187463100-187463327
  hyper
aatgatcatgagcagcggcggcggcagcggcaccagcggcaacagcggcggcggcggcagtagcagcagcagcggcggcagcaacagcaataatcacctggtgtccggcctttcctagaaacttcttgcatcaccacttctaagaaccccagttctaagaatcaacagagctcaattctcggaatttgagcttcggactttaccactgctacgtggcaggggaggac

SEQ ID NO: 281826 - DNA, 228 bp, Homo sapiens; identical to SEQ ID NO: 230095
  chr3:187871096-187871324
  hyper

SEQ ID NO: 281827 - DNA, 91 bp, Homo sapiens; identical to SEQ ID NO: 230096
  chr3:187871524-187871615
  hyper

SEQ ID NO: 281828 - DNA, 358 bp, Homo sapiens
  chr3:189838066-189838424
  hyper
tgtagggcactctgcgctggaagtcgctgcgcacatcctcgctgacgcggtggcgggatgcggggcccccgaggcgctgggtctcacagctgcgataacagcgcgcccgccccaacaaggagcggaaaaggggcagctcagcgccggggccctcgccggggggcgggggcgggagcgggtggcgcgccgcgcagtggcgggcacagcgcgtgcggatttcccgcaggcgccggtggctgcgcagcgccgcttccaagtcgcgcaccgctcgctcgtagtctccgctgtagtaggcggccgcgccgctggcgtagagcaggtcgaagggctgcagaggcccgggctccagctccagctc

SEQ ID NO: 281829 - DNA, 60 bp, Homo sapiens
  chr3:189838441-189838501
  hyper
gggggccgccccacagtggcggcggcagtagcagcggcagcagcagcagcagcggcggcg

SEQ ID NO: 281830 - DNA, 61 bp, Homo sapiens; identical to SEQ ID NO: 230098
  chr3:190164468-190164529
  hyper

SEQ ID NO: 281831 - DNA, 73 bp, Homo sapiens; identical to SEQ ID NO: 199262
  chr3:190231324-190231397
  hyper

SEQ ID NO: 281832 - DNA, 31 bp, Homo sapiens; identical to SEQ ID NO: 230100
  chr3:190231801-190231832
  hyper

SEQ ID NO: 281833 - DNA, 37 bp, Homo sapiens; identical to SEQ ID NO: 230101
  chr3:190232236-190232273
  hyper

SEQ ID NO: 281834 - DNA, 54 bp, Homo sapiens
  chr3:190529763-190529817
  hyper
attatcaccaggagatggcgctgtgcattagtaaacatccggcttacaaaagta

SEQ ID NO: 281835 - DNA, 540 bp, Homo sapiens
  chr3:191046935-191047475
  hyper
ccccacctaaagacgcgaccctcccgtaggaggggggcagggcccgggggcgggagcacagcggggccccagcctcaggcggcgcgtcactgagcacaaaggagacaacagcgaggcggcagcgggcgctgatcttcgctcgccagccactcgcaattgcggttacagacctgcagctccccctcccccagccggcccgcccgcctttctgtctcctctctccctccgtactggacggccccggtccatttccgggctccggatatttggtatcgattggggccggggacgcggagcaggtggccgcggcggggcagctgggccgccagcttggtgcctcggggaccgtctcccgctgctttggtcaccagcccctgcccgcccgacccgctccgttctccggcctgcgagccctgccggccggactttgcgccgcgtccggcgctgctgctgcgctcggggccccgctcggcgccggcggtgaccgggaagcccgcgttaaaggggcaaccgggaccctggcccggtatggctgaagtc

SEQ ID NO: 281836 - DNA, 70 bp, Homo sapiens; identical to SEQ ID NO: 199263
  chr3:192128140-192128210
  hyper

SEQ ID NO: 281837 - DNA, 108 bp, Homo sapiens
  chr3:192445501-192445609
  hyper
gtcacagggaagcgctgctaaaaataaacgccggaccggattttcctctgcaaactagaaaatggattggactagtactgcgtgcatcaggacgaattactgaagtct

SEQ ID NO: 281838 - DNA, 212 bp, Homo sapiens
  chr3:192635147-192635359
  hyper
ccagccccaggtggcggagaaattaacaaaagagcaagcgaacagggggaaagggagacccggcgtaaagtatagtaaggaggggagggcaggcagctcggctttcggcggagaaagaagagagaggcggaacagagatggcttatacccaaggcaccggctcgggaaggcaacccagaagggaagaggtcgagaagcggcaatgggttttc

SEQ ID NO: 281839 - DNA, 546 bp, Homo sapiens; identical to SEQ ID NO: 199265
  chr3:192635622-192636168
  hyper

SEQ ID NO: 281840 - DNA, 196 bp, Homo sapiens; identical to SEQ ID NO: 230112
  chr3:193310837-193311033
  hyper

SEQ ID NO: 281841 - DNA, 174 bp, Homo sapiens; identical to SEQ ID NO: 230113
  chr3:193506053-193506227
  hyper

SEQ ID NO: 281842 - DNA, 648 bp, Homo sapiens
  chr3:193721033-193721681
  hyper
ggctccgggcacccgagatccttaactgcagcttccaaagccctggctgatcctaatcagtgtgggaaaggagcgccgggcccagcccgccggccggagacgccgcctcttttcataaactttatcgccgcggtgcacagccgctgataaagcaccataaataaacgagcgggcgggagtgcgcggctgtctggaggctgccggagcgcacgccctgcctcggccctgcagctcccgggggaaatgaatcacacgccgggctgcaaagagcagcatgttctcctctccagaccaaggccgtaaataataatgcgttctttccctacgtggagaccctcaccttttgtcttgtgcattccgtaaaaagctcaggagtttccttccggctgcctggcctcccctccttgccccggggggttaggagtgctctgttctgacttaggcgtttccctagggtggagctcctgggcctgggttgggcctgggcgtgtggctccgtgatcgtaagtcccctctggctcttgcacaacagaccgaggctggagcagggcagggaggccgcagtggggcctgggttaggaggggggtggtttgacatctctagtggtaagtgatggtgagcccggttcccgccgtggtggccacgga

SEQ ID NO: 281843 - DNA, 131 bp, Homo sapiens; identical to SEQ ID NO: 199267
  chr3:193775945-193776076
  hyper

SEQ ID NO: 281844 - DNA, 366 bp, Homo sapiens
  chr3:193852644-193853010
  hyper
cacacaccccccacacgcagcgcgcgccaatgagcccgggccaggcgcagggggcggggttttcccaggctcgagcacagcagctgctatttaccttcttggcttctcccggggaccaggaaccggcccccgctctccgccgcccgtcgccgccccccgcctccctgcccccggggcgcgcgcacacacactcactcacacacgcacgcacacacacatcctcccggcccggccgcagccgcggcggcaataaaacatcctggcacgtgctccggctccaggcgcgcccacgccggccggctgatgtcaaactgcagctcggctggtgtagctcttaaagggcccgcgggcgccgggggccgaggc

SEQ ID NO: 281845 - DNA, 635 bp, Homo sapiens
  chr3:193853736-193854371
  hyper
ccctgggctcaggcgcgcgccattggccgccagaccttgtgcctggcggccaatgggggggcgcggtccacgagcggtgccgcgtgtctcctcctcccattggctgaaagttactgtgggaaagaaagtttgggaagtttcacacgagccgttcgcgtgcagtcccagatatatatagaggccgccagggcctagggatcacacaggatccggagctggtgctgataacagcggaatcccccgtctacctctctccttggtcctggaacagcgctactgatcaccaagtagccacaaaatataataaaccctcagcacttgctcagtagttttgtgaaagtctcaagtaaaagagacacaaacaaaaaattctttttcgtgaagaactccaaaaataaaattctctagagataaaaaaaaaaaaaaaaggaaaatgccagctgatataatggagaaaaattcctcgtccccggtggctgctaccccagccagtgtcaacacgacaccggataaaccaaagacagcatctgagcacagaaaggtaagggcggtacctgtatctctttgcagcccctcaaaattaagtaggggttggggggcttctttctgtcttgaaaccccgggatggcagattc

SEQ ID NO: 281846 - DNA, 33 bp, Homo sapiens; identical to SEQ ID NO: 199270
  chr3:193858570-193858603
  hyper

SEQ ID NO: 281847 - DNA, 246 bp, Homo sapiens; identical to SEQ ID NO: 199271
  chr3:193858636-193858882
  hyper

SEQ ID NO: 281848 - DNA, 282 bp, Homo sapiens; identical to SEQ ID NO: 3063
  chr3:193858949-193859231
  hyper

SEQ ID NO: 281849 - DNA, 121 bp, Homo sapiens; identical to SEQ ID NO: 222312
  chr3:193859656-193859777
  hyper

SEQ ID NO: 281850 - DNA, 151 bp, Homo sapiens
  chr3:193987504-193987655
  hyper
tttccgggactggccgggtcaccctgcggctcggccgtgtctggcagccccacccttcctggcagccaggccctctgaaattccgccagcaccgggggacgaagaaggtcttgctaggatgggggagggcgggaagacggggagcacgagc

SEQ ID NO: 281851 - DNA, 40 bp, Homo sapiens; identical to SEQ ID NO: 230120
  chr3:194207834-194207874
  hyper

SEQ ID NO: 281852 - DNA, 115 bp, Homo sapiens; identical to SEQ ID NO: 199273
  chr3:194278585-194278700
  hyper

SEQ ID NO: 281853 - DNA, 571 bp, Homo sapiens; identical to SEQ ID NO: 222316
  chr3:194353932-194354503
  hyper

SEQ ID NO: 281854 - DNA, 246 bp, Homo sapiens; identical to SEQ ID NO: 230121
  chr3:194393108-194393354
  hyper

SEQ ID NO: 281855 - DNA, 117 bp, Homo sapiens
  chr3:194406436-194406553
  hyper
ggaccggtctccccgctccctcgaccaatggctgtcacgcggtccctttaagaaaccaggaatccgcccggagtcggagcccaaaacagatcctcttctctgctcctcccctgtccc

SEQ ID NO: 281856 - DNA, 477 bp, Homo sapiens; identical to SEQ ID NO: 40105
  chr3:194406589-194407066
  hyper

SEQ ID NO: 281857 - DNA, 156 bp, Homo sapiens; identical to SEQ ID NO: 199275
  chr3:194407279-194407435
  hyper

SEQ ID NO: 281858 - DNA, 153 bp, Homo sapiens; identical to SEQ ID NO: 199276
  chr3:194407836-194407989
  hyper

SEQ ID NO: 281859 - DNA, 101 bp, Homo sapiens; identical to SEQ ID NO: 199277
  chr3:194408028-194408129
  hyper

SEQ ID NO: 281860 - DNA, 77 bp, Homo sapiens
  chr3:194827128-194827205
  hyper
gaaaggttctggccccagcacggccccgcacacaccctctctcactggacttgccccttcccttctcccgggcctca

SEQ ID NO: 281861 - DNA, 139 bp, Homo sapiens
  chr3:194827241-194827380
  hyper
gggctcggtgattcggggctgcggtgggagggccctgagttcttagacccgcgtgcagatccggccgcgacacaggcgagacccctgccggcgaggcgcggaactgcaggcacgccgcggcagggagggccgcagagcg

SEQ ID NO: 281862 - DNA, 258 bp, Homo sapiens; identical to SEQ ID NO: 222317
  chr3:194980253-194980511
  hyper

SEQ ID NO: 281863 - DNA, 194 bp, Homo sapiens; identical to SEQ ID NO: 230125
  chr3:194992081-194992275
  hyper

SEQ ID NO: 281864 - DNA, 287 bp, Homo sapiens; identical to SEQ ID NO: 230126
  chr3:195163846-195164133
  hyper

SEQ ID NO: 281865 - DNA, 596 bp, Homo sapiens
  chr3:195599090-195599686
  hyper
gggccctggagtcccgagcggggccaggtcagcatccatccccgcccagtactcactcgtcaatcctgtccgggaagccccagcagtggcgggggtcactgtcgccatgccctgtgtggatgaagctgttctgcaggggctggctgatgtcctgggccgacaggccggccacggaggtcaccacgttgcgagggaagggccccacacacagcgtccgtgtgttctggccacgccaccagtagttctcggccctgcgcgacagagatggcacggtgaacgccaggcgtggcggggcagccccggcactgggaccctcctcacaccctggccactgtggcagaagggggatggagctcaggcctcaggaccaggctgtgtgccaccggccctcctccccaacagcccccgtgacccaccatgccccgtacaggcctgtttgcacacggccttacccacaactctctaggtgggtcaggcagctttccctatggtttgcaaataaggaggcacgctggaagctgctgcagcaggcaacatgacctgtccacggttaccagaaagatcccagcagacctgggacccaacgccagctttca

SEQ ID NO: 281866 - DNA, 141 bp, Homo sapiens
  chr3:195610106-195610247
  hyper
tcccggatgaagtcgtccatggcttctggctggctcaggacatcgggcttcaggcacttcacagccacactcacctgcccagagcgggatttgcaaggactcaggacttgccaggtcccagacacgcggagccaacctgct

SEQ ID NO: 281867 - DNA, 982 bp, Homo sapiens; identical to SEQ ID NO: 109537
  chr3:195622064-195623046
  hyper

SEQ ID NO: 281868 - DNA, 33 bp, Homo sapiens; identical to SEQ ID NO: 199281
  chr3:195636198-195636231
  hyper

SEQ ID NO: 281869 - DNA, 505 bp, Homo sapiens
  chr3:195808865-195809370
  hyper
tgaagggaggacacgagggtcggtgtagttctagaagcccgcactcacactagcgcgtcctccgtcccgagccgccacccgatatcccgacgctctgaggggatggcggcccctaaccggcggtttatagcctggccccgcccccggcccccaggggggctgtgcgtcacttcctgaggcacgtacgctcgcgaggtgctctgacagatcgcccggggggcggggatgcgcgcgcagcgggcggggccctatgcggagggcgctgcgggcgaggcgaaggccaagggaaaaggcgccaaggcagcaggtgccccgaggagccgcgcgatgggcgcactggcctctgcctcggcgccttcctccaccctggtagcctggcagcctccgcctgaccttgaccaacctccagtccctgcagtgctaggtccaatctgttggcgttgacgcttaaatgttggatattgcactgcggcagtgccttgaaatgtacgtgcaggatggaatg

SEQ ID NO: 281870 - DNA, 158 bp, Homo sapiens; identical to SEQ ID NO: 230130
  chr3:196014679-196014837
  hyper

SEQ ID NO: 281871 - DNA, 175 bp, Homo sapiens; identical to SEQ ID NO: 230131
  chr3:196158444-196158619
  hyper

SEQ ID NO: 281872 - DNA, 42 bp, Homo sapiens; identical to SEQ ID NO: 230132
  chr3:196230643-196230685
  hyper

SEQ ID NO: 281873 - DNA, 80 bp, Homo sapiens
  chr3:196366355-196366435
  hyper
gcccctagctggccgcccccagccctgccaaggcaccaacgcaagaaagccgggggagcctcggtcgcattgctggaaga

SEQ ID NO: 281874 - DNA, 46 bp, Homo sapiens; identical to SEQ ID NO: 230134
  chr3:196466463-196466509
  hyper

SEQ ID NO: 281875 - DNA, 223 bp, Homo sapiens; identical to SEQ ID NO: 222323
  chr3:196695305-196695528
  hyper

SEQ ID NO: 281876 - DNA, 94 bp, Homo sapiens
  chr3:196755864-196755958
  hyper
cggggcgggggtggcggtggcttcatcgtttgcattgatgagtgcgtcgcctgcggccacagcggtgccacgaactccatcccctcggcggtcg

SEQ ID NO: 281877 - DNA, 342 bp, Homo sapiens
  chr3:196756044-196756386
  hyper
aggggacccggcctccgtctccacctccatccctgcatgtgccagaaacccccgggcggactcccgcgcctgccggtcagtccctctgaatcttctcccgcgggggctcgggagaaagagctgctccgagcccccaaagtcttcctgagttcctgcgcccgtcgggaggggccgccctccgggagctcctctccacaccccgaggcctccccaccacgcctcagcccgcgcttctccttggagcgtcggaagcctcgggtgttcgaggccgcctcctccaagaagccttccagacttccccgtctgcgcttcagtgctagttccctccgccgtcctcactcg

SEQ ID NO: 281878 - DNA, 239 bp, Homo sapiens; identical to SEQ ID NO: 230136
  chr3:197023961-197024200
  hyper

SEQ ID NO: 281879 - DNA, 677 bp, Homo sapiens; identical to SEQ ID NO: 199283
  chr3:197025626-197026303
  hyper

SEQ ID NO: 281880 - DNA, 352 bp, Homo sapiens
  chr3:197183346-197183698
  hyper
cacccacgctcccgagagctcccaggccaggcctcacagggctccttccctgtgggagcggaggtttgccgcgagccatcgcccggcacgggacacgtctcagggggaaggaacacgttttctctcagactgagcgctcgctgaccccggctcccaggcaccacgtctaccacgtgactggattcctgcggccgccgcgagccgggagaattctaatagcgcagatgcccggaaccgctgcagcagcccgagccggaagtgccagactcctacttcccaccggatgcggggctcggcaggctcggcaggctcctccgcaggccacacagccggcggcacaggcctcctgcgg

SEQ ID NO: 281881 - DNA, 96 bp, Homo sapiens; identical to SEQ ID NO: 199284
  chr3:197222652-197222748
  hyper

SEQ ID NO: 281882 - DNA, 244 bp, Homo sapiens
  chr3:197237111-197237355
  hyper
gtgagaaacctcaggctcgggcggcagcgcgggagtctggggcgctggaggccggcgccggctgcggaggaggagcgccctctagcggcaggtccgcccagggagaggcggaaacgcggagtctgattcgaaggcgggcactggggaccctgccccgggccgaaagccccctggaggacagtggtgtttggcttcggtcccaacatacaggccctgggcagtcgcagggatggcagctttcaaa

SEQ ID NO: 281883 - DNA, 156 bp, Homo sapiens
  chr3:197281702-197281858
  hyper
cgctagggaccgaccggagcgctcaaacccacagggtatctatcaggcgcgcgtcagcacgtaagcagagcgcgagaacgcccgagacggcggcgcagccaatcccagagcagcgctccccaacggccggccggagggcggggagagaggggggct

SEQ ID NO: 281884 - DNA, 238 bp, Homo sapiens; identical to SEQ ID NO: 109572
  chr3:197281920-197282158
  hyper

SEQ ID NO: 281885 - DNA, 246 bp, Homo sapiens; identical to SEQ ID NO: 230140
  chr3:197476866-197477112
  hyper

SEQ ID NO: 281886 - DNA, 190 bp, Homo sapiens; identical to SEQ ID NO: 230141
  chr3:197517983-197518173
  hyper

SEQ ID NO: 281887 - DNA, 146 bp, Homo sapiens
  chr3:197807082-197807228
  hyper
ctgagggtgcccagcgccctccaaggcccccgtcccaggggctgcggggctgcggggaagccgggcctggggaccccctcccaccccggctgagcccccgctacctgtcctgggcatccacgtcccggcacctgcgcgccaggcgg

SEQ ID NO: 281888 - DNA, 716 bp, Homo sapiens
  chr3:197807545-197808261
  hyper
ctcagcccgcgaagccgttaggcgcgcgcctgcagctcagcgcccgcgcggactccggaagccgctcccaagcccgcgctgccggcagggggcggctgcggctcgggcgcaggcgccgctggcttgcgggttctcctgggctcgcccgggacgtcccgtagtcgcaggcgcgcaacccgcccggcctgagggcccgcctggccgtgacccccgccccgctcctcctccgaagagagatcggggccgctggcaggggccctccgcagccaccagggatggggctgtggggcagttcccgccccggtgcagccgccgccgggcagaccgcctggcttggctgcagccgcggcatctggctccggttctgcgaggctgggagctccagcgagcttgggagctgccaggcggctgctgcgagcaggcagagggcgcctggagcttgggccctcaggcggcggagcatggcctgggcggcctctggatcgcgagtgcacctggcctgagagcctgccaggccctgcccccgctcggctcctcctctgccggagctccggaccgctagccaggggccctctgcagccaccgggaatggggctgagggcgggttcccgcccctgtgcagccgccccagggccgactgcctggctcggccgcagccactggtacatctggctccggttctgagatgttgggagtgcgggcgggctcgggggttg

SEQ ID NO: 281889 - DNA, 40 bp, Homo sapiens; identical to SEQ ID NO: 109581
  chr3:197808380-197808420
  hyper

SEQ ID NO: 281890 - DNA, 210 bp, Homo sapiens; identical to SEQ ID NO: 199287
  chr4:331352-331562
  hyper

SEQ ID NO: 281891 - DNA, 31 bp, Homo sapiens; identical to SEQ ID NO: 230146
  chr4:379916-379947
  hyper

SEQ ID NO: 281892 - DNA, 198 bp, Homo sapiens
  chr4:380158-380356
  hyper
ggaaatggcggcggcgggaccgagtctgtgaagagagtcccctctgccgccgctcagccctcgggcctcagccccctccggtgagggactctggtttctgtcggttcccgcagggtggctctggcccagcctgcagccctccttgtgcagctctgcccccgcagccgcgcaccttccctgggctgtggggtgaggagg

SEQ ID NO: 281893 - DNA, 234 bp, Homo sapiens; identical to SEQ ID NO: 230148
  chr4:492842-493076
  hyper

SEQ ID NO: 281894 - DNA, 49 bp, Homo sapiens
  chr4:568246-568295
  hyper
ctgaattaccagctgctctgcgtctctgtctgctcttcctccgtgggaa

SEQ ID NO: 281895 - DNA, 172 bp, Homo sapiens
  chr4:657349-657521
  hyper
gcgtcccaagccgacgatggagccgctggtggagagctgggcaccctgaggagggccctgagcagcaggcggattaggggtcccgcccaccgagggcccgagggcgggggcgtgagaggcacaggcagccgaggcggaaggggcggggtccccgggcaccctgagaggtggc

SEQ ID NO: 281896 - DNA, 114 bp, Homo sapiens
  chr4:657552-657666
  hyper
ccgcagaccctgaacatctaccagaacctgaaccggcggcagcacgagcacgtgatccacctgatggacatcgccatcatcgccacggacctggccctgtacttcaagtgcgcg

SEQ ID NO: 281897 - DNA, 145 bp, Homo sapiens; identical to SEQ ID NO: 199288
  chr4:657712-657857
  hyper

SEQ ID NO: 281898 - DNA, 226 bp, Homo sapiens
  chr4:667540-667766
  hyper
agctgattccactatcggggtcacgctcggtggaggacacggtcctgcagcctcgcatgcgtcccaagcccccttccagagctggagttctccaaatagcacaggagctccacaggaaagccgagcagaccccgccccggccccgcccgcggtcactcactgtagcgcgtggctccgtaggccacaccgaggaacagggcggagtagcggccgagctgcgaaagag

SEQ ID NO: 281899 - DNA, 238 bp, Homo sapiens
  chr4:779894-780132
  hyper
cgcagccccccgtctgctatggctgtgctcctgagtgcgggcccgacaggcgcccaccgccgcgaacgcgcgcacaggggtggtcgcggggctgcccttcggcggccctggcctcgggcgctgctgggtgggcggtaaacagcaagagaaaggggcgtcccaggcgatggggctccagccacccgcgggcagaggagcacggggcggactgggggggtcctgggggcgcgcgcccctt

SEQ ID NO: 281900 - DNA, 344 bp, Homo sapiens; identical to SEQ ID NO: 230155
  chr4:785955-786299
  hyper

SEQ ID NO: 281901 - DNA, 297 bp, Homo sapiens
  chr4:819437-819734
  hyper
aagcgaggaggaggccgggcgcgggccgggaccgcgggggccgcttcagcaccgcggcagtggacagcgcccgccccggaccccgcgcgcgcggagcccgggagagaaacgggggctgcggggagaagccggggtcggggggagaaacgggggccggagggagaggccggagccggggggagaagccggagccggggaggagagacccggggagcggaggccggggggaggagctgggcgaagccggggccgcggggagaaggggggccgggaaggagaaaccggggccggcgggag

SEQ ID NO: 281902 - DNA, 143 bp, Homo sapiens; identical to SEQ ID NO: 230157
  chr4:926347-926490
  hyper

SEQ ID NO: 281903 - DNA, 309 bp, Homo sapiens; identical to SEQ ID NO: 222331
  chr4:966933-967242
  hyper

SEQ ID NO: 281904 - DNA, 396 bp, Homo sapiens; identical to SEQ ID NO: 199291
  chr4:1004393-1004789
  hyper

SEQ ID NO: 281905 - DNA, 83 bp, Homo sapiens
  chr4:1036539-1036622
  hyper
cccacacacccaccccacacaccaacacacacccacccatccccgcacaccgacacacaacccacccccgcacactgacacac

SEQ ID NO: 281906 - DNA, 318 bp, Homo sapiens
  chr4:1049472-1049790
  hyper
cttcacgtggtggtcggctgctgttaactcggttaactcgagtgagataacaaagttctttgacactttttaggtaaatgcaaactaaaagattagaactaaccccataagcctcttttccaaccctgtgtggtcccggctggcgggagagacctgggctctgagactctctgggagccacgtgcacgggggcgtctcctgcaggagaccccaccctcctgacggatgaggaggctccacccacgcaggccgcatctgcagggtgagctcaggcccggaattcatctctggacctgacggagattcacccgctgaagc

SEQ ID NO: 281907 - DNA, 307 bp, Homo sapiens
  chr4:1165683-1165990
  hyper
tgcttggggaaggccgtctggctccacttgcccgtgaaggtgatgctgtatttggccagggctctggcggaacagatggactctcccccaagaggctggccggcggcgccgagagtggccaggaggagagcgcagagggccttgcccagggcggcggccgggctggggttttccatcacctgggagcacagaggggagcagccgcgcgctggcaccgtcgtggcagcctcggggtggaaagccgagagggctgcggcactttgggctctgaggacggccccgagcacccgcgaccccctccctgctc

SEQ ID NO: 281908 - DNA, 243 bp, Homo sapiens
  chr4:1166359-1166602
  hyper
cagcggtcgggtcccagccagagcccggagctcctatttaagcccgaggccggcgccccgggccggccaatgaggctccagttcctcctgtcttcgatgctgcacggcctggcctccagcgagaggcagataggacgtgggagaaaggaggagaaggggctgcgggggcggcgggggctgccgctttcccaactcgccctgcccagcgaccttccccgggtcggatcaccctcttcccctggc

SEQ ID NO: 281909 - DNA, 140 bp, Homo sapiens; identical to SEQ ID NO: 199293
  chr4:1243421-1243561
  hyper

SEQ ID NO: 281910 - DNA, 218 bp, Homo sapiens; identical to SEQ ID NO: 199294
  chr4:1332660-1332878
  hyper

SEQ ID NO: 281911 - DNA, 434 bp, Homo sapiens
  chr4:1395972-1396406
  hyper
cccaggcagccccttctccccggggaaaacaggcaggcgcttcttcctccaggcagtagccgaagctgacaccgcccccaagctgacacgcctagcccggtgctcccttgcggggctgtggggcaggggagtgggaccggagcaggctgcaggggtggggagcaggaggcggaaaatgccgcggccccaccagctccatggctaagaggagaggcgaagaggaagcagctggtcactttccgagacctgtgatcttttttgggacggggagggggcggtcagggaggtgacgctgggacctgagcctcagccagcttggcgggtgagcccctgcgctcagcccctgcgcccacgacgacgggcaggcaccagcagagtggcctgaattccggccgggggacgccaggccggtgggaaaacgggctggagtcccg

SEQ ID NO: 281912 - DNA, 103 bp, Homo sapiens
  chr4:1396923-1397026
  hyper
gggcagccccgtgccaggcccggcccccggtcccggtccgcccccgccgccggtcggagcgctggtgtcggcgcccgggttctgcttcttccacttggttcgg

SEQ ID NO: 281913 - DNA, 467 bp, Homo sapiens
  chr4:1397780-1398247
  hyper
ggcctgtccttccctcccgccgcccgcgtctcctctcggtcccttgcttgtttctttctatggagagggtccccctcgccccgcgctgcccgttctcgcggcgccgggcgtttttgcctgagcggggctggacgggtgctgcgggccgggcccggctgcggagatcacagcggagtggaagctctgatcgatccgcagggctgatacacacttaattaaactcattttgtgtagtgtacaaactagttaaggccatttaatttatttcggcgtatattaccccccaattaccgccggcgcagggccagccaattgccgggcatttaataacaggcccggcggtggggccggagccggccgagagaatggggcttgggggacccaaatcctatgccctggccccgaccctacctcaagcctccaggccctgagcttcggtcgcgagggtcagccccggctcccctgcc

SEQ ID NO: 281914 - DNA, 298 bp, Homo sapiens
  chr4:1398378-1398676
  hyper
gctccgcatcctccaagcagaggccctgaagtgactgcattttgagtctctgaaatttggaagaaagcatctctcccaggcagggtcgcctatgccccggcactgggggcctaagtcaggaggagtcggggcaggtgccctccacagagctgcccagcggcagccgcggcctgctctccggccaggtcggaaccgaaatctccggtaagaaatgaccaatcgctcctgtcagattcctccagggcgactggccacctggcatggaggccagcaggtggtctgggtccccgcgaccctc

SEQ ID NO: 281915 - DNA, 246 bp, Homo sapiens
  chr4:1399254-1399500
  hyper
cgctttccgccgctaagcacatttccccttaactgtaatcgaagggatttaattgtttttccagcgataaccagcgttttgtcacaattagtctgatttgtccaaaaaaaaagagagagagggagaaaggagggagggagggaggcctcgggcgggcacagtgggggcggggaggtcacgggccagccaccgcgagcggcccctcgcctcctgcaccaactacccttctaggccggagacgcgcgg

SEQ ID NO: 281916 - DNA, 69 bp, Homo sapiens
  chr4:1399564-1399633
  hyper
agaggagcctggcgatgcaggccctgcagtccgggtcggatggaggccacgggtgggctggtgcggacc

SEQ ID NO: 281917 - DNA, 58 bp, Homo sapiens
  chr4:1399665-1399723
  hyper
cgtgggccagacccaactcgccacggtgtcccagggtcgtaaacgcatagaagcctcc

SEQ ID NO: 281918 - DNA, 222 bp, Homo sapiens
  chr4:1399768-1399990
  hyper
cggcggctcagctccggcggctccgactcccccggcgccggcgagggcgcggcgctccagctcctccgcgcgtggcgggcgtcccgaggcggcgggtgcaggggcgcatggggccgaagcgcaaggggcgcacgcagcgggagccactgggcccagcagcacgcaacgacgcctcctgctgttgaacttgttggggtccaggatgtccagtaccgagaagga

SEQ ID NO: 281919 - DNA, 136 bp, Homo sapiens
  chr4:1400112-1400248
  hyper
cgtccatagcttcctgggcagcggcggcgggagcgggcggtgcgggccccgaacctggctggggaggcggcggtagcgcgggaatgtccccaggagcctcggggccgctagcgctcatgccggcctcccgccgctc

SEQ ID NO: 281920 - DNA, 36 bp, Homo sapiens
  chr4:1402412-1402448
  hyper
gaggcctgggtcggggagggccgggcaggtctcaag

SEQ ID NO: 281921 - DNA, 124 bp, Homo sapiens
  chr4:1404605-1404729
  hyper
ccgatcaaaagccagcccgttcacctcgaccaagccagcatccaccaaagggccagaagtttaccaggccgctcaccgcgtgggcttccattctcctacctgcaagctgcgcgagttaaggagg

SEQ ID NO: 281922 - DNA, 408 bp, Homo sapiens
  chr4:1407532-1407940
  hyper
cctcgtggctcctccgacagggtgggcactgtggcggtcgtaaggggcagggatgagcgcgctcagggagaccccgcggttaccgcagcctttcagggaggagggaggcggcggatgcggtctgggagggctccaggcgtgagaaggcggcccttgcctggcgcaggggagcagggagcttccagggtgggtgcggggaggaaggaggagtaaggggttagaggccaggtacacagcaggtgctcaataaacgagttcggcaccgtcatcccgccctgcagggccgctctgggttcggagggcgcgtagggagggcgggtcaggccgcacaatgagcttaattgaggttaatgcctcccgcagctccgcgattattaaattatcatcatcacgcgcgtgaatcataat

SEQ ID NO: 281923 - DNA, 201 bp, Homo sapiens
  chr4:1408542-1408743
  hyper
gcgctcacgtggcgcgcccccggctgagcccaaggccggggtctcagaaggccccgcccaccccgcagcgaccccccccccacgcccctcgcaccgccgagcccctcccccaggggccgttcccttccgggcctgcaccgcccccgcagctgccctccccccagagcagcgcccgcccccctcctctcggcggttgggagc

SEQ ID NO: 281924 - DNA, 54 bp, Homo sapiens; identical to SEQ ID NO: 230172
  chr4:1714965-1715019
  hyper

SEQ ID NO: 281925 - DNA, 1517 bp, Homo sapiens
  chr4:1794972-1796489
  hyper
cgcggaccgtcccccactggctgcggcgcgcggggcagcccaggctcagtgcgcggtggcggcggcgtcgcgggcagctggcgccgcgcggtcctgctctgccggtcgcacggacgcaccggcgggccgccggccggagggacggggcgggagctgggcccgcggacagcgagccggagcgggagccgcgcgtagcgagccgggctccggcgctcgccaggtccgtgcttggggccgggcaggctcgcggaggggtccaacggtgctcgcggaggggtcggggcgcggctgtcgcggaaccacagaggtccctgcagcgggccgggccggggcgcgggcttcccgctccggaaagtttgccgccgccgccgccctgggagggctttgcagcagccagggagggaagggggaggagggagggaccgcggcggggaggaggcggccggcgccaggcggcccgggagccctgggcggcggcggcggcgggcggggcggctgggggtcggaggggtcgggacgcaggagccggccaccgccgctttcgtccctgtccgcccctctaacgagctgccttcctcctcctgtagtctcccgagcggcgcccgcctcccgccggtgcccgcgccgggccgtggggggcagcatgcccgcgcgcgctgcctgaggacgccgcggcccccgcccccgccatgggcgcccctgcctgcgccctcgcgctctgcgtggccgtggccatcgtggccggcgcctcctcggagtccttggggacggagcagcgcgtcgtggggcgagcggcaggtaagaagggacccactaggcacgggagaggccggcccgtgcgggcagaggcgttggggacgggaaccggccccgggtcggaggggccgccgggtgtgagtgacgccccggggttagagcccggattccgctgcctccttgccggagagcgcggccagagctagcgcggcgacttgtggtgcgcccggagccgcagctaccctccaagtgcgaggccaccacggggagccaggctgggggttggcgtccgcagccccgatcccctgcgactccctagccctggcctgtcgggagggcgcggggggccccatttccacgattcccgctgttgttattcgggttctgcgcagacggaaagttcccattgttggcgtccccctcccccgggccccagtttgtggccagcttcggccaaggcgagagaccggacttctaagggtgggtgtgcgcgtcagcgaagcccggcccctgcccgcccgaagaggcagcagcctccagcgtccccgctgccgaccctgcccctgcctgggggccgagggcgcttccccgtgggtgcgcgccgagctccaggcaagcgaggggcgcgtgtcccagcgtcgcgggccctagactgggctggcggtccaggtcccgcgggacgtcgagggtctgaagggaggtcccaaggggcgaggggaggggaaggggcgcccggccggacctgcacacgcgccgcggtt

SEQ ID NO: 281926 - DNA, 547 bp, Homo sapiens
  chr4:1796598-1797145
  hyper
aggccttggcccggtgagctcgcgccccacccgggccgaggcccgaacagccgcttctttgtacctcgacgcggccacagaccgcgcattgatggcggctcggcggctcgcggggaggtgtgagcgaccgcgggcgcggcgggccggggagggcgcctggagggccgaggcagatggcgtccgccccgcccgcgcccccgcgcccctttctccgtcggcggctgcagcctcccggaacaatgtcattttttttatgaatgaaagtggcccggcgcttgaatgtgcgtgtcattcagcggcgtgacaggggccgtcgggaggtcagcgcgcgcttttagcgtctgctcgggcggccccgcttccaggggtgccggaggggcggccgcggggggagcttggctttcgcattctcattcagataaagatattactccctacggcccgggaatgtcagccagccccggggaagggcggcggccaggctgcggagcctctcctggaccccctgcgggcgcgcggggcctcccccagtcgctcctggaacgcc

SEQ ID NO: 281927 - DNA, 508 bp, Homo sapiens
  chr4:1828221-1828729
  hyper
accttccccagctcccggtgctgcccgttcacagacgcgcttgtctccatgtctgctgctgtcacctggagtgctctctgaacaggatcatgcaggagtcacctctggggttccctgaggacccactgggggtgctatgggtgtgccgggttaggcctctcactgccatgcggcattctgcagcatgcgtgccctccttagccgaacccttcgcccactaagctgggctccgccagttgatcaggaatgaagatgctttctgtctgctttcttctccctgtcctcctgggggctggctggcctccgtttgatttcgctctggtggtctggagtctgtgcagcattttcagtgttgctctggggatcacgatacacaatccacggacgcagctcactgtagtgcagtggagtcggcgctccacccacgaaggcaagtgctgaagcttcccctccgtctgttctgagtctcaggtgtcgcctccactcgcatcgtcgcctccacccacac

SEQ ID NO: 281928 - DNA, 42 bp, Homo sapiens; identical to SEQ ID NO: 230176
  chr4:2010687-2010729
  hyper

SEQ ID NO: 281929 - DNA, 47 bp, Homo sapiens; identical to SEQ ID NO: 230177
  chr4:2011067-2011114
  hyper

SEQ ID NO: 281930 - DNA, 351 bp, Homo sapiens
  chr4:2042731-2043082
  hyper
ggggggcgcccgaggctccgggtcctgcacggcgagcggggcggcctccaggtaggggtgcggctccgcccaccaagaagagggtctggcgggaggtgtggttagtccctgagctcccggccacagcgcgggctgctgggtggggtggggggggagcgggggcgccagcacccacgtgcgcctggggcgccttctgaggaggccaccgcctgtgtcggtgtcggcgtgggggcctggctccgacggctgggaccatccctcccagggcgtccggggcccagattcgcacttgccgggcgcccccgggggccactggctgcacggcgctctttaaggccaacagccctgagt

SEQ ID NO: 281931 - DNA, 230 bp, Homo sapiens
  chr4:2043187-2043417
  hyper
tgggttgggggtgggtagccgggagggaccgagcaggctggtgcccaccctgacgcccgaggatcggggagaggctgggccagggaaaagccgggcgagggcggatcccccgagccgatcccccagaccagctctctccgggcggtgcgaccccacactggaccccactcgcccgcggtcggaggccaagcgtttgcatgcgcagctccccgcgcctcgcgagcatcgag

SEQ ID NO: 281932 - DNA, 982 bp, Homo sapiens
  chr4:2043447-2044429
  hyper
gagctccagccacagatttcccacttcctcagcttttctcccgccggccttgcgctctggaggtctcgccccggcgccgcctcctccaggcagtcctctagactgcatccgccatgggcctggacgctgctcccgggggcagcccccggccagggccaggcacacccgattcctggagcgtcctaggttcctctaaacccgcggccagcgcagtctcgggtttccatgacgacgacgtcggatggggaacccgggcggggtcgggtcggagcgcatgcgcgttgcgcgccggacgcggaacgtctgccggtgtccccgcgctgctggtcccggggtccctgaaccgcggtaagggcggtggtgcgggcgtccgaatgggcgttttctagatacggggcgcggactagaggctcgctgggcccggagaccggcggactggagtcggggaaccggaggtggggagggggctcccgggcccggggtgggtgggtccagggctcccaggcctggggcttggacaagggtcgtggggcccgcgggaggggacgggggctcaccggcccggggcgggcggggcgggcgccgctgacccctcgctggcttcagggcggccccgctccctctgctggccatggcccccccgcccgcgtgccggtccccgatgtcaccgccgccgccgccgctgctgctgctgctgctgagtctggcgctgctgggcgcccgggcccgcgccgagcccgccgggagtgccgtccccgcgcagagtaggtgccgggggccgggttccggggagcggggcggggctggcgacaggggcgtgcggggccggggctctgcggggaggaccgcgcctcgcctttgttcccgggagcgggtcctccccttcgcgggagatggtggcttggggagtggggacgtgcgctctttggcactgggtggacgggcccagagtgcgtgggggccttgcgggtgaccccccctg

SEQ ID NO: 281933 - DNA, 556 bp, Homo sapiens
  chr4:2060920-2061476
  hyper
tcccccacccccgcgatcacatggtgacccccggcagccaatgcagtggacgctaggaccctgcgggccgcgggcgccgcgactgcaccggcgccgccgcattataaatacttctccaaaatgcggcgcagctccctgcgcgcgccccggccgcccgccgcctccgccccgcgcccctgagctgccgccgccgccgccgccgctgccgccgccgccgccgccgccgcgggtccgagggcgccgcgcccttgccctgggcccggccgtgcccgccgccgcccggccgcgtccccgctgccgcgccgcccggccgggtgcatgcattgtgggcctcccgacatggtctgcgagacgaagatcgtggccgccgaggaccatgaggcgctgccgggggccaagaaggacgcgctgctcgccgccgccggcgccatgtggcccccgctgcccgccgcgcccgggccggccgccgcgccccccgcgcccccacctgccccggtggctcagcctcacggcggggcggggggcgcggggccgccgggggggcgcggcgtgtgca

SEQ ID NO: 281934 - DNA, 84 bp, Homo sapiens; identical to SEQ ID NO: 199301
  chr4:2418904-2418988
  hyper

SEQ ID NO: 281935 - DNA, 871 bp, Homo sapiens
  chr4:2419032-2419903
  hyper
gccgggatcctgaacaccgccgcgccttcatcccgcgccgagcgcgcccggccctgctccggctgcagcgggcacgagccccaggcgggcggcggggacgcagcgcccgcagtgcgactggcgcagccgctgaggcacggggcgcgccgcccggaccccgaccccgcggcgctaggagaggcgcgggcgccggctggagagccgcacctcccgccccgccgaggctgctggccacgggcgcgctcgccccaagggccgggcggaggacctgtcccggattccagaggacgtgggtggggaagggacaaggatagggacaagggaggggacgcgaactgggccgaggtgtgggtcagtcctggttcgggaagggaggccgttggcagggccatcaggatcctctctggacatggaaggacgggtctgccctggacccagggattgggaaatgtgggttctctcagaacctggggaagtggggagagggtctgttctggagtgcggagggagatctattccgggcccaggacaatgggggtgggggcaggacgggaatgagggggcattcctggtgcagggaggggagacggagaagtagtagggggtctgctccgggcccgcgggctggggaccacgaagtgtaggagggcaccgtccaggaccgggatgaggagggagaggggcccgttgtggccctggatagagggggagggaaagtgcgccccggcccgagaggaggagcaggagggtcagtcctggacccgggcttaggaagccgggagggaggttcggatccgcctcagagacagggcgatgaagatctgtccaagtcttggagtggagggaaggatgtcggcggtgggggaagagg

SEQ ID NO: 281936 - DNA, 68 bp, Homo sapiens; identical to SEQ ID NO: 230182
  chr4:2421165-2421233
  hyper

SEQ ID NO: 281937 - DNA, 90 bp, Homo sapiens; identical to SEQ ID NO: 230183
  chr4:2470686-2470776
  hyper

SEQ ID NO: 281938 - DNA, 330 bp, Homo sapiens; identical to SEQ ID NO: 230185
  chr4:2795141-2795471
  hyper

SEQ ID NO: 281939 - DNA, 230 bp, Homo sapiens; identical to SEQ ID NO: 230186
  chr4:2965177-2965407
  hyper

SEQ ID NO: 281940 - DNA, 136 bp, Homo sapiens; identical to SEQ ID NO: 199303
  chr4:2965827-2965963
  hyper

SEQ ID NO: 281941 - DNA, 168 bp, Homo sapiens; identical to SEQ ID NO: 230188
  chr4:3076404-3076572
  hyper

SEQ ID NO: 281942 - DNA, 154 bp, Homo sapiens; identical to SEQ ID NO: 199304
  chr4:3445267-3445421
  hyper

SEQ ID NO: 281943 - DNA, 206 bp, Homo sapiens; identical to SEQ ID NO: 230191
  chr4:3464873-3465079
  hyper

SEQ ID NO: 281944 - DNA, 144 bp, Homo sapiens
  chr4:3767151-3767295
  hyper
gctctgacggggagcgccgatccaggatctggtccggaccctgagctcggcaggacctgtgcgcacgcaggtagcgtcgcgtcctcccccaggctgcgagaggttgctctgccatcaggccatggaccccgagccgcccgtgct

SEQ ID NO: 281945 - DNA, 283 bp, Homo sapiens
  chr4:3768207-3768490
  hyper
gcggtccccggcgggcgcgcccgagcagcaggcggcgatgcgggcgccgaccccggctggggggcgcccgagctgccgcggctgcgccccggctccaggagggacggcgtagctcgcgggaggaccatggcgtccccggcgctggcggcggcgctggcggtggcggcagcggcgggccccaatgcgagcggcgcgggcgagaggggcagcggcggggttgccaatgcctcgggggcttcctgggggccgccgcgcggccagtactcggcgggcgcggtggcag

SEQ ID NO: 281946 - DNA, 117 bp, Homo sapiens
  chr4:3873848-3873965
  hyper
gtgaggaattacggtcccttttactgatgaggaaacggaggcgcagacggcactgggtccaagttgcccaggcctccgaggtgcgcgcagctcctagccgggccttctgtttggaga

SEQ ID NO: 281947 - DNA, 47 bp, Homo sapiens; identical to SEQ ID NO: 109694
  chr4:3873974-3874021
  hyper

SEQ ID NO: 281948 - DNA, 185 bp, Homo sapiens
  chr4:3882250-3882435
  hyper
cccccaaggagctgttctgcccagatgctgagctgggagccgtccctcccccggccacacgcctgcaggtgacccccctgccccgccccgccaccaggcctgggcaccccaacctccacccctgccagaggcgcctgcaccgggttcctcctgcagatctgcaaactcacgcccgcccagctcag

SEQ ID NO: 281949 - DNA, 74 bp, Homo sapiens; identical to SEQ ID NO: 199305
  chr4:4250037-4250111
  hyper

SEQ ID NO: 281950 - DNA, 161 bp, Homo sapiens; identical to SEQ ID NO: 199306
  chr4:4389011-4389172
  hyper

SEQ ID NO: 281951 - DNA, 467 bp, Homo sapiens
  chr4:4389297-4389764
  hyper
ttgtggtgactccccccggccctcccgccgcaggctgcagcctcggagctcccggaacgatggtgaagttggggaacaatttcgcagagaagggcaccaagcagccgctgctggaggatggcttcgacaccattcccctgatgacgcccctcgatgtcaatcagctgcagttcccgcccccggataaggtaagcccccccacgcccctccacgttgccgggtgtgcacccccaaatctcgcacggcgggcgcaacaaaagaaacgcgccgcgtgcgctgggtacgcgaagtgggggcgggctcgggaggccggagggagcgcggcgaggacagtgtacccgcgcgggattctggatcgcgggatgctgggcgggggaggggagccctgccttagatgatattctcgtcctgacagtggaacgcggtggggcaagattccttcgcgtttttcctgggagcctcatccg

SEQ ID NO: 281952 - DNA, 139 bp, Homo sapiens
  chr4:4389794-4389933
  hyper
cctcccttgccccgtggccccaggggctctggatcgggggtgagcctaggggcgggcgaggctgcccctgtaccttcccgggtgtggcagttcagcccgacttgccccaccgaggcgggggagcgttctccttggtcag

SEQ ID NO: 281953 - DNA, 239 bp, Homo sapiens; identical to SEQ ID NO: 230202
  chr4:4543750-4543989
  hyper

SEQ ID NO: 281954 - DNA, 187 bp, Homo sapiens
  chr4:4854482-4854669
  hyper
ctcgtgttctaggacggcagggatgaatcactataggctggctctctctagctcagcccggcctgctgcggcctggggccactgctcctgggtcctcaggactgcctgggggaaggtagtgcattgtgcagcgcgcggtccagaagtgaaaagggaggcgcggagataagctgccggcggaagttcc

SEQ ID NO: 281955 - DNA, 198 bp, Homo sapiens; identical to SEQ ID NO: 199308
  chr4:4856359-4856557
  hyper

SEQ ID NO: 281956 - DNA, 769 bp, Homo sapiens; identical to SEQ ID NO: 199309
  chr4:4856593-4857362
  hyper

SEQ ID NO: 281957 - DNA, 153 bp, Homo sapiens; identical to SEQ ID NO: 199310
  chr4:4857407-4857560
  hyper

SEQ ID NO: 281958 - DNA, 236 bp, Homo sapiens
  chr4:4857871-4858107
  hyper
catcttcaggatccgaaatgcagaggccctctacttgggggcggggagtgctttaggatgcctgaaaatgaggggagatggagcgagaggggaggggagagaagtctagaggatggaagcggagcgccagtccccgagctttatctgctggggccagccctgcccttgccaggcatgaattactgcccggctttctcggctgcagcggcagcgcagagaaatgccgggggtacaaa

SEQ ID NO: 281959 - DNA, 564 bp, Homo sapiens
  chr4:4858130-4858694
  hyper
cgagataacaggctcagccccagggcctgcctgctcgctgaacccctgggccgggaaatcggtaaagtcctagacaaaaaataactcagagaagtctccctctcactgcccctgtaactcgtggctttcctcccgcgggaacaaacaacgccctgggaaacaggcagacattttatttcttttatctgactcctttctcttgagactgccggcacctttctttctctcgcaatccaggggcagagcaatgggaaagccccgcgcttttctgacacggaattgagtctgaacccccttctctgccgatgcactcttctcgcctagcaacgtttacacgcggttaacctgccgcgcggggcgacagcagacacgaacccaggccgaacctataaagaagacaccgtggcgttcagacccggctcgggaagccgaggggctggctgcggggccggtgctgcggggccaggcgatttgctccccggaggcaggggcgcgacttcaagggcccgtgcgccgggtgcagcctttgatccggccgccgctggcgccttaaaacaacatcct

SEQ ID NO: 281960 - DNA, 39 bp, Homo sapiens
  chr4:4858867-4858906
  hyper
agcccccgctgcaccatgcggcttcgctctctgagttca

SEQ ID NO: 281961 - DNA, 221 bp, Homo sapiens
  chr4:4859825-4860046
  hyper
tgggaggctaccaatcgctccggcgtccgcagcccgacccctgccgccagaccccggacgtcttccggataataaagttcccgctctaattcattttccctaatctggacgcccctaatctacagcttttattgcgcccagttaaaagtcgagggaattcgctgtccctccgcgctcggataattacccctaaatggccacggcagccccttgtgtttcct

SEQ ID NO: 281962 - DNA, 61 bp, Homo sapiens
  chr4:4860075-4860136
  hyper
cagggccgagtgagccgccaatcacctccgctcactccctgagagccgctggcctgggccg

SEQ ID NO: 281963 - DNA, 206 bp, Homo sapiens
  chr4:4861136-4861342
  hyper
atagagacccaggggactcccgcagagagggcctcttgggcttcagcgcagaggaaagtttcccgggcaccccctctcctcccctgccctccgccgcctgggccctgccctgcgtgcccccaggcccagcgcgcctccgggcgagtccccaggagcgcggcccaatggatcgctccgggcccgccccctcgcgcgctgattggccg

SEQ ID NO: 281964 - DNA, 212 bp, Homo sapiens
  chr4:4861568-4861780
  hyper
cggagcccatgcccggcggctggccagtgctgcggcagaagggggggcccggctctgcatggccccggctgctgacatgacttctttgccactcggtgtcaaagtggaggactccgccttcggcaagccggcggggggaggcgcgggccaggcccccagcgccgccgcggccacggcagccgccatgggcgcggacgaggagggggccaagc

SEQ ID NO: 281965 - DNA, 109 bp, Homo sapiens
  chr4:4867482-4867591
  hyper
cgcgttcgtgatagggaaatggcagggcaggatcgggtgtctcccccggccccggctccaggacctcctggctccttggagtttggcaatttagggtagaggcaaattt

SEQ ID NO: 281966 - DNA, 138 bp, Homo sapiens
  chr4:4867886-4868024
  hyper
aacagggtgtgcacacagaaggtgctcgataattgtttgctagatcggagcggcacgctggtgtggggagaacacccagagccacagtcagccgggtccggccggaaatcgcggctgcgcttccggcactgcttctcg

SEQ ID NO: 281967 - DNA, 262 bp, Homo sapiens
  chr4:4868122-4868384
  hyper
ctctggcaagaaacatgggatctaccaggcggagaggtcggccaccttccgcgctgggaggtagtgatggagcagtctgcactcacagcctactgtgtgccgggagttcccgctcacgctgactcccaacacacctaggagatttttatagcgcaaaggactgcagctcagagaggtgacatggttttcccaaggttacacagttaatgaaggacatagcaggaattccaacacggattccactcgaggatccggtttttcc

SEQ ID NO: 281968 - DNA, 73 bp, Homo sapiens; identical to SEQ ID NO: 199316
  chr4:4868464-4868537
  hyper

SEQ ID NO: 281969 - DNA, 466 bp, Homo sapiens; identical to SEQ ID NO: 199317
  chr4:4870849-4871315
  hyper

SEQ ID NO: 281970 - DNA, 370 bp, Homo sapiens; identical to SEQ ID NO: 199318
  chr4:4871384-4871754
  hyper

SEQ ID NO: 281971 - DNA, 242 bp, Homo sapiens; identical to SEQ ID NO: 199319
  chr4:4872215-4872457
  hyper

SEQ ID NO: 281972 - DNA, 71 bp, Homo sapiens; identical to SEQ ID NO: 199320
  chr4:4872706-4872777
  hyper

SEQ ID NO: 281973 - DNA, 230 bp, Homo sapiens; identical to SEQ ID NO: 199321
  chr4:4872909-4873139
  hyper

SEQ ID NO: 281974 - DNA, 1160 bp, Homo sapiens
  chr4:4873528-4874688
  hyper
aggtgcgtgccagctgtaggagcctgctccgcctgccctcctggaacgcagtcatcctccaggccctgcccgcgcccatttcgcggcccaggaaactgaggtgtggaagcctgtgaagggagggactgctacctatcgattcgtaccggatccagaccctgtgctaaacgctcggcgtgcatggtgccccttaatcctcacaaaagtcgagcgacttagggaggaatattatcccattgcacacacgagcacactgctgcgcagaggcacgaaggtacctgcccagggtctcagctagtcccatttccaacccaggaaggcaagggagcaacccgggaagcaaaatgtaaggagacactttcagggttgtgcaagtgtggggtgggcacccggggagaagggaggagggatgaactatccagagaggaaggcacgcccggccccgacttatcggaataattgtctccattccgcttcggcggtgtctgttgtgtccattgaacagaagcagaacgtgagtccgtatctgcccctcgccaccgccaccagcacctgggatttgactcacacttcaattcctgccctaggaattgatgccagcgcccagtatggccccgcgtggggaatcgagcgccccatccctcggtgagggcttactctgagcctgagtctgtggcaggcccccccatagctactgtctgccttaatccacgccaaggcctctaaaggaaaacattgccttggttctttttcacagacgtgtcaactgtggaccagagatgtcaagccacgtgcccaaggtcaccaagcagtttctgggtgagccctcagggaatcctaaatcccgacccaaacccgggatttcccctcgccctcggggcctccaaggggagctgcgagaggcggggacgcaaggaggcgctgggaccagtttgctctgagtgctcctgctccggactgctccttggagaggcggggccttgggcagcagaatcccaagctcctcccggtgggaaatccggcagctcccgtctgagggtagggccagcagaccacctggcccagtaaactccaccggcttcgggggtggggagttggggcaggtgcgccccaggggctcggtatacaaagccatgcctgagccacgtccttaatttcca

SEQ ID NO: 281975 - DNA, 143 bp, Homo sapiens; identical to SEQ ID NO: 230212
  chr4:4874973-4875116
  hyper

SEQ ID NO: 281976 - DNA, 70 bp, Homo sapiens; identical to SEQ ID NO: 199323
  chr4:5052365-5052435
  hyper

SEQ ID NO: 281977 - DNA, 289 bp, Homo sapiens; identical to SEQ ID NO: 199324
  chr4:5052556-5052845
  hyper

SEQ ID NO: 281978 - DNA, 100 bp, Homo sapiens; identical to SEQ ID NO: 199325
  chr4:5712784-5712884
  hyper

SEQ ID NO: 281979 - DNA, 78 bp, Homo sapiens; identical to SEQ ID NO: 40248
  chr4:5713393-5713471
  hyper

SEQ ID NO: 281980 - DNA, 166 bp, Homo sapiens; identical to SEQ ID NO: 199327
  chr4:5890606-5890772
  hyper

SEQ ID NO: 281981 - DNA, 76 bp, Homo sapiens; identical to SEQ ID NO: 199328
  chr4:5891819-5891895
  hyper

SEQ ID NO: 281982 - DNA, 204 bp, Homo sapiens
  chr4:5892316-5892520
  hyper
cgagtgctttcggagccccgggagcgccagaggcgctgccttttgtccggtgcctgagaagccatggagaaaggcagaggggaccacagggagaagaggaaggagtaggggagaggaacgggagaggtgaagcgaccagcgtccccaagggtcagggcgcagctgcggggctggcccaggctgcgccctgggggagatgctggc

SEQ ID NO: 281983 - DNA, 68 bp, Homo sapiens
  chr4:5893913-5893981
  hyper
ggaccaacacggaacggagctccagttcttttcacaaaacagaatgaggggcctgggttagattcatc

SEQ ID NO: 281984 - DNA, 34 bp, Homo sapiens
  chr4:5894599-5894633
  hyper
cgtacttctggcgcggggtctgcgccgcgctgcc

SEQ ID NO: 281985 - DNA, 206 bp, Homo sapiens; identical to SEQ ID NO: 199329
  chr4:6201673-6201879
  hyper

SEQ ID NO: 281986 - DNA, 73 bp, Homo sapiens; identical to SEQ ID NO: 199330
  chr4:6202658-6202731
  hyper

SEQ ID NO: 281987 - DNA, 822 bp, Homo sapiens
  chr4:6271359-6272181
  hyper
tcgctgtgggcgagccggacccgccttctggcccctcgggcccaaccacgcagggggagtgccgggccgcagctaggcgaggcgcaccgtgattggcggagatgtggagtgattggcggctacaccggccactcagcaggccgagctggcgccgcatccggggggccgcgtctggagtggagggaggccgaaggccccgcccctgccccgccccctcgtgcagaaggccgcgctagccggctcttcagcagcgagtgcagattgctcccccgcggccgcagatctcccgtttgcgccgcgttcagctgctcccgaacaacttttctgccggcccagaggccccagggcgtcgcagcgccgcgtgcggcccactcacgggccggtgagtacttcggcgctggggcagtggcgcggtggctgtgggcagcgcgcaggaggcgggcaagagccctgaggcactgtcctcttcgggcctcagtttccccttccgagctgatgggtggctggccccaaagtcccgacaaggtccccgaagttggagggccgggggtcccgcccgctctgcaacgcgcaaggcgacccctgttccgggcccgaacgggtcacccggggggcgcgccccggtcccccgcgcgctgtcgcctggagccccgccgcgggcgggacagcaggcccgagaggcggagcggccggcgggcaggccccctccccgcgccccgcgccatcccccccgagttgccccgtcatgcccctcccccgcggtcccgggacccacggccgccctcggtgcccgcccggccgttggaacgcgcctgggccccc

SEQ ID NO: 281988 - DNA, 382 bp, Homo sapiens; identical to SEQ ID NO: 230225
  chr4:6339372-6339754
  hyper

SEQ ID NO: 281989 - DNA, 171 bp, Homo sapiens
  chr4:6473623-6473794
  hyper
tgcctcccggagggcggcgcggaggagggcgctgccctgtgccggcgctgggcagcggaggccggtaccctcgggctccctccctcctgggccccgggcagggtgggatgggatggggtggggtggggtgggatggggtggggtggggtggggcggggggacacgacacac

SEQ ID NO: 281990 - DNA, 50 bp, Homo sapiens
  chr4:6474487-6474537
  hyper
tgctgggtgcgccacgggggagggaggaaggagaccgccagcttgcgggg

SEQ ID NO: 281991 - DNA, 508 bp, Homo sapiens
  chr4:6565256-6565764
  hyper
ggggccgggcgccctgcagcccgcgcttaccttcggaaacttcgaggtcggcggccccattgagctggcacaggcaccaggagccctggtcggcggcgggcgcggcgggcgcggcgggggcgcggtcagctggcaaaacagcaagggcgcgtgagcgcgggcccggggcggggggcggggggcgggggcgcgcggcgaggctaacccggctgctgggccatgggcggctccgcaggctgcgaccgcgacgggcgtcctccgggcggctgcggggggccgggcgcggcggccgctcctcctccgcctcctccgggctcggctccctgcgcgggcgggcgggcggggaggcgcgcccagaaggctccgcccggagcgcgggtgcggggcgcggggtgcggctgcgggcgccgagggtgggcgcggggcgacgatcgcgaggcgcggatcgcagggcgcggatcgcggggcgcggggccgggcaccgggtaagaggcgcggggtgcgggcg

SEQ ID NO: 281992 - DNA, 426 bp, Homo sapiens; identical to SEQ ID NO: 230229
  chr4:6675573-6675999
  hyper

SEQ ID NO: 281993 - DNA, 122 bp, Homo sapiens; identical to SEQ ID NO: 222362
  chr4:6717792-6717914
  hyper

SEQ ID NO: 281994 - DNA, 340 bp, Homo sapiens; identical to SEQ ID NO: 230230
  chr4:6894039-6894379
  hyper

SEQ ID NO: 281995 - DNA, 223 bp, Homo sapiens; identical to SEQ ID NO: 199332
  chr4:7069843-7070066
  hyper

SEQ ID NO: 281996 - DNA, 155 bp, Homo sapiens; identical to SEQ ID NO: 230232
  chr4:7070680-7070835
  hyper

SEQ ID NO: 281997 - DNA, 214 bp, Homo sapiens
  chr4:7194882-7195096
  hyper
ccctacccgggacaccgcgggacacccgggcgggaccgccacggcccccaccccagatccccactatggtcatcaggggcgggttcttggcgacttgggcacttgggtcacctcggccgcgcccctactggcctctggtcactggttacttggggagaggtcctcagattcgtacgcttgtctcaccgcaggggacattcccgcagatttcggg

SEQ ID NO: 281998 - DNA, 682 bp, Homo sapiens; identical to SEQ ID NO: 199334
  chr4:7940410-7941092
  hyper

SEQ ID NO: 281999 - DNA, 32 bp, Homo sapiens; identical to SEQ ID NO: 199335
  chr4:7941129-7941161
  hyper

SEQ ID NO: 282000 - DNA, 522 bp, Homo sapiens; identical to SEQ ID NO: 199336
  chr4:7941191-7941713
  hyper

SEQ ID NO: 282001 - DNA, 626 bp, Homo sapiens; identical to SEQ ID NO: 199337
  chr4:8159729-8160355
  hyper

SEQ ID NO: 282002 - DNA, 141 bp, Homo sapiens; identical to SEQ ID NO: 40281
  chr4:8160429-8160570
  hyper

SEQ ID NO: 282003 - DNA, 88 bp, Homo sapiens; identical to SEQ ID NO: 199339
  chr4:8201024-8201112
  hyper

SEQ ID NO: 282004 - DNA, 38 bp, Homo sapiens
  chr4:8201450-8201488
  hyper
gggagcagagccagcctgtcgctggattccaagtccag

SEQ ID NO: 282005 - DNA, 42 bp, Homo sapiens; identical to SEQ ID NO: 199340
  chr4:8594310-8594352
  hyper

SEQ ID NO: 282006 - DNA, 131 bp, Homo sapiens; identical to SEQ ID NO: 199341
  chr4:8609443-8609574
  hyper

SEQ ID NO: 282007 - DNA, 83 bp, Homo sapiens; identical to SEQ ID NO: 199342
  chr4:8863155-8863238
  hyper

SEQ ID NO: 282008 - DNA, 47 bp, Homo sapiens
  chr4:8873984-8874031
  hyper
gtgtgcgcgcgcgtggtgtgtgcacgagtgtgcgtttgaatggctgt

SEQ ID NO: 282009 - DNA, 153 bp, Homo sapiens
  chr4:8874787-8874940
  hyper
ggagaagagagaagagactcccccagagggtaggtggctccggcaagcctggaattccttcactgatgccccggagtccggctggttggcagggcggtggggctccaggagcggctgaggcctagccagctgggccctcgcggcctgggttcg

SEQ ID NO: 282010 - DNA, 92 bp, Homo sapiens; identical to SEQ ID NO: 199343
  chr4:8894036-8894128
  hyper

SEQ ID NO: 282011 - DNA, 310 bp, Homo sapiens; identical to SEQ ID NO: 199344
  chr4:8894331-8894641
  hyper

SEQ ID NO: 282012 - DNA, 715 bp, Homo sapiens; identical to SEQ ID NO: 230253
  chr4:9154789-9155504
  hyper

SEQ ID NO: 282013 - DNA, 187 bp, Homo sapiens
  chr4:9500034-9500221
  hyper
cagctctcggcctcggacccgggccgcgtgtgagcgcgctttgcacctcctatccccagggtccgccgagagccacgattttttacagaaaatgagcaataaagagattttgtaccgtcctgactggggagtcccaggccgcgtgggacggagtgcccctcggatgcaagcccgtctggcccagcct

SEQ ID NO: 282014 - DNA, 105 bp, Homo sapiens; identical to SEQ ID NO: 199345
  chr4:9534314-9534419
  hyper

SEQ ID NO: 282015 - DNA, 209 bp, Homo sapiens; identical to SEQ ID NO: 199346
  chr4:9684933-9685142
  hyper

SEQ ID NO: 282016 - DNA, 58 bp, Homo sapiens; identical to SEQ ID NO: 199347
  chr4:10089890-10089948
  hyper

SEQ ID NO: 282017 - DNA, 236 bp, Homo sapiens; identical to SEQ ID NO: 199348
  chr4:10090133-10090369
  hyper

SEQ ID NO: 282018 - DNA, 41 bp, Homo sapiens; identical to SEQ ID NO: 199349
  chr4:10458331-10458372
  hyper

SEQ ID NO: 282019 - DNA, 39 bp, Homo sapiens; identical to SEQ ID NO: 199350
  chr4:10459327-10459366
  hyper

SEQ ID NO: 282020 - DNA, 418 bp, Homo sapiens
  chr4:11429088-11429506
  hyper
ttctcggagcgcagcgcaaagacagtggatttggagtggcctccctagaatccccccaaaagcatcttggcacaagttgtagataaaaatagctcatgataacattgtgggaaagggaggagcgagactcgcgcaaggcgaggcaagggtaccactggatctgcaaaggaggaggaagagggaggatgcaacccttggcccaagagagcgccctgagtgtgcgaggaatcgctggctcccaggggagggaaagagatggaagacctatagcgcctataactgcagagttatagacctataactgcagagcccagcacaccccatcccgcgccggcacccggctttggctccagcttcttcttcccatcatccgcctacgttctgggtctgtcctccgcttcctgggacaggctggggc

SEQ ID NO: 282021 - DNA, 93 bp, Homo sapiens; identical to SEQ ID NO: 230261
  chr4:11429925-11430018
  hyper

SEQ ID NO: 282022 - DNA, 320 bp, Homo sapiens; identical to SEQ ID NO: 199352
  chr4:11430339-11430659
  hyper

SEQ ID NO: 282023 - DNA, 569 bp, Homo sapiens; identical to SEQ ID NO: 199353
  chr4:11430707-11431276
  hyper

SEQ ID NO: 282024 - DNA, 223 bp, Homo sapiens; identical to SEQ ID NO: 230263
  chr4:13486089-13486312
  hyper

SEQ ID NO: 282025 - DNA, 84 bp, Homo sapiens; identical to SEQ ID NO: 230265
  chr4:13529795-13529879
  hyper

SEQ ID NO: 282026 - DNA, 260 bp, Homo sapiens; identical to SEQ ID NO: 230266
  chr4:13536102-13536362
  hyper

SEQ ID NO: 282027 - DNA, 147 bp, Homo sapiens; identical to SEQ ID NO: 230267
  chr4:13538786-13538933
  hyper

SEQ ID NO: 282028 - DNA, 98 bp, Homo sapiens
  chr4:13545288-13545386
  hyper
aacgcaaggggcagcggttctcccaacccagtctaatgcacattggcccaggatgtctcaggcctcaccccaggacgtagggctctgaggagctactc

SEQ ID NO: 282029 - DNA, 155 bp, Homo sapiens
  chr4:13546756-13546911
  hyper
attggctggctccagttgggcgacgttgactttaacagacaaaactgggcacgttgcgccgctaaagacagggtctgacttaaccccttctctcctaagcctggtcctcgaagcaccctccagcaacaaggaggctcatccgacccaaaccacgt

SEQ ID NO: 282030 - DNA, 44 bp, Homo sapiens; identical to SEQ ID NO: 199354
  chr4:13550560-13550604
  hyper

SEQ ID NO: 282031 - DNA, 69 bp, Homo sapiens; identical to SEQ ID NO: 230273
  chr4:13629534-13629603
  hyper

SEQ ID NO: 282032 - DNA, 33 bp, Homo sapiens; identical to SEQ ID NO: 199355
  chr4:13655883-13655916
  hyper

SEQ ID NO: 282033 - DNA, 122 bp, Homo sapiens; identical to SEQ ID NO: 230275
  chr4:15006620-15006742
  hyper

SEQ ID NO: 282034 - DNA, 80 bp, Homo sapiens
  chr4:15412561-15412641
  hyper
aaacaaaacagagttttgaaaagcagcagtgcctgtcatccaaattgcatttcctgtttcacacgcgaacaggaaggaaa

SEQ ID NO: 282035 - DNA, 107 bp, Homo sapiens; identical to SEQ ID NO: 230277
  chr4:15683192-15683299
  hyper

SEQ ID NO: 282036 - DNA, 367 bp, Homo sapiens
  chr4:15780742-15781109
  hyper
cttaagtggtttgcaaagcctgtggtaggggaggagggtgtagaagggccaaaccacggaacttagttttattcatttatataaagcagcactccgattctttttgcgcggcctgaaatgcatgtgaccagagaagtaattaacaaaacaatgtcaacttctaaaaccgagacattacttagatgataaggcgcagcaactcggtgaatctgtacaaaccttggaaaaaaaacacattagtctatgggaccttccagttttctcatgctcctttccagctactaacctctcctaaagggaacaaccactttttggatttgattcccaggcctcgctttcaccgggaaattatcgttgcttgtaaaac

SEQ ID NO: 282037 - DNA, 126 bp, Homo sapiens
  chr4:16083804-16083930
  hyper
gctcctaggataaccgggacagaaaggacggtgagaaaagaaaaatgagtaacatcacacaagttgaatcatatgaggttgacgatattcacatcttccatccaaaaaaccgacaatttcttatga

SEQ ID NO: 282038 - DNA, 224 bp, Homo sapiens
  chr4:16084483-16084707
  hyper
ctacagccgtgaagctcctggtctgtccacgctcctctttgttgtccggtcggcgtgttctggcagggtgcgccttgagcaccccagttctccatctagcgatagccgcgggtccccgcgcatgcaagcagaagggccgtggagcgagaggctgggaaggtgcttcaagccaggggtgcatgctttctcccacggacgcggggagatggcctcgctttgtaccc

SEQ ID NO: 282039 - DNA, 140 bp, Homo sapiens; identical to SEQ ID NO: 199357
  chr4:16228990-16229130
  hyper

SEQ ID NO: 282040 - DNA, 275 bp, Homo sapiens; identical to SEQ ID NO: 109875
  chr4:16229202-16229477
  hyper

SEQ ID NO: 282041 - DNA, 173 bp, Homo sapiens; identical to SEQ ID NO: 199359
  chr4:17578690-17578863
  hyper

SEQ ID NO: 282042 - DNA, 271 bp, Homo sapiens; identical to SEQ ID NO: 230281
  chr4:17616177-17616448
  hyper

SEQ ID NO: 282043 - DNA, 111 bp, Homo sapiens
  chr4:17782723-17782834
  hyper
actcccggctcgggcgccccgggcgtgcagctcgctggcccgctgcgccccaccttaccttggtgagctgggcgatcttcttgcacattttcacgtgcatctggggatcac

SEQ ID NO: 282044 - DNA, 250 bp, Homo sapiens; identical to SEQ ID NO: 230283
  chr4:17812338-17812588
  hyper

SEQ ID NO: 282045 - DNA, 106 bp, Homo sapiens; identical to SEQ ID NO: 199361
  chr4:18024246-18024352
  hyper

SEQ ID NO: 282046 - DNA, 393 bp, Homo sapiens
  chr4:20253116-20253509
  hyper
cccccttaaggatcgcgtggcaaaagctgcaggagaggcactggcagggctgtttatttatgagccgcgttcaaagccgacctcttcccattctcccactgcaaacgactatctccgagcccaggtcacctctggggccaaggagttgggggctggggctcgggtggctccttcttcgggccaagtttgcccgcgcgtgggagcgagggggcgagccagggcgcacgggaacgcgcgccgccagccgccgcctccgcccagcgctggcagccccggcctcacctctcccctctccccagcgaggtgcgggctcccagagcggagccagggggcgggcctgggcctcgaggggcggggtcagggggcggaggctcgggcggctatataaggccc

SEQ ID NO: 282047 - DNA, 82 bp, Homo sapiens; identical to SEQ ID NO: 199363
  chr4:20253975-20254057
  hyper

SEQ ID NO: 282048 - DNA, 370 bp, Homo sapiens; identical to SEQ ID NO: 199364
  chr4:20254323-20254693
  hyper

SEQ ID NO: 282049 - DNA, 207 bp, Homo sapiens; identical to SEQ ID NO: 199365
  chr4:20255120-20255327
  hyper

SEQ ID NO: 282050 - DNA, 152 bp, Homo sapiens; identical to SEQ ID NO: 230285
  chr4:20985813-20985965
  hyper

SEQ ID NO: 282051 - DNA, 38 bp, Homo sapiens
  chr4:21949839-21949877
  hyper
taggggaaggaagcgtgcggtctggagtcatctggcag

SEQ ID NO: 282052 - DNA, 1009 bp, Homo sapiens
  chr4:22517045-22518054
  hyper
ccacacaaaggcgcgtgggtgccggctggaccctgctccaaagttgagcggagagataagaaagagccgagcgggagaggacccagcgtcgcgggagatactcacagggtgaccgtgcggttgggcagagtatctgggggcaggacctgcgcgagttccaggctgctgcacaccaccttgccctcggcggcgcccgccgccctgccagcccctcggggccgcccatcgtgcttgcagccggcgggcagcgccgcggcgccgccgccgccgccgcctcccagcagcgcgagcagcgctaacagcgagagcggcagcaacagcggcggctgcgcgcggccccgccggcgtccgggtggctccatgctgcgggccggggcctgcggggcgagcggcggcgcactggcctagcgggccgccccggagcccgggcgggcaggagcgcggcgcgggcccagcggcgaccggagccttatggcggccggaggacgggccttccccggcgcggacatgctcctttgtccgctgcggctgcgctgggcctctagggagccgggggtcacggccgcatgggtcccagcgccgctctaccgcccggcgcgagcaccgcctcctcctcctcctctgccgccgccgccgccgccactgcctcctcccctggccaggacccgcgcgcggcggctcctccccgcccgccgccggcggccgcccccgccccttcccctcctctttcccggctctcctgctctccccgtgtctgcagctgcccgggacctcggggaggaggcgcgcgctcccgggacctgccgagcccgactccgacccggtgcgcgcccgggcctcggcctccgggcaggagttgtggggagcccgcgggaaggcagtaactcgtagagagaacggaggaaagttcgagtccgaacggaggaaagttcgagtccaaactccacccgcggtggccactctcctgctcgtttcccttcgccgccaccgcgctcgcaccgcgggcaca

SEQ ID NO: 282053 - DNA, 46 bp, Homo sapiens
  chr4:24471837-24471883
  hyper
tcgtacccgcctcagtcctcaaagacgagcagggcttggtttctga

SEQ ID NO: 282054 - DNA, 428 bp, Homo sapiens
  chr4:24471943-24472371
  hyper
cacactctctcacacaggcaggcacgcggacgcccgctcctggagagctggagtttgcggagccggagtggtcgttggctctcggcaatcctgggcggatgcaaggaagcgtggagagcacccaaggcccgccaggcggggcaggatagcctgaaggaagccaccggcgccggccacgggcagccgggcaccctccgggccccgatcgtgcttctccaggcccccagctccagcgccggcccgaccacctcagtagctcctgcaagtttctactcgcagcgaggcctcgtgtctcccggctgcctcaccgcgaatcctcactccgcgcgcctgggctgccctcccgccccgcccgaacggccggcgtacttcccgggggcagcccagacgcccccacccgcggcggcggcccgacggtctgcccagag

SEQ ID NO: 282055 - DNA, 398 bp, Homo sapiens
  chr4:24472580-24472978
  hyper
tgctttcggggtttgtcttctctgccgggagctcgcaggaacgcgctgcgccccgggcccgggagggagcgcgccagcgccggcgagcgcggcgggcagccccgcaagcggccgaggctggctggcgggctccggaggagaggcgccgcggaggccaggcgagccgggctgaacggagctcttttcctcgacaccccccacccctagcgggccagctccccccgcggtgcgcgctccgcggggcccgggaatccccggcgccctggaccgcccaccgagtagctaatgcctttcaccattgctcctccaccgctcctctggccccaactttccccagcccagacacgcgagcgcgcgcgcacacccacacacagacacacacccgcgtgcacacacac

SEQ ID NO: 282056 - DNA, 90 bp, Homo sapiens
  chr4:24473241-24473331
  hyper
cgccccccttccggcgtctacccccagcgtccctgggccccccgagtcacaccgacacgcacacctacaggccggcggcgtggagcgtct

SEQ ID NO: 282057 - DNA, 436 bp, Homo sapiens; identical to SEQ ID NO: 230292
  chr4:24474654-24475090
  hyper

SEQ ID NO: 282058 - DNA, 141 bp, Homo sapiens
  chr4:24914265-24914406
  hyper
aagtgcaggaggagcggcgcacctggcggggtcgcgcgggtgcggcagccgcggccacttggagtgcgcgcccccctctcgtccctcccagctcggcctctctgggggcgcgggcccggggctggcggccgctcggcccgg

SEQ ID NO: 282059 - DNA, 70 bp, Homo sapiens
  chr4:24914804-24914874
  hyper
gggaagccagggtctcagcctacaggtcactccggacccctcagcgctctccgcgcgggaggcgggcccc

SEQ ID NO: 282060 - DNA, 107 bp, Homo sapiens; identical to SEQ ID NO: 199368
  chr4:25031937-25032044
  hyper

SEQ ID NO: 282061 - DNA, 460 bp, Homo sapiens
  chr4:25032103-25032563
  hyper
aggggtcccactcacagggagctgatgtcgcccggcacgatcctgggcacccaggaagagcccacgcagatgatagactccttggtacagctgcaagtggcggggcagcgcgccagccgcctcacctgcgcgctccgcggtatcaggcacgcggcgcccagcagcagcagcagcagcccgagcgctccgcagccgcctctccgcagcgccatgcccggtccccgctccccgcccgggccccgacccccaccgccgcgccgcgcgctcggacccggcgccgctgcagacgcgggcgccgctcgctgctctgccgccgccgctgctggcgaggactagggagccgcgggtgtgggaggccgagccgcagccgagcagcatgctggccgccacccccactcggcgcccccccacccgagcccgggctgctgggcggccgccgccgctgcgcccgccgcactcg

SEQ ID NO: 282062 - DNA, 233 bp, Homo sapiens; identical to SEQ ID NO: 230296
  chr4:25161802-25162035
  hyper

SEQ ID NO: 282063 - DNA, 127 bp, Homo sapiens; identical to SEQ ID NO: 199371
  chr4:25235355-25235482
  hyper

SEQ ID NO: 282064 - DNA, 158 bp, Homo sapiens; identical to SEQ ID NO: 230298
  chr4:25314271-25314429
  hyper

SEQ ID NO: 282065 - DNA, 251 bp, Homo sapiens
  chr4:25656879-25657130
  hyper
agcccccttccttttcctcagcttgacggtcccagcctttcccattgcggacctagagcccagactcccagggcagaaagcgccccacagactgataaaggtgaacaatccaggctttgtttccaagggctttatccctgactttccaactggcttttatctgtgtcttcacgtctctgacctcttgagcctcacaggagctagactagaaggttcaagttcttgaggagaaggcaggggcgggagagccc

SEQ ID NO: 282066 - DNA, 74 bp, Homo sapiens; identical to SEQ ID NO: 199373
  chr4:25657493-25657567
  hyper

SEQ ID NO: 282067 - DNA, 623 bp, Homo sapiens; identical to SEQ ID NO: 222382
  chr4:25863667-25864290
  hyper

SEQ ID NO: 282068 - DNA, 423 bp, Homo sapiens; identical to SEQ ID NO: 230300
  chr4:25915659-25916082
  hyper

SEQ ID NO: 282069 - DNA, 143 bp, Homo sapiens; identical to SEQ ID NO: 230302
  chr4:26321224-26321367
  hyper

SEQ ID NO: 282070 - DNA, 68 bp, Homo sapiens; identical to SEQ ID NO: 230303
  chr4:26585707-26585775
  hyper

SEQ ID NO: 282071 - DNA, 182 bp, Homo sapiens; identical to SEQ ID NO: 230304
  chr4:26862030-26862212
  hyper

SEQ ID NO: 282072 - DNA, 178 bp, Homo sapiens; identical to SEQ ID NO: 230305
  chr4:26862442-26862620
  hyper

SEQ ID NO: 282073 - DNA, 127 bp, Homo sapiens; identical to SEQ ID NO: 199376
  chr4:27086305-27086432
  hyper

SEQ ID NO: 282074 - DNA, 266 bp, Homo sapiens
  chr4:27086484-27086750
  hyper
gcagtgcttaggagaatgcgggacccaaatgaaattccgcgtctccccgcggcgggtgccgcagagccaccggcgaggggcgggcgccaccacgtgactgattattcaaatggaccgatgattaactcggtttatattgatgcaaataatcctgccggagcctgcaacggctaatgcattttggaactgtggtttttccattgatagcacaaaatattgtagaggaaagccattttcataatattaataatggaattacagaatca

SEQ ID NO: 282075 - DNA, 91 bp, Homo sapiens
  chr4:27086840-27086931
  hyper
tgcagcgatctcattgcataaaacgcacatccccttccctttttctttttaaaagaaaaagagcttcagaaatgaccgtggctaagtacaa

SEQ ID NO: 282076 - DNA, 391 bp, Homo sapiens
  chr4:30718983-30719374
  hyper
cttgcccagaacggcgctgcagggcaaagccgccgccacttctttgctgctctggcagaaaggtcggagcctgggactgatgggggtgggagcaaagccagcaggcttcttggcccccgcagtctgtcctcgctgttctccatgcagcacacgtcggacccatttcccacgctggcttggctccgccgcgaagttggtaggaatgagagtgaggagggcgggctggagacttcctcccgctcgcaaagaggaaaccactccactgtgaaggacgcgctgcaactccctagtcatccgggaagaaatgtgcagcgcgctgaggaaaagccgcccactccttcgcgccccgctcaagtgtgcgcctggagagtgcgcgccagagccgcgagca

SEQ ID NO: 282077 - DNA, 87 bp, Homo sapiens
  chr4:30719763-30719850
  hyper
cgcgcggggcttttctcgctgatgctgcagatacagagctgagaggttcgggtgccagcagcgggagggttagcgggaaggccgggt

SEQ ID NO: 282078 - DNA, 300 bp, Homo sapiens
  chr4:30720947-30721247
  hyper
ttccggggggaggaggacgtcgtctgagagggagggagaaggagaaacctatcctgacaccagctccgaaagctctcacgcgtgaactgggcattagtcaagggaggaggaaatttaccagcccgagggagggaaaacaagtcccccagagaagacggcggtactcgctagggagggggactgggctttggcttaaagaggactggctgggattgggcacactttgagcggcccctggagctgaggctgggctttcccgagcgcggcggctggctgacgctccctcccgcctccttatcc

SEQ ID NO: 282079 - DNA, 319 bp, Homo sapiens
  chr4:30721470-30721789
  hyper
ggcggcgggagcgcccgcaccagactctcccagacgcgaaaagggacgagacaactgcggaattcaccagccgtgccagggcacttccgaggccacaaccgactgacactttttctccccttggcaaactggatttttttttttaagctacttggcagctgtctctgactccacctccccctccacccccgcccgaaagcctttggcttttcttcggaaatccagacagaattgggcatctttgttaattgccgttggggacgcccggccgtgcgctttcgccggctaacgtcgcctgtgctccgagcctggtttgctc

SEQ ID NO: 282080 - DNA, 234 bp, Homo sapiens; identical to SEQ ID NO: 199379
  chr4:30722009-30722243
  hyper

SEQ ID NO: 282081 - DNA, 566 bp, Homo sapiens
  chr4:30722273-30722839
  hyper
cgcgccggggggaccctgacactgaccgctctgtgacgcgagtagtctcccctgcaccgtgcccgaagcgacgtgccgggggatttttcattctcgatctgttgactggctcccccgctgcatgagcagagtcggagttgagactggcttgttgctggccccagcgcctggtgcaggaagcgactcacgtttgtctgggtggccggagccggagcagagcctgggtttggagtgagtgcctggaacgtgaattggactcaactcgagtagcagcaaagaccagcgggctggcaggcgggggaggctgcaggctcattccccacctcttcccagccccactgcccgtctgccggagcggttctggccccttccgacagagcggggactagagccggggattctccgcccgctgaggggatgactctgggttgggggagcgccgaacccgcggcgcgcagtgtcccgtgaactgtgagtactgcgactgaacggcggcaggcgagcgggcgattagcacccattgcatgaattatgaaacaataactttcggaagaagcaggaggaaa

SEQ ID NO: 282082 - DNA, 502 bp, Homo sapiens
  chr4:30723011-30723513
  hyper
tagaaggagcagtagcagcagcagcaggagaagatgctgaggatgcggaccgcgggatgggcgcgcggctggtgcttgggctgctgcctcctcctgccgctctcgctcagcctggcggccgccaagcagctcctccggtaccggctggccgaggagggccccgccgacgtccgcatcggcaacgtggcttcagacctgggcatcgtgaccggatcgggtgaggtgactttcagcctggagtccggttccgagtacctgaagatcgacaacctcactggcgagctgagcacgagcgagcggcgcatcgaccgcgagaagctgccccagtgtcagatgatcttcgacgagaacgagtgcttcctggacttcgaggtgtcggtgatcgggccctcgcagagctgggtggacctgtttgagggtcaggtcatcgtgcttgacatcaacgacaacacgcccaccttcccgtcgcccgtgctcacgctcacggtggaggagaatcggc

SEQ ID NO: 282083 - DNA, 201 bp, Homo sapiens
  chr4:30723862-30724063
  hyper
ctacgagctgaccctgcgagtgcgcgacggcggcgacccgcctcgctcctcgcaggccatcctacgggtcctcatcaccgacgtgaacgacaacagcccccgcttcgagaagagcgtgtacgaggccgacttggctgagaacagcgccccggggacccccatcctgcaactgcgcgcagccgacttggacgtgggggtcaa

SEQ ID NO: 282084 - DNA, 90 bp, Homo sapiens
  chr4:30724126-30724216
  hyper
cgagacgtccggctggctcagcgtcctgcaccggatcgaccgcgaggaggtgaaccagctgcgcttcacggtcatggcccgcgaccgcgg

SEQ ID NO: 282085 - DNA, 799 bp, Homo sapiens; identical to SEQ ID NO: 199382
  chr4:36245409-36246208
  hyper

SEQ ID NO: 282086 - DNA, 145 bp, Homo sapiens; identical to SEQ ID NO: 109945
  chr4:36246257-36246402
  hyper

SEQ ID NO: 282087 - DNA, 107 bp, Homo sapiens
  chr4:37245430-37245537
  hyper
cgcacacaagaagctgctgcccacagccagctccgatttctcgcaccccggtcccaatccacggccacctgcactttgcgtaacgttgcgctggggggcgctccaga

SEQ ID NO: 282088 - DNA, 394 bp, Homo sapiens
  chr4:37455036-37455430
  hyper
ggtggtggcgcccccgctgtttctaggtccatgtagctcatacagggctggccatggaactcacagcaggtctaggcggcgaatgccagaaataaggaggaaactgaaaaatgccaagttctcggggtttgggagtacacaactatttgccagcgggtgcatttgttttgtgtatccccgtactccagtcccttgatcataggaagctcccttctctccagcgcaacattggagtaagcaccccggagtttcccgtgatggcaggcggttggcgcggtcgtttgtgctcagaggccaacaagcgcgtggattttctgcttcagtgcgcccgggactgccaccccggccccggggatgtcggacatcgtactccagggtttcgagccctagcccc

SEQ ID NO: 282089 - DNA, 344 bp, Homo sapiens; identical to SEQ ID NO: 199385
  chr4:37455485-37455829
  hyper

SEQ ID NO: 282090 - DNA, 86 bp, Homo sapiens; identical to SEQ ID NO: 199386
  chr4:37688564-37688650
  hyper

SEQ ID NO: 282091 - DNA, 225 bp, Homo sapiens
  chr4:37891998-37892223
  hyper
gagaaggggtaaggcgggggagagcaaggtggcttggtcgcccccggcccccgccccccatgttgtgtgcagtttccaccacgtctgtttcggagggagaagaggagggtgcagatgaggcgaggcgccttcgggagcgcggagagcgggcaggcagtgccacctgctgagagccactcaggccgagcaagcggcgggcagtgccacctgctataaataggccgc

SEQ ID NO: 282092 - DNA, 211 bp, Homo sapiens; identical to SEQ ID NO: 3243
  chr4:37978651-37978862
  hyper

SEQ ID NO: 282093 - DNA, 155 bp, Homo sapiens; identical to SEQ ID NO: 199388
  chr4:38666037-38666192
  hyper

SEQ ID NO: 282094 - DNA, 354 bp, Homo sapiens; identical to SEQ ID NO: 230315
  chr4:38666434-38666788
  hyper

SEQ ID NO: 282095 - DNA, 56 bp, Homo sapiens
  chr4:38732973-38733029
  hyper
agggccggggtcctcttgagggttctcggagcaccttctcgcggctcagagggttc

SEQ ID NO: 282096 - DNA, 740 bp, Homo sapiens; identical to SEQ ID NO: 199390
  chr4:38868924-38869664
  hyper

SEQ ID NO: 282097 - DNA, 196 bp, Homo sapiens; identical to SEQ ID NO: 199391
  chr4:39047091-39047287
  hyper

SEQ ID NO: 282098 - DNA, 346 bp, Homo sapiens
  chr4:39183810-39184156
  hyper
acatcttagtcatcgcggtccaaaatttacgcacgcgcctttgagggctcacagagcccgtctctcccggacgaatctcatccaatcagagccagccaggaagccgaggctcagcaaggcctcgcgacgcccaacttcccagggttagcgtctctgatgtcatgtgattccaccctccgcctctcacccaccctcgcagagggcggtgcgcttggcccggcccctcgaggcaccgcctttcaattagcactcgctgattggtcgctgctcgcgcggtctcctgggtgacgggaacgcggtagcctgcttggtggagaccgggtgcgcctgcgtacttcatagttcg

SEQ ID NO: 282099 - DNA, 166 bp, Homo sapiens; identical to SEQ ID NO: 230319
  chr4:39367987-39368153
  hyper

SEQ ID NO: 282100 - DNA, 249 bp, Homo sapiens; identical to SEQ ID NO: 230320
  chr4:39529280-39529529
  hyper

SEQ ID NO: 282101 - DNA, 249 bp, Homo sapiens
  chr4:39529736-39529985
  hyper
tagtcagattcctcctgacccaccgcttctgggaaagaggcgcctcccgtcaggaggatgctgagttcctcatgactggaccagtgagtgtccactccctggtccctggcgagagaggcgggacccccacgccctcctggcgctctttgcagagatgttcctcaggcccaatccgggatttgggatgtctgtgcgtgctgtggagcagagagtttgcaacatgtaagtgccgtgcgtgaggaagagtaa

SEQ ID NO: 282102 - DNA, 350 bp, Homo sapiens; identical to SEQ ID NO: 230321
  chr4:39638992-39639342
  hyper

SEQ ID NO: 282103 - DNA, 126 bp, Homo sapiens; identical to SEQ ID NO: 230322
  chr4:39639612-39639738
  hyper

SEQ ID NO: 282104 - DNA, 74 bp, Homo sapiens; identical to SEQ ID NO: 230323
  chr4:39699544-39699618
  hyper

SEQ ID NO: 282105 - DNA, 232 bp, Homo sapiens; identical to SEQ ID NO: 230324
  chr4:39978126-39978358
  hyper

SEQ ID NO: 282106 - DNA, 433 bp, Homo sapiens; identical to SEQ ID NO: 230325
  chr4:40058592-40059025
  hyper

SEQ ID NO: 282107 - DNA, 53 bp, Homo sapiens; identical to SEQ ID NO: 230326
  chr4:40631725-40631778
  hyper

SEQ ID NO: 282108 - DNA, 336 bp, Homo sapiens
  chr4:40632134-40632470
  hyper
ggttcaaagaaaatcggccttgatggcagagattgggggacttgaccagacggacttctctccccgccccaaaagtcacatgcctttcagacacccagaagtggcacctgctccacctgggggcatctgtccgagtcagacgctcggcccccttcgggctgctccgagaaacccagccagaaccacgttggagaaattaggaacctgctgctgaatttcaagccgatcggaaccgccccgctccccttcttccccccataaacaagtcgctggacgaggtgggatctctgcgacccccgcgtgcccggggagagctcccggggcgagctcccgggg

SEQ ID NO: 282109 - DNA, 744 bp, Homo sapiens
  chr4:40751829-40752573
  hyper
aaacaggtgtctccgcgcgctgggggaagagcgactctcccggcaacaggtagcacccgccaaatcccgcgggaacggccctcgcgccgcgccccctgccccacctccgctcgcggttgccatgaagacccggtccgggagcagtcgactgccggagactcgggaggctgagctttcctcggcctgagccagccagaccccgggcaccgcgctcacccctcttcgccgccacgtccgcgaaggcctcacgcgcgaggccaggcgaggccccgaggcgcccaccacttcacgacaccggagcgaaccgggcgccagaggctgcgacccccctgccccgaatcctgccggtgggagtggctgcatttgaaccaaacggccttcgcgggcagcagccgtcgccccgcagtcccggggctcccaagggcctgtgaccgacgccgccctccgcgtcttcgtccccgaagccccgggaaccatccgccctcggggtaagggaggagtcgggggagccggtgactgggctgtggggacgcggacggggctccgggggcagctctgcccccagactggcttgagggaagccgtcggtctccttggggctcttctccctccgccgctgcacccctcctcgcttttttttttttttttgagcgtcccaggctcgaagtctgggacactcagatgggacgggaaatgctccctcttagtctttaaggccacaacgaagggggccacccacagggg

SEQ ID NO: 282110 - DNA, 138 bp, Homo sapiens; identical to SEQ ID NO: 199395
  chr4:41216265-41216403
  hyper

SEQ ID NO: 282111 - DNA, 315 bp, Homo sapiens; identical to SEQ ID NO: 199396
  chr4:41218383-41218698
  hyper

SEQ ID NO: 282112 - DNA, 60 bp, Homo sapiens
  chr4:41362244-41362304
  hyper
gtacttcccggcgccgggccaggggctgccccgccttgcccctacctctgcggccaggaa

SEQ ID NO: 282113 - DNA, 671 bp, Homo sapiens
  chr4:41363167-41363838
  hyper
tgcagtctagctgcgcgcgtgagggcaggaagggatcccctgcgcgtccatccttcctgcccgctggcctcgcaaatctcagctagcgccgcttccaggcgctgccaagggaagcgcagtgctagcaaagcgttgcaaaggcgcaggaagcgcgagcccccagagacttcaccggtgctcgcatttcggggtatcttgcttctggtcccacatttcgccccttgtccccctaccccgcacccttccggagcagagttggcagtgtcttcacggaggcgcatacccaccggagcctcttgctgtattcctggcaccgggtcaggtgtgaggctggcacagtgcgcagggcgggggtagcttgcaagacccacctgcgagcacgcatccgcatagacgctgcccagcctttggcaacccccgcccctctccatcccaaggactgcagggtcggttccgaagtacgggctacccggtctggttggcatatttcacttcttaaataactcgttggcaggccagggaaatcactggagctctcggctctcagtcccggaagcgctcactgggtgatcctgattcacgatgtctatcagtagatgcagcttggtagccccgagctcccgaaatgaactgtctgcggggttcaggacgcttgaagggcatgaagggga

SEQ ID NO: 282114 - DNA, 72 bp, Homo sapiens
  chr4:41746749-41746821
  hyper
tctgcagccagttacgtggactgcaattgaccccaatccaaagcagtgccaaaaagttcagtaaaagctggt

SEQ ID NO: 282115 - DNA, 108 bp, Homo sapiens
  chr4:41751611-41751719
  hyper
tctgtttgcattagcgcaagccttggttggtttgagtttctgtgaggttgttcgttttaattacaccataactggcaagcgagcatgaagtgtacccaaatgtatctc

SEQ ID NO: 282116 - DNA, 85 bp, Homo sapiens; identical to SEQ ID NO: 199397
  chr4:41752227-41752312
  hyper

SEQ ID NO: 282117 - DNA, 48 bp, Homo sapiens
  chr4:41867463-41867511
  hyper
ctgcgcgcgaatcacgtctggcaggctgctccagcccgcagtccacac

SEQ ID NO: 282118 - DNA, 155 bp, Homo sapiens
  chr4:41869045-41869200
  hyper
ccccattcagggaccgaattgaaatggatatttccctcctcggcccagctgaacgaggctcaatgcctcaaagatgcagagctgcctcggtggacatgctctgtggctgatattataattttcataatgcgcttttatgtcgcgccagactcctc

SEQ ID NO: 282119 - DNA, 61 bp, Homo sapiens; identical to SEQ ID NO: 110024
  chr4:41882651-41882712
  hyper

SEQ ID NO: 282120 - DNA, 89 bp, Homo sapiens
  chr4:41884432-41884521
  hyper
caaggtgtcccctgcccggccaaggtgggggctcgaaccctgagcggccgcgccggctacttacgttgaaggtgcgcgcattccagacg

SEQ ID NO: 282121 - DNA, 177 bp, Homo sapiens; identical to SEQ ID NO: 199398
  chr4:41991961-41992138
  hyper

SEQ ID NO: 282122 - DNA, 60 bp, Homo sapiens
  chr4:41993656-41993716
  hyper
caggtgtggtggtgcgctcctgtagtccagctactcgggagactgaggcaggcagatctt

SEQ ID NO: 282123 - DNA, 46 bp, Homo sapiens; identical to SEQ ID NO: 199399
  chr4:42401057-42401103
  hyper

SEQ ID NO: 282124 - DNA, 1078 bp, Homo sapiens
  chr4:42657889-42658967
  hyper
gagtgggaatcagcgatgatggcaagatagatttctgaaaaacatgttattccaccctctgcaggattcaagtacaggtttatgggagaggacaaacaaaccttgggatatttacagtcttggctttgacgcgagcaaaatcaaataatatttacagagtgcctgccacatggcaggcaggatgttgagggctcctcggagacgatgaagagtctgggccctcggaaagcttacttgcttctaccccggagcatctgttgctcagtgttgacaaccatggccattcaagagctggccccaggtggagcaaagaaaacagcttccacctggctgaaaagtcagctcagctggccgaagtgagggtttcgggcaaaagggaaacacaaaaacgaaacctcagacgcgagccggtgggactccgctgcaggaggcagaattgcagaagctgtaatgcagggaacccactcggcacccgaccccgatgaaggctccccgcgcttcgagagccaagggactacggatcaaaggatcctgcagccggggaaaagcaaactcgcttcgctgggagctcagatagggggttgcaaaacggtgggcgccggaggcaggggcggcgggctggggatctgctgagtggaaatcgaactggtggggagggaggtgggcagggcgagtgagctcagtgactgggacctaatggtcacactgcggtgcaaagcacgcctcggggctcccgcggagaacacccattcgagggtactggagcctggaaagggtctgcgagtacactgggggcagcgcggggggaagggtcccctaggggccgggcgcgacagtcggactgccgccggggaagaggtaggatgcggtctcttccaggataaacacacacgctcacacacacactcgcttcccgaccccgggctagccccgagcctcggcggccccttaccttcggcgcgcgagcggatctccgacacggtcctccgcatggtgggcatcgcggcggcggctgcaggtgggtcctcagcccggactctgcacctgtcacggcgtggtacacgcgggagacccggct

SEQ ID NO: 282125 - DNA, 138 bp, Homo sapiens; identical to SEQ ID NO: 199401
  chr4:42659535-42659673
  hyper

SEQ ID NO: 282126 - DNA, 152 bp, Homo sapiens
  chr4:44448455-44448607
  hyper
ccagctggcttttcgtttgtccaaatcgctctctagtcgttgtcttttcacttcataaacgccactgagaattgtgcccaccacagccccaccccactcccaatcccactcccaatccccaggttcagattatggtatttggtatagttctt

SEQ ID NO: 282127 - DNA, 54 bp, Homo sapiens
  chr4:44448660-44448714
  hyper
ttcccaaatctattccttcattctctcatttcagaaaatcgctctatttattca

SEQ ID NO: 282128 - DNA, 34 bp, Homo sapiens; identical to SEQ ID NO: 199402
  chr4:44449403-44449437
  hyper

SEQ ID NO: 282129 - DNA, 62 bp, Homo sapiens; identical to SEQ ID NO: 230358
  chr4:44680330-44680392
  hyper

SEQ ID NO: 282130 - DNA, 207 bp, Homo sapiens; identical to SEQ ID NO: 230359
  chr4:44680670-44680877
  hyper

SEQ ID NO: 282131 - DNA, 218 bp, Homo sapiens; identical to SEQ ID NO: 230360
  chr4:44728536-44728754
  hyper

SEQ ID NO: 282132 - DNA, 208 bp, Homo sapiens
  chr4:46391145-46391353
  hyper
gatgggtacttcacgccacaaccccctcaaccaagaccacctccgcaaccacagcgggaaaagctaggggcaggcagcccacttttgcaattactctacattacagtgaactgcggtcctcacgtcttcttttcttcactccccttaacaaaataaaataaataatttcccttcctgcccacccacggttgcccaagaccaagtctta

SEQ ID NO: 282133 - DNA, 285 bp, Homo sapiens; identical to SEQ ID NO: 199404
  chr4:46391393-46391678
  hyper

SEQ ID NO: 282134 - DNA, 707 bp, Homo sapiens
  chr4:46391710-46392417
  hyper
caggaaagtgtctctatcgggaccaacgtgtgcgaccctacctgaaacggcaagcagaattcggtgttttcttccttttgccctgatcttgacgagataggaaacttgggagagagagagagagagagagagagagagagagagagagagagagagagagagagagagaccgagactgcagcagccaagagagcgtggagcgatgggctggtggaagccggagaggagcgctaggagccgcggcggcggcgcgaggtgtagaaggaggcgaaggcgttcgtagtggcggtgatgggcggaggaggaggaagaggaggaggaggaagaggaggagggggaaaacgatgacaggagctggggccggggggggaaattggggggacgcgggcggaggcgcggtgcgcgccggcggtggcgggcacgagccccgcgcctggaggaggaggagtcaggccgggtaggagggctaaggaggttcccgggaaggcagggccccccctcccccccctcccccccccccacacacacacactcccctgcctcgatccctcgatccctggtaactgaccgtcgcccgcctggcactagcagcggcgcagacccgggcggcgtcgggcgcctgggtgcgctcggagcgccgctcccctcgcccacacctcgccggaggagcggagcccacgcgcagcctcgggctgctccccgaggcc

SEQ ID NO: 282135 - DNA, 157 bp, Homo sapiens; identical to SEQ ID NO: 199405
  chr4:46392515-46392672
  hyper

SEQ ID NO: 282136 - DNA, 150 bp, Homo sapiens
  chr4:47033394-47033544
  hyper
cgtttacacatgctcgtaggatcccctgcgtggaaacagcagcttgtctctgactacccggaggacatggagcaccccaaataggaactttagagggattgaaatctgttgcctgttccactaggaatattgtttgcaaggcacaaggtg

SEQ ID NO: 282137 - DNA, 47 bp, Homo sapiens
  chr4:47033601-47033648
  hyper
agcagccgactaagttgcattccttgaatcttcgcagaaaagacaat

SEQ ID NO: 282138 - DNA, 118 bp, Homo sapiens
  chr4:47033893-47034011
  hyper
gctcattttgaatacggtccctacttcttccccttagcaccaatgaacccagcaacatgtcatacgtgaaagagacagtggacagattgctcaaaggatatgacattcgcttgcggcc

SEQ ID NO: 282139 - DNA, 184 bp, Homo sapiens; identical to SEQ ID NO: 199406
  chr4:47465718-47465902
  hyper

SEQ ID NO: 282140 - DNA, 439 bp, Homo sapiens
  chr4:47487073-47487512
  hyper
accaaaccgtcaaccgcgagcaacctgtacttgggaggtgaaagtcagaggtgagattgtaagggctctgggtcactggggcatctgcgctgggcagaagggcagctcggtcaaacagctggagctgggagccggtcagttgccaggccctgccgctgctacgtcacggagggcggggcggtgggcgattggcggtgcactgcagctcgggctgctctgcagcctggcggagacgggaggaggagcggagggagaagtaggttgcgagctcagcacaggctccggcgctggctcccgcagctgagtttgggagatgtctaagtgattttttttttttcccggaaggcaaatggctggcgtggaagcacaacccgctttcactcttcgaatttgtgcttagctcttttcttgtaccttgcgactcgtgaccaacatgctg

SEQ ID NO: 282141 - DNA, 314 bp, Homo sapiens; identical to SEQ ID NO: 230367
  chr4:47838720-47839034
  hyper

SEQ ID NO: 282142 - DNA, 93 bp, Homo sapiens; identical to SEQ ID NO: 199407
  chr4:47839530-47839623
  hyper

SEQ ID NO: 282143 - DNA, 396 bp, Homo sapiens; identical to SEQ ID NO: 40486
  chr4:47839675-47840071
  hyper

SEQ ID NO: 282144 - DNA, 400 bp, Homo sapiens; identical to SEQ ID NO: 230369
  chr4:47916484-47916884
  hyper

SEQ ID NO: 282145 - DNA, 261 bp, Homo sapiens
  chr4:48271821-48272082
  hyper
gcgccgcggagtccggagcctagcgccccagagtccagagcaaagcgccccgccccgccctctgatctccccgtcccgcccccaatcaccccgccccgccccgattgctggccccgtggacgccctaccccgcctctgatcctgcaggcccgcccagtcctcgatcgccccgccccggtcgcttgggccctgggtggcaggtttgcgcagccctgcggcgatttcaaggcaagtgaccggaatgggtcggaagcgcgtccc

SEQ ID NO: 282146 - DNA, 198 bp, Homo sapiens; identical to SEQ ID NO: 199410
  chr4:48272083-48272281
  hyper

SEQ ID NO: 282147 - DNA, 83 bp, Homo sapiens
  chr4:48492097-48492180
  hyper
agggtcattgtgccaacatccgggcgtggagagtttctgtagggagaaggacgaagaggggccccctcggcggggacgcgggc

SEQ ID NO: 282148 - DNA, 523 bp, Homo sapiens; identical to SEQ ID NO: 230373
  chr4:48833079-48833602
  hyper

SEQ ID NO: 282149 - DNA, 256 bp, Homo sapiens; identical to SEQ ID NO: 199411
  chr4:48908455-48908711
  hyper

SEQ ID NO: 282150 - DNA, 130 bp, Homo sapiens
  chr4:48988335-48988465
  hyper
cgcggacgcaggcccgggaggacgcggcggcgggaacctgggggcgcagggctagggcagcgggcccgacccgcacggctttcctggaaagcgctgcccctcgccgcggcgatgccctcgctgtggagag

SEQ ID NO: 282151 - DNA, 32 bp, Homo sapiens
  chr4:48988533-48988565
  hyper
cgggccatgtccagagccgtggagccaggcca

SEQ ID NO: 282152 - DNA, 293 bp, Homo sapiens; identical to SEQ ID NO: 230376
  chr4:52710793-52711086
  hyper

SEQ ID NO: 282153 - DNA, 207 bp, Homo sapiens; identical to SEQ ID NO: 110080
  chr4:52904505-52904712
  hyper

SEQ ID NO: 282154 - DNA, 177 bp, Homo sapiens
  chr4:52917368-52917545
  hyper
aacttctgcttttctggacacgcgtgggcacccagaaccccgaatggggaggaatgctgtagacgccctgctgccctccagcccgcgcggctgcgcgtctcagtccacccctggggcgcgcggctgtcacccagggcggggcggcgcgggcgttgccacgacgcgggccgcgcgcgt

SEQ ID NO: 282155 - DNA, 279 bp, Homo sapiens
  chr4:52917685-52917964
  hyper
cccctctggcttcccgaacccggccaggtccgacccgagggggaggatggaaacacctgccgcgctctgagccccccagaagagaacacccttcccgccatatcaccccacggtcctgcggaggccaccgcctggtccccccaagtctccatcgcgcagcgtggggccgagaggaatagtgagcgatggcggaaaacctgaaaagactggtctcaaacgaaactttacgaacgttgcaggaaaagctagacttctggctgaaggagtacaacgtgagtc

SEQ ID NO: 282156 - DNA, 253 bp, Homo sapiens
  chr4:52918087-52918340
  hyper
atctcagctttcgaccgggatcgctggggaaggaaggacatgtgtgtacatgcccttgtctcagagcttcgggaggcggcgcgcaggcggcctgcggagcgcagcactaggctgcggagactggagagtgcttccaatcagtggtaactaaggacgccggcgacctagcaatagggaagccctgctgtccgcggctggtctggtcatgcctgccactctttcccatcccccttgccagcgcaatccacaccgc

SEQ ID NO: 282157 - DNA, 34 bp, Homo sapiens; identical to SEQ ID NO: 230379
  chr4:53578477-53578511
  hyper

SEQ ID NO: 282158 - DNA, 253 bp, Homo sapiens; identical to SEQ ID NO: 199413
  chr4:53617148-53617401
  hyper

SEQ ID NO: 282159 - DNA, 241 bp, Homo sapiens; identical to SEQ ID NO: 199414
  chr4:53617560-53617801
  hyper

SEQ ID NO: 282160 - DNA, 170 bp, Homo sapiens; identical to SEQ ID NO: 230382
  chr4:54244103-54244273
  hyper

SEQ ID NO: 282161 - DNA, 145 bp, Homo sapiens; identical to SEQ ID NO: 230383
  chr4:54774734-54774879
  hyper

SEQ ID NO: 282162 - DNA, 65 bp, Homo sapiens; identical to SEQ ID NO: 230384
  chr4:54930698-54930763
  hyper

SEQ ID NO: 282163 - DNA, 175 bp, Homo sapiens; identical to SEQ ID NO: 230385
  chr4:54931050-54931225
  hyper

SEQ ID NO: 282164 - DNA, 67 bp, Homo sapiens; identical to SEQ ID NO: 230386
  chr4:54961838-54961905
  hyper

SEQ ID NO: 282165 - DNA, 186 bp, Homo sapiens
  chr4:54965613-54965799
  hyper
aaacaaggaagggtcgttggtctgagtggccccaggagggccccaagtacaaagacacttcagaccttgtcgaacatcagcatgaaaagcttgacggtttcttagctgggaggcctcacagttctgcgccggacagtcctgaactaaccacctgaatgacctctgccaagtccaaaagctgtggac

SEQ ID NO: 282166 - DNA, 362 bp, Homo sapiens
  chr4:54967511-54967873
  hyper
agcccccatccctctttaatcctgtgacttcgcatcctgcgcatcgaagacctttatttgctttgcacgtctcttttcttccccgctaagcaaccacgtgccttgaaatgggaaagggatacagatgttcggctgggcttccccgggtgggtccctgaaatgcgtcctggttagcacatggggtgggagcaccttgcccgagccttacctctctaccctctcttcgccggtccgcaggaggctctgacgccagccaggtacccaatggcaagaggatgaggacggcgttcactagcacgcaactcctggagctggagagagaattctcttccaacatgtacctgtctcgactccggaggatt

SEQ ID NO: 282167 - DNA, 40 bp, Homo sapiens
  chr4:54975352-54975392
  hyper
gggcctggatggcccgaggcctccaagatatcagacggac

SEQ ID NO: 282168 - DNA, 194 bp, Homo sapiens; identical to SEQ ID NO: 199416
  chr4:55094320-55094514
  hyper

SEQ ID NO: 282169 - DNA, 91 bp, Homo sapiens
  chr4:55094684-55094775
  hyper
cttcaagggagtaaaggtcgttctatcggagaacgttccaaacctacacagaccctcttttctttgtaccgtatttcagaccacccagtct

SEQ ID NO: 282170 - DNA, 31 bp, Homo sapiens; identical to SEQ ID NO: 199417
  chr4:55095430-55095461
  hyper

SEQ ID NO: 282171 - DNA, 43 bp, Homo sapiens
  chr4:55096171-55096214
  hyper
aggcgggctgggctcggctggagaccggacctcggtgttggcc

SEQ ID NO: 282172 - DNA, 194 bp, Homo sapiens
  chr4:55096344-55096538
  hyper
gtttggggcgctctggagcggtttgttgggtcagtgaggtgccagggagagcgggtgcctgccgggcagtgtgctcgggttgcacgccctagcgcgggggcgacagcggcggcgcgggcgggcggtctggaataatgacaaacacatttggccctgagtgaagaagtcgtcgtcgcctcgcattccagcaactg

SEQ ID NO: 282173 - DNA, 602 bp, Homo sapiens
  chr4:55099464-55100066
  hyper
tgggtcccggggtcagaagccggacagtggcgggggctggacagtccgagcgcagagcctcccgggcgaagtctgcgcgcagcactcccggctgcgctgtcggggaccaggagcctgggctgcgggcgagctagctggcgagccgggtaagattcgcggggctgtcgcgccctctagtgggctccggggacgcatcccgctttccccagccccgggcggtcggcgccgctatctcagtggagcgcagcgctggaaccccgggggcccggagcggaggctaatctgggtcacctttcccctcctccgggcagccagtggactcctcgcaggctctgtgtgggcccgggaggcgccgggtggacgagagggggccgaggtctctgggtttggattgagaatgggacgtccttgtaattcaatgtgggagaagcaggggagtgtggaggaggacgggtcccgtgcgttcttggggggcaggcgccgtcttctgcgttccagcccctcgccagctcccttgccccgcgggcggcctgttgctgtttgtttgttttacgaccctgcgttattgtgcaacggtaacagtcgtttccaatcagctgcgc

SEQ ID NO: 282174 - DNA, 247 bp, Homo sapiens
  chr4:55523973-55524220
  hyper
cagacgccgccgggaagaagcgagacccgggcgggcgcgagggaggggaggcgaggaggggcgtggccggcgcgcagagggagggcgctgggaggaggggctgctgctcgccgctcgcggctctgggggctcggctttgccgcgctcgctgcacttgggcgagagctggaacgtggaccagagctcggatcccatcgcagctaccgcgatgagaggcgctcgcggcgcctgggattttctctgcgtt

SEQ ID NO: 282175 - DNA, 224 bp, Homo sapiens
  chr4:55524294-55524518
  hyper
gcctgtgcctgggagggtggtacccgccagggtgcatccggagagaggactgcgggccctcagtgcccgtgcgttccagcctccggggagactccaggtggccctcggactctccggcgccctgcctcgctcacctgcgcgaggagaccccagctgctggtggtgggggacgcgaatccggggttcttcgggaatggggacagcaagagggggttaggcgtgag

SEQ ID NO: 282176 - DNA, 65 bp, Homo sapiens
  chr4:55525357-55525422
  hyper
aaatcctactcagttcttaaagctataacagaaatccaggtatatccgcgcgggaactgggtctt

SEQ ID NO: 282177 - DNA, 229 bp, Homo sapiens; identical to SEQ ID NO: 199420
  chr4:55561714-55561943
  hyper

SEQ ID NO: 282178 - DNA, 91 bp, Homo sapiens; identical to SEQ ID NO: 199421
  chr4:55564469-55564560
  hyper

SEQ ID NO: 282179 - DNA, 75 bp, Homo sapiens; identical to SEQ ID NO: 199422
  chr4:55569950-55570025
  hyper

SEQ ID NO: 282180 - DNA, 45 bp, Homo sapiens; identical to SEQ ID NO: 199423
  chr4:55592094-55592139
  hyper

SEQ ID NO: 282181 - DNA, 43 bp, Homo sapiens; identical to SEQ ID NO: 199424
  chr4:55593675-55593718
  hyper

SEQ ID NO: 282182 - DNA, 34 bp, Homo sapiens; identical to SEQ ID NO: 199425
  chr4:55598031-55598065
  hyper

SEQ ID NO: 282183 - DNA, 96 bp, Homo sapiens; identical to SEQ ID NO: 199426
  chr4:55602683-55602779
  hyper

SEQ ID NO: 282184 - DNA, 54 bp, Homo sapiens
  chr4:55990892-55990946
  hyper
catgaagacaacaacgggccgggtcccgcaaagaggcagaaccgagtgtaccgt

SEQ ID NO: 282185 - DNA, 61 bp, Homo sapiens; identical to SEQ ID NO: 199427
  chr4:55991393-55991454
  hyper

SEQ ID NO: 282186 - DNA, 133 bp, Homo sapiens; identical to SEQ ID NO: 199428
  chr4:55991493-55991626
  hyper

SEQ ID NO: 282187 - DNA, 61 bp, Homo sapiens; identical to SEQ ID NO: 199429
  chr4:55991802-55991863
  hyper

SEQ ID NO: 282188 - DNA, 39 bp, Homo sapiens; identical to SEQ ID NO: 199430
  chr4:55992221-55992260
  hyper

SEQ ID NO: 282189 - DNA, 109 bp, Homo sapiens; identical to SEQ ID NO: 230402
  chr4:56212201-56212310
  hyper

SEQ ID NO: 282190 - DNA, 267 bp, Homo sapiens; identical to SEQ ID NO: 230403
  chr4:56261513-56261780
  hyper

SEQ ID NO: 282191 - DNA, 34 bp, Homo sapiens; identical to SEQ ID NO: 199431
  chr4:56412390-56412424
  hyper

SEQ ID NO: 282192 - DNA, 178 bp, Homo sapiens; identical to SEQ ID NO: 230404
  chr4:56413701-56413879
  hyper

SEQ ID NO: 282193 - DNA, 177 bp, Homo sapiens
  chr4:56501427-56501604
  hyper
atctcccctggaacgtttgcgttctgctcggctatgtctccaaagcttcagatctccttccctgaccttgcgtttcctatttcttccctctaagccaagctcagcatgtccctattgttatcaaatcacatctgccatcacttgctgtagctgtcgcactgcctgaaagcctggctt

SEQ ID NO: 282194 - DNA, 705 bp, Homo sapiens
  chr4:56501725-56502430
  hyper
ccgttgtaccgctcaggtttatctcagcataacactagctcactcaccaaagaggctgagcactcgccaagtttaccttgcctcagcggatgaagtatcaaactcactcttgttttgcttcaaccatcaatctctccaataattgcaatcaaagggaaaacattttaatgttcactattttagtacccgtttccacgggccggggggtctggaaatcccgaggatgagggaaccctaccagtctccatctatcgcagccggcccggcgcagggtctccgctgggcatcaacgagcagggcctgggtatttcggccctggccgggccccttgctcctacgtcgctagttgccctggggaggcgacctgtgcctgggaggcgggaaaccccgcggcaccagagaagccaagtgaagtcccagaagccaagtaaaggtgagagaaagagggtggaggagagcggtgagtggagccagagagaggcgcgcatggcgtggaagcggccgggtgcggggccgtcttacctcggcaggcgcccgcgcaccaggcgagcagcagcagcagcagcaggagcggggacgccgcggccacctgtccggcgggcgacctggggcggcagctctctgttcgcagcatctcggcggctgcgggaggctcggtgctagggacgctgcgctgcgccacgcgtagctggtgctccacctggt

SEQ ID NO: 282195 - DNA, 397 bp, Homo sapiens
  chr4:56502467-56502864
  hyper
gcgcccggcgagccgccaacttttaaatctcgcgcacaagtgggctgggctgcgcggtccccgccgcgcgtcacctcgccgcctgccgcccccggcctacctcgcctcaccccgccccgctgcctgcccgcgccccaccctgcagcaggacccgagccccctagcctgagtttctgacccgagtaccacgcattttcgctctgggataaagagaatggaatttaaataatgcaccattcccacctttggaaggactggactgggaacagggtgtggatggcaaaccaggccgtctgagtttttaaacttggtagtggcgacgctctctggtgtcctgggtctacgtgggacaccctttctccttcacctcttccagagctccggcagtcactagtac

SEQ ID NO: 282196 - DNA, 126 bp, Homo sapiens
  chr4:56719667-56719793
  hyper
cccttccctgacacgcccctccaatgaggccttgttccgcctggccacgcccgtcggttggcgccccgcccctccgcgtctattggccgctccctttttctcccatcgctgcttcttccttctcta

SEQ ID NO: 282197 - DNA, 419 bp, Homo sapiens; identical to SEQ ID NO: 110145
  chr4:56719823-56720242
  hyper

SEQ ID NO: 282198 - DNA, 980 bp, Homo sapiens; identical to SEQ ID NO: 222417
  chr4:56914935-56915915
  hyper

SEQ ID NO: 282199 - DNA, 177 bp, Homo sapiens; identical to SEQ ID NO: 230412
  chr4:57253559-57253736
  hyper

SEQ ID NO: 282200 - DNA, 172 bp, Homo sapiens; identical to SEQ ID NO: 230413
  chr4:57301958-57302130
  hyper

SEQ ID NO: 282201 - DNA, 127 bp, Homo sapiens; identical to SEQ ID NO: 230414
  chr4:57333253-57333380
  hyper

SEQ ID NO: 282202 - DNA, 188 bp, Homo sapiens; identical to SEQ ID NO: 230415
  chr4:57333686-57333874
  hyper

SEQ ID NO: 282203 - DNA, 44 bp, Homo sapiens
  chr4:57397325-57397369
  hyper
ttcctgggtggtaggtgttccccttccctcgtcccctctcctgc

SEQ ID NO: 282204 - DNA, 106 bp, Homo sapiens; identical to SEQ ID NO: 199432
  chr4:57687532-57687638
  hyper

SEQ ID NO: 282205 - DNA, 219 bp, Homo sapiens; identical to SEQ ID NO: 199433
  chr4:57687887-57688106
  hyper

SEQ ID NO: 282206 - DNA, 143 bp, Homo sapiens; identical to SEQ ID NO: 199434
  chr4:57775639-57775782
  hyper

SEQ ID NO: 282207 - DNA, 205 bp, Homo sapiens; identical to SEQ ID NO: 199435
  chr4:57843820-57844025
  hyper

SEQ ID NO: 282208 - DNA, 66 bp, Homo sapiens; identical to SEQ ID NO: 230424
  chr4:57844898-57844964
  hyper

SEQ ID NO: 282209 - DNA, 227 bp, Homo sapiens; identical to SEQ ID NO: 199436
  chr4:57977107-57977334
  hyper

SEQ ID NO: 282210 - DNA, 92 bp, Homo sapiens; identical to SEQ ID NO: 199437
  chr4:57977364-57977456
  hyper

SEQ ID NO: 282211 - DNA, 440 bp, Homo sapiens
  chr4:58029751-58030191
  hyper
tcctgagctgctgcgtgagtcagtgattcccagtgttgctgtgcctgaaaacccaccactaatgtcagcgccttgtgctgttgagttgcacgcggcgcccctgcagtccagggctggggctagcccggcgagcgcgcggcaggcagagcattcccggacgagtccggtagatggtagcattgtgcagccgatgcgtcctctcccagcttgcgtctcatttttccctctccccctttcctgggctcagcggtgaggctcaggtaccggcgccgccctgatgcctactatgccgcgccatctccagatggtccgcacctggcgggtcacgacgagtctcaatccacagcatggggctgactcggactcaggagtttttgtggctccaggcgtaaccgttgctttggataaaattggtccagttcacttgaccaaggagaagt

SEQ ID NO: 282212 - DNA, 249 bp, Homo sapiens
  chr4:62067624-62067873
  hyper
acacactcatccggtcgtggtgcggggcgggaagggaacctcctggctggtgggcgctcgggtctggcgcgggttggagttttttccagccattgggcgatttgaccggccgaggggagtgagggggataagagactgggcgcattcgcagctgcacacgctggggaataggaacagttcccaccccgttaattttccctctcctctcaccccagtggcatcccctggtgggggcagaaagcggacagg

SEQ ID NO: 282213 - DNA, 238 bp, Homo sapiens
  chr4:62068395-62068633
  hyper
gacccagcctccggtcccacgtcggagctcagaagcttagggtgccaggcccccagcactataggtgggtgtgtgtgtgtctgtgcgtgtgtgtgtggtgtgtaggggtgggggcgacctcctctaccagccttacttggcggcggagtcagcgtttgagtgtgtgcgcatttttgcgccccagggacggcagagagatatttgcggggatgccggagctgatgctgctggagctgag

SEQ ID NO: 282214 - DNA, 347 bp, Homo sapiens
  chr4:62068663-62069010
  hyper
taactggaaaatctggtttgaggaggccacgggggcccccgcagggtggcgaggaaaccttgccgtgtccccttcccctggagaggcgcagctcggcgacatgcgtgcggcgcgtgagagtcgctggtgcagcgctcgatgcaccccagaatggccctgatgagaacctcatagggtagtcatctctccagcaggttgaagtaatcgagtccagccagcgtaactcctggtccctggaattctctggccactttcctacctctgatagaaacatgcgctgcttttatttatggccagagatatcatagcagttgggagaactcgaggcttgcgagccacctccaggg

SEQ ID NO: 282215 - DNA, 44 bp, Homo sapiens; identical to SEQ ID NO: 199438
  chr4:66536636-66536680
  hyper

SEQ ID NO: 282216 - DNA, 213 bp, Homo sapiens; identical to SEQ ID NO: 230434
  chr4:68411140-68411353
  hyper

SEQ ID NO: 282217 - DNA, 80 bp, Homo sapiens; identical to SEQ ID NO: 230435
  chr4:68567004-68567084
  hyper

SEQ ID NO: 282218 - DNA, 109 bp, Homo sapiens; identical to SEQ ID NO: 230436
  chr4:71479320-71479429
  hyper

SEQ ID NO: 282219 - DNA, 107 bp, Homo sapiens; identical to SEQ ID NO: 230437
  chr4:71554111-71554218
  hyper

SEQ ID NO: 282220 - DNA, 56 bp, Homo sapiens; identical to SEQ ID NO: 230438
  chr4:71705636-71705692
  hyper

SEQ ID NO: 282221 - DNA, 730 bp, Homo sapiens; identical to SEQ ID NO: 199439
  chr4:71767778-71768508
  hyper

SEQ ID NO: 282222 - DNA, 177 bp, Homo sapiens; identical to SEQ ID NO: 110197
  chr4:71768550-71768727
  hyper

SEQ ID NO: 282223 - DNA, 46 bp, Homo sapiens; identical to SEQ ID NO: 230441
  chr4:71859073-71859119
  hyper

SEQ ID NO: 282224 - DNA, 84 bp, Homo sapiens; identical to SEQ ID NO: 230442
  chr4:72052855-72052939
  hyper

SEQ ID NO: 282225 - DNA, 242 bp, Homo sapiens
  chr4:73433657-73433899
  hyper
cttctgagagcatcgggcttcaccttgagcctccaaagggttgggggcagggccgaaaagaaacagagctgcactcaacttagctttaaaaagaggaggagttgtgcagagggggaggggagaaggcggccggcgcctgcagcctctgcccaggaaaacggagggcaggaaacgtctccagcccccctccccaactgtcaaatcctagcccggccgtggtactcccaggacacgtgtctact

SEQ ID NO: 282226 - DNA, 146 bp, Homo sapiens
  chr4:73434163-73434309
  hyper
ggtgaagccctaggtgtgacaagactgggctcccggagtgggagtcgtaacctcccgtgcaactcaaccctctacccccaaaagcccgcacgctgcgcccagccctcaaaacaccgtttctgaacgcaaaagataacagggaaggg

SEQ ID NO: 282227 - DNA, 125 bp, Homo sapiens; identical to SEQ ID NO: 199442
  chr4:73434679-73434804
  hyper

SEQ ID NO: 282228 - DNA, 87 bp, Homo sapiens; identical to SEQ ID NO: 199443
  chr4:73435243-73435330
  hyper

SEQ ID NO: 282229 - DNA, 396 bp, Homo sapiens; identical to SEQ ID NO: 230445
  chr4:73935363-73935759
  hyper

SEQ ID NO: 282230 - DNA, 224 bp, Homo sapiens; identical to SEQ ID NO: 199444
  chr4:74702525-74702749
  hyper

SEQ ID NO: 282231 - DNA, 217 bp, Homo sapiens
  chr4:74734859-74735076
  hyper
tctggggcagaaggcgaatatcccagagtctcagagtccacaggagttactctgaagggcgaggcgcgggctgcatcagtggacccccacaccccacccgcaccccaagcgctccaccctgggggcggggccgtcgccttccttccggactcgggatcgatctggaactccgggaatttccctggcccgggggctccgggctttccagccccaacca

SEQ ID NO: 282232 - DNA, 177 bp, Homo sapiens; identical to SEQ ID NO: 110211
  chr4:74735193-74735370
  hyper

SEQ ID NO: 282233 - DNA, 713 bp, Homo sapiens
  chr4:74904434-74905147
  hyper
atgcatggttgagactggaaagcccggagcggccgggccagggaaattcccggagctccagatcgatccggagtcccgaaggaaggcgacggccccgcccccggggtggagtcggatacgggtagggggagcccactggtgacgcctacgcctcgccctccagagtaacccccgtgcactctgggactttgggatattcattttctgccccaaattcctggagaggcagtgagtccacctcgctgaagatacagcctgtgaggggggaccttaggtccccgatgaccccccgcgtacggggtagggttggaggaaagagctggggggacccgtgagaaccaggacaggaaaggcacgacttctttagaggaagagagctttgtctccttagttatcagatttgctggggacccggagacaggcgagttttccctcagctatcctctctctatatagtctatcctctatgttaacctcccggtctctgcctctctcattttcggtttagcgttatttcatgtacatctaacatcatgctctctgtgaaagtacagccatcgtctcggattccagagaagaatgttctacttgttccttgttttgcatattctctaatcacacttagaataccttgtttacgttttccatttggtggcaacagattatcagtgtcaaaatttgaattcagtgttagtgtccgtggaagccagggc

SEQ ID NO: 282234 - DNA, 711 bp, Homo sapiens; identical to SEQ ID NO: 230450
  chr4:74964529-74965240
  hyper

SEQ ID NO: 282235 - DNA, 340 bp, Homo sapiens; identical to SEQ ID NO: 230451
  chr4:75023526-75023866
  hyper

SEQ ID NO: 282236 - DNA, 249 bp, Homo sapiens
  chr4:75230487-75230736
  hyper
aggcatgtatggggaacgccagccttggctaaaagactgattcaagttatgtccgtcaccctgagcaaccaaaaccacccactacagggcaggtgaccccacaaagcaaaccaagccatctggtccacgctccccacctcccggagggagatggaaaagtttcgggagtagtccccggccaatcggaaagacattttttcattcctcaaccactactctcaggtgctccagggagggaggatgacttcc

SEQ ID NO: 282237 - DNA, 91 bp, Homo sapiens; identical to SEQ ID NO: 230453
  chr4:75719943-75720034
  hyper

SEQ ID NO: 282238 - DNA, 241 bp, Homo sapiens; identical to SEQ ID NO: 199447
  chr4:75858217-75858458
  hyper

SEQ ID NO: 282239 - DNA, 49 bp, Homo sapiens; identical to SEQ ID NO: 199448
  chr4:75858524-75858573
  hyper

SEQ ID NO: 282240 - DNA, 290 bp, Homo sapiens; identical to SEQ ID NO: 199449
  chr4:75858629-75858919
  hyper

SEQ ID NO: 282241 - DNA, 365 bp, Homo sapiens; identical to SEQ ID NO: 199450
  chr4:75858998-75859363
  hyper

SEQ ID NO: 282242 - DNA, 506 bp, Homo sapiens; identical to SEQ ID NO: 199451
  chr4:75859428-75859934
  hyper

SEQ ID NO: 282243 - DNA, 35 bp, Homo sapiens; identical to SEQ ID NO: 230455
  chr4:76439684-76439719
  hyper

SEQ ID NO: 282244 - DNA, 133 bp, Homo sapiens; identical to SEQ ID NO: 199452
  chr4:76555905-76556038
  hyper

SEQ ID NO: 282245 - DNA, 278 bp, Homo sapiens; identical to SEQ ID NO: 230457
  chr4:76598656-76598934
  hyper

SEQ ID NO: 282246 - DNA, 71 bp, Homo sapiens; identical to SEQ ID NO: 230458
  chr4:76649921-76649992
  hyper

SEQ ID NO: 282247 - DNA, 112 bp, Homo sapiens; identical to SEQ ID NO: 230459
  chr4:76650652-76650764
  hyper

SEQ ID NO: 282248 - DNA, 128 bp, Homo sapiens; identical to SEQ ID NO: 230460
  chr4:77069657-77069785
  hyper

SEQ ID NO: 282249 - DNA, 349 bp, Homo sapiens; identical to SEQ ID NO: 230461
  chr4:77135172-77135521
  hyper

SEQ ID NO: 282250 - DNA, 436 bp, Homo sapiens
  chr4:77172534-77172970
  hyper
ttgctatctctttatcgctcctcctgccttcttcctttctttccttcagtaaacgttttttgaaacgatgatgagcaaaaaacgcctgatccagtctatggcgcgtttcggtgggaagatgaacacgccttcccagcagagtaaaacgtgattacaccaaggaccggtaccctctcccttccctcggccaggtccacgtccccaggcgtcggagaaggggttggaccgcgcagcggggcgtcagagttgccaggcgcccggggcaaataccggcagcggtggttgtgcggtgtcctagcaacggggcggcagcagggcacacacaccgcccaagcccggacggtggccgcgaagctagggccaccatggcggaccgcaggcggcggctccggccggggacgttggccccggtgcgcgagggcgtgaactgcaggtc

SEQ ID NO: 282251 - DNA, 100 bp, Homo sapiens; identical to SEQ ID NO: 199456
  chr4:77173055-77173155
  hyper

SEQ ID NO: 282252 - DNA, 202 bp, Homo sapiens; identical to SEQ ID NO: 199457
  chr4:77227271-77227473
  hyper

SEQ ID NO: 282253 - DNA, 504 bp, Homo sapiens; identical to SEQ ID NO: 199458
  chr4:77227525-77228029
  hyper

SEQ ID NO: 282254 - DNA, 92 bp, Homo sapiens
  chr4:77228452-77228544
  hyper
gggcggctgcagtggcggcgccccttcccggcctttggaaaggggggcttaggtttaggggatcctacaagcctcttcgatctctgcccaag

SEQ ID NO: 282255 - DNA, 469 bp, Homo sapiens; identical to SEQ ID NO: 230465
  chr4:77610246-77610715
  hyper

SEQ ID NO: 282256 - DNA, 472 bp, Homo sapiens; identical to SEQ ID NO: 199460
  chr4:77818185-77818657
  hyper

SEQ ID NO: 282257 - DNA, 406 bp, Homo sapiens; identical to SEQ ID NO: 199461
  chr4:77818754-77819160
  hyper

SEQ ID NO: 282258 - DNA, 267 bp, Homo sapiens; identical to SEQ ID NO: 199462
  chr4:77819271-77819538
  hyper

SEQ ID NO: 282259 - DNA, 156 bp, Homo sapiens; identical to SEQ ID NO: 199463
  chr4:77819573-77819729
  hyper

SEQ ID NO: 282260 - DNA, 42 bp, Homo sapiens; identical to SEQ ID NO: 230467
  chr4:77997174-77997216
  hyper

SEQ ID NO: 282261 - DNA, 111 bp, Homo sapiens; identical to SEQ ID NO: 230468
  chr4:78079532-78079643
  hyper

SEQ ID NO: 282262 - DNA, 43 bp, Homo sapiens; identical to SEQ ID NO: 230469
  chr4:78978694-78978737
  hyper

SEQ ID NO: 282263 - DNA, 267 bp, Homo sapiens; identical to SEQ ID NO: 230470
  chr4:78979307-78979574
  hyper

SEQ ID NO: 282264 - DNA, 784 bp, Homo sapiens
  chr4:78979792-78980576
  hyper
agtacggagaagcacgaaccagcctgcttcccagaacaaaagtggttaataagagtttaggttcattcttttacttcaccctccgcctcctggttttcctccgaggctccaagctacctgtaaaaccccggagccgcaggagagaaaaggaagccgtgagactagttgtcgccatgatatcaaatgcaatccgggctcagccaaataaatgagtcaataagtaaatcaagagtttggggtcatgggatgccgggcctggggacgcgaggcgctgtgagctccctcctgctccgaggagccagggaagtcgccccgccagtgcttagggagggggaagggagccggcgggctgggaggaagacggcttaatccacagcgcctggctctcggcttcccctcccggctccattcattattcatccagctgcgggaagaagagttcacctgcccagccgcaaaccagagccgcggctgggcggcggcggcgggcgcagggcgggccgccttctccgccctggtgcctaggaaggggcgcggggcggctcccgggagtcgagctctggcgcaggactgggggctgcgggaggcccggggaggacaaagctctgcctcgggtcgacctccagtcactggagcagctgccttttctttgctggcttcccaagagaaaggccttgggaatccacgcacaagggtgggggactttcccgtgggtccaggtgctgccttctgcactcttccgggatgtgtgtcaagtgtgtataatctccgcgaaaggcacatc

SEQ ID NO: 282265 - DNA, 100 bp, Homo sapiens
  chr4:79472691-79472791
  hyper
agtaaaggtgtagtggaaaccgagagcgaaatgagggcgtagggagaaaagggtggggaagcttagagaccggtgagggagcagagctggggcgcctgtg

SEQ ID NO: 282266 - DNA, 86 bp, Homo sapiens
  chr4:79473111-79473197
  hyper
cgagtgcagctcgaccctgggcagggctggcggctggcgcccgcgcccggccccaacccagctgcgtgggtggggagctggaggga

SEQ ID NO: 282267 - DNA, 533 bp, Homo sapiens; identical to SEQ ID NO: 230473
  chr4:79860213-79860746
  hyper

SEQ ID NO: 282268 - DNA, 787 bp, Homo sapiens; identical to SEQ ID NO: 230474
  chr4:80993248-80994035
  hyper

SEQ ID NO: 282269 - DNA, 933 bp, Homo sapiens
  chr4:81105153-81106086
  hyper
ccgccgaggggcccgcagtagctgcgctcccggggaaggagccccacagtccccaggtaaggaagccgcggggcaggcgaagggcggggaaggaggagcctgagcgttccggtacccaaccctctctctttcttgaccttcctcccctctgccccttcatcctgggcgcggagggcggaacagtttctggaccagagcacccgcgagaagcagggagcggccgcacagcagccagaagagggcgccagcaccccggggccggggctacagggctggctctgccccggcgtcccgcccccgccccggggaacgctgcctctgccgcaaagatgcccccttccgctggaaagcggtaatgcccaccgcccaccgcgaccaccccttccccatttttctcagttctaactgtactcctctctcgtttcctttttgcttctctctctctctcccccctccctcgtcctctcttcctctctctttctctctgcgcttgttttcttacttccccctccctccccgcttgcaccccggtacttttccttttcttttctgatcactggcggggggagggtttgtcgcccgccggaaggtagtgtggaggggatggatgtgtttcacgctcaggttctggctctggctcctctccataggtgcctccctgggtgctcgcgaaagcagccctgagaatggcagctctcagaggttgaagtcattcttttcgggggacggggcacggcgactgtttgattggggggtgagttatgcacttggggcagcgcttccctggaatgcagagctggggatttcccttgctagacggatgcttaaagttcagtggctttgtactgagcccctttctcccctcgaaaagtcatgacagtcaaaagtatctctctttctctctcccccgccccccacttctctccaaaaccc

SEQ ID NO: 282270 - DNA, 57 bp, Homo sapiens
  chr4:81122998-81123055
  hyper
aatcatgtggtgtgcgtgtgtgtgtgtgtgtgcgtgcgtgcgtgtgtgtggtgtttg

SEQ ID NO: 282271 - DNA, 172 bp, Homo sapiens
  chr4:81124731-81124903
  hyper
gccacctgcaggaataaacacgcgagaacatccaccgcttccttgcaccccgaaaccctgcacaaagacacatacattcaccgcccccccgcccccccaacgcgcacacacacgtcctctcctcccaggaacctcattcaaatatttacccgggacacacacccccccccac

SEQ ID NO: 282272 - DNA, 51 bp, Homo sapiens
  chr4:81257239-81257290
  hyper
cccctagagtcacccagcgcagaaacgcgcgggcacactcacactggggag

SEQ ID NO: 282273 - DNA, 670 bp, Homo sapiens; identical to SEQ ID NO: 230487
  chr4:82391837-82392507
  hyper

SEQ ID NO: 282274 - DNA, 230 bp, Homo sapiens
  chr4:82965102-82965332
  hyper
aagacccccaggcccgccaggggtccctgaggggacacaccctccacctacctcaaacatgggagaggcgcccttgctcggcaacgtgcagcccaggagctcggcgagaaactttgccatatacaagcggtgaggcagggtccctcccgatgcgccgtttctgtcctttccccttgccagagcccgagcgccaggatcctgcccgcagcccgcccgccagccggggccgt

SEQ ID NO: 282275 - DNA, 364 bp, Homo sapiens; identical to SEQ ID NO: 230489
  chr4:83293752-83294116
  hyper

SEQ ID NO: 282276 - DNA, 66 bp, Homo sapiens
  chr4:83482618-83482684
  hyper
gtcaaacttggggtcgcttctcacccgagtccacccgataacgagatgatggggcggcgggtgggg

SEQ ID NO: 282277 - DNA, 125 bp, Homo sapiens
  chr4:83483372-83483497
  hyper
cgcgtttgcctggcgctcctcatccaacaaaaggaaggacagaatcttggatcctccgcctggtggttatttattcctgacctgttgtaaccttctgcctggctctctttcgtccgcacacctag

SEQ ID NO: 282278 - DNA, 90 bp, Homo sapiens
  chr4:83718834-83718924
  hyper
agaactgcaaatgggcatagaagattgcggagggggcagggacaggggccttggagaggcaagaggggaaccggtatcttccatctggtg

SEQ ID NO: 282279 - DNA, 368 bp, Homo sapiens
  chr4:83718966-83719334
  hyper
cggtccaactcccttacttgtcctcatctctgtccccaaggtccgtgacccgcggaggtgatgggggggataggagagccccagggaccgcagaggtgacacaatcgcccgcccgtcctccctcgctgggagccgattcagcctgtgccgagcctctcccttcgcgcgcctctgcgcacagcggtggcaccgcaggactccgggtcccccccggctctccatcgggaagccggcaaatgcgcttcctcaggcagaccgcggcggggtgggggcggggggggggcggaagttgaaatactgggacagaaacacctgcccgtcccaagggacggaaaactggatgccaagggggccgcggcgcgcagcgg

SEQ ID NO: 282280 - DNA, 39 bp, Homo sapiens
  chr4:83719425-83719464
  hyper
ggccggggcgcagggggcgccggcgggacttaccccaga

SEQ ID NO: 282281 - DNA, 374 bp, Homo sapiens; identical to SEQ ID NO: 230492
  chr4:83719881-83720255
  hyper

SEQ ID NO: 282282 - DNA, 283 bp, Homo sapiens; identical to SEQ ID NO: 230493
  chr4:83812351-83812634
  hyper

SEQ ID NO: 282283 - DNA, 234 bp, Homo sapiens; identical to SEQ ID NO: 230494
  chr4:83821698-83821932
  hyper

SEQ ID NO: 282284 - DNA, 201 bp, Homo sapiens; identical to SEQ ID NO: 230495
  chr4:83956037-83956238
  hyper

SEQ ID NO: 282285 - DNA, 46 bp, Homo sapiens; identical to SEQ ID NO: 199471
  chr4:84030840-84030886
  hyper

SEQ ID NO: 282286 - DNA, 229 bp, Homo sapiens
  chr4:84030916-84031145
  hyper
agcggcagctgcgcgcggggctcttcgatcaaccctcaccccgccggattacgcctcccgccagcccagctctgggacccctgggtctcctctgctgggaccagacctgcctgccggtaaattcttaagagcagcccgcgcagaatctatcccaaggagaccgcccatttttgctggggcaatcagggaactgcgtctgcggatggctgccctcgggggaccattcgcc

SEQ ID NO: 282287 - DNA, 267 bp, Homo sapiens; identical to SEQ ID NO: 230497
  chr4:84205947-84206214
  hyper

SEQ ID NO: 282288 - DNA, 85 bp, Homo sapiens; identical to SEQ ID NO: 222435
  chr4:84292570-84292655
  hyper

SEQ ID NO: 282289 - DNA, 571 bp, Homo sapiens; identical to SEQ ID NO: 230498
  chr4:84376736-84377307
  hyper

SEQ ID NO: 282290 - DNA, 61 bp, Homo sapiens; identical to SEQ ID NO: 230499
  chr4:84406474-84406535
  hyper

SEQ ID NO: 282291 - DNA, 210 bp, Homo sapiens; identical to SEQ ID NO: 230500
  chr4:84456995-84457205
  hyper

SEQ ID NO: 282292 - DNA, 227 bp, Homo sapiens; identical to SEQ ID NO: 230501
  chr4:84457807-84458034
  hyper

SEQ ID NO: 282293 - DNA, 48 bp, Homo sapiens
  chr4:85403425-85403473
  hyper
ttcataacattttaaaaatggtcaagtccggccgggcgcggtggctca

SEQ ID NO: 282294 - DNA, 161 bp, Homo sapiens
  chr4:85404920-85405081
  hyper
acaactgaaggcagcggccacggctgccttttcctgccctgaagtggtggagcttctgggaagatccggggcctgtagcgccctttccactgcgagtaggcgcagccgctttacaggttgtgcgatggatacaggtatcgtgtggcagacgtggtgccgtc

SEQ ID NO: 282295 - DNA, 91 bp, Homo sapiens
  chr4:85405111-85405202
  hyper
acaagccagccaatcccgagcgttctaattgccttagtcctgggatcacccacgcagcaagtccagccatgaagcccgcccccacagacac

SEQ ID NO: 282296 - DNA, 144 bp, Homo sapiens
  chr4:85416760-85416904
  hyper
catgtgtgcacgcgcgcgcgacaggggcggtacctatccctccaggtatgcaaggtccactcaccttgacctgactctctgtcatccccaacgaataggccaaacgagccctctcgggccccgccaagtattttgtttgttcga

SEQ ID NO: 282297 - DNA, 48 bp, Homo sapiens
  chr4:85417564-85417612
  hyper
ccatcaaaaccgatacaatagcgtctccctggcacccccaccaggccc

SEQ ID NO: 282298 - DNA, 234 bp, Homo sapiens
  chr4:85417719-85417953
  hyper
aacttcggagactcgctgaaaggcgaagaactgagcgagaaaaggaccccaggctgggccctgaagtccacctggaaggctgggagcctccgcggcgctgcggcctactaccccgaagactagcgtgatcttggggcaactcagtttgcctcaagcaaggtctttgcgggatggtacattttccccaggccgtgtcccttcatctcactcttctcctggctcgctcttgtgtta

SEQ ID NO: 282299 - DNA, 700 bp, Homo sapiens
  chr4:85419891-85420591
  hyper
actgggatgctctgctctttcggtcgcgcggctgattcgcattcgacgctcactgtgcccggggagaaagcgcatccagcccgcgggagatctagcctctgtgcgggcttcctccgcccacgctgccccgggctgctgcgccagaaagggcagtgccacggatccccgcggctcccaggtcctcacctccacccgccttgccctctggcccacggggcactggagttgcaatattgaaaagaaaaagggggaggaaaaacacagaaaaacaaaagactaagtgtgaaaagtctgacggctgggtttcggcgccgctcgtcagtccacttctgcaaacgggcccggcgacccccgccccacccccgctccctctctccctctcactctcagcctttgactctcctctctggcattttcttcgcggcttcccaggcttcggtcttctaagtcctgtcctctggccaaactgaccctctccgcggctcctccgctctttctctcctttcctctctccctccgggcctgacagttcagatgaagctctcaaaggtaataaaacatttgcatcactccctacccctctttagctgggggacgaaagggagggggaagtgggggaccaaaatgagaactttgagggacgtcactccgaggctgcgggggccggcgagccgggcgcaggccgggggcgtaaccaccg

SEQ ID NO: 282300 - DNA, 42 bp, Homo sapiens; identical to SEQ ID NO: 230507
  chr4:85421916-85421958
  hyper

SEQ ID NO: 282301 - DNA, 330 bp, Homo sapiens
  chr4:85503526-85503856
  hyper
agtactgagtttctgggagacggcgctgcggttgtgatcggaattgttggccgacgcacctctggacgcccagtgaggcaaaagcatctcctgttttcaaggtgatgacactgggctggaatgccgcggggccaaccagtccgtcctgccagacaagtttctggtccagtgagcctccgacccgccgcgcgtgtcaagctgacaaggccggggaggcgtttgaagcagcagtgttgagcgctgttaacatttagcgggcgtctttgagtagctcctccagccctcgcagcggcccagggactagcctgcaagttctcaacgctcacttcc

SEQ ID NO: 282302 - DNA, 250 bp, Homo sapiens; identical to SEQ ID NO: 199476
  chr4:85503985-85504235
  hyper

SEQ ID NO: 282303 - DNA, 300 bp, Homo sapiens
  chr4:85504793-85505093
  hyper
ttcctccctgcctggcactgcttcctccttctccagagggggtcgggacccgggatcccagtggcggtgaggttcccaggatgaccgcggccgctgcccgggagaaatgggccactcaacccggcttacagtttagcttcatcctcttccggtcccttcttcaggatctggggccgacgctggaatcaggagggaacctgtcctcctaggggctgcagtgcagttagtagctgccacctcacctctcttttcagtagagggaacaaagttagtaaggactagagacgtgccaccgtcggc

SEQ ID NO: 282304 - DNA, 321 bp, Homo sapiens; identical to SEQ ID NO: 199477
  chr4:85886793-85887114
  hyper

SEQ ID NO: 282305 - DNA, 678 bp, Homo sapiens
  chr4:85887200-85887878
  hyper
acagcagctgggccgcggcctgtccctagggggagcgggcgcagggccgcgagtgggcagcgcctccgccccgcacgaacaaagcggccaggcgcgccgggccgaggcagcaccgcctctccgggagcgcggggggcggggaggatggcgggggtactcacctgagggccggcggagggcgcgggcgggacaggcccaggagacgggaccgcggcgggccggggctccgcgccgagggcgcacgggctacggggaaggggcgaccggcgcgacgtccgcggcggggcccgggagccccgcgccgcgggccgggggccggggcccgagctcgattctgcggccgcgaggtatgggaaccggtccgccgggccaggcagcggtgctaggcagcaggggcagcgacgccgccgcctttcccttctcctgcccccgtccctgctccgccgcgtcctcgtcctcgctgggtccccgccgccgccgcctcagcctcggcgctcctcgggtttcttctctccatcaaggccgggccgacccgcagggaccatcccggaaagtgaggggttgttgccgtttcccgcagctgttggtggccatctttaatcctcctcctcctcctgctttctccacctcccgctggctgtctgactgactgactggatcctcctctttcccctcctg

SEQ ID NO: 282306 - DNA, 438 bp, Homo sapiens
  chr4:85887927-85888365
  hyper
ccctcctgcctttccttcctctttccttacttccttcccttccctcggcttcccgctcttgcctcactctcagcggctgccttcgcccctgtctgcagacagcgccgctggatgctcccagctggacttcaaccccactcctctcagtccctctccccactgccttccagacgcgcctcttccccgccccgcgcccctctctcctctcccacccctgcccctctccgcggcgctcaccctcctcagtcccagtttctgaaaggactcagctgagaaaggacaactgggttccgctttccttaaccctacaccctttagctggatgctgtcagaggcgatggagaaacgcaaaggtgcgttaattttactctagccagagtataaaagaactgcccacgccagctattgtactacgcagcttcgaaactcctgcacgct

SEQ ID NO: 282307 - DNA, 63 bp, Homo sapiens; identical to SEQ ID NO: 199480
  chr4:85888399-85888462
  hyper

SEQ ID NO: 282308 - DNA, 101 bp, Homo sapiens; identical to SEQ ID NO: 222440
  chr4:86396088-86396189
  hyper

SEQ ID NO: 282309 - DNA, 543 bp, Homo sapiens; identical to SEQ ID NO: 222441
  chr4:86396422-86396965
  hyper

SEQ ID NO: 282310 - DNA, 233 bp, Homo sapiens; identical to SEQ ID NO: 230515
  chr4:86851207-86851440
  hyper

SEQ ID NO: 282311 - DNA, 197 bp, Homo sapiens; identical to SEQ ID NO: 199482
  chr4:87515019-87515216
  hyper

SEQ ID NO: 282312 - DNA, 45 bp, Homo sapiens; identical to SEQ ID NO: 230518
  chr4:87516267-87516312
  hyper

SEQ ID NO: 282313 - DNA, 32 bp, Homo sapiens; identical to SEQ ID NO: 199483
  chr4:87813018-87813050
  hyper

SEQ ID NO: 282314 - DNA, 340 bp, Homo sapiens; identical to SEQ ID NO: 199484
  chr4:87813080-87813420
  hyper

SEQ ID NO: 282315 - DNA, 327 bp, Homo sapiens; identical to SEQ ID NO: 199485
  chr4:87813512-87813839
  hyper

SEQ ID NO: 282316 - DNA, 74 bp, Homo sapiens; identical to SEQ ID NO: 230520
  chr4:87855923-87855997
  hyper

SEQ ID NO: 282317 - DNA, 1019 bp, Homo sapiens; identical to SEQ ID NO: 230521
  chr4:87856414-87857433
  hyper

SEQ ID NO: 282318 - DNA, 42 bp, Homo sapiens; identical to SEQ ID NO: 199487
  chr4:88887030-88887072
  hyper

SEQ ID NO: 282319 - DNA, 235 bp, Homo sapiens
  chr4:89079573-89079808
  hyper
ggatctcaggatgcgtgcgctcggaggcagcgctttaacaattaaggatgtaaatgttgggatgagtcacccggaccttccaaacaaactctaaagcagcagtttccacttaacaagaccaccaagcatgtgcacggtgcgttcctaaatcctacccagttcctccacaggctgcctccttgccgcgtctctcaatctcagtgggagtggcgggcactgcctcttccctcctgcg

SEQ ID NO: 282320 - DNA, 512 bp, Homo sapiens; identical to SEQ ID NO: 40681
  chr4:89079844-89080356
  hyper

SEQ ID NO: 282321 - DNA, 441 bp, Homo sapiens; identical to SEQ ID NO: 230524
  chr4:89299895-89300336
  hyper

SEQ ID NO: 282322 - DNA, 393 bp, Homo sapiens; identical to SEQ ID NO: 199489
  chr4:89377924-89378317
  hyper

SEQ ID NO: 282323 - DNA, 177 bp, Homo sapiens; identical to SEQ ID NO: 230526
  chr4:89444420-89444597
  hyper

SEQ ID NO: 282324 - DNA, 274 bp, Homo sapiens; identical to SEQ ID NO: 230527
  chr4:89444895-89445169
  hyper

SEQ ID NO: 282325 - DNA, 151 bp, Homo sapiens; identical to SEQ ID NO: 199490
  chr4:89513528-89513679
  hyper

SEQ ID NO: 282326 - DNA, 657 bp, Homo sapiens; identical to SEQ ID NO: 230529
  chr4:90228653-90229310
  hyper

SEQ ID NO: 282327 - DNA, 120 bp, Homo sapiens
  chr4:90757397-90757517
  hyper
cgtctccaaccccgcgccagccacccgagggggcgttctcagcctccaccctagcggaccccgcgccagcacttgttaacccgttaccacctgttgacttggcctccttgcacttccatt

SEQ ID NO: 282328 - DNA, 234 bp, Homo sapiens; identical to SEQ ID NO: 199492
  chr4:91048333-91048567
  hyper

SEQ ID NO: 282329 - DNA, 91 bp, Homo sapiens; identical to SEQ ID NO: 199493
  chr4:91048568-91048659
  hyper

SEQ ID NO: 282330 - DNA, 51 bp, Homo sapiens; identical to SEQ ID NO: 199494
  chr4:91048895-91048946
  hyper

SEQ ID NO: 282331 - DNA, 436 bp, Homo sapiens; identical to SEQ ID NO: 110365
  chr4:91049201-91049637
  hyper

SEQ ID NO: 282332 - DNA, 78 bp, Homo sapiens
  chr4:91049697-91049775
  hyper
tgggttggttcacctgagcagaaagtcagccgtaagctgaaaccgcatgtggccccctggccccttcgacttttggct

SEQ ID NO: 282333 - DNA, 169 bp, Homo sapiens
  chr4:91760071-91760240
  hyper
cttctcctgttcaatcgtttctttggaaggcagtggatttttctcttgcgtctctgtcttcttcagtttcggcttatcgaatttctcgatctcagccatatcgggtttgtcagacatggttgcggaggaaaagcggagcgaggcgcgcgagtacgagcgaagtctggtc

SEQ ID NO: 282334 - DNA, 87 bp, Homo sapiens; identical to SEQ ID NO: 199496
  chr4:92905822-92905909
  hyper

SEQ ID NO: 282335 - DNA, 91 bp, Homo sapiens; identical to SEQ ID NO: 199497
  chr4:93224881-93224972
  hyper

SEQ ID NO: 282336 - DNA, 269 bp, Homo sapiens
  chr4:93225440-93225709
  hyper
tgggaccggagacccgcggcccccgcgcagcgatgggtctgatctgagccccagcctctccccctgcccaagagcagtagaggctggatatatttttcaaaagccaaactgcaaacaactctggcgatgccaaaattcccctccaagtgacacggctttgcgaaggaggtttcctcaggctgggctctttctgtcattcccttctgcctttctcggcgacgataaaaggctttgctctggcaataggaatttagaaaaaaagaaaaagc

SEQ ID NO: 282337 - DNA, 236 bp, Homo sapiens
  chr4:93225739-93225975
  hyper
tttggactgtttgaaaaaaaaaaaattggaagaaaatccatcctccaagagaatcggcataggaggagatggaagttttcccctttctcttggttttgtccgtctggtggtctcgaacctgggactcggcgaatgcggattcgatcattcacatcggtaagaaagtgttggtgcagctcgtggttacttttaccgtttcagttctcaaatgtttccccttcgctttccccctctcc

SEQ ID NO: 282338 - DNA, 322 bp, Homo sapiens; identical to SEQ ID NO: 230538
  chr4:94748536-94748858
  hyper

SEQ ID NO: 282339 - DNA, 196 bp, Homo sapiens
  chr4:94749529-94749725
  hyper
gcggtcgtgcacatctgacccgagtcagcttgggcaccagccgagagccggctccgcaccgctcccgcaccccagccgccggggtggtgacacacaccggagtcgaattacagccctgcaattaacatatgaatctgacgaatttaaaagaaggaaaaaaaaaaaaaaacctgagcaggcttgggagtcctctgca

SEQ ID NO: 282340 - DNA, 276 bp, Homo sapiens
  chr4:94749755-94750031
  hyper
ctttgattggctgctcgcacgcgcctgcccgcgccctccattggctgagaagacacgcgaccggcgcgaggagggggttgggagaggagcggggggagactgagtggcgcgtgccgctttttaaaggggcgcagcgccttcagcaaccggagaagcatagttgcacgcgacctggtgtgtgatctccgagtgggtgggggagggtcgaggagggaaaaaaaaataagacgttgcagaagagacccggaaagggccttttttttggttgagctggtg

SEQ ID NO: 282341 - DNA, 279 bp, Homo sapiens
  chr4:94750277-94750556
  hyper
cactttgcagggcatctgcacggcacgcgccgcccagtatttgctacattccccggagctgggtgcctcagaggccgctgcgccccgggacgaggtggacggccggggggagctggtaaggaggagcagcggcggtgccagcagcagcaagagccccgggccggtgaaagtgcgggaacagctgtgcaagctgaaaggcggggtggtggtagacgagctgggctgcagccgccaacgggccccttccagcaaacaggtgaatggggtgcagaagcagag

SEQ ID NO: 282342 - DNA, 67 bp, Homo sapiens
  chr4:94753212-94753279
  hyper
gcaccttgaaaagagaaaagcgccaaaaagaaaaggaaagcgccacaaactgggtttgcagaaagag

SEQ ID NO: 282343 - DNA, 54 bp, Homo sapiens; identical to SEQ ID NO: 199501
  chr4:94753547-94753601
  hyper

SEQ ID NO: 282344 - DNA, 71 bp, Homo sapiens; identical to SEQ ID NO: 230541
  chr4:95372822-95372893
  hyper

SEQ ID NO: 282345 - DNA, 130 bp, Homo sapiens; identical to SEQ ID NO: 230542
  chr4:95373288-95373418
  hyper

SEQ ID NO: 282346 - DNA, 233 bp, Homo sapiens; identical to SEQ ID NO: 222444
  chr4:95373794-95374027
  hyper

SEQ ID NO: 282347 - DNA, 60 bp, Homo sapiens; identical to SEQ ID NO: 199502
  chr4:95678999-95679059
  hyper

SEQ ID NO: 282348 - DNA, 314 bp, Homo sapiens
  chr4:95679325-95679639
  hyper
gacgggtagcggctgggtgcggagctgggcggcggtcgccctaggcaggacggagcgcgcgagggagagggcgagagcgagggcgggctgcgcggccgtggggcggtggcggcggcggggagggggtcaggcggtggccgcctcggctttgtgcgcgggcggctctgccgggaccccgaggcctcgtgcctgcgcaggcgaggagtcggggcagcggcggcggcgggcgggacacgtgcttcgggctgtagggacgccccaaggcagggagtcggacctgcgagcggagggatggggcgggagggcgagctgag

SEQ ID NO: 282349 - DNA, 78 bp, Homo sapiens
  chr4:95679745-95679823
  hyper
acccagccttgccgtgggggaaagtgcgcagcgggctggtcccggcgccttggactgggctccgtctctgcttcagtt

SEQ ID NO: 282350 - DNA, 221 bp, Homo sapiens; identical to SEQ ID NO: 199503
  chr4:96469413-96469634
  hyper

SEQ ID NO: 282351 - DNA, 133 bp, Homo sapiens; identical to SEQ ID NO: 199504
  chr4:96469635-96469768
  hyper

SEQ ID NO: 282352 - DNA, 429 bp, Homo sapiens; identical to SEQ ID NO: 199505
  chr4:96470264-96470693
  hyper

SEQ ID NO: 282353 - DNA, 46 bp, Homo sapiens; identical to SEQ ID NO: 199506
  chr4:96471192-96471238
  hyper

SEQ ID NO: 282354 - DNA, 66 bp, Homo sapiens; identical to SEQ ID NO: 230545
  chr4:99850237-99850303
  hyper

SEQ ID NO: 282355 - DNA, 76 bp, Homo sapiens; identical to SEQ ID NO: 199507
  chr4:99850526-99850602
  hyper

SEQ ID NO: 282356 - DNA, 164 bp, Homo sapiens; identical to SEQ ID NO: 230547
  chr4:99916362-99916526
  hyper

SEQ ID NO: 282357 - DNA, 235 bp, Homo sapiens; identical to SEQ ID NO: 230548
  chr4:100009991-100010226
  hyper

SEQ ID NO: 282358 - DNA, 49 bp, Homo sapiens; identical to SEQ ID NO: 230549
  chr4:100484871-100484920
  hyper

SEQ ID NO: 282359 - DNA, 55 bp, Homo sapiens; identical to SEQ ID NO: 230550
  chr4:100485194-100485249
  hyper

SEQ ID NO: 282360 - DNA, 154 bp, Homo sapiens; identical to SEQ ID NO: 199508
  chr4:100729523-100729677
  hyper

SEQ ID NO: 282361 - DNA, 257 bp, Homo sapiens; identical to SEQ ID NO: 110403
  chr4:100867945-100868202
  hyper

SEQ ID NO: 282362 - DNA, 31 bp, Homo sapiens; identical to SEQ ID NO: 230553
  chr4:100871520-100871551
  hyper

SEQ ID NO: 282363 - DNA, 119 bp, Homo sapiens; identical to SEQ ID NO: 199510
  chr4:101111126-101111245
  hyper

SEQ ID NO: 282364 - DNA, 216 bp, Homo sapiens; identical to SEQ ID NO: 199511
  chr4:101111971-101112187
  hyper

SEQ ID NO: 282365 - DNA, 80 bp, Homo sapiens; identical to SEQ ID NO: 199512
  chr4:102269360-102269440
  hyper

SEQ ID NO: 282366 - DNA, 251 bp, Homo sapiens; identical to SEQ ID NO: 230556
  chr4:102269669-102269920
  hyper

SEQ ID NO: 282367 - DNA, 91 bp, Homo sapiens; identical to SEQ ID NO: 199513
  chr4:102711787-102711878
  hyper

SEQ ID NO: 282368 - DNA, 407 bp, Homo sapiens; identical to SEQ ID NO: 230558
  chr4:103266029-103266436
  hyper

SEQ ID NO: 282369 - DNA, 220 bp, Homo sapiens; identical to SEQ ID NO: 222446
  chr4:103266878-103267098
  hyper

SEQ ID NO: 282370 - DNA, 79 bp, Homo sapiens; identical to SEQ ID NO: 230559
  chr4:103422182-103422261
  hyper

SEQ ID NO: 282371 - DNA, 381 bp, Homo sapiens; identical to SEQ ID NO: 230560
  chr4:103681575-103681956
  hyper

SEQ ID NO: 282372 - DNA, 109 bp, Homo sapiens; identical to SEQ ID NO: 230561
  chr4:103682320-103682429
  hyper

SEQ ID NO: 282373 - DNA, 406 bp, Homo sapiens; identical to SEQ ID NO: 230562
  chr4:103748279-103748685
  hyper

SEQ ID NO: 282374 - DNA, 138 bp, Homo sapiens; identical to SEQ ID NO: 230563
  chr4:103749252-103749390
  hyper

SEQ ID NO: 282375 - DNA, 712 bp, Homo sapiens
  chr4:103997159-103997871
  hyper
aaagcaagcaagaaaacccacgccaacaccttacaacagtaaacagacacgcgcccgtcaccgggtgtacaaacagaaaaggctgggcccctcgctcgcgtctccggtccagcaggcctacagggtacccgccgctggcgctgggtttatttttacccttagtgtctctggggcctctcacctggcagtctccggcgaagtcgaccaggctccgtctgaacgattaggaaaggggctgtgggggaggcggcggagcccggtctagccaccgcgctctggggttcccgattcgcgcatcttcccaggctgagccgggaggctgcgttgactgcagataaacggtctcagggcgcggcaccgcgtgtagtcggccccgcctttcgcacgaacccgctgggcgacaccgcgcagggaggtccgacccgtcggcgccggtacaggctccggagtaagcatgggttggtccggggcccgcagcggcagccccgtgtgccctccgccgggtttcaggtccggcggcgcgggtgcagagccgcgtgcgatgcctggtgcgcgtggcttcccccggaaaggtggcgccaggccgaccatgggcccacgtcccggggcctcggagcggcaccgcgcggtctttcagctgcttatcctccctgggcgggtccgcaggcttctggggccaggaccagcgagctcccgggaaagcttcccggaa

SEQ ID NO: 282376 - DNA, 103 bp, Homo sapiens; identical to SEQ ID NO: 199515
  chr4:104020935-104021038
  hyper

SEQ ID NO: 282377 - DNA, 203 bp, Homo sapiens; identical to SEQ ID NO: 230565
  chr4:105412285-105412488
  hyper

SEQ ID NO: 282378 - DNA, 61 bp, Homo sapiens; identical to SEQ ID NO: 230566
  chr4:105412786-105412847
  hyper

SEQ ID NO: 282379 - DNA, 42 bp, Homo sapiens; identical to SEQ ID NO: 199516
  chr4:106067031-106067073
  hyper

SEQ ID NO: 282380 - DNA, 281 bp, Homo sapiens; identical to SEQ ID NO: 199517
  chr4:106067220-106067501
  hyper

SEQ ID NO: 282381 - DNA, 295 bp, Homo sapiens; identical to SEQ ID NO: 199518
  chr4:106067841-106068136
  hyper

SEQ ID NO: 282382 - DNA, 277 bp, Homo sapiens; identical to SEQ ID NO: 199519
  chr4:106068588-106068865
  hyper

SEQ ID NO: 282383 - DNA, 146 bp, Homo sapiens; identical to SEQ ID NO: 199520
  chr4:106111516-106111662
  hyper

SEQ ID NO: 282384 - DNA, 4461 bp, Homo sapiens; identical to SEQ ID NO: 199521
  chr4:106155053-106159514
  hyper

SEQ ID NO: 282385 - DNA, 240 bp, Homo sapiens; identical to SEQ ID NO: 199522
  chr4:106159634-106159874
  hyper

SEQ ID NO: 282386 - DNA, 180 bp, Homo sapiens; identical to SEQ ID NO: 199523
  chr4:106160114-106160294
  hyper

SEQ ID NO: 282387 - DNA, 120 bp, Homo sapiens; identical to SEQ ID NO: 199524
  chr4:106161134-106161254
  hyper

SEQ ID NO: 282388 - DNA, 2721 bp, Homo sapiens; identical to SEQ ID NO: 199525
  chr4:106161374-106164095
  hyper

SEQ ID NO: 282389 - DNA, 230 bp, Homo sapiens; identical to SEQ ID NO: 199526
  chr4:106164712-106164942
  hyper

SEQ ID NO: 282390 - DNA, 177 bp, Homo sapiens; identical to SEQ ID NO: 199527
  chr4:106180762-106180939
  hyper

SEQ ID NO: 282391 - DNA, 107 bp, Homo sapiens; identical to SEQ ID NO: 199528
  chr4:106182911-106183018
  hyper

SEQ ID NO: 282392 - DNA, 161 bp, Homo sapiens; identical to SEQ ID NO: 199529
  chr4:106190752-106190913
  hyper

SEQ ID NO: 282393 - DNA, 376 bp, Homo sapiens; identical to SEQ ID NO: 199530
  chr4:106193708-106194084
  hyper

SEQ ID NO: 282394 - DNA, 3101 bp, Homo sapiens; identical to SEQ ID NO: 199531
  chr4:106196198-106199299
  hyper

SEQ ID NO: 282395 - DNA, 1601 bp, Homo sapiens; identical to SEQ ID NO: 199532
  chr4:106199359-106200960
  hyper

SEQ ID NO: 282396 - DNA, 475 bp, Homo sapiens; identical to SEQ ID NO: 230570
  chr4:106629648-106630123
  hyper

SEQ ID NO: 282397 - DNA, 181 bp, Homo sapiens; identical to SEQ ID NO: 199534
  chr4:106816201-106816382
  hyper

SEQ ID NO: 282398 - DNA, 329 bp, Homo sapiens
  chr4:106816425-106816754
  hyper
cgcccctgcccccgagttgcctgccccgctgggcccccgggaggagcggagcgcgctcacccttcgcccggggctgggagggcggcgagtcgggcgcacgcgcaccccctgcccgcccctggcgcccctccccgcgggcggtgcagctacccctgcagcgcctcccctagctagaagggagcgggagggggctccgggcgccgcgcagcagacctgctccggccgcgcgcctcgccgctgtcctccgggagcggcagcagtagcccgggcggcgagggctgggggttcctcgagactctcagaggggcgcctcccatcggcgcccacca

SEQ ID NO: 282399 - DNA, 1102 bp, Homo sapiens
  chr4:106816801-106817903
  hyper
tgcccaacatggattttctcctggcgctggtgctggtatcctcgctctacctgcaggcggccgccgagttcgacgggaggtgagctgggccccggggcgccctctcctccttcccgcgctaatttcacactcactgtcttgggtcacttttccccgcggggtttcgtggtcagagaggcgtctcctccatccagaagttgggccaccgcacagcgtggcgcgaggagagcggtccagcggctccgagtgcccgcccgaggcggagagggcgcgcccttgcgagtctgggaccccatccgcggccccccgagggcgactcgccccggctcgggaattaggactgagggagaggagccgctggagcctgggatctcggctctgagggcgcggtttagccacctacgccgaggtgacgcgcgaaacatcccttacccgggaaactcccgcgcctgaactagacggctcttcactggggaagcttccaggcccccggggggaggcccgggctctgctcagggctctcggggccgctcacacagagagtgggtgcgagtcagcgactgggctacgggggagatttgtgggcctctccatttggttttcttgagggaaggagactcaaaatgaggaccggagggtgggcgctccgtgaatgtgagcatgagtgtgtggatgtgtgtgtgagagcgcacacactgcgccgctcctcagactcgggcgagcctgacggcggcgtgctgtgacaggttccaacaacctcgggccgcgtctccgctgtcactcagccggtcctcccgcgctccggggccgctccggtgtgtgagagacactgggtctgtcgggagggtgtgctcggtccccctcacctctgtgcaattacagactaggctcgtcccgggtgcagatggctgctgcgaaaagaggttttactctggcgcacaccgtcgcccggtcgccttccttcagcgacctctgcccccacccctccgtgtaggtccctgcctagtcctaaagaaagatgccgcacctgttttacctttaatcttggaacgaatcaattccacaattgattcgctttcttgtacccggaggcgaacggagg

SEQ ID NO: 282400 - DNA, 334 bp, Homo sapiens; identical to SEQ ID NO: 230572
  chr4:107237672-107238006
  hyper

SEQ ID NO: 282401 - DNA, 148 bp, Homo sapiens
  chr4:108745572-108745720
  hyper
accctctgaatcaacgctggcgctcccaagcccactcacacgccgtcaggaagcagtttccgaaacaggccgggtgcgggggtgggggatcccgttccagccccacccctgaaagttgctgggagtggcacccaaagaactttcccag

SEQ ID NO: 282402 - DNA, 264 bp, Homo sapiens; identical to SEQ ID NO: 199537
  chr4:108745750-108746014
  hyper

SEQ ID NO: 282403 - DNA, 320 bp, Homo sapiens; identical to SEQ ID NO: 199538
  chr4:108746071-108746391
  hyper

SEQ ID NO: 282404 - DNA, 191 bp, Homo sapiens; identical to SEQ ID NO: 199539
  chr4:108746519-108746710
  hyper

SEQ ID NO: 282405 - DNA, 231 bp, Homo sapiens
  chr4:108852945-108853176
  hyper
ctggctgcggaggcgccgggcgcggggcatcccgcccgggcccacgccctggcctctggtgggcaacttcggtcacgtgctgctgcctcccttcctccggcggcggagctggctgagcagcaggaccagggccgcagggattgatccctcggtcataggcccgcaggtgctcctggctcacctagcccgcgtgtacggcagcatcttcagcttctttatcggccactacct

SEQ ID NO: 282406 - DNA, 107 bp, Homo sapiens
  chr4:108853287-108853394
  hyper
gggtgagcgggaggtcgtgggctgtgggtacgcggatgccgcggatgagtctccaggtgcgtgggggctgcagttcctgtgccccttccggccgcccgcgcccccag

SEQ ID NO: 282407 - DNA, 203 bp, Homo sapiens; identical to SEQ ID NO: 199540
  chr4:108911333-108911536
  hyper

SEQ ID NO: 282408 - DNA, 206 bp, Homo sapiens
  chr4:109088463-109088669
  hyper
gatccatttggaataagttaccctgcccctctacctcccatcctacacacacacacacacacacacacacacacacacacacacacactgcggaccgggggcccagctacgcacacaccccaaaacaaacgagggatctactcgggaccctcagccgggcggccgggcgccttcgttcccttcctccctctctgagtttcccaggg

SEQ ID NO: 282409 - DNA, 709 bp, Homo sapiens
  chr4:109089314-109090023
  hyper
ctggagggagcacgcctccccaaagtgcagaggagggtccggcggcgcgtctccgcggaaaccctctccactgtagttaccccggatgccgacttagtagtttgttttccgagaaaagagaggggatctgggcagaagggccccgtttgccccaaaagaaggtgcaaggatcagaagataacgaaacgtccacttcctgaagggtgggaaaaaaagaaaaagaaaaaggagccacccacgctggagatgtccgttttagatcttcttattttcttccctttcgcttcggtttttcttctcgaggctcatttaatctgctagagaaggaggaggagcagaagatgggggccgaggaggaggggaagagaaagagaagtttgccaagaataaagtttttgccggcaagcgcggggactccgcagtggagggcactgcggagtctcggggagtcacagcgggggcctcgggcccaaatgcctctgcccggagctcgagccgacacacacactcagtccgacccctctttgttcccggctcgagtttctcagcctggctcgccggctcgccgctctgcacgcctccgccggccagctctgtcaaagcaaagagctgcgccccttgagttcgcccggccgaggggaggggacgccccgagcttggccgcgtgcgaggctccgggcgcgtcctggttcctcggcccgagagcgcg

SEQ ID NO: 282410 - DNA, 416 bp, Homo sapiens; identical to SEQ ID NO: 199541
  chr4:109092685-109093101
  hyper

SEQ ID NO: 282411 - DNA, 246 bp, Homo sapiens
  chr4:109094283-109094529
  hyper
cctcctttctgaaaaacttttctcaggcgcctgaacttggcatggggaccggcctcgaaaagccggcgggtagcacggccgcggtatccaacccttcgccctccttcccaccggccctccgcgtccctcggcccgccccccgggtcggggacgcgcgcggaaaggccgctcgcgcgctcgagccgtgccttatatcggctgagggaggcgcctgcgcacggccccgcgcggcggcgcggcctttga

SEQ ID NO: 282412 - DNA, 236 bp, Homo sapiens; identical to SEQ ID NO: 230581
  chr4:109541581-109541817
  hyper

SEQ ID NO: 282413 - DNA, 78 bp, Homo sapiens; identical to SEQ ID NO: 199544
  chr4:109571439-109571517
  hyper

SEQ ID NO: 282414 - DNA, 250 bp, Homo sapiens; identical to SEQ ID NO: 199545
  chr4:109684115-109684365
  hyper

SEQ ID NO: 282415 - DNA, 142 bp, Homo sapiens; identical to SEQ ID NO: 199546
  chr4:110343714-110343856
  hyper

SEQ ID NO: 282416 - DNA, 529 bp, Homo sapiens; identical to SEQ ID NO: 199547
  chr4:110481809-110482338
  hyper

SEQ ID NO: 282417 - DNA, 211 bp, Homo sapiens; identical to SEQ ID NO: 199548
  chr4:110651657-110651868
  hyper

SEQ ID NO: 282418 - DNA, 381 bp, Homo sapiens; identical to SEQ ID NO: 230587
  chr4:110736301-110736682
  hyper

SEQ ID NO: 282419 - DNA, 440 bp, Homo sapiens
  chr4:111117165-111117605
  hyper
tcattttcagtcccacgagggctgagacctgtctggctcagtactgagtgaatggagagaagaggcgggaaatggtacctgaagcaggcctaggaagtggcctcagagaaaaagcaacaagtaaataagaggcagtatcgactgcagtgggctaggaatggcgggcgtacagtgaatggggtcagccagcaaagcgagggaaagcggactccggaagagcaggttaaaccaggacgcagcaagtcagagattcggcacagaagcaaatgctgaccacactgaccacacaggctaatgcgggaggactgtgggcccgaacaggccggctggaggatatgacaaacatgtgcggagaagacccgggcccggggctagccagcagcgcggttccggcgcccgccggctccggccaccgccccctccccgcctccagcaccacc

SEQ ID NO: 282420 - DNA, 522 bp, Homo sapiens
  chr4:111119712-111120234
  hyper
ctcctcctcccggcgtccgcatccaccgtaggaggaaatgaatgccttgcggtcttagtgcccgcacgtttgtccatcaccctttttactcgtctacagggaaatctcctccccctcgtgcgatttgagaaattaacccttggcgagggagtgtgcgaaagagcgcgacctctctccgcccgggggggacagttttgtttacagcgaaggtggttggaagagtgggggaagggcgcagagagaaaggaagtggcctggaggtcatccagatcccctaagcccaacctcgtgggccgccttgctttgaatgaagtttcagcttgcagggcgcatccccgcggcgcgtggacccgagagcttggcgagtaaacgattgggaaatagtaaaacctgccagctctcttgcaagagaactccgggcaaatctacgttgagatcaccagtgaagggaatacgcttcccacctcctcgccctacctctgggaccacccccacccctacccccacccccacccgggagct

SEQ ID NO: 282421 - DNA, 163 bp, Homo sapiens; identical to SEQ ID NO: 199550
  chr4:111537244-111537407
  hyper

SEQ ID NO: 282422 - DNA, 94 bp, Homo sapiens; identical to SEQ ID NO: 199551
  chr4:111537497-111537591
  hyper

SEQ ID NO: 282423 - DNA, 99 bp, Homo sapiens
  chr4:111539229-111539328
  hyper
ggagttgccccatccggcaaggtcctaggatcccggcgctgtgggtgcggctcacacgggccggtccactgcatactggcaagcactcaggttggaggc

SEQ ID NO: 282424 - DNA, 214 bp, Homo sapiens
  chr4:111539595-111539809
  hyper
tggggaaaacatgctctgtgatgacagggggttgacgttcatagagttgaagaaggggaagctcttggtggatagggaggcggatgtaaggcccttggcggcccagttgttgtaggaatagcctgggtacatgtcgtcgtagggctgcatgagcccattgaactgcggcccgaagccattcttgcatagctcggcctgctggttgcgctccctc

SEQ ID NO: 282425 - DNA, 327 bp, Homo sapiens; identical to SEQ ID NO: 110508
  chr4:111540782-111541109
  hyper

SEQ ID NO: 282426 - DNA, 51 bp, Homo sapiens; identical to SEQ ID NO: 199552
  chr4:111542042-111542093
  hyper

SEQ ID NO: 282427 - DNA, 52 bp, Homo sapiens; identical to SEQ ID NO: 199553
  chr4:111542757-111542809
  hyper

SEQ ID NO: 282428 - DNA, 232 bp, Homo sapiens; identical to SEQ ID NO: 199554
  chr4:111543735-111543967
  hyper

SEQ ID NO: 282429 - DNA, 444 bp, Homo sapiens
  chr4:111551628-111552072
  hyper
taatggcattaaacgtgtttaggcagcaatttttcttttcggtcaaaaagtagaaaaagacatattgagtgtaggggaagagcctttcacgtgcactaaaacaatgcgggcctgaaagtaatggttaagaaagcaatcattcattatttctagttctttatgtgctagttatcaaaagcgaacgaccaggggcgcctgcgcggcttgtgactggcgcaagcagaactcctctgctcttagccgtttcctgctcacctacgaggaccccatcctaccgtaggcttctccacctgtcctcagaatgcattccccatgtctaggaaacctggggtagggactgggggaaggagacattttgcgtctctctggctcccagcacaataagaaatgtcagcctcggcttggcgactgcgagcccgccccgcgcgaagcgagattggggag

SEQ ID NO: 282430 - DNA, 141 bp, Homo sapiens
  chr4:111552211-111552352
  hyper
agaagaatttaacacaatctaaatgacagaaatcacgcgacgttatctctgcattgcccccatttaaccccatggggttaatcccggacaagtgagcgtttaactggcccagcagggcgactggcggtgtagtgcagtgtc

SEQ ID NO: 282431 - DNA, 260 bp, Homo sapiens; identical to SEQ ID NO: 199555
  chr4:111554139-111554399
  hyper

SEQ ID NO: 282432 - DNA, 289 bp, Homo sapiens; identical to SEQ ID NO: 199556
  chr4:111554661-111554950
  hyper

SEQ ID NO: 282433 - DNA, 190 bp, Homo sapiens
  chr4:111562152-111562342
  hyper
tgcgttgccgattccggtgttttataatcatttcgaaattagtacttaaccacttgagctaaaagaatatataaatgcctgtattgactcactaatgaattacccaattaaaacgtccgggcaatgctgggcgctggaaagattgttaaatcaagacatattacaggagggatatgaagattagaaaggt

SEQ ID NO: 282434 - DNA, 221 bp, Homo sapiens
  chr4:111562690-111562911
  hyper
aaagctgacatttaatagatatgctaactgagcacttaccttcgtcctgagaataggaataaaaggtagctcttcttaagagaggcggtgcaaaggcacgctataggagttcagaaaaggctggcggcgggaaatctgtagcctgggggctagtcaacatcccctttcatttcaagcacttattgatttgctgttgtcatctttggcgacgcagaaggaca

SEQ ID NO: 282435 - DNA, 156 bp, Homo sapiens; identical to SEQ ID NO: 230607
  chr4:113152695-113152851
  hyper

SEQ ID NO: 282436 - DNA, 174 bp, Homo sapiens; identical to SEQ ID NO: 230608
  chr4:113153417-113153591
  hyper

SEQ ID NO: 282437 - DNA, 102 bp, Homo sapiens; identical to SEQ ID NO: 199557
  chr4:113430517-113430619
  hyper

SEQ ID NO: 282438 - DNA, 366 bp, Homo sapiens; identical to SEQ ID NO: 199558
  chr4:113431158-113431524
  hyper

SEQ ID NO: 282439 - DNA, 61 bp, Homo sapiens
  chr4:113432609-113432670
  hyper
gcaacactgagagtctgtgtctgtcaccggaagaaaatctccacagcgttgtttgaagtgt

SEQ ID NO: 282440 - DNA, 299 bp, Homo sapiens; identical to SEQ ID NO: 199559
  chr4:113435475-113435774
  hyper

SEQ ID NO: 282441 - DNA, 242 bp, Homo sapiens; identical to SEQ ID NO: 199560
  chr4:113436585-113436827
  hyper

SEQ ID NO: 282442 - DNA, 46 bp, Homo sapiens
  chr4:113437315-113437361
  hyper
ttcagtggctgcgtgtctggcacacgactctccttaaaacccctta

SEQ ID NO: 282443 - DNA, 228 bp, Homo sapiens; identical to SEQ ID NO: 199561
  chr4:113438278-113438506
  hyper

SEQ ID NO: 282444 - DNA, 172 bp, Homo sapiens
  chr4:113442552-113442724
  hyper
cctcttctttcccacgaaggaaagaaattaccgtaggagattttgccaatccatgccagctttctgattgttttcttcaggtaaggggaaaagaacagccagcgcgtgaatggagagctgagggcccactagggagagaacctcttccccacccttcggtgcctgcaaaaag

SEQ ID NO: 282445 - DNA, 42 bp, Homo sapiens; identical to SEQ ID NO: 230617
  chr4:113443712-113443754
  hyper

SEQ ID NO: 282446 - DNA, 94 bp, Homo sapiens; identical to SEQ ID NO: 199563
  chr4:113444850-113444944
  hyper

SEQ ID NO: 282447 - DNA, 129 bp, Homo sapiens
  chr4:113445444-113445573
  hyper
caaaacacctcccctagggttctgatagttgccaagtttaagaacaaccggatttaagccccacgggtttcgttttcttttgttttgaggatttagcaaatcagctagaagtgacgccaagacccaata

SEQ ID NO: 282448 - DNA, 218 bp, Homo sapiens; identical to SEQ ID NO: 230620
  chr4:113558091-113558309
  hyper

SEQ ID NO: 282449 - DNA, 286 bp, Homo sapiens; identical to SEQ ID NO: 230621
  chr4:113558540-113558826
  hyper

SEQ ID NO: 282450 - DNA, 105 bp, Homo sapiens
  chr4:113627471-113627576
  hyper
cggggccgacacgagccaacttggctacatcgcccggcccaggaccattctctaaacctcttttctcagtctcacttcacacacagacacacatacagacacaca

SEQ ID NO: 282451 - DNA, 159 bp, Homo sapiens; identical to SEQ ID NO: 230624
  chr4:113739235-113739394
  hyper

SEQ ID NO: 282452 - DNA, 920 bp, Homo sapiens; identical to SEQ ID NO: 230625
  chr4:114682535-114683455
  hyper

SEQ ID NO: 282453 - DNA, 119 bp, Homo sapiens
  chr4:114900467-114900586
  hyper
ctgcgaagtggacgcgtcgcgtctggctctgatcagacagataaactgccgtagtggaccggcctcctgatcaccttctccactttcccagggctattttccccagtcctttcctaggc

SEQ ID NO: 282454 - DNA, 552 bp, Homo sapiens; identical to SEQ ID NO: 199565
  chr4:114900650-114901202
  hyper

SEQ ID NO: 282455 - DNA, 33 bp, Homo sapiens
  chr4:115519422-115519455
  hyper
cgcgacatcaacacgcagagctcactgagccgc

SEQ ID NO: 282456 - DNA, 85 bp, Homo sapiens; identical to SEQ ID NO: 199566
  chr4:115519971-115520056
  hyper

SEQ ID NO: 282457 - DNA, 229 bp, Homo sapiens
  chr4:115520945-115521174
  hyper
tgtgtgttttggatttgaaggaggcaaaccgcatcggagagtgcaagtagatgcagtgcgtcggggcaaaaggacaatctgaggaggtgggcggggtacccaatctctatatacaagctttctggtttaattgagggtttataaaattgagtacggtaaacctgccattgtgcagcacttccttaggaaaggaatagcctctgtacctgtaccgcgagttcccatcacc

SEQ ID NO: 282458 - DNA, 555 bp, Homo sapiens
  chr4:118954450-118955005
  hyper
aggaagggaccgcgcgggtgcgccccacccttccagcgtcgcctcggggactcgcacccctttccctggccgcacaagacgtttcatccttggcggccgccgccaacccgccgggaggggcggtcggaactggcaggccggggcggaacccccggggtctccttgtcgaggcccgggcagccagatcctcagggccggtccgggcgggagcccggtcgatggaggcggctcccgtcctcagctcccgctccctccccttccccggggcgggcgcgcgcgggccgggagctgggaggcggcggctcccgcccgggaggcggtggcgagggcggcggaggcgcggccgggcgggtcccagggccgtggttctccagcgcaggagtccccggcgcacccgctgcgctcgccccgcagccgcagcctgagcggccgaagtcgccaccagctgtgtccgcgcagatcccgggcgcggaggggagaggtcgcccgcttgtcgcccccgccggaccccgggcaccgcgtagcacccaagcgccacccggacgaggggccctg

SEQ ID NO: 282459 - DNA, 88 bp, Homo sapiens
  chr4:118955125-118955213
  hyper
ggaatgcggactccagaggcggcatctcgaccagacaagtttctcgcggcttggaatgagggagtcctgaaaccgacactcgttttat

SEQ ID NO: 282460 - DNA, 304 bp, Homo sapiens; identical to SEQ ID NO: 199569
  chr4:119200550-119200854
  hyper

SEQ ID NO: 282461 - DNA, 109 bp, Homo sapiens; identical to SEQ ID NO: 199570
  chr4:119273335-119273444
  hyper

SEQ ID NO: 282462 - DNA, 222 bp, Homo sapiens; identical to SEQ ID NO: 199571
  chr4:119273515-119273737
  hyper

SEQ ID NO: 282463 - DNA, 201 bp, Homo sapiens; identical to SEQ ID NO: 199572
  chr4:119273903-119274104
  hyper

SEQ ID NO: 282464 - DNA, 252 bp, Homo sapiens
  chr4:119274214-119274466
  hyper
tgccccctgggggcgggcgccggccgcgcaagctgctccggacctacgctcggcccctgccaggcccaccgcagtccgcccgcacggcactgccagctgctgggaccgagcccgagggtgcccgcgcggagcacggtcttggctgccccttgccagcatgcagcaccagcacagcccggcgttggcggctcccaaatctggcaccggcccctgccgtcatctctcctccaacctcgtcgccccgtatcttgc

SEQ ID NO: 282465 - DNA, 50 bp, Homo sapiens; identical to SEQ ID NO: 230634
  chr4:119757206-119757256
  hyper

SEQ ID NO: 282466 - DNA, 221 bp, Homo sapiens; identical to SEQ ID NO: 110565
  chr4:119757549-119757770
  hyper

SEQ ID NO: 282467 - DNA, 155 bp, Homo sapiens; identical to SEQ ID NO: 230636
  chr4:119809910-119810065
  hyper

SEQ ID NO: 282468 - DNA, 250 bp, Homo sapiens; identical to SEQ ID NO: 230637
  chr4:120133569-120133819
  hyper

SEQ ID NO: 282469 - DNA, 36 bp, Homo sapiens; identical to SEQ ID NO: 199575
  chr4:120221341-120221377
  hyper

SEQ ID NO: 282470 - DNA, 50 bp, Homo sapiens; identical to SEQ ID NO: 199576
  chr4:120221611-120221661
  hyper

SEQ ID NO: 282471 - DNA, 333 bp, Homo sapiens; identical to SEQ ID NO: 199577
  chr4:120549978-120550311
  hyper

SEQ ID NO: 282472 - DNA, 635 bp, Homo sapiens; identical to SEQ ID NO: 230641
  chr4:120988004-120988639
  hyper

SEQ ID NO: 282473 - DNA, 37 bp, Homo sapiens; identical to SEQ ID NO: 199578
  chr4:121843110-121843147
  hyper

SEQ ID NO: 282474 - DNA, 260 bp, Homo sapiens; identical to SEQ ID NO: 199579
  chr4:121843304-121843564
  hyper

SEQ ID NO: 282475 - DNA, 276 bp, Homo sapiens; identical to SEQ ID NO: 199580
  chr4:121843731-121844007
  hyper

SEQ ID NO: 282476 - DNA, 171 bp, Homo sapiens
  chr4:121844206-121844377
  hyper
ctgggttttcaaaccttgccccgctgaaccattactccctgtaggggagtctcgcttgcttctcttcagatgcaaaacgaaatggaccttcacacagctggggcatcctccaaaacaactttatcaagttcctgactctgaaagccagcttattgccgactactgagaacg

SEQ ID NO: 282477 - DNA, 516 bp, Homo sapiens
  chr4:121992696-121993212
  hyper
tggaaagggaggcaacagccctcttggcaggcgggcaaagtaagtgtccaggctaagtccgggataaaggctccgcggctccccagaccccactgcaccccgagctcccgggtcccaggtcttccccgcccttgcgctgtctgtccacctcctcacatctctccgggccgcccagcttcgaaagcagctaaattaaaaacaaacaaacaaacaaacaacaacaacaataaaaaaaaaaaaacgagggaaacctgctcctgcccctcatgccctcagctcctacggatagggcgcccttgagaagcttcttgggccttgaagatttgggggcgcgtgcctcgagcccccatctcggatgacccttcgggcgtgaacgctccttgtgctaggtctcagggtggcgggctaaggcgtcgggtctctggggcattgctttcctctccccacttaccttaaaaagatctgtttttcgtagggaaaatagaaaaaaatccctccccgtggtgtggtgtgcga

SEQ ID NO: 282478 - DNA, 259 bp, Homo sapiens; identical to SEQ ID NO: 199583
  chr4:121993736-121993995
  hyper

SEQ ID NO: 282479 - DNA, 50 bp, Homo sapiens
  chr4:121994354-121994404
  hyper
ttgaaactcagcagctgttttaacaattgaaaaagcggccctacaggacc

SEQ ID NO: 282480 - DNA, 39 bp, Homo sapiens
  chr4:122685768-122685807
  hyper
gcgaattctcttttcgccatctctcccagccctggaaca

SEQ ID NO: 282481 - DNA, 52 bp, Homo sapiens; identical to SEQ ID NO: 230648
  chr4:122722576-122722628
  hyper

SEQ ID NO: 282482 - DNA, 330 bp, Homo sapiens; identical to SEQ ID NO: 230649
  chr4:122744981-122745311
  hyper

SEQ ID NO: 282483 - DNA, 524 bp, Homo sapiens; identical to SEQ ID NO: 230650
  chr4:122791300-122791824
  hyper

SEQ ID NO: 282484 - DNA, 178 bp, Homo sapiens; identical to SEQ ID NO: 199585
  chr4:123653964-123654142
  hyper

SEQ ID NO: 282485 - DNA, 69 bp, Homo sapiens
  chr4:123747656-123747725
  hyper
gtggtttgggtggtgcgggggttgggcgggggtgacttttgggggataaggggcggtggagcccaggga

SEQ ID NO: 282486 - DNA, 227 bp, Homo sapiens
  chr4:123748993-123749220
  hyper
actactctcacccactctgttttatatttttccgaattgacgaaagctgaaagagcaaaaacaaaaaccaaccagccaaccagcaaaaaatccagatgttgttaataaagtgccatagctttgtttcagtagtgaaaagaagtgcaaacactttaatcttccacctgcagtgactagctttgagaccttgagccgacgcttaaccccagagccggtttcctcatcgc

SEQ ID NO: 282487 - DNA, 657 bp, Homo sapiens; identical to SEQ ID NO: 230657
  chr4:123843158-123843815
  hyper

SEQ ID NO: 282488 - DNA, 178 bp, Homo sapiens; identical to SEQ ID NO: 230658
  chr4:123844085-123844263
  hyper

SEQ ID NO: 282489 - DNA, 1571 bp, Homo sapiens; identical to SEQ ID NO: 199587
  chr4:124317731-124319302
  hyper

SEQ ID NO: 282490 - DNA, 338 bp, Homo sapiens; identical to SEQ ID NO: 230661
  chr4:124319560-124319898
  hyper

SEQ ID NO: 282491 - DNA, 209 bp, Homo sapiens
  chr4:124426861-124427070
  hyper
tcaaggcccggcgaggcccgggggttgagaagttaaggagcgggaggtggtgcgccggggccgcggccgcgccatttgcatttcaatgcgacccgcttgttgactcagtgcccggcgcttccgcagctcccaccagaatctgcctttgttggttttagctccggtcaagtccacttcttgcatcgggggagccgcgcgcattgagtttg

SEQ ID NO: 282492 - DNA, 79 bp, Homo sapiens
  chr4:124427137-124427216
  hyper
caaccgggcttaagcagccgagtgactatttaatctataaggtgcacttgaatccctcgcaaatcctctcagtgtggag

SEQ ID NO: 282493 - DNA, 196 bp, Homo sapiens; identical to SEQ ID NO: 199588
  chr4:124778304-124778500
  hyper

SEQ ID NO: 282494 - DNA, 620 bp, Homo sapiens
  chr4:125633097-125633717
  hyper
agagtagagtgcttcggtgctggtgggtgtctgcccacaggtccggcctccagtttcagctgacagacaaaaggaactccgggattcccagcgccgggcaccaccttgggttggaaccgcccagaggagccacaggggagccacctcagagaggccacgagcgaaggtgcagcctccacaccgaggtctgcccttccagaggctgggagcgcctctgcaccccgccccgcaccgagattggggtgtgtcttttgaagggggagggggtgactgaggtccttgccaatcccagacgaggggtcgcctcccggtcggcttccgcctctgcgctcccgccccatgccccgctcccgctcccacccggccgacggcggtgcgagggaagagggcaaatctggggctcgaggccggagagggtgggtggttgggtcaggtccaagccacggcctcggcctcccagcttccaacccgagggaggggcctcgcttccaccgccgccgccgccccccggttacctcggccccagccgccgccgtggccgccgctgccgctgttagggactctcagtctcagacacttgcttcgctgagaagtcgctgccagcagcgctcccaagactc

SEQ ID NO: 282495 - DNA, 283 bp, Homo sapiens
  chr4:125633784-125634067
  hyper
gcccccggcggctgccagttccagctttcccagcagaatcggtcgtgctcgccccagcccccaccggccaaccgccgccgccgccgccgtcagggcagtaactgtctcaggcagcccccggccggccggctccgccccgcccgcccagcccagaccccgcccccgcccccgcccccgccccgccgctcggcctttctttgcccgccggctccgcctccgcgtccttcccctcccccaccgcgctctcccgcagcatcccgtgcctgggcgtgtgcggccgcct

SEQ ID NO: 282496 - DNA, 242 bp, Homo sapiens
  chr4:126236000-126236242
  hyper
gcgctcgcggtaggagtgccggtcggggctgcttcagctccggcccaatggggctggggcgagggaggggcagaaggtgacaggactgggagctagggggagtccaggcgaactaaagtgcggggatcaatgagtgtcgagcaaagtttctgagtgctgctccagctcgcggtcttccctccccctctgtttgtgtttcggcgacgcgctgtgtgtgtgtgtgtgcgtgtgtatgtgtgtgt

SEQ ID NO: 282497 - DNA, 250 bp, Homo sapiens
  chr4:126237060-126237310
  hyper
cccaccaccccttccccggtgcgcagttgtgcttggacgtttgttcctccctcttcacgttcttcgctgcgggtaagttctaaagtttctgaagaccgttctttgcaatgattcctcatataccttagatacaggcaacttctcccaactctcatccacccgggtgaaaacgctcagactatctggattcaaaaacaaagtaaaagggggcatatataagaggcttgagaaacttttctgggaactcagc

SEQ ID NO: 282498 - DNA, 43 bp, Homo sapiens; identical to SEQ ID NO: 199592
  chr4:126237611-126237654
  hyper

SEQ ID NO: 282499 - DNA, 118 bp, Homo sapiens
  chr4:126238436-126238554
  hyper
gacgaggggacccccttccaaatggaccctgagacgggacttatcacggtgcgggagcccctggacttcgaagctcggcgccaatactcgcttacggtgcaggcgatggacagaggcg

SEQ ID NO: 282500 - DNA, 242 bp, Homo sapiens
  chr4:128544404-128544646
  hyper
cgccttcagcccttggcttccgcgcgtcggaggctggcacctccaggttcaccgcggcggccggagctgtgcgggggccagacggttcggcgggagccggggctgggacctgggtgacctgtcgtccgcccctgtagcgagtctccagtgggcatgtttcaggtgggcaggtccagcatccccaaacctgccccccgcagcctggaggacctggactcagtgcagcgtgtcctgttacacag

SEQ ID NO: 282501 - DNA, 57 bp, Homo sapiens
  chr4:128544806-128544863
  hyper
cccaccctttccagaatcgggtgccagcgatccaccctgtcccgctgccgagactgg

SEQ ID NO: 282502 - DNA, 45 bp, Homo sapiens; identical to SEQ ID NO: 199593
  chr4:128554021-128554066
  hyper

SEQ ID NO: 282503 - DNA, 137 bp, Homo sapiens; identical to SEQ ID NO: 199594
  chr4:128703235-128703372
  hyper

SEQ ID NO: 282504 - DNA, 245 bp, Homo sapiens; identical to SEQ ID NO: 230668
  chr4:128801996-128802241
  hyper

SEQ ID NO: 282505 - DNA, 385 bp, Homo sapiens; identical to SEQ ID NO: 110609
  chr4:128886040-128886425
  hyper

SEQ ID NO: 282506 - DNA, 130 bp, Homo sapiens; identical to SEQ ID NO: 199595
  chr4:128887030-128887160
  hyper

SEQ ID NO: 282507 - DNA, 159 bp, Homo sapiens; identical to SEQ ID NO: 230671
  chr4:129210004-129210163
  hyper

SEQ ID NO: 282508 - DNA, 316 bp, Homo sapiens; identical to SEQ ID NO: 230672
  chr4:130014786-130015102
  hyper

SEQ ID NO: 282509 - DNA, 144 bp, Homo sapiens; identical to SEQ ID NO: 230673
  chr4:134067330-134067474
  hyper

SEQ ID NO: 282510 - DNA, 57 bp, Homo sapiens; identical to SEQ ID NO: 199597
  chr4:134067733-134067790
  hyper

SEQ ID NO: 282511 - DNA, 147 bp, Homo sapiens
  chr4:134069142-134069289
  hyper
aactagctatgtggatgtgccgcgttgcccctgcgcctccggaaggggcactcacagctggtcaagcgcgtccttcggaactcggggaggctccgttggggcttacacagagctaagccctgggccagggaggatggatgcaagtac

SEQ ID NO: 282512 - DNA, 297 bp, Homo sapiens; identical to SEQ ID NO: 199598
  chr4:134069896-134070193
  hyper

SEQ ID NO: 282513 - DNA, 158 bp, Homo sapiens
  chr4:134070455-134070613
  hyper
gccagcccagaccacaggctcagaggctgaagcaggaggaaggaaggactggaaggaaaaagagacaggttagagggaaagaggcttgggaagaaaacagcagaaaagaaactgctcattacacttacagagaggcaagtaacggtggagatgaggac

SEQ ID NO: 282514 - DNA, 157 bp, Homo sapiens
  chr4:134073705-134073862
  hyper
tagaggagtccgggggctttggctcccaccaccacaaccagaattactgctatcaggtatgcctgacccctgagtccgccaagaccgacctgatgtttcttaagccctgcagcccttcgcggagtacggacactgagcacaacccctgcggggccat

SEQ ID NO: 282515 - DNA, 111 bp, Homo sapiens
  chr4:134073919-134074030
  hyper
caacgaggtaaggctgaagcgaaaggaccaccatctctcatctcctccatcagaaagcctcctctagcccggcccttgtatctctggtgcactgtatctatttttaggata

SEQ ID NO: 282516 - DNA, 130 bp, Homo sapiens; identical to SEQ ID NO: 230678
  chr4:134074354-134074484
  hyper

SEQ ID NO: 282517 - DNA, 95 bp, Homo sapiens; identical to SEQ ID NO: 230679
  chr4:139773302-139773397
  hyper

SEQ ID NO: 282518 - DNA, 92 bp, Homo sapiens; identical to SEQ ID NO: 230680
  chr4:140005146-140005238
  hyper

SEQ ID NO: 282519 - DNA, 44 bp, Homo sapiens; identical to SEQ ID NO: 230681
  chr4:140005729-140005773
  hyper

SEQ ID NO: 282520 - DNA, 102 bp, Homo sapiens; identical to SEQ ID NO: 199600
  chr4:140097254-140097356
  hyper

SEQ ID NO: 282521 - DNA, 186 bp, Homo sapiens; identical to SEQ ID NO: 230682
  chr4:140187863-140188049
  hyper

SEQ ID NO: 282522 - DNA, 403 bp, Homo sapiens; identical to SEQ ID NO: 230684
  chr4:140222258-140222661
  hyper

SEQ ID NO: 282523 - DNA, 251 bp, Homo sapiens
  chr4:140374762-140375013
  hyper
ctcctctctggggcgaccaaacgatacgtcgatgccggaaccgacccgacgccggagccgtcggctccgtccttaccgttgctctccaggtacacgcccccgtcaaaggcggctctgcggccctctcgcgagagagtgcccgtggtacctccttcctctcagttgtctgtctctccccgcccccggagtgattgcgcggcttcctccagagggcgggaaccttggacgtggcggggctgggtcagtcaggg

SEQ ID NO: 282524 - DNA, 180 bp, Homo sapiens; identical to SEQ ID NO: 222492
  chr4:140587058-140587238
  hyper

SEQ ID NO: 282525 - DNA, 36 bp, Homo sapiens; identical to SEQ ID NO: 230687
  chr4:140969978-140970014
  hyper

SEQ ID NO: 282526 - DNA, 150 bp, Homo sapiens
  chr4:140970239-140970389
  hyper
ggggcagaaagaagcgcatctgctgctctgtgattgcacaagagaagctaccactccttttcttcacaaagaaaaaaaaatggcatttatcgcaagtacagcaaggcatattaggattcacctcccccattctttcttccctcttcctcc

SEQ ID NO: 282527 - DNA, 226 bp, Homo sapiens
  chr4:140970419-140970645
  hyper
ttggaaaagaaaaggtgggagggagaggaggacccaccggtcacagacaacgctgtgggattctctttcttcagcttttaccagcctatgggggtcaggatgctattggttcagctttatgtgtgatatggtgcctctcacttagcaacagcgagcaggagaggcaggaagcaacgccacctggctcagcaagtgtgcggatggtttaaaacgagccactcactca

SEQ ID NO: 282528 - DNA, 1319 bp, Homo sapiens; identical to SEQ ID NO: 199602
  chr4:141071488-141072807
  hyper

SEQ ID NO: 282529 - DNA, 2282 bp, Homo sapiens
  chr4:141073109-141075391
  hyper
agcggggcagggggcgccaagcggagaaagactccgtgcacgcaagtttaaaaggaaaaaaggaaagaatcccaagcgaagttgtgtggtggggcctcttggcgcaaaccctgggtattgctttcccctcccgccccctccaggccgctcccctcttaaccctcccagccgctccacctgccgggctagccccgagtcgcgagcaaagagcggagcgcacccgcgccccgcatccgcgcgcgctcccgcgagcacccccgcgcgcagccaccctcgctcgtttctcacccacttcaaagttcattcacaaaactctcagactttctcagcccaaagggggtgagctggggagaggaggcgagaggctctccttccccgcttcccccctaggggttgagggcctggtgcccgcccagaacctgcgacagcatcaatatttccacgcacccggcggatgtgctgagaggggtgggcgtagggggacgggtctggggaggcgaggcggcgcggctagaggtggggtggggagcggcgaagaggaggagcaaggtttcaactcaggggttcactctttcaaatcggtatcttaagaaagggaaggggggaaacttttccagcacctcactccgacgctcctctaggctccctccgcccctcgcagtcgtgactggcttctcccctctcgccccctcctccccaaatctgacaaccctgacagattaacaggtagcgacgacggcagctttttccctaagaaaagttgacgttaacccttaggcttcagcccacctcacccaccgtgcaaatcagacccttgtacccccatgtaagaagctccacgcgccccccaccaccaccaccacccccaacgcgcgccgcaagcccgctgcccgtgcgccctcaccatgatcagcgtgtggttcctctgctccgccgaggcagcctccgcatcttgctggggtttgctcgggtgctgctgtttgccggtgccggcgcccgatttcttggccctctgctccagggtccgctggtagaggctcacggtgtcccggcgctccagctccagctgctccacctgagcctgctggtacctgttctcgcagttgacgtggtgccgacggcagccctcgatgcgctggcggagccgctccaccacggtgctgtgcttgggaacggccgccgaaccgccgccggggcccccggagccgccgcatccaccggctgccgggtgattgctactcggagcagcgggagtactattgggagtattattcacaccgatcccggccccgccgaggctgctgttcaggctactgttgatgcaaatactactgccattcgcggcagcagcgggggctgcgaaatcccccatcctgctccccgggcacactattttggaagaactttttttatccacccccctatcagcctcctccttgggtccaaggattaaaatagtttaagtggaacgcgggggagacgcaagcacatggatggaaacggcgatcccgacggggcgaaaaaaacggggggggagattttggggtggtttttgtttcctttttttaaactgtaaaagctcaaggggaagaaaaggggggaacgttatcggaataccatcagacacctatcaacaaaaagaatcacaacaaactgagccagcagcaaatcgggttgcaactcaaggggagatccgctccttgcttgccttctttttataatccattattttctaataaattccaggagatttccggtggttggcaagcattttctccctacataccgaaaaacacaccccatgtacacacacaagcatatgcctccagtgcggacacgcgcgacacacactcactccacaccgcatcggaaaacggcaagcttgcttattgcattttccttccacaaaaaagttttggtgtttatgccgccccgtgttctcaaagtactttggctgctcagttgcatttcacaggaacctagatatcgaatcctcgggctgggggaagtaaacacatggacagtccgaggcgactgcaaaagtagatcggtgaagtcctttgcaaaacgccgcgcagagagcagcacctaacgctcggctgggctgccgctgccgccgctgctcctgccaccatcacaatgatcaactgctcgccgccgccgccgccgccgcctcctcctcctcctctcgctcctccacctcctcctcctcctccatgccagcggagtgatatcaggacgcgcgagctcagtaaacacggcagcggcggcggctggaggcc

SEQ ID NO: 282530 - DNA, 61 bp, Homo sapiens; identical to SEQ ID NO: 230691
  chr4:141173821-141173882
  hyper

SEQ ID NO: 282531 - DNA, 372 bp, Homo sapiens; identical to SEQ ID NO: 199606
  chr4:141293944-141294316
  hyper

SEQ ID NO: 282532 - DNA, 103 bp, Homo sapiens; identical to SEQ ID NO: 199607
  chr4:141294418-141294521
  hyper

SEQ ID NO: 282533 - DNA, 88 bp, Homo sapiens; identical to SEQ ID NO: 199608
  chr4:141294545-141294633
  hyper

SEQ ID NO: 282534 - DNA, 54 bp, Homo sapiens; identical to SEQ ID NO: 199609
  chr4:141295287-141295341
  hyper

SEQ ID NO: 282535 - DNA, 224 bp, Homo sapiens
  chr4:141348840-141349064
  hyper
ggcggcccgaggtgtgtgctacgcgctcctgctccgaggggctcaaccgcctccagggggagccgcacatggagcctgtgccgccgccggccggttgtggcctggaccccgctcccgggttagcccaggaggaattccccctgcaagtccgaagacttttcctcctctgagctcccgccctctctgcagaccgtgctacctcctgttgcgcaatgattgggtcc

SEQ ID NO: 282536 - DNA, 121 bp, Homo sapiens; identical to SEQ ID NO: 230695
  chr4:141445663-141445784
  hyper

SEQ ID NO: 282537 - DNA, 102 bp, Homo sapiens; identical to SEQ ID NO: 199610
  chr4:141489128-141489230
  hyper

SEQ ID NO: 282538 - DNA, 1308 bp, Homo sapiens; identical to SEQ ID NO: 222498
  chr4:141676913-141678221
  hyper

SEQ ID NO: 282539 - DNA, 60 bp, Homo sapiens; identical to SEQ ID NO: 199612
  chr4:142054594-142054654
  hyper

SEQ ID NO: 282540 - DNA, 176 bp, Homo sapiens; identical to SEQ ID NO: 199613
  chr4:142054757-142054933
  hyper

SEQ ID NO: 282541 - DNA, 71 bp, Homo sapiens; identical to SEQ ID NO: 199614
  chr4:142141958-142142029
  hyper

SEQ ID NO: 282542 - DNA, 852 bp, Homo sapiens
  chr4:142557229-142558081
  hyper
acaaagctgccacccgggtgtcttcttccaacatttcccctagttggacttcaaagtttccttcttgcagcctgtgcggggaccaagaggccggtctagagtagccgcccagcatccagatccgacatccttttccctttcctcaggaagacttggatgcgcgccagcccagcccgggtctccaggttcagctgcggaagcttcccacatggtgcccgtcgcttgggatgcggctatccttgtgccttctctgcaggtgtcccggcaggtagaggaggagaccggtggctggtgttcctgcagggcggggctggggctcctcgatgtccttgcgcttgccctgcaagttctgcgccccaggccccggcagggacggaaacaggccgggaagcagtgacacctggggcagtcagtcatccaggagccgccgccacccgccccacccccagtctccgcgggaggtgtttgtcttcgcctatgctcccggctctttctctttcacttttcttttcgccaggggttgggactccgggtggcaggcgcccgggggaatcccagctgactcgctcactgccttcgaagtccggcgccccccgggagggaactgggtggccgcaccctcccggctgcggtggctgtcgccccccaccctgcagccaggactcgatggaggtacagagctcggcttctttgccttgggaggggagtggtggtggttgaaagggcgatggaattttccccgaaagcctacgcccagggcccctcccagctccagcgttaccctccggtctatcctactggccgagctgccccgccttctcatggggaaaacttagccgcaacttcaatttt

SEQ ID NO: 282543 - DNA, 192 bp, Homo sapiens; identical to SEQ ID NO: 199617
  chr4:143767433-143767625
  hyper

SEQ ID NO: 282544 - DNA, 346 bp, Homo sapiens; identical to SEQ ID NO: 199618
  chr4:143768278-143768624
  hyper

SEQ ID NO: 282545 - DNA, 67 bp, Homo sapiens; identical to SEQ ID NO: 230705
  chr4:144105725-144105792
  hyper

SEQ ID NO: 282546 - DNA, 540 bp, Homo sapiens; identical to SEQ ID NO: 199619
  chr4:144256959-144257499
  hyper

SEQ ID NO: 282547 - DNA, 189 bp, Homo sapiens; identical to SEQ ID NO: 199620
  chr4:144257937-144258126
  hyper

SEQ ID NO: 282548 - DNA, 300 bp, Homo sapiens; identical to SEQ ID NO: 199621
  chr4:144258375-144258675
  hyper

SEQ ID NO: 282549 - DNA, 270 bp, Homo sapiens; identical to SEQ ID NO: 230708
  chr4:144434324-144434594
  hyper

SEQ ID NO: 282550 - DNA, 182 bp, Homo sapiens; identical to SEQ ID NO: 230709
  chr4:144434957-144435139
  hyper

SEQ ID NO: 282551 - DNA, 130 bp, Homo sapiens
  chr4:144480192-144480322
  hyper
aggctcaccttgacgctctgattggcggctgcagaccccatccgcgagatggcagtgttaggaacaaaggtgagctgcccactgcaggtcaaacgctgccggctaccagctgcagctgggagtgaaagac

SEQ ID NO: 282552 - DNA, 371 bp, Homo sapiens
  chr4:144480364-144480735
  hyper
ggtttaacacccgaacagtggtgctagaaggtcagagtcttctacgtacatgttggaaacatccttgattgtctagcaccaagacttttaaacacagggggacaaatcatcactttgggtatttgtaattgttcgtcagttcaaatctcttggttttaaaaaaatactttccctctgcgcgactggcgcgtcacgtcgcgcgcgaccagtccgcagggctcctcccgcgctgctgataggcccgcagacggcggcccagcagaggagcggaaagcatggtccggggggcggcggacgcctggtaggcgctcgggccgttgttgtggggctgcgcgctggcgctgcagggcgggatgctgtacccaagagag

SEQ ID NO: 282553 - DNA, 97 bp, Homo sapiens; identical to SEQ ID NO: 199622
  chr4:144622231-144622328
  hyper

SEQ ID NO: 282554 - DNA, 201 bp, Homo sapiens
  chr4:145566944-145567145
  hyper
cagccgggcagtcccggaatctccggactgcgtccctgccccaagcccgccgggaacccgggccgtggacgcccccacccgggggccgcggcgaggcgggcgcgcggggttcagcaccctcgaggctggttccgaaggctcgcggccctccccctccgtccgccgccgtcgcggctagccgcccctccccgccgcagcagg

SEQ ID NO: 282555 - DNA, 223 bp, Homo sapiens
  chr4:145567402-145567625
  hyper
cgccgtcgccgtttctgttcctgctactgtcccacctaaacaactcccgttacacggacaagtgaacatctgtggctgtcctctccttttcttcctcctcttccaactccttctcctcctcccacttcccagccgcagcagaaagcccccaacccaactgacactggcacaactgcaaacggtgtcatccgcacaactttatctcgctcctcgggctccccta

SEQ ID NO: 282556 - DNA, 171 bp, Homo sapiens; identical to SEQ ID NO: 230713
  chr4:146018850-146019021
  hyper

SEQ ID NO: 282557 - DNA, 209 bp, Homo sapiens; identical to SEQ ID NO: 230714
  chr4:146098924-146099133
  hyper

SEQ ID NO: 282558 - DNA, 1185 bp, Homo sapiens
  chr4:146402704-146403889
  hyper
ttaggaaagcctgaacgccgccacactgttttttctccaggaagaaacggggcgtggggctgccggtagaagggggtggctccggccgctcccccgcgccgtcctccggccccggccgcgctgcgctcacgccggccgggccgggaatttggagaggatccctggtcgcgcggcagcggcggcggcgcgcgggtgagcgggtgagcgtgtgagcgggcgggcgggcaggcgagtgcgccgggtattggcagctgaggagtggaggctgggcagctccgactccctgacgccagcgcgaccagatcaatccaggctccaggagaaagcaggcgggcgggcggagaaaggagaggccgagcggctcaacccgggccgaggctcggggagcggagagtggcgcagcgcccggccgtccggacccgggccgcgagaccccgctcgcccggccactcgtgctcccacacggacgggcgcgccgccaacccggtaaaacgaaacagacccgaaccgaactttcccttcatgccgcgtcccagccctcccctcggcgccccgggctttccagcgccgccgccgccgtctctgcacgcgtggggccgccgcggtcgtgctgggctgggggcgcgggcagcggcgggaagggggctctttctgcgcggggcgggccgcgaccccccccccccatgatggcgcctcccgtctgctcggaggagcgaacctgctaccacgtcttctcgcgcccagcccgccgggctcccctggtgtctttgttgggtcttctgctgtgggaagcccagttcccgggcccccgagcctcggctcccgggcctgaccgcgctgggatctccccggccgcgctccccttccgcgcgctcctcacatctctcccgtgctgccgccgggccgaggcccgttcgcgtggcccgcggacccattgtgtcccccgcgccggcggggcgacccctgcgggagctggaggacgaccgctggcgctgctctccaaggcgcctggtggagcgggtctcgcgggcgggggaccccggcgccccgggcccctccacatcccgcacgggttttcttctcggccccagcaagcctctttggggtcgaggtcaaggaaagttcgcaccgagatcccctctaatttattcaaaggtttggcggcggcgcgtaattttttccccc

SEQ ID NO: 282559 - DNA, 1008 bp, Homo sapiens; identical to SEQ ID NO: 230717
  chr4:146857461-146858469
  hyper

SEQ ID NO: 282560 - DNA, 43 bp, Homo sapiens; identical to SEQ ID NO: 199626
  chr4:147443081-147443124
  hyper

SEQ ID NO: 282561 - DNA, 270 bp, Homo sapiens; identical to SEQ ID NO: 199627
  chr4:147560617-147560887
  hyper

SEQ ID NO: 282562 - DNA, 91 bp, Homo sapiens
  chr4:148402121-148402212
  hyper
ttaggacgctcttgcggtcccagagtggagtggaaggtctggagctttgggaggagacggggaggacagactggaggcgtgttcctccgga

SEQ ID NO: 282563 - DNA, 174 bp, Homo sapiens; identical to SEQ ID NO: 199628
  chr4:148402740-148402914
  hyper

SEQ ID NO: 282564 - DNA, 33 bp, Homo sapiens; identical to SEQ ID NO: 199629
  chr4:148538935-148538968
  hyper

SEQ ID NO: 282565 - DNA, 295 bp, Homo sapiens; identical to SEQ ID NO: 199630
  chr4:149362746-149363041
  hyper

SEQ ID NO: 282566 - DNA, 120 bp, Homo sapiens; identical to SEQ ID NO: 199631
  chr4:149363664-149363784
  hyper

SEQ ID NO: 282567 - DNA, 93 bp, Homo sapiens; identical to SEQ ID NO: 199632
  chr4:149364560-149364653
  hyper

SEQ ID NO: 282568 - DNA, 222 bp, Homo sapiens
  chr4:149364662-149364884
  hyper
ggtttccctccaaccgccccctcctcgattctcctcccgcccacccaaatgctgcagttactaagcaaaaggatggggttcctaactttgatttctaaggacttttaggcttctcatgtaaggccccgttttaggctccccgctggcccggagtcagcatcagtgacgtatacacctaaatctggtcccccggccctcggcgacccgcagcccggcggcggc

SEQ ID NO: 282569 - DNA, 438 bp, Homo sapiens
  chr4:149365430-149365868
  hyper
tctcagcttcttgcaaaatctaggttagaaccgtgcaggggcagccgccgcgatcactcgcccgccacccagcacccttgccccagggccgccagcgggcaactcgtctcctgcccgcatcccacctccgctcgccaacccgcgccctctgccctgggcgcgcaacctgccttgcccggggccgcccctgcgctctccggaccccctctcgccgctgtcagcgcaaagtgactgtcgctgcactcaccttttctaggacatggtggggaggctggggcgggggaaggggaacggctagactcccgccgccgctgctgccgccgccaccagcaagtccaatattggctgatcggcggtgaggatggagaggatgataatcccggcagtggcagtcgccctgctgacggtgggtagagcaatagtgctgttaccctacaa

SEQ ID NO: 282570 - DNA, 347 bp, Homo sapiens; identical to SEQ ID NO: 199635
  chr4:149365911-149366258
  hyper

SEQ ID NO: 282571 - DNA, 118 bp, Homo sapiens; identical to SEQ ID NO: 199636
  chr4:150999236-150999354
  hyper

SEQ ID NO: 282572 - DNA, 552 bp, Homo sapiens; identical to SEQ ID NO: 199637
  chr4:150999589-151000141
  hyper

SEQ ID NO: 282573 - DNA, 145 bp, Homo sapiens; identical to SEQ ID NO: 199638
  chr4:151000581-151000726
  hyper

SEQ ID NO: 282574 - DNA, 123 bp, Homo sapiens; identical to SEQ ID NO: 230731
  chr4:152020631-152020754
  hyper

SEQ ID NO: 282575 - DNA, 239 bp, Homo sapiens; identical to SEQ ID NO: 230732
  chr4:152021090-152021329
  hyper

SEQ ID NO: 282576 - DNA, 109 bp, Homo sapiens
  chr4:152246023-152246132
  hyper
gcaggcaaacccctcggaaggtgtcgttgtccaccgagacggccattgacctctgactcatccagagataagtcatcaaccaggccacaagtcccaagccagcagctcc

SEQ ID NO: 282577 - DNA, 178 bp, Homo sapiens; identical to SEQ ID NO: 199640
  chr4:152246314-152246492
  hyper

SEQ ID NO: 282578 - DNA, 483 bp, Homo sapiens; identical to SEQ ID NO: 199641
  chr4:152246542-152247025
  hyper

SEQ ID NO: 282579 - DNA, 1078 bp, Homo sapiens
  chr4:152329809-152330887
  hyper
aaagcagagctgggccggggcgccggtggccgccgtcaaacctttgggaagcaagaaatccgaaacgcccgtgacgtgcggcgttgtccgactccttccactaggcagaacccgagagacgagcctttggcgggacggtgaacgattgtgctgtgtacggcggtgtgcgtgcgtgagtaaagagtgtgtagctccggccaaacgctagcccccaagggcgcgagtgctacactgcgcccagctcaagtttctgtggaaactttccctcagaggctcctcctccttcaccttggaaaccggcgcgggccgtgcggcgcggcactgcctaagtccccggcgcacctggcggcggcgtgtcccagcggcagaggcggggccggcggcggcgggggcggggccggggcgcgctccccgaggcctccaggcaggttgggccccacccccgcccctgccccgccccggcccccgcccccgcccccgccccccccgcgctcactagggagaggctggggggaggcagtgacccacgcgcctcagcccgcggctgacgcaccttcgaaaagttgcgctccgaccttctcacgacctacattcttcccgggcactcctgagtttgagccgggcctggaggacctgggccaagactttcgagcggcggccgcccgaggtgcgaggagccagcccggctttcctcactgggtcccgcgcaggcgtccccgggaccgcagagcaaactttctggactatctgaggacacttgtccagcgagccccactgctcggggaggaggagccacggccggggacaggtaggtgctgtgctggccggagatttgcgcttgagggattcttttattttagagggttgaaggaggagggagagtcgaaatgtcccttctctgcatccgccaactgggcagggggtgcgggcattgggctgagggagcaggcattgggctgggggccggctggggatgttccaaacgaggtcgctgcgtcgggcgggggcgcaggggggaggaggtgacttctagggtttcgggctccgggacggggcgtaacgcggtgactgaccctgg

SEQ ID NO: 282580 - DNA, 210 bp, Homo sapiens; identical to SEQ ID NO: 199643
  chr4:153600921-153601131
  hyper

SEQ ID NO: 282581 - DNA, 275 bp, Homo sapiens; identical to SEQ ID NO: 199644
  chr4:153601161-153601436
  hyper

SEQ ID NO: 282582 - DNA, 196 bp, Homo sapiens; identical to SEQ ID NO: 230737
  chr4:153856945-153857141
  hyper

SEQ ID NO: 282583 - DNA, 184 bp, Homo sapiens; identical to SEQ ID NO: 199646
  chr4:154073356-154073540
  hyper

SEQ ID NO: 282584 - DNA, 86 bp, Homo sapiens; identical to SEQ ID NO: 230739
  chr4:154073798-154073884
  hyper

SEQ ID NO: 282585 - DNA, 57 bp, Homo sapiens; identical to SEQ ID NO: 199647
  chr4:154143758-154143815
  hyper

SEQ ID NO: 282586 - DNA, 213 bp, Homo sapiens; identical to SEQ ID NO: 199648
  chr4:154144184-154144397
  hyper

SEQ ID NO: 282587 - DNA, 117 bp, Homo sapiens; identical to SEQ ID NO: 230741
  chr4:154387146-154387263
  hyper

SEQ ID NO: 282588 - DNA, 239 bp, Homo sapiens; identical to SEQ ID NO: 222516
  chr4:154387495-154387734
  hyper

SEQ ID NO: 282589 - DNA, 226 bp, Homo sapiens
  chr4:154387970-154388196
  hyper
tgtgtggcgcgcgcgggtgccccgcagcggcccggcttcctgcagctttgttcccccgagcctggccgcccagggtccacactccagatgctcgggctgcggagcccggagtgcctcgtggggtgtcttcactcccacttcgtccccccacccccagcacgagcaccccgagcctgcctgcacgctgtcgccttcgcgtccgaggggccgccggctcacaccccac

SEQ ID NO: 282590 - DNA, 47 bp, Homo sapiens; identical to SEQ ID NO: 230743
  chr4:154605244-154605291
  hyper

SEQ ID NO: 282591 - DNA, 271 bp, Homo sapiens
  chr4:154710914-154711185
  hyper
atgggcttgttattctgttggagtgagtgcctaggaagggtttcgtcgttgtagaaacgcccctacaagagtctcaccagtcacacaggactgcccaccatttccccgttttggagagatttttccttcttaaatgaatggcatgactcaatactcgaaggcatcacgggctctaacacacagccgcccttgcagctgtgcgctctggaaagctggagtatgggcccccagggcactgtttgtaaagactggtggccggcacaaaagacgg

SEQ ID NO: 282592 - DNA, 204 bp, Homo sapiens; identical to SEQ ID NO: 199649
  chr4:154714010-154714214
  hyper

SEQ ID NO: 282593 - DNA, 348 bp, Homo sapiens; identical to SEQ ID NO: 230754
  chr4:155471470-155471818
  hyper

SEQ ID NO: 282594 - DNA, 53 bp, Homo sapiens; identical to SEQ ID NO: 230755
  chr4:155662823-155662876
  hyper

SEQ ID NO: 282595 - DNA, 372 bp, Homo sapiens
  chr4:155664664-155665036
  hyper
acgaaagattcggtcaggaaagaatctgcaggcattcgaggcgctcgcactttgcaaagtaaatgcaatctctttattaagccgaagtccctcatatctatccttttagaggaaggtggtccaactcagaaatctctcccaagaggactttccaccgaagactaccgcgaagtgccaggaactcgccccagtcccgacaggtgcaggacctttcgtgccgccacaccttgggactctacctccctaaataggccacttaaaagccagtagtgcaaccgggatcccgcggcgataaagaatcactgtgcagaaccctggagctgggagtcggcccgcccccctcccaaagaaaccgggatcccgcgtcctccc

SEQ ID NO: 282596 - DNA, 246 bp, Homo sapiens; identical to SEQ ID NO: 199651
  chr4:155665475-155665721
  hyper

SEQ ID NO: 282597 - DNA, 68 bp, Homo sapiens
  chr4:155665778-155665846
  hyper
gttattgtcaaagtggccagcatccgcgtggacacagtggaggacttcgcctacggagctaacatcct

SEQ ID NO: 282598 - DNA, 61 bp, Homo sapiens; identical to SEQ ID NO: 199652
  chr4:156298073-156298134
  hyper

SEQ ID NO: 282599 - DNA, 213 bp, Homo sapiens
  chr4:156587870-156588083
  hyper
atttctgttatggcgattgggcggctgcagagaccaggactcagttcccctgccctagtctgagcctagtgggtgggactcagctcagagtcagttttccagaagcaggtttcagtgcagagttttcctacacttttcctgcgctagagcagcgagcagcctggaacagacccaggcggaggacacctgtgggggagggagcgcctggaggag

SEQ ID NO: 282600 - DNA, 144 bp, Homo sapiens; identical to SEQ ID NO: 199653
  chr4:156588167-156588311
  hyper

SEQ ID NO: 282601 - DNA, 55 bp, Homo sapiens; identical to SEQ ID NO: 199654
  chr4:156588401-156588456
  hyper

SEQ ID NO: 282602 - DNA, 164 bp, Homo sapiens; identical to SEQ ID NO: 199655
  chr4:156589109-156589273
  hyper

SEQ ID NO: 282603 - DNA, 42 bp, Homo sapiens; identical to SEQ ID NO: 199656
  chr4:156589363-156589405
  hyper

SEQ ID NO: 282604 - DNA, 167 bp, Homo sapiens; identical to SEQ ID NO: 199657
  chr4:156680532-156680699
  hyper

SEQ ID NO: 282605 - DNA, 216 bp, Homo sapiens; identical to SEQ ID NO: 199658
  chr4:156680970-156681186
  hyper

SEQ ID NO: 282606 - DNA, 178 bp, Homo sapiens; identical to SEQ ID NO: 199659
  chr4:157891924-157892102
  hyper

SEQ ID NO: 282607 - DNA, 246 bp, Homo sapiens; identical to SEQ ID NO: 199660
  chr4:157892475-157892721
  hyper

SEQ ID NO: 282608 - DNA, 465 bp, Homo sapiens
  chr4:157892762-157893227
  hyper
tccggcacctggcttgagttttccgcgaccaaagttcaccttgttcgggctcgtcccccgctcctcaaagcctggggcaattcggccgctcggggtcaccgcggggctccggttgttccccgtcccctccccccacgcctcgggctccgcgctaacctcggggctacgcgcggcgtctccgcacggggtgaagagggaaggccggggcggccgggaggatccggcttgtcccctccccttctctaccttccccccgccgggcggcagacaggaggtgggggccgtgggccgagcccgggcggagcgcgcgcctggcgagcgggggcggctcagcggctctcccgcaggcggccgatggggcgggcgggggtcagcgcctctgggaggggcagccctgggacgcgtccgcgcgagcgggcttggccgcccactggctgtcaacaggtgctgcgcagacagggggtg

SEQ ID NO: 282609 - DNA, 170 bp, Homo sapiens; identical to SEQ ID NO: 199662
  chr4:157997215-157997385
  hyper

SEQ ID NO: 282610 - DNA, 102 bp, Homo sapiens; identical to SEQ ID NO: 199663
  chr4:157997663-157997765
  hyper

SEQ ID NO: 282611 - DNA, 42 bp, Homo sapiens
  chr4:158141450-158141492
  hyper
gagatcagctttgctgcatttggtccaggttggagcatctcc

SEQ ID NO: 282612 - DNA, 58 bp, Homo sapiens
  chr4:158142700-158142758
  hyper
ttattcggcctattcgcgtgaataagagactcttggatttttgggcgctagcgcgcgc

SEQ ID NO: 282613 - DNA, 268 bp, Homo sapiens
  chr4:158143023-158143291
  hyper
gtgtgcgtttctggggtggtgtgtgtgcgtttctgtgtgtcagtgtgtgggtgtgagtgactgcacacacgcgtgcgtgtgaccgtgtagagagaaggtggctgtaatctcagggacccccgctggctggagagggctgaagagagagggaaaggacgtcaagagtgtgcgcattagggagccggggtgagggttggagccagggagggcggctttcttgggttcaaggggttttcgctcatcttgagtgcttcaggagaagccctcc

SEQ ID NO: 282614 - DNA, 316 bp, Homo sapiens
  chr4:158143704-158144020
  hyper
gggcgaggccgccaggggcgccgcggtcagcttgccagcccggcgcgctttgttctcaggtagctgggctccagcagaggcagccggggaaaaggactgggaagccgtgggatctggccgagtttgaaaatctggagaagtcgctgatcagccattttagtctttgcaatgctccatattaaccctctcactccgcgcagtgctccgggactcgctgggaagctctgtgatgggttcagataaagtactagaaaccaaacaattagggatctaaaaggattggtgtggaggccagagggctccggtccccgcgctc

SEQ ID NO: 282615 - DNA, 148 bp, Homo sapiens; identical to SEQ ID NO: 199666
  chr4:159093901-159094049
  hyper

SEQ ID NO: 282616 - DNA, 129 bp, Homo sapiens; identical to SEQ ID NO: 230768
  chr4:159593505-159593634
  hyper

SEQ ID NO: 282617 - DNA, 737 bp, Homo sapiens
  chr4:159690017-159690754
  hyper
ctcccgccggggttacgtgagcccggggcgggcggccgccgggccaatggccgccgccggggccgccgcgctcctcccgcgccgccgccgccgccgtggggctgcgggctcctcccgcaggagataactgtcagcgcgcgaggcggtggcgggccggctcagtcatatgaccggcagccggcggctccggcgccgagcagagttactcagtcgcagcggccccgcgctcccgcaaggctgggcggccgcgccgccgcgatggccccgccaccgcggccgccgcccccggctgcgcgctgagccgccggccccccgagcgccacggccggagctgcggcggcggcatcatggccccgaccctgctccagaagctcttcaacaaaaggggcagcagcggcagctccgcggcggcgtctgcccagggcagggctcctaaggaaggacccgcctttaggtgagggggcgccggggggcaattctggcgcgggacccgagttggcttcggtgctcgccggggaggggacgggtaggggaaagggaagggactgtccaggacggcgctgcctatcgccggcacctggtcccgggcttgtcagcgtggacgcgcctgatccgagtgtggctccggaccctccgtgacccttcctcccgctctttctccacaactcagggtccttccccatttcagagttctcttgtgttccttggggttcccgggcgtgcgctgtgcttggctg

SEQ ID NO: 282618 - DNA, 176 bp, Homo sapiens
  chr4:163085066-163085242
  hyper
aactggtccgctcgcgtctcaggttcagcaccgacagcacagtggacagtaccagctcctttcacctccagtttgtctcagtcactgaaccaggctgattctcgctcctcctccctaggcaggagctgctgccactcaacccgggggtgccccgcccccaccatctgacgtaacta

SEQ ID NO: 282619 - DNA, 258 bp, Homo sapiens; identical to SEQ ID NO: 199669
  chr4:163085479-163085737
  hyper

SEQ ID NO: 282620 - DNA, 150 bp, Homo sapiens; identical to SEQ ID NO: 230771
  chr4:164088008-164088158
  hyper

SEQ ID NO: 282621 - DNA, 373 bp, Homo sapiens
  chr4:164253781-164254154
  hyper
gaactccacctcatcccggatcacgtgacggcgtcccgcgagtagcgcctgaagctcccccaaccccacaaacacctcacaaaggtgcacacctcggggaagcattgcctaggaattttggaaagaaaagcaatccaacagaagccacacattattcgacacagacctcccgcgcaggggaaaggaagccctaatccccacagtcctcgactccggggaaggcagggcagtttcccgaggcttgaaaaagtcggtgccactgtgcttttctttgtttgcaggtcagtgccatcttgtggccgaagtcatacccggctggagagctcgagcgccagcccaaaccaggaatcaaagggctcgctgggaaacatga

SEQ ID NO: 282622 - DNA, 64 bp, Homo sapiens; identical to SEQ ID NO: 230774
  chr4:164415572-164415636
  hyper

SEQ ID NO: 282623 - DNA, 48 bp, Homo sapiens; identical to SEQ ID NO: 230775
  chr4:164415908-164415956
  hyper

SEQ ID NO: 282624 - DNA, 169 bp, Homo sapiens; identical to SEQ ID NO: 199671
  chr4:165304244-165304413
  hyper

SEQ ID NO: 282625 - DNA, 140 bp, Homo sapiens
  chr4:165305190-165305330
  hyper
ctcccctcctctgctccccctccccttctccgtccccctctctgagccggcattcactgggctcccatgatgtcatccagtggaaatctgccatgctcaaagactggaataatccagcgctcacgcggggaacgcagagc

SEQ ID NO: 282626 - DNA, 79 bp, Homo sapiens; identical to SEQ ID NO: 230777
  chr4:166248060-166248139
  hyper

SEQ ID NO: 282627 - DNA, 259 bp, Homo sapiens; identical to SEQ ID NO: 199672
  chr4:166300444-166300703
  hyper

SEQ ID NO: 282628 - DNA, 536 bp, Homo sapiens
  chr4:166794038-166794574
  hyper
gggaggggaaatatggatttgcagctaagttatcacgatccttcgctccacccccggtctggcactctcaactgacacgtacatcatctattaattgctgtttgcgtacacagatacataatatattcatttttatctttggtaaaatataaatggaattgtcagcgcgctcctgtctgtttgtttgtctaaggctatcaaaagaagtcaagagaggaggctgtggtccggatcctgaccctgattgtatgaataagtaagcaggatgcaagtgattgggttagatggtgcgaatatttttttttttcaagttaggaagagggtaaaaagacaggctggcggggggaaggcaaacagtgcatccccaaatcctcacacttttgctctcttgcagtcagttgctttgctggcttctgcaggcttttaaggtctcgcggcgtagaaatgcctggcccccacccccttcctcggtctcccctttcaattcagatgtgctgatgtgcagaccggattcatcttctcggagctgcggcggc

SEQ ID NO: 282629 - DNA, 280 bp, Homo sapiens
  chr4:168155508-168155788
  hyper
acgcagacccagaggaggagaggtgggtataaggaagcaagccccagccgcagcagcccgagcgggcacaaaaccgcttcctggcacatcaccttgttgtgagccagcactgtgctcgcagctcctgctggaaatgcagccctgctctgccaactcgctgctttctggagctgctgcacgcgccgccgtctcgagccgtccactcagctccctgcgcccggcgcgctccccccatctccaccctcccttcgcgcgcggatctccagcttactcccctccg

SEQ ID NO: 282630 - DNA, 228 bp, Homo sapiens
  chr4:168155867-168156095
  hyper
acagttggctccggataggacgcttggctggagccagaggacgaggtagctcctagcctaggaatccttatctgctttgtaacctctcccctccagaagaggttctcatgttcgcgagacagcctgctcattctctgctcctggatttaacacaaagtgtactatctctcgcagttgcctctgctccacaatttccagggttgtcaggcagacgtgagaaacaagatc

SEQ ID NO: 282631 - DNA, 467 bp, Homo sapiens; identical to SEQ ID NO: 230783
  chr4:169401169-169401636
  hyper

SEQ ID NO: 282632 - DNA, 82 bp, Homo sapiens; identical to SEQ ID NO: 199673
  chr4:169552543-169552625
  hyper

SEQ ID NO: 282633 - DNA, 115 bp, Homo sapiens; identical to SEQ ID NO: 199674
  chr4:169552932-169553047
  hyper

SEQ ID NO: 282634 - DNA, 675 bp, Homo sapiens
  chr4:169752831-169753506
  hyper
ctgccctggagtcgcgtttattggacactctttagtctgtaaaggaaaaaaacacaaacaccggaggagaatcatcctaacaagccgacaacatatctatgggcctaaaaaacttaaattctttcccgttattagcacttctcgatcgttccaggaaagcccgatttgtagcttggctgccccaggaaggggcctgcgaccagaaagatgcaaagggcgggacaaggttacgagtgggtgcggggaagcctccctaacctgggggccgcgtcccagagctgcgagccacgcctcctctctcccgcccgccgcgccgccggactcttattttgaagggcggcgggtgaaggctcggagcctcctgagtcacccggcgggcgaggtataaagcccgatacctgccccgcgcccggtccgcggagcccgctgcagctcccgctcgctccggacgcggaatcgggcagcagcgggaggcggcccggagagccgaggtaggcgcggggaatcggccctgaggctggtggaagaaatgtgtgaattaaagggagtgcagcgtgcagggtgggccgcgagtcgggagtgcagggctcgggacagggtgggggcggggaggacaagagactcgtcagcgcactttccacccggccggttccttcccgagccctctccctcccc

SEQ ID NO: 282635 - DNA, 439 bp, Homo sapiens
  chr4:169753535-169753974
  hyper
cggagctccagataggaatgtctgcatcatcttggcagggcccagacgggagaagatgctctgctgccacggacgatccctcccgctctcctaactcttctctgaacacctcgcacccccacggccccccgcccctctcttaatcttggccacgctccctgaggggtcagacctggggtgggagagcagagaaagcggggctggcagagacaggggtgagggccgggagaggcgatgacatcattccctggcagctggcggggagagggtggggacggaggggtccccccgacctgagccgagccctcccttcccaagcccatcctcctttctttgggatggttcaccccacctgggcgccattcaaaggaagtttgcgcgtaactcggggcgtcctttccccggccgggtgctgtgcccggcccgcagtcggtgtttc

SEQ ID NO: 282636 - DNA, 283 bp, Homo sapiens
  chr4:169754143-169754426
  hyper
gggtcccgtgagcagccaggctggccctccccgggcctgggtgagctcccaaagctggagcgcagggctctaggccggccccgccccggggctgggggcttcccgcccgtttgtctcattttaacttttgggggcagctctgtcccgaatggtgagtggtccagactctagaaaggggtttggtcgcttgagcccggattgaggcttgggacctttgctctcttgctggggacggaagggggcgcgctgggcaggagagggggcgtctcggtcgggtctccct

SEQ ID NO: 282637 - DNA, 178 bp, Homo sapiens; identical to SEQ ID NO: 230787
  chr4:169931434-169931612
  hyper

SEQ ID NO: 282638 - DNA, 73 bp, Homo sapiens; identical to SEQ ID NO: 199677
  chr4:170192274-170192347
  hyper

SEQ ID NO: 282639 - DNA, 40 bp, Homo sapiens; identical to SEQ ID NO: 199678
  chr4:170192665-170192705
  hyper

SEQ ID NO: 282640 - DNA, 241 bp, Homo sapiens; identical to SEQ ID NO: 230789
  chr4:170679068-170679309
  hyper

SEQ ID NO: 282641 - DNA, 290 bp, Homo sapiens; identical to SEQ ID NO: 199679
  chr4:170946845-170947135
  hyper

SEQ ID NO: 282642 - DNA, 102 bp, Homo sapiens; identical to SEQ ID NO: 199680
  chr4:170947173-170947275
  hyper

SEQ ID NO: 282643 - DNA, 171 bp, Homo sapiens; identical to SEQ ID NO: 199681
  chr4:170947867-170948038
  hyper

SEQ ID NO: 282644 - DNA, 426 bp, Homo sapiens; identical to SEQ ID NO: 199682
  chr4:170948089-170948515
  hyper

SEQ ID NO: 282645 - DNA, 954 bp, Homo sapiens
  chr4:171010622-171011576
  hyper
atttcatttctgcacgcagagcctggctcaccgcgagcgtgcacaggggtacgcatggatgcaaccaagcggtggcttgctagggaaccctccttagaggctgtgcgaggaatgccccaccccaaaggagagatggtcaccccgtttctcactcatggtccggatgggagaagggtttctggctgcgctcgctgccgtgatgaaccgtgcgtaattcatgtcttctgacagccaagcatcaagcttcttcttcagtggttgaggactagaaaaaccaaagagcctcgtcaagtcctgcctgctaactcctcactctggcaacgccaccgcgagatgtgtccccccgctgcgtctggcttcccgcgcgcggtgcccggagaacgccgccgaaactccccggctggacgctgcgttcggtctcccggtcctaaacgggtctggggctgtgtggcgagcccggcaaagtccacgccgcacgcgctcctgcggccgccagggcccaggccggttttgccccgccgcgggcctcgccgcgccccctcccgccccgcgccgtggcctatggccgcccgcggcgcgcgcctccccgtcccggatcatcgccctcagagcgcagggcgcggggtagcccaggcgcgaggcgcttgcagccccaggccaatgactcttgacctcgccgctgggaatcaccgcaacccggcgtccgcgttggccggcctaggcgccggcccagaggctagcccaggggctgaccgaggggaccggaagtgcccgtgatcctaatcctcgggaaccatctggcggcgacttgggtccactgcagggggctcccgagctgcgcccagccgggagcggccccaccctcgttcccgcgcgctccgctggcctcctctcagtcactgggactgtgcattttgcccgctcagaccatggctatgctaaatacccatcttt

SEQ ID NO: 282646 - DNA, 1703 bp, Homo sapiens
  chr4:174089734-174091437
  hyper
agtcggagctctgcggtggccgccagaggggagggggccacggggaggagcggagggaagagcccggggaaaggtgtagccgaggggagttccggatctggagctggaaagggcaggcagcggagagggcggcagccgtagcggtaggggtgggggaaagagggggaggagagccggaggagggggaaggagggaggggagagcggtggcggcggctgcgccgggctgtgagtctctcgccgccggaggaagatgaggctgaagattgggttcatcttacgcagtttgctggtggtgggaagcttcctggggctagtggtcctctggtcttccctgaccccgcggccggacgacccaagcccgctgagcaggatgagggtgagtgacccgcccggccccctccggcggcagcgaccggcaacttgttttgtttgcccgcgtgtggagggagcaggggcggcggggtcgcggcacggcgtgggcaccgcagctccgcaggtggtgctggcgcagcgcgggccgagggggtgccgagccccgcgcactccgacctccctggccgccgccggcccgccccctcgccgccccttcctccgctcttccccgccccgggctccgtcgccgacacccgcgctgccgcggcagcggctcgggcggccgctctccgcgccgggactgcgggcggagcgggcggagagccgggtccggggggctgcggccgcccggcgtcccgctctggggggccgggaccgcagcgctcacggcccggggacgcggggttggtccaggctgcggcctgtggcgcgtgcaggcctgaaggaggcgagatgccgatgccgccaccgctggtccggtggaccaggccccttggtccagcctcccctcccgcagccgcccgtctgggggtgttcgcagccccgggctcccccggcccgcccgccggggagtgggagggcgatggcgccccgcctccggctcttacggagagcgcgcctccccctcaactccggcggcggggagccggggtgcgatgcgcggccgaggcctcgcccggaccgccggtccccctcgcgtccctgggcgagggaggggcggttggccggagatggcggaggggcgtccccgccccgcctgcccgccgcccccagccctcagcgcctggggaagcccctgctgtggcagtgctcgggcgctatccgggggaagaggagcagttcctcttccttggctgcggcagggctgcttgggccggaaaactaacttgtgtcggcgcccggccgccccgcgccggctgccggctagctcaggccgacgccgaggggagcggcggcgcggagctcgcggcggctccgctgggacgcatttgtctgccgcccagggcgcgagtgttagcgctgacattccttggatttggagggtttagtcaggcgcctcggaacattagttacccggagccgcgccgcgcggggaagggaccgcgggcactgcggcttccctgacccggcagcgggcggcgcgcaccggcctcgcccccgaccctgacctgcttccccccggatgaaccgttgcaccacctgcttcctcctccccgctgggacagccaactgggccggctgccagtgggggtaggagagggtatgaggggctcacgaccgccgaggcggcggggctgcaggaggagtcgagtcgctctctctgttgta

SEQ ID NO: 282647 - DNA, 42 bp, Homo sapiens; identical to SEQ ID NO: 230795
  chr4:174254798-174254840
  hyper

SEQ ID NO: 282648 - DNA, 180 bp, Homo sapiens; identical to SEQ ID NO: 230796
  chr4:174291979-174292159
  hyper

SEQ ID NO: 282649 - DNA, 514 bp, Homo sapiens; identical to SEQ ID NO: 230797
  chr4:174415375-174415889
  hyper

SEQ ID NO: 282650 - DNA, 76 bp, Homo sapiens
  chr4:174429791-174429867
  hyper
tagagaaggcctgccgcccgaatctccccaagtgcaggggagaattacatttccccacctcctacccaacctgccc

SEQ ID NO: 282651 - DNA, 43 bp, Homo sapiens; identical to SEQ ID NO: 110864
  chr4:174429949-174429992
  hyper

SEQ ID NO: 282652 - DNA, 398 bp, Homo sapiens; identical to SEQ ID NO: 110869
  chr4:174439053-174439451
  hyper

SEQ ID NO: 282653 - DNA, 56 bp, Homo sapiens; identical to SEQ ID NO: 199685
  chr4:174439741-174439797
  hyper

SEQ ID NO: 282654 - DNA, 270 bp, Homo sapiens; identical to SEQ ID NO: 199686
  chr4:174440348-174440618
  hyper

SEQ ID NO: 282655 - DNA, 122 bp, Homo sapiens; identical to SEQ ID NO: 199687
  chr4:174443429-174443551
  hyper

SEQ ID NO: 282656 - DNA, 165 bp, Homo sapiens
  chr4:174448153-174448318
  hyper
gatcccttaccacacgggagtgtcctcttcgtattaaaatatggaatgcttttcttcaaatatccactttttttttggagggggagacggggagcagatgcctcaaagggggtcaaagagaggggaaggaaattgcacataaataaaccggatgattccaaatgc

SEQ ID NO: 282657 - DNA, 357 bp, Homo sapiens
  chr4:174448663-174449020
  hyper
agcccctgcagagaagctaccaaggttagcgctaccctagccggcggggaggcctcggcgctgcagcgctcaacaaccggatccacaagtttataaacaaccgcccgttttcgagtcgtttatggaggagcggggggccttttctcttactccagatgtaggggcgggagctggagtcggcgctaagtctggtttctctgttttcattagcaatcctagatccacatctaggaaaaatagggcgaaggagcctctgtttcggcctgggcctctcggccagaggctctcggcctccagctcagcagtgcctctcctccaaggcttctgaaatctctggttattcgggaggtcactcga

SEQ ID NO: 282658 - DNA, 237 bp, Homo sapiens
  chr4:174449662-174449899
  hyper
cagcgcaaagcatccctaaccttctcctcctcctgctgacaccctcccctcaactctctgcttatgccggaagccatccttacacaacctggtgcaaacaaccttgaagcgggacgcagccaaagaacacgagatgccatttctcagcccaattggaaagaggccgggagcaccagttccctgaccccctcagccccaccgcctgccgccccctggtactgaccagctccttcttcc

SEQ ID NO: 282659 - DNA, 123 bp, Homo sapiens; identical to SEQ ID NO: 199688
  chr4:174458999-174459122
  hyper

SEQ ID NO: 282660 - DNA, 56 bp, Homo sapiens; identical to SEQ ID NO: 199689
  chr4:174460221-174460277
  hyper

SEQ ID NO: 282661 - DNA, 289 bp, Homo sapiens
  chr4:175138122-175138411
  hyper
gctttgtgtgacctcgtgcaatgtcactttaacctggatagcgtcaggtttcctcacgcataaaataagatcagatgatgccctcttggattctttgactgcaggacaatcattaggccatagtgaacagatgcgcttggttgccagaccgcgccctttgcgggtctatcaaaagggcaagcgcatattctggagctgtctcggagacttggacagaaagattcgaggcaaatattctaggctgggaaatttcgcgccgagcccccccctcagttagcctgtctaaagg

SEQ ID NO: 282662 - DNA, 205 bp, Homo sapiens; identical to SEQ ID NO: 230816
  chr4:175204404-175204609
  hyper

SEQ ID NO: 282663 - DNA, 639 bp, Homo sapiens; identical to SEQ ID NO: 230817
  chr4:175204865-175205504
  hyper

SEQ ID NO: 282664 - DNA, 114 bp, Homo sapiens; identical to SEQ ID NO: 230818
  chr4:175444082-175444196
  hyper

SEQ ID NO: 282665 - DNA, 92 bp, Homo sapiens; identical to SEQ ID NO: 199691
  chr4:175750738-175750830
  hyper

SEQ ID NO: 282666 - DNA, 75 bp, Homo sapiens; identical to SEQ ID NO: 199692
  chr4:176922578-176922653
  hyper

SEQ ID NO: 282667 - DNA, 57 bp, Homo sapiens; identical to SEQ ID NO: 199693
  chr4:176986729-176986786
  hyper

SEQ ID NO: 282668 - DNA, 517 bp, Homo sapiens; identical to SEQ ID NO: 230822
  chr4:177116426-177116943
  hyper

SEQ ID NO: 282669 - DNA, 99 bp, Homo sapiens; identical to SEQ ID NO: 199694
  chr4:177240753-177240852
  hyper

SEQ ID NO: 282670 - DNA, 98 bp, Homo sapiens; identical to SEQ ID NO: 230823
  chr4:177241206-177241304
  hyper

SEQ ID NO: 282671 - DNA, 69 bp, Homo sapiens; identical to SEQ ID NO: 199695
  chr4:177713159-177713228
  hyper

SEQ ID NO: 282672 - DNA, 168 bp, Homo sapiens; identical to SEQ ID NO: 199696
  chr4:178230844-178231012
  hyper

SEQ ID NO: 282673 - DNA, 236 bp, Homo sapiens; identical to SEQ ID NO: 230826
  chr4:178363508-178363744
  hyper

SEQ ID NO: 282674 - DNA, 126 bp, Homo sapiens; identical to SEQ ID NO: 230827
  chr4:178363969-178364095
  hyper

SEQ ID NO: 282675 - DNA, 48 bp, Homo sapiens; identical to SEQ ID NO: 222534
  chr4:179699960-179700008
  hyper

SEQ ID NO: 282676 - DNA, 226 bp, Homo sapiens
  chr4:180978997-180979223
  hyper
gccaaaacaggtttacctaacgggaagcctggaagggctggcgttggagaagccgctcggaagcggggcaggtagcagagagccgcccgccggtctccgggtctacgcccagggctctttccagcccggcctttgggtaactggtgtgggggagggcggccggctttcaggtcgcctctcccgcaggtttgggagcccggtaggccgtgactgaaagaccgtagca

SEQ ID NO: 282677 - DNA, 355 bp, Homo sapiens
  chr4:180979649-180980004
  hyper
ccgggtcccggcgcgccgagccagccgcccctcgcgcagttcctcggccgcggcgcggggttcgccccgcttctccccggcagcagccggctgggtgcccccggcacagcacagtgcggcaggcggcagcgtcctcccctcgcctcccccacattccctcacctcagccaaggcggcagccccggcgtccccgcccgcccggccccgcgcccccgcccggagcgcccccacccgttgcgcccccgccgggtcccgccgcgcagccccgccacgctgcagctggagcgaccgccgcggccggccccgcagaccggggaggaggaggaggaggggaagccggagagggaggcgcggg

SEQ ID NO: 282678 - DNA, 574 bp, Homo sapiens
  chr4:180980410-180980984
  hyper
cctccgcgcctggcaccgcagcaaggtacgtggcgcttcctggcgcggcttcttccctagcacaccccgcgcggatttttggctgcctagattcttccccttcccggagtggtcatcatttgtcaaactttacctccacctcgcacatgcgggcggccgctgcagccgccctccctggcggcatgggctccgctcgctgatgggaaccgagaggagggtgggggggaggatctgctggcagcggtggttctcatctggattaagatcgtatttcggaataactcgcaggtcttaccttccgggggtgtccttcattatgatgttccctgtgatgctggtaatggttttccttgctccttctgcacggaaggacgtacaagtttgcaggagaaggtacatgaaaagcaggtgaagtttgcagccacttgactccaagagaggagtaaccctttctttgcagtagccgctatggttttgaagcagcggcggcggcggcagcggtgacagcggtgacagcagcctggccggtggcggcagctgcacgttgtcccgtctgtgactggaagaaggagga

SEQ ID NO: 282679 - DNA, 211 bp, Homo sapiens
  chr4:183063455-183063666
  hyper
agccgggtcgggttcgcttactaccaagacttctctacttaacgcgctgcgctcgggcacttagcaacttcgggaacacgggctgtgggtctgggcacaccacctcgagtttagggattctcctcacttctagcccaaactttggataaactaacataaaggttcaggctttcctaggaggcgtcgtccttgttctcccagtgctcgatct

SEQ ID NO: 282680 - DNA, 429 bp, Homo sapiens
  chr4:183065517-183065946
  hyper
tcgcctccccggtcctcccgctcgcgggctgaaccccgaaaactccggcccggcctggtccgccgccttggaggaggctggaggggccggcgggcggggagagggggagcgcgggggagagaaagaaagtgaactcattggcgcgcgggcgccctcccctcccgcgtccccgggccgcgcggccgggggcgggcagggaaggaagttgtaacactcgcgccccctccccgcccccgccccgccggcgcccgctccccgctccctcggcggggcccccctcccccgcgcccggctcctttgaatttggcccggcgcggtgtgcgcgcggctcgggcggacgcggcggctgctgccggggagcgagccggcggcgcgggcgagccgagcgcggtaagtgcggcgccgccgccggcgcgccctccttccttt

SEQ ID NO: 282681 - DNA, 318 bp, Homo sapiens
  chr4:183066306-183066624
  hyper
cgtcttaacaggatcctggggggcttccagcgagcggaaagccccgggatgtcaccgctttccggggcaggcaggggacagaaggcttctgcagcgatcagggagccaagttgaaaaggagtgaaggagggagagtgcggggcgaggggtagcgtggggagtggtggatcacggctgaaacttgatcgggaaactctggatggggttggaaacacacacaaaatatcctgagctgggcgtttcaaaaattacgaatttatgagcctgcaactgagattctaagtccctctcgtgttttacaaccgattacaaagagct

SEQ ID NO: 282682 - DNA, 41 bp, Homo sapiens
  chr4:183369220-183369261
  hyper
gtatatcatggagagtggctcgggccacttgcacacatgcc

SEQ ID NO: 282683 - DNA, 241 bp, Homo sapiens
  chr4:183370318-183370559
  hyper
cgctcgctcgctccggggaccgcggcggtggcggtggcggtggtggcggcggcggcggcggcggctccgctcttctcccttgtggtgtcggaatgggaggaggctcggcgcgggtttgaatcggtgcggaggcaacattcgcatctgagatgaggtggctttttaacccctgagggaccacatttaaggatttcgaagagatggaggctgaactttctcgatgactcttcgtcacccggag

SEQ ID NO: 282684 - DNA, 177 bp, Homo sapiens
  chr4:183727529-183727706
  hyper
cccctggggttcctgggactcggcttctgcggacatggaaaagccgtcccaacatccggcggccccgtgggcaggggtcctgggacgccccctcctgcatccccgggcgggccctgcaggggatggcggcgatttcaggaagggctccggcgccccctagtgacgcgcggctgtggt

SEQ ID NO: 282685 - DNA, 285 bp, Homo sapiens; identical to SEQ ID NO: 230832
  chr4:183839056-183839341
  hyper

SEQ ID NO: 282686 - DNA, 206 bp, Homo sapiens; identical to SEQ ID NO: 199699
  chr4:184019900-184020106
  hyper

SEQ ID NO: 282687 - DNA, 39 bp, Homo sapiens; identical to SEQ ID NO: 199700
  chr4:184021278-184021317
  hyper

SEQ ID NO: 282688 - DNA, 321 bp, Homo sapiens
  chr4:184328290-184328611
  hyper
gcccgcgccccttccgcgcagtctccttccgcgtcacctctgtgaccgctgtgcccagtcgggccccacagaagcggcaagcgacgtcctcaaccgcaatctcggctcctcgggcgccacccagtggcctcggggcggaatcgcgggcgagctcggaggggctcggggtggcggggcgcagcgcggcgcctgtaaaacaaccctttgtcttcagaaggcgcttgtcctgccaaagcaaagcaccgtgctttacagctactggaagagcagtcctgagaaacaaagccccgattttttatagccaccggggaaaccagagcc

SEQ ID NO: 282689 - DNA, 36 bp, Homo sapiens; identical to SEQ ID NO: 230836
  chr4:184365599-184365635
  hyper

SEQ ID NO: 282690 - DNA, 50 bp, Homo sapiens; identical to SEQ ID NO: 230837
  chr4:184580352-184580402
  hyper

SEQ ID NO: 282691 - DNA, 365 bp, Homo sapiens; identical to SEQ ID NO: 199701
  chr4:184718835-184719200
  hyper

SEQ ID NO: 282692 - DNA, 533 bp, Homo sapiens; identical to SEQ ID NO: 199702
  chr4:184719413-184719946
  hyper

SEQ ID NO: 282693 - DNA, 75 bp, Homo sapiens
  chr4:184826163-184826238
  hyper
caccaacatgtcaaatgcagcgctgaaaaaggaaatcgggcttatttttgtcgttgtttactgtaccaaagcatt

SEQ ID NO: 282694 - DNA, 47 bp, Homo sapiens; identical to SEQ ID NO: 199704
  chr4:184826657-184826704
  hyper

SEQ ID NO: 282695 - DNA, 233 bp, Homo sapiens; identical to SEQ ID NO: 199705
  chr4:184826705-184826938
  hyper

SEQ ID NO: 282696 - DNA, 266 bp, Homo sapiens; identical to SEQ ID NO: 199706
  chr4:184827291-184827557
  hyper

SEQ ID NO: 282697 - DNA, 136 bp, Homo sapiens
  chr4:184827659-184827795
  hyper
cgtgcctttccccccaggaatctggaagctataagccgggcggattgcaaatgaagtgtaatgcattgtgggacgtgtgtaaaatcggagccttcgccgtgggggtgtgggggggcgtggggagggccggacccgc

SEQ ID NO: 282698 - DNA, 40 bp, Homo sapiens; identical to SEQ ID NO: 110933
  chr4:184828122-184828162
  hyper

SEQ ID NO: 282699 - DNA, 101 bp, Homo sapiens; identical to SEQ ID NO: 199708
  chr4:185396094-185396195
  hyper

SEQ ID NO: 282700 - DNA, 40 bp, Homo sapiens; identical to SEQ ID NO: 230842
  chr4:185747361-185747401
  hyper

SEQ ID NO: 282701 - DNA, 381 bp, Homo sapiens; identical to SEQ ID NO: 222537
  chr4:185747618-185747999
  hyper

SEQ ID NO: 282702 - DNA, 64 bp, Homo sapiens; identical to SEQ ID NO: 199710
  chr4:185937209-185937273
  hyper

SEQ ID NO: 282703 - DNA, 402 bp, Homo sapiens
  chr4:185938975-185939377
  hyper
ccccttttcttctcggcccactcttctccgtgttgccccccaatcctcccacccgccccttcacacacaaacacacacacacgcccgccagtctctcctcccccaccctctggcattattaaaatttagcccaatgaaactattcatacttttcaatggacattttcgtataggataataggctacaaattgagcctcttccccccgcgaagagggagcaggaggggtggggagaaaagaaagccagcgacgtggtcagggagtaggggggagcgtcgcgtgccaaacagcggcgggaggggcgaggcgaggcgaggcgggagcctcgtgtgccagccgcagccccacacctgccgggatgtccggacaaataaagcggtgtaaacaaaaaggggggagaag

SEQ ID NO: 282704 - DNA, 230 bp, Homo sapiens
  chr4:185939443-185939673
  hyper
tcccttgaacccggcggaacagcctattaaaggcttacttaattactttaatgactctggacaggctttaaaacgcactcggcgctgggacggcgggcttgctgggatttgtaaacaggcgatcatgtgagactcagcggtgggactaaaagaggcgacactgttttgtgagggtcctcgccccccggtgcccgcggccgctgcgcccctgcgctccgcgcccgcgactg

SEQ ID NO: 282705 - DNA, 69 bp, Homo sapiens; identical to SEQ ID NO: 230848
  chr4:185961214-185961283
  hyper

SEQ ID NO: 282706 - DNA, 54 bp, Homo sapiens
  chr4:186050065-186050119
  hyper
aggggtgaccgagttacgccgcgggcgctgcctgagcaacgctttctaccgcgg

SEQ ID NO: 282707 - DNA, 54 bp, Homo sapiens; identical to SEQ ID NO: 230850
  chr4:186064211-186064265
  hyper

SEQ ID NO: 282708 - DNA, 68 bp, Homo sapiens; identical to SEQ ID NO: 199713
  chr4:186130483-186130551
  hyper

SEQ ID NO: 282709 - DNA, 79 bp, Homo sapiens; identical to SEQ ID NO: 230851
  chr4:186317080-186317159
  hyper

SEQ ID NO: 282710 - DNA, 344 bp, Homo sapiens; identical to SEQ ID NO: 230852
  chr4:186347192-186347536
  hyper

SEQ ID NO: 282711 - DNA, 108 bp, Homo sapiens; identical to SEQ ID NO: 199714
  chr4:186434979-186435087
  hyper

SEQ ID NO: 282712 - DNA, 501 bp, Homo sapiens
  chr4:186456226-186456727
  hyper
cagtggctctcctcggaaagtcgctgcggacccagaggatgggacacctttagagcggactttgtcaaatctctgagccgctccgcagccacttgacggagttgccgccgcccccggagctgggcgccgaagcccgggagccagcagcgccccgtccgcccgccctcgcgcgctttctggccgccctcggccccggggcatccactgcgtccccccggacgccgccggagtccccacctcgcagcaaaagcaagaatgccgacacctaccctggtgatgaccaaaggctggttgaagtctatgccccctgagagcctgaagccccagggcgcagggcccgggaggatcaccgtctggggcatgccgccttcctcccgcccaccgggctctaagtgtccccgcgcagggcagccactccgcgccgggcggcgtcctggccccgacccgggcgggggcgctttatccccgctgggggtgacgtcaccgccccgccgtcctccc

SEQ ID NO: 282713 - DNA, 112 bp, Homo sapiens; identical to SEQ ID NO: 199715
  chr4:186706061-186706173
  hyper

SEQ ID NO: 282714 - DNA, 190 bp, Homo sapiens
  chr4:187026478-187026668
  hyper
cgccagccgcgccgcgggagcagtggggaccctgctctcttggcccagtagccctagagcgggtaaagccccgccccagccccccactccctccggcgggggctgctcccctgctcgcctggtggtcccagcgcggccgccctcgggccccggcggggtctgggccgcgctccccaggaacccgctccag

SEQ ID NO: 282715 - DNA, 880 bp, Homo sapiens; identical to SEQ ID NO: 230858
  chr4:187644343-187645223
  hyper

SEQ ID NO: 282716 - DNA, 565 bp, Homo sapiens; identical to SEQ ID NO: 199716
  chr4:187645505-187646070
  hyper

SEQ ID NO: 282717 - DNA, 176 bp, Homo sapiens; identical to SEQ ID NO: 199717
  chr4:187646285-187646461
  hyper

SEQ ID NO: 282718 - DNA, 357 bp, Homo sapiens
  chr4:187646716-187647073
  hyper
tcgccacaggagccgccgagagccagggatggagatttcagacttaggactctgccacgattctactgatccttaagcgccaacagaacgaaatggacatgcctattagctaccacaaatcgaattattttatatgagagagagaaatgtggttcaagttccacatttgtcctttaaataatcgaccctccctaaccctgtccccaaaggctcgtggaaattagggagggggttggggagacggttccagaaacaaaacgctttcctccagcacggcctctacatccagtccacccaagctgatttttgtaactcatataaagaatgggcccgggtgggtggtcagtgaagactggg

SEQ ID NO: 282719 - DNA, 182 bp, Homo sapiens; identical to SEQ ID NO: 199719
  chr4:187647457-187647639
  hyper

SEQ ID NO: 282720 - DNA, 393 bp, Homo sapiens; identical to SEQ ID NO: 199720
  chr4:187647669-187648062
  hyper

SEQ ID NO: 282721 - DNA, 254 bp, Homo sapiens
  chr4:187648119-187648373
  hyper
gcgcctggagccgcctggagccccgctgcgcgcacttccccggctcgcggagcccctccggcggcgtttcccacgccgcggactgcaggtgatgctcttcctcttctgcagccgaaattcgtcgcgatgtgtcgcctgccagatttttgctgggcggaagcatgaacagtctctgcagactggcctggacgacttgtactttgtggccctccaacttctggatgtgaattttttttcacgacttattattatgc

SEQ ID NO: 282722 - DNA, 86 bp, Homo sapiens; identical to SEQ ID NO: 199722
  chr4:190123535-190123621
  hyper

SEQ ID NO: 282723 - DNA, 166 bp, Homo sapiens
  chr5:54097-54263
  hyper
gaggatttgagctgctgagaccgggggcggcgcctggggacgccggagatccgctgctccccgggacactcacctgctgcccggcgctgcgggaggagagcgcggaaccgggagccctggaaccctggcccgactgctgagcgccccgtgggtcctacgctcccgc

SEQ ID NO: 282724 - DNA, 68 bp, Homo sapiens
  chr5:54264-54332
  hyper
ccttctagggaagcccctaaagttggtgagtcccctagaaagcagttcctctgtggctacgtccagga

SEQ ID NO: 282725 - DNA, 191 bp, Homo sapiens; identical to SEQ ID NO: 199723
  chr5:92399-92590
  hyper

SEQ ID NO: 282726 - DNA, 64 bp, Homo sapiens
  chr5:343971-344035
  hyper
cgcgttccggtgaccgggtgcccccttgtcttccaggccgaggacgatgatcccgccgggggag

SEQ ID NO: 282727 - DNA, 207 bp, Homo sapiens
  chr5:344297-344504
  hyper
ggggccctgagcggtggagcgaggcggcgggcaccgtgaggcgctgaggccaaggacgcgggcggagctccgggcggcagaggcggaggcggcggggccacggcagcttcccaggctccgcaggcgagaccgccacccgctgggacggagggtgtggcacggccgggtgtgtgcgtgtgtggcgaggctatgcgaggctgtgtgtct

SEQ ID NO: 282728 - DNA, 82 bp, Homo sapiens; identical to SEQ ID NO: 199724
  chr5:368381-368463
  hyper

SEQ ID NO: 282729 - DNA, 259 bp, Homo sapiens; identical to SEQ ID NO: 199725
  chr5:373104-373363
  hyper

SEQ ID NO: 282730 - DNA, 285 bp, Homo sapiens; identical to SEQ ID NO: 199726
  chr5:374579-374864
  hyper

SEQ ID NO: 282731 - DNA, 267 bp, Homo sapiens; identical to SEQ ID NO: 222548
  chr5:377105-377372
  hyper

SEQ ID NO: 282732 - DNA, 1687 bp, Homo sapiens
  chr5:472580-474267
  hyper
ctcacccagccagggcaccccgggcgacctccgcgccaggtgcgacagctcaggccggagacctcgtctgtggggacgggccgtgtccggggccgccaccctgagaccgggcgcgggcaggacggaacctgggggggaaacggggcaggtactggctttaggagtctaaatccccaaacgctgagcagacggaagacgttcctgccactttacctgcagttcaaagacctggcgagggcctggaaacggcgctcggcccaggccgcttgcgggcgctgggcctgcagccgctgcaggtcgggccctgagtcctggcgctcgggaggtccctgagtcggtccccgagtcagtccccgggcgcggggctcggttgggggggcccggaaccttgggctggtttcacgcaaatccgtttggggcgagcctcggtttcccggcagcggtgggaaagggcgcgagcggccagccatggcgcgcggacccttcccgccggcggcgtcacagcggcgtctcctcctgctccagcgcgtgcggcggtgcgtggcacgagggcggcagcgacgccagcttcagcagcgcggggcggcggcgcgcgcgaggccgctggaacgagcgccggctgtgcacgcggcgcgccgccgccgaacgcgcgtgcgcactcggcagccctcggcgctccggccccgcccccggcgcaggccccgcccccggctcgccctcgggcggctctgcgggcgcaggcgcggcactctcggagttctgcgcaggcgctggcgtgggcgaggcggggctcggggctcgcggtcgctgtagccgcgcggggatctggggtttctctgggacagcggcggcggcggtgggcggaccgtggcgcggggacgagcggccggttagcggcgtgtcggagccggtgtcacctgcgggagaggaaggcgtgagcggcgcgcggagcccgggcgctggggcgggaggggcgtccccgggggcctcagctgtccccgagcccggcggctctcgcctcccctcccgcggcgcaccccaggctcggcgtccgctggggcctcctcccaggacccgggttcgcggggcagaggcggaagcagcaacagcgaagccccagcccggccccgccacgtccccccgccgggggtcccgggacagcggcctcctcggcgcaggaaggtcccgccccaggccctgcagcgcgggaggtcaaggtccccaaggggacctgcttcctccatctcaaaccgccctggcgtcccccgggtgcctcccaggcccccagagggagctcagaaagcccagaccccacggcccgcccctctccctgctctgagctggaggcagagtccgggtctgcggggccggccctccctgtatccctgtgagagggtcggggacccggggcgtctgtctggcttcccccagccctgctctcagctccctgggagcgcaggatttggactcgcggactagctttcggagccacctaaaggaaatctcaggcggccctagtgccctcagctccgtgggagcagcagagacgccagagtatctctgtccgggctcctgagggaggtgcggccagcagggcgctagaggaggaagaggggctgctggagagagagagcgcgccaggttcaggtccagggaggagagagagcgagcgcgcgaggcggagacc

SEQ ID NO: 282733 - DNA, 457 bp, Homo sapiens
  chr5:490766-491223
  hyper
caaggtaggtgtgagcctcgaggggccgcgggtccaggagtctctgctacaacccctgaggctttcccttgggtgcggtggctagggcggctgccccatccgaggtgtgtcctgaccacctatggcatcgcccacgtgacgggcctgccatccatgagcctgtctgtgccctcggcagctttccctgggctgcacctggtgggtgatgctggacggcagggactacagggaggggtgagaaggcgccaaggaaccacgtgctgggtgaggcggccccaacccgggagctcctctttctccatgcgtctccttggtctcaggtttcagccccttgattcccatggagaggccgggccgtgctctctcttgaaccagacggaaaatcgccaattcttgtgagtctggttcagctggtggatttgtttgaggctgagttctcagaccggtgagggcggca

SEQ ID NO: 282734 - DNA, 88 bp, Homo sapiens
  chr5:523690-523778
  hyper
aagagaaatctgaccgaccgggattttctaaaaaaaaaaaaaaaaaaggaggcccgccaatgggaacgctgcgcctgtagggaggatt

SEQ ID NO: 282735 - DNA, 51 bp, Homo sapiens; identical to SEQ ID NO: 222554
  chr5:612241-612292
  hyper

SEQ ID NO: 282736 - DNA, 263 bp, Homo sapiens; identical to SEQ ID NO: 199729
  chr5:676505-676768
  hyper

SEQ ID NO: 282737 - DNA, 377 bp, Homo sapiens; identical to SEQ ID NO: 199730
  chr5:676926-677303
  hyper

SEQ ID NO: 282738 - DNA, 35 bp, Homo sapiens; identical to SEQ ID NO: 199731
  chr5:693798-693833
  hyper

SEQ ID NO: 282739 - DNA, 225 bp, Homo sapiens; identical to SEQ ID NO: 230869
  chr5:923604-923829
  hyper

SEQ ID NO: 282740 - DNA, 227 bp, Homo sapiens; identical to SEQ ID NO: 199733
  chr5:1004765-1004992
  hyper

SEQ ID NO: 282741 - DNA, 128 bp, Homo sapiens
  chr5:1009130-1009258
  hyper
cctgcacctgagcgcggggcccggcggggcgtggcggcggcgatggggaaactgcagtcgaagcacggtgagccgcgggccggtagggcgggagggcgggcgggcgggcgtggggccgcctctcactg

SEQ ID NO: 282742 - DNA, 152 bp, Homo sapiens
  chr5:1009625-1009777
  hyper
gcggccgcaaaggcgcggaggaagcggagcggcgcgcgcgggacaagcaggtaggcggcggggcggaggctggggtcgcgctgcgcacccgcccgggggcggggagcggtgtcagagctgttcctggtgcccgcccgcggacaggcgagacg

SEQ ID NO: 282743 - DNA, 219 bp, Homo sapiens; identical to SEQ ID NO: 199734
  chr5:1061582-1061801
  hyper

SEQ ID NO: 282744 - DNA, 1239 bp, Homo sapiens; identical to SEQ ID NO: 199735
  chr5:1064042-1065281
  hyper

SEQ ID NO: 282745 - DNA, 57 bp, Homo sapiens
  chr5:1104736-1104793
  hyper
gcccactctcatcccggaccccaggaccactccccacagagccgaggcccaccgggg

SEQ ID NO: 282746 - DNA, 163 bp, Homo sapiens
  chr5:1104884-1105047
  hyper
gcactctcctccccacaactgtttcctcaaaaagacaccgcccaaggggagagcggaaacaggcacgggctggcaggatgggggcccacgtcacagcccagggccgcaagcaccactcggaccccgagacccctgcaacggcagcacacgcccctccccgcag

SEQ ID NO: 282747 - DNA, 1020 bp, Homo sapiens; identical to SEQ ID NO: 222561
  chr5:1111381-1112401
  hyper

SEQ ID NO: 282748 - DNA, 35 bp, Homo sapiens; identical to SEQ ID NO: 199738
  chr5:1140552-1140587
  hyper

SEQ ID NO: 282749 - DNA, 167 bp, Homo sapiens
  chr5:1155507-1155674
  hyper
gcgaggtcagagggcgccccgggagctgtcggcccatccccgcggcccctgccccggctcggtgtcacctgcaggccccggacagggcgggatccccgcagggaactgccccaggtccccggagcgcgcggcgggcggcaggggcggggctccgctgggctgggggg

SEQ ID NO: 282750 - DNA, 369 bp, Homo sapiens
  chr5:1279435-1279804
  hyper
ctgggcccgcacacgcagcacgaaggtgcgccaggccctgtggatatcgtccaggcccagcacagaggcgcccaggaggccggggcgccgcgcccgctcgtagttgagcacgctgaacagtgccttcaccctcgaggtgagacgctcggcctggcggggacagcatgggagacagtcaggaaagtggatccggccaagtgcccaccccaccatagggacccaggggagaagcagcccctccccagtgtccccagccacccagacccgggacctagaacccctcccagcttcctcagaccctgtttgaaacgggttcctggccgcatgtgtgttgcacacgggatcctcatgccacacctctgtccacct

SEQ ID NO: 282751 - DNA, 111 bp, Homo sapiens
  chr5:1294071-1294182
  hyper
gtggatggggggcccgcgtggtgctggcggcccacggatgggtgggagtggcgcgtgccagagagcgcaccctccaaagaggtggcttcttcggcgggtctggcaggtgac

SEQ ID NO: 282752 - DNA, 45 bp, Homo sapiens; identical to SEQ ID NO: 199739
  chr5:1345798-1345843
  hyper

SEQ ID NO: 282753 - DNA, 310 bp, Homo sapiens; identical to SEQ ID NO: 230879
  chr5:1645164-1645474
  hyper

SEQ ID NO: 282754 - DNA, 936 bp, Homo sapiens; identical to SEQ ID NO: 230881
  chr5:1800423-1801359
  hyper

SEQ ID NO: 282755 - DNA, 91 bp, Homo sapiens
  chr5:1852001-1852092
  hyper
acttgcaggtcaccactgctgcttacacagccttactctagcaaggccctgggcagccacactgtgacactcggaacgtcacacctggcgt

SEQ ID NO: 282756 - DNA, 306 bp, Homo sapiens; identical to SEQ ID NO: 199741
  chr5:1874586-1874892
  hyper

SEQ ID NO: 282757 - DNA, 85 bp, Homo sapiens; identical to SEQ ID NO: 199742
  chr5:1877239-1877324
  hyper

SEQ ID NO: 282758 - DNA, 94 bp, Homo sapiens
  chr5:1879045-1879139
  hyper
ccagaggccaccaggtcacaaactggcaacacaggggcctccaatgggggaggggggtgtctaattttttttttttttgagacggagtctcgct

SEQ ID NO: 282759 - DNA, 101 bp, Homo sapiens
  chr5:1879747-1879848
  hyper
cttcttgaggcgccggcgcgcgttggcgaaccaggtggagacctgtgtgagggtcatcttggtgatgatggccagcatgatcttctcgcccttggtggggt

SEQ ID NO: 282760 - DNA, 89 bp, Homo sapiens
  chr5:1882047-1882136
  hyper
cagcagccggctctcgtagaccgggcagtagaccggcgcctgggccgaggcggcgggcccggagtccgccagcgtgcggcctccggact

SEQ ID NO: 282761 - DNA, 99 bp, Homo sapiens; identical to SEQ ID NO: 111084
  chr5:2741122-2741221
  hyper

SEQ ID NO: 282762 - DNA, 59 bp, Homo sapiens; identical to SEQ ID NO: 199743
  chr5:2743446-2743505
  hyper

SEQ ID NO: 282763 - DNA, 48 bp, Homo sapiens
  chr5:2749729-2749777
  hyper
aggggttcttgcggtgctcgttgagccaggccttgagagtggccgtgg

SEQ ID NO: 282764 - DNA, 109 bp, Homo sapiens; identical to SEQ ID NO: 111092
  chr5:2749840-2749949
  hyper

SEQ ID NO: 282765 - DNA, 793 bp, Homo sapiens
  chr5:2753572-2754365
  hyper
cccaccactcttcctacaaaccacacccccatcctgcacacatcctcttcaggccatctcaacacacgcacacgcacacacacccacgaccacctctccctccacccacagacaccccgttcccacaggctgggccccctgcaacgacccagcggggggtttcaaccttgttgcgactccacatgggacatcctaattcagtccaggacagatatttttaatcaattactatagagctgaaaaacagagagagagagaaagcagccgggttgggcaagccgtcgacagtctgcgacatttttgcgcttcctgggagggaattcctccaagaagaggggtaaatgagaggcccacacgctggatggcaaacacaaacactgtcagatcagatggcaacctttagggttcctttacgatcagatcagtttaaatgaaaaaaaaatcgggtgtaatttttatcaccagggagcactggcctggagtatttccatttctaaagagcggttcccgctgtggtttcattagcatttggggctcatcctccctccccctcccttgacccacccccctccccccgccggacctctgccaggggcagaagagaaaacagccagttattatacaaacatcctcagtttggagctggagtgtctgctctggatacagtcgattctgacatcaattaaatatataaccagacacgtgcagtggcggggagggtcccctcacccagggtgcatctccagaaacgccgcctgcccttccccctctttagctcagtgttgggagtttg

SEQ ID NO: 282766 - DNA, 40 bp, Homo sapiens
  chr5:2754767-2754807
  hyper
agagggtggcgggctcagcccagactccgtctcggggcca

SEQ ID NO: 282767 - DNA, 234 bp, Homo sapiens
  chr5:2754908-2755142
  hyper
ggcacttggcttctgaggcttttcagttgccgtccgagcaggagggagggaatgagcaggcacgcagggaaaacccagtaactgctttgcaaacgcgacccctggtcacaataacccaggcgatgggggcagtttcaggttcctggtgggccctgccccctttcctaggtgtgccctaggaggtggggaaaaaattaacactgtttctatttttctttattgtccctgcaacag

SEQ ID NO: 282768 - DNA, 265 bp, Homo sapiens; identical to SEQ ID NO: 230906
  chr5:2757844-2758109
  hyper

SEQ ID NO: 282769 - DNA, 116 bp, Homo sapiens
  chr5:3121976-3122092
  hyper
tgacaatgttcactttcagccgaggatggccaggaaacagttaatttgatttgcgaggcgaaaaggtcgcatgttttgttcagccctttctcagccccttcctccctcgctcggcc

SEQ ID NO: 282770 - DNA, 104 bp, Homo sapiens
  chr5:3122204-3122308
  hyper
ccagctcagggggttcctttgccggcgtcccttccccttggaatgcgctttcttgcacctcctgtttacaaacaaaataaaacggcaccaagctaaacagccaa

SEQ ID NO: 282771 - DNA, 208 bp, Homo sapiens
  chr5:3590903-3591111
  hyper
cacaaactaattaaaaaccgcataatggagccctacaggaacaaggcagaaaaacaaataaatacaagtgcagctggcacggcgatggtgcctctgcccccgagcaaccgtctggtgacatcaaataagaagccctgagaactctcacaccgctgctgttgttcatattggaggcataatggaaatgatctggttaattaaggggagg

SEQ ID NO: 282772 - DNA, 94 bp, Homo sapiens; identical to SEQ ID NO: 199747
  chr5:3591458-3591552
  hyper

SEQ ID NO: 282773 - DNA, 244 bp, Homo sapiens; identical to SEQ ID NO: 199748
  chr5:3591613-3591857
  hyper

SEQ ID NO: 282774 - DNA, 79 bp, Homo sapiens
  chr5:3592384-3592463
  hyper
ccccctgcgctccccgagacacgcgcgctctctgcccatgccgctgcagccggaggcctgcatctgtcccagccctgga

SEQ ID NO: 282775 - DNA, 302 bp, Homo sapiens
  chr5:3592881-3593183
  hyper
gggaaccacacaacctcccattccaatgtccatcgcctttgcctggcacccctagggccaccagagggatggtcctagatgccagtgatgctgagtccgggcagcggcaggggcagtctctttgagggaaagttttagaccttctcacgacatttttaaaaggacgttcaaatcaggcccacggattccagacgcacagcccttctgcctgctccagcatctgaggccatgaagccctgggccccactgaaacatttgctgctgaaaatgagtggcagaacgagtgggaggaaactctacca

SEQ ID NO: 282776 - DNA, 243 bp, Homo sapiens
  chr5:3601905-3602148
  hyper
cgattttataacgtcggtaaaaacagaggaaaaagaatttttattgcgaccccagaggagaacttcggattagaaaccagtttacaactagttgtctcaacggcgcatcgtggcgcctggtcgttttctgagttgagtgtgaaaataatggagtatcgctttgcatgtatttttagtgattcggttaaatcaaacacgggaagaaattggaaggctctttaaaactccacagatgggccagcc

SEQ ID NO: 282777 - DNA, 88 bp, Homo sapiens
  chr5:3602716-3602804
  hyper
cgcacccccagcctgtgacccgcccttcccggcttgctcgagacccactggcgccagtgctgcgcgtggggactccgtgcatggccga

SEQ ID NO: 282778 - DNA, 95 bp, Homo sapiens
  chr5:5887042-5887137
  hyper
aggctgtctctgaagcatcacgagccggtcccaacacgaacgtggaggagcacgcagcagcatttcctgcaacaccagcctcgctttgctggcgc

SEQ ID NO: 282779 - DNA, 98 bp, Homo sapiens
  chr5:5887246-5887344
  hyper
gcttcagctcctgcccatcagcgctgtgccaggggtgggaaggggtggtggtggtggcgggggcggtggggaaggggagtcgctccctttacccctgc

SEQ ID NO: 282780 - DNA, 78 bp, Homo sapiens; identical to SEQ ID NO: 230925
  chr5:6378229-6378307
  hyper

SEQ ID NO: 282781 - DNA, 31 bp, Homo sapiens; identical to SEQ ID NO: 199749
  chr5:6449618-6449649
  hyper

SEQ ID NO: 282782 - DNA, 35 bp, Homo sapiens
  chr5:6583141-6583176
  hyper
ccccgcttctcgggcgtcggggctcgccgcagtca

SEQ ID NO: 282783 - DNA, 70 bp, Homo sapiens; identical to SEQ ID NO: 199750
  chr5:6687057-6687127
  hyper

SEQ ID NO: 282784 - DNA, 129 bp, Homo sapiens; identical to SEQ ID NO: 230929
  chr5:6714973-6715102
  hyper

SEQ ID NO: 282785 - DNA, 209 bp, Homo sapiens; identical to SEQ ID NO: 199751
  chr5:7396264-7396473
  hyper

SEQ ID NO: 282786 - DNA, 85 bp, Homo sapiens
  chr5:7851299-7851384
  hyper
gcattcccgctccagggtggagcgaccctcccctcctccctcccggcccctcgactacacctggggtctctccttccttcctcct

SEQ ID NO: 282787 - DNA, 71 bp, Homo sapiens; identical to SEQ ID NO: 199752
  chr5:9544614-9544685
  hyper

SEQ ID NO: 282788 - DNA, 376 bp, Homo sapiens; identical to SEQ ID NO: 199753
  chr5:9545120-9545496
  hyper

SEQ ID NO: 282789 - DNA, 713 bp, Homo sapiens
  chr5:9545851-9546564
  hyper
tgggggcaccggcttgggggccacgagcacggtccccgagcgcgcggccaaccggtgggtgggcaggttcgcgcccagcagagacgaccctcgaggtggcaaagttgggtgtccaagccagctccgcggggcagtcctgggtgggagaagggagcgtcccgggatgagcgacactggccgggccgcccctgcacggggaaggtggagggccggggctgcagcgggccaagggccgcggctggcctgaggctgcgaagcccacccgcggcgggaaagcagcgctcgggagcgggctcagggagagcagccgccaccggcgccgccttcccggcaagtagatcggcgcggggcgagcgggcgcggagagcgcggggcggagagcgctgggcggggagcgggggacagcctgggcccacccccgccccgccccgcccctgccccgcccccgccgccgcgccgcctcctcctcctcctcctccccgccggggtgaaactcgagcgccccacccgcgcctgacctccccgagcccctccccgggccccgccccttcccggtacaggacccccaccttcgctcctgggagccccgctgcaccccaggagttccattccagcctccccagtgcgagtgcggccgagcgctgacttttgggggctccctcccccgtctcactgggtccctctgcggctcccccgcccgctgtcccggttca

SEQ ID NO: 282790 - DNA, 88 bp, Homo sapiens
  chr5:9546688-9546776
  hyper
aggggccgtctggtcctccggaactcgaactttgtgattttgttctttctgtgtgacatcctcatccgttctgagggagaaactcctt

SEQ ID NO: 282791 - DNA, 55 bp, Homo sapiens; identical to SEQ ID NO: 230933
  chr5:10250264-10250319
  hyper

SEQ ID NO: 282792 - DNA, 31 bp, Homo sapiens; identical to SEQ ID NO: 199755
  chr5:10333392-10333423
  hyper

SEQ ID NO: 282793 - DNA, 502 bp, Homo sapiens; identical to SEQ ID NO: 199756
  chr5:10354850-10355352
  hyper

SEQ ID NO: 282794 - DNA, 902 bp, Homo sapiens
  chr5:10441403-10442305
  hyper
tttctcctatccttcgactcgaggctcttttgacagatgtgatttatttcctcctagagccagtcacattggctcaagcaacctatcgtaagaaaacaaatacaatagtgttttagctggaaactgcccactgtctaagcggctttttaaattaagaactcaggttcactacgggatggcttaggccagggaacagcatgtgcgaagttcgaagcccgagaagtttggaggagcggccccaggcgcaggcgggtcccgcagcggggcccgtgccgcccaggcgatcagccccttcacttaacccgcttccctcctagcaggcccgagtcccctagcctcagcctcacgcagccagagcaaggggaagagggagtccttcgtgagttcgccgctcacattcggcggtgggaaaccgatccgaagatgcttttgtaggcgaaacgctcagctcgcgcggctctgaaccaccggggagcagcggctgctgctagtcggactacgccagcacctccttgtccagcccgggagcagccccgcctcgctcagggccgcgtgcgcgtgcgcggctccaggggcggggcctgctcgcgtcccgggtgcctggataccgagcgcgtccgtagtggcggctggcgctagggaactgcagggtctagggtgttgtcggagtggcagttggtccgaatttctcccgaagcccgcggaggagcgggtaagagccccgcgaatccggccccaacctcgggaacgggatgggaggcggccctggccgcaagccccgcgctgctagcgggtccaccgcgtcgtagccgacagccgcccttcttcctcgcagcgcgccgcgattcaccagcctggtcccttctgcggagagcgatgccgcttcccgacaccatgttctg

SEQ ID NO: 282795 - DNA, 97 bp, Homo sapiens
  chr5:10563416-10563513
  hyper
cccgcccatccccggcgccaggactgacggggagagggcaaggccgggccagaggggctgtgggcctggactgcggctgtcgcccgcggccctgctc

SEQ ID NO: 282796 - DNA, 39 bp, Homo sapiens
  chr5:10563597-10563636
  hyper
gcatggggacggggagttcctcgtcgtccgttcccactc

SEQ ID NO: 282797 - DNA, 183 bp, Homo sapiens
  chr5:10564288-10564471
  hyper
ggccaggaaggggcgcgaggggaaggccccgggggaaggcgtgtccccgcgccccgccccgccccgcctcggaaagcccccgcggtcccgcccaccccaggggctcgctcagcctccggagacttttttctttgagcgcagccgcctggtgccggtttccgccgagctggagcgcgcgggcca

SEQ ID NO: 282798 - DNA, 96 bp, Homo sapiens; identical to SEQ ID NO: 230941
  chr5:10627880-10627976
  hyper

SEQ ID NO: 282799 - DNA, 170 bp, Homo sapiens; identical to SEQ ID NO: 199758
  chr5:10988184-10988354
  hyper

SEQ ID NO: 282800 - DNA, 162 bp, Homo sapiens; identical to SEQ ID NO: 199759
  chr5:11385588-11385750
  hyper

SEQ ID NO: 282801 - DNA, 87 bp, Homo sapiens; identical to SEQ ID NO: 199760
  chr5:11903281-11903368
  hyper

SEQ ID NO: 282802 - DNA, 58 bp, Homo sapiens; identical to SEQ ID NO: 199761
  chr5:14108555-14108613
  hyper

SEQ ID NO: 282803 - DNA, 53 bp, Homo sapiens; identical to SEQ ID NO: 199762
  chr5:14108840-14108893
  hyper

SEQ ID NO: 282804 - DNA, 38 bp, Homo sapiens; identical to SEQ ID NO: 199763
  chr5:14142660-14142698
  hyper

SEQ ID NO: 282805 - DNA, 1289 bp, Homo sapiens; identical to SEQ ID NO: 199764
  chr5:14142816-14144105
  hyper

SEQ ID NO: 282806 - DNA, 124 bp, Homo sapiens; identical to SEQ ID NO: 3833
  chr5:14144285-14144409
  hyper

SEQ ID NO: 282807 - DNA, 45 bp, Homo sapiens; identical to SEQ ID NO: 199766
  chr5:14145000-14145045
  hyper

SEQ ID NO: 282808 - DNA, 153 bp, Homo sapiens; identical to SEQ ID NO: 230948
  chr5:14205132-14205285
  hyper

SEQ ID NO: 282809 - DNA, 180 bp, Homo sapiens; identical to SEQ ID NO: 199767
  chr5:14581606-14581786
  hyper

SEQ ID NO: 282810 - DNA, 94 bp, Homo sapiens; identical to SEQ ID NO: 230950
  chr5:14810079-14810173
  hyper

SEQ ID NO: 282811 - DNA, 93 bp, Homo sapiens; identical to SEQ ID NO: 199768
  chr5:15499745-15499838
  hyper

SEQ ID NO: 282812 - DNA, 170 bp, Homo sapiens
  chr5:15499947-15500117
  hyper
tgcccacgcacttaaaataggctgtacttgcagacaaactcaagggattccaaacgacgcctggaagttcatcttatagattgggggccaagcctgtaaaagaacaacagtaaaacagagccaacaggacgttgcttcgctccgaagggttcgcgcgtagcgcgctgagc

SEQ ID NO: 282813 - DNA, 292 bp, Homo sapiens
  chr5:16616791-16617083
  hyper
gcaggctccgcagcggcctcttccagctcagcagctcgtcggcgcggcagcccagccacagcaccggctccccgagcagccaggttaccgcggccgccgcccggcccgcggcctcctccacctgcaaccccgcgccctccgccgccccagcttcctgcgcttcctcctcctgctgctgccgctctgcgggggatgcctggggcggtggcggcgacggcggcgcctgctcctcggcggcaggagccgggcatccctcctcggcgtgctccggaggcgccgggctcgccatctt

SEQ ID NO: 282814 - DNA, 258 bp, Homo sapiens
  chr5:16934294-16934552
  hyper
tcaggacgctgtagcgcgttatcctgatgttccccccacttgcactagggggcagagttctccccaagggggagccacggacccctgtggtgctcagacaggctacaggaggagtgagatccgtgcaaactgaatacaaatttctatattttcatcagattttctaagggacccagaacacaaaaacaacaaagttaagaatcattgccctaggggcagggcctccgttttcttacagatgcaagcaattaaacaccg

SEQ ID NO: 282815 - DNA, 57 bp, Homo sapiens; identical to SEQ ID NO: 199771
  chr5:16934582-16934639
  hyper

SEQ ID NO: 282816 - DNA, 98 bp, Homo sapiens; identical to SEQ ID NO: 199772
  chr5:16935458-16935556
  hyper

SEQ ID NO: 282817 - DNA, 266 bp, Homo sapiens; identical to SEQ ID NO: 199773
  chr5:16935617-16935883
  hyper

SEQ ID NO: 282818 - DNA, 33 bp, Homo sapiens; identical to SEQ ID NO: 199774
  chr5:16936321-16936354
  hyper

SEQ ID NO: 282819 - DNA, 70 bp, Homo sapiens; identical to SEQ ID NO: 199775
  chr5:16936514-16936584
  hyper

SEQ ID NO: 282820 - DNA, 249 bp, Homo sapiens; identical to SEQ ID NO: 199776
  chr5:16936833-16937082
  hyper

SEQ ID NO: 282821 - DNA, 309 bp, Homo sapiens
  chr5:17216354-17216663
  hyper
gctgggacgcaggcgagcatgaaagcgatccaaacacagccagagggcgccaaaatgccgcaaataaaagttccaaaggcgtcaactggcttttgcgggaaggtaaaattggcttttgtgtaatcaaagagctaccgttgtcaacgatgtcacgttacgttatttttgtatgtccctcttgccaacaggtaagcaaagtgaacgcatcttcctaccccggtggctattctgtgtcccggtgctaaaccaagtgtccgcccccttagggcacccggacaagccgcggttggccctagctttgactcgagc

SEQ ID NO: 282822 - DNA, 35 bp, Homo sapiens
  chr5:17217138-17217173
  hyper
caacggttccaaataaatgagggggagagagagag

SEQ ID NO: 282823 - DNA, 38 bp, Homo sapiens; identical to SEQ ID NO: 230958
  chr5:17217233-17217271
  hyper

SEQ ID NO: 282824 - DNA, 48 bp, Homo sapiens; identical to SEQ ID NO: 199778
  chr5:17217633-17217681
  hyper

SEQ ID NO: 282825 - DNA, 76 bp, Homo sapiens; identical to SEQ ID NO: 199779
  chr5:17987028-17987104
  hyper

SEQ ID NO: 282826 - DNA, 84 bp, Homo sapiens; identical to SEQ ID NO: 230960
  chr5:21459584-21459668
  hyper

SEQ ID NO: 282827 - DNA, 187 bp, Homo sapiens
  chr5:22853256-22853443
  hyper
ttctcttctgtttcccctttccaaatcactgtgccaacacactgctttgcattttgtccgttttcattcaaagaaggttctccaggccgggcagccagtagacaccactttcttcctggaagaggctgcctctcttctcagaaaagcctggacccctctctgtggctccctccacatttacccttca

SEQ ID NO: 282828 - DNA, 114 bp, Homo sapiens
  chr5:22853569-22853683
  hyper
tcattgagtagtgaaaagtaattgaatcctatatttgaaatgtattttgtttgttctttttcccccctagcgttcattgtagaatgctttgaatgaatccgaggactccttagc

SEQ ID NO: 282829 - DNA, 188 bp, Homo sapiens; identical to SEQ ID NO: 199780
  chr5:24644974-24645162
  hyper

SEQ ID NO: 282830 - DNA, 121 bp, Homo sapiens; identical to SEQ ID NO: 199781
  chr5:29296854-29296975
  hyper

SEQ ID NO: 282831 - DNA, 54 bp, Homo sapiens; identical to SEQ ID NO: 199782
  chr5:31194641-31194695
  hyper

SEQ ID NO: 282832 - DNA, 54 bp, Homo sapiens; identical to SEQ ID NO: 111231
  chr5:31194760-31194814
  hyper

SEQ ID NO: 282833 - DNA, 158 bp, Homo sapiens; identical to SEQ ID NO: 230964
  chr5:31532167-31532325
  hyper

SEQ ID NO: 282834 - DNA, 439 bp, Homo sapiens
  chr5:31639164-31639603
  hyper
cgtccctgtcactcggggaagggagttcccgcccctcgaatcaaccagggggagggaatccccgcccatcctggaggctcggcggatcccctgcgcagcgaggcgaggagcggaccccagcgccggtgcgtgccggccccgggcagcgggacgcggcggggcggcggctgcaggcagccgaggagccgcaggccgaacccaaggcaccgggattgcgcctcccgcggctgccggcgaaccgcggctctgcagctcggggcaggcgcggcggcggcaccggtggtggccgcggtggcggcagctgcgcggggacccgccgggcggcgcctgggtctggacgcgcgaggaagccgcgggagcctcggccaagccgcgagcaggtgaagcgaccgtcccgctgcagccgggacgcgcggctccgggtgggcaggggatgggg

SEQ ID NO: 282835 - DNA, 498 bp, Homo sapiens; identical to SEQ ID NO: 199784
  chr5:31854442-31854940
  hyper

SEQ ID NO: 282836 - DNA, 139 bp, Homo sapiens
  chr5:32313003-32313142
  hyper
ggggcagcagcggcggccaccagcactagcggctggggctccgcccatccccaaggccgcgaccgccgcgatgccgcccgcatccggctccgccgctgacaccgctcgccccgcccaggcccgtgggccccgcccatcc

SEQ ID NO: 282837 - DNA, 252 bp, Homo sapiens; identical to SEQ ID NO: 111238
  chr5:32313198-32313450
  hyper

SEQ ID NO: 282838 - DNA, 214 bp, Homo sapiens; identical to SEQ ID NO: 199785
  chr5:32709879-32710093
  hyper

SEQ ID NO: 282839 - DNA, 72 bp, Homo sapiens
  chr5:32713505-32713577
  hyper
cgcggacgtgtaatcgccagtgtggcccattttacggtagggtagaatctgagggaaggcggactgagatgc

SEQ ID NO: 282840 - DNA, 41 bp, Homo sapiens
  chr5:33892013-33892054
  hyper
agaaataaagcgctcgcctgtggcccagcaggaagatgcag

SEQ ID NO: 282841 - DNA, 38 bp, Homo sapiens; identical to SEQ ID NO: 199786
  chr5:33936115-33936153
  hyper

SEQ ID NO: 282842 - DNA, 193 bp, Homo sapiens; identical to SEQ ID NO: 230975
  chr5:34007307-34007500
  hyper

SEQ ID NO: 282843 - DNA, 52 bp, Homo sapiens; identical to SEQ ID NO: 199787
  chr5:34008090-34008142
  hyper

SEQ ID NO: 282844 - DNA, 79 bp, Homo sapiens; identical to SEQ ID NO: 199788
  chr5:34486431-34486510
  hyper

SEQ ID NO: 282845 - DNA, 127 bp, Homo sapiens; identical to SEQ ID NO: 199789
  chr5:34655746-34655873
  hyper

SEQ ID NO: 282846 - DNA, 441 bp, Homo sapiens; identical to SEQ ID NO: 199790
  chr5:34655910-34656351
  hyper

SEQ ID NO: 282847 - DNA, 221 bp, Homo sapiens; identical to SEQ ID NO: 199791
  chr5:34656421-34656642
  hyper

SEQ ID NO: 282848 - DNA, 401 bp, Homo sapiens; identical to SEQ ID NO: 199792
  chr5:34657034-34657435
  hyper

SEQ ID NO: 282849 - DNA, 182 bp, Homo sapiens; identical to SEQ ID NO: 111256
  chr5:34915469-34915651
  hyper

SEQ ID NO: 282850 - DNA, 188 bp, Homo sapiens; identical to SEQ ID NO: 230980
  chr5:34915876-34916064
  hyper

SEQ ID NO: 282851 - DNA, 88 bp, Homo sapiens; identical to SEQ ID NO: 230981
  chr5:34929946-34930034
  hyper

SEQ ID NO: 282852 - DNA, 386 bp, Homo sapiens
  chr5:35230090-35230476
  hyper
aaagctggggttgggggcagtggtggaggcaaagcaccttaagagtattttttagcccctctgagaagggacatccgggcgggaggcgggcggatcccgggcttccccgccggctgccgactctggctcctggctggcgttctctccaggagcccgcgccggtggccccgctctccccttcagcacgcgggcctcgaacccgcatcccggagagcggccgcccgcgcagcccctgccgcgcgccgtcggaggcggcctcagctcgccatgggtactcacttttgccagggagcaaagtctgccacatcagtcgatgagtacttcctgcacgaggacatgaagctccattgtgtggaaagctgtttcgcgaacggtcggtaaaatcc

SEQ ID NO: 282853 - DNA, 175 bp, Homo sapiens
  chr5:36066734-36066909
  hyper
gagccctggcagtgcgagtatccgggacgcgcctgtctgggaattctccggccaagcactcacctactgtagatattgtcaggattttggcagcctctgagagcaggaccccagggagaaggaagcccactagaagaagcactcgctgcccagccatgctcacttctacggaagc

SEQ ID NO: 282854 - DNA, 53 bp, Homo sapiens; identical to SEQ ID NO: 230984
  chr5:36151263-36151316
  hyper

SEQ ID NO: 282855 - DNA, 87 bp, Homo sapiens; identical to SEQ ID NO: 230985
  chr5:36152364-36152451
  hyper

SEQ ID NO: 282856 - DNA, 228 bp, Homo sapiens; identical to SEQ ID NO: 230986
  chr5:36242122-36242350
  hyper

SEQ ID NO: 282857 - DNA, 103 bp, Homo sapiens; identical to SEQ ID NO: 230987
  chr5:36606432-36606535
  hyper

SEQ ID NO: 282858 - DNA, 69 bp, Homo sapiens; identical to SEQ ID NO: 199794
  chr5:36607363-36607432
  hyper

SEQ ID NO: 282859 - DNA, 32 bp, Homo sapiens; identical to SEQ ID NO: 199795
  chr5:36690646-36690678
  hyper

SEQ ID NO: 282860 - DNA, 172 bp, Homo sapiens
  chr5:36693072-36693244
  hyper
ctctgcgcccggggcggcccagcaacccctgctcgcctccgcagaggccttttgtcccgcgggctctcccagcggccccgcgctgcgtggccgttttgtgaagggcacaatccgatgttctgaggagaccacccagcttcctctcccagagtctaccagagaacaaaaccgc

SEQ ID NO: 282861 - DNA, 246 bp, Homo sapiens; identical to SEQ ID NO: 199797
  chr5:36693274-36693520
  hyper

SEQ ID NO: 282862 - DNA, 758 bp, Homo sapiens; identical to SEQ ID NO: 230992
  chr5:36744875-36745633
  hyper

SEQ ID NO: 282863 - DNA, 790 bp, Homo sapiens; identical to SEQ ID NO: 230993
  chr5:37248995-37249785
  hyper

SEQ ID NO: 282864 - DNA, 316 bp, Homo sapiens; identical to SEQ ID NO: 230994
  chr5:37370926-37371242
  hyper

SEQ ID NO: 282865 - DNA, 170 bp, Homo sapiens
  chr5:37371575-37371745
  hyper
aacttcccgcgtcggtatccgctaactgcagctatatgagttcgcgcatgagcgcgcagtttggttctccaagtaactgcttttgtgagagtagttaagaattggtaggtcgctgtcacagagagggatataaaccagtatctcactatattcttcgcgggcttcagtgt

SEQ ID NO: 282866 - DNA, 153 bp, Homo sapiens; identical to SEQ ID NO: 230996
  chr5:37379258-37379411
  hyper

SEQ ID NO: 282867 - DNA, 265 bp, Homo sapiens; identical to SEQ ID NO: 199800
  chr5:38258958-38259223
  hyper

SEQ ID NO: 282868 - DNA, 113 bp, Homo sapiens; identical to SEQ ID NO: 199801
  chr5:38556094-38556207
  hyper

SEQ ID NO: 282869 - DNA, 85 bp, Homo sapiens; identical to SEQ ID NO: 199802
  chr5:38556985-38557070
  hyper

SEQ ID NO: 282870 - DNA, 160 bp, Homo sapiens; identical to SEQ ID NO: 199803
  chr5:38557400-38557560
  hyper

SEQ ID NO: 282871 - DNA, 158 bp, Homo sapiens; identical to SEQ ID NO: 231003
  chr5:39075114-39075272
  hyper

SEQ ID NO: 282872 - DNA, 42 bp, Homo sapiens; identical to SEQ ID NO: 199804
  chr5:39424510-39424552
  hyper

SEQ ID NO: 282873 - DNA, 41 bp, Homo sapiens; identical to SEQ ID NO: 199805
  chr5:39424612-39424653
  hyper

SEQ ID NO: 282874 - DNA, 38 bp, Homo sapiens
  chr5:39424891-39424929
  hyper
tcgaagctactcaccggctagctattgcctccgtgaag

SEQ ID NO: 282875 - DNA, 41 bp, Homo sapiens; identical to SEQ ID NO: 199806
  chr5:40680493-40680534
  hyper

SEQ ID NO: 282876 - DNA, 336 bp, Homo sapiens; identical to SEQ ID NO: 199807
  chr5:40680627-40680963
  hyper

SEQ ID NO: 282877 - DNA, 189 bp, Homo sapiens; identical to SEQ ID NO: 199808
  chr5:40798280-40798469
  hyper

SEQ ID NO: 282878 - DNA, 104 bp, Homo sapiens; identical to SEQ ID NO: 231009
  chr5:40835228-40835332
  hyper

SEQ ID NO: 282879 - DNA, 471 bp, Homo sapiens; identical to SEQ ID NO: 199809
  chr5:41510364-41510835
  hyper

SEQ ID NO: 282880 - DNA, 796 bp, Homo sapiens
  chr5:41870078-41870874
  hyper
agcgccaaagggctcgggagcgctgccaggagtcctcccgccccttctcagcctctccgcgcgcttctttatcgcgtctcgctccatcagggaagcgactgcagaaccaagcaaaggcggtcatccgaggggccggcgaggccaggaacgcgtcgccgcgtgtccgtgaccagggcaccgcgccacggatgccagatcccaggctggagagagcgggtaggggcagagaagaaaacgcgggcaccactcagggtttggtccacgttcttcctgcccatggccttcctcttcccccgcactttaccttgtaccaggttgccccagatccgcgggcagaggcgcagagccgaagcccggaggagaggagtttgagagccgccatcttcgggcggtgaggcaggaggaggctgcgggttggagcgcgcgtttgagcgtcggtgcgcgactgcgaaggaaacccgggcgggctggaggctcgacagcgcgtcgatgacgtcctcccggcctttcgagccgcacgccaccggcgcgctgctggctgctgcttttaaaagaagtgaggctgggcggggccccggcggggagaagaggctctgtgcagccggggcggatcgcggggaagttcctctcagcgcctcaggtgtctgggcgtgtgcagctgtgttggcgcacacttgccgctacagcccttctgtcagccctttagcttcgatggggcgctggtggccgcctccccctaggttgtggatgagtcttggcctagggttcagggccctccggccgcgggaggatctcc

SEQ ID NO: 282881 - DNA, 343 bp, Homo sapiens; identical to SEQ ID NO: 231012
  chr5:41904222-41904565
  hyper

SEQ ID NO: 282882 - DNA, 316 bp, Homo sapiens; identical to SEQ ID NO: 231013
  chr5:41925471-41925787
  hyper

SEQ ID NO: 282883 - DNA, 236 bp, Homo sapiens; identical to SEQ ID NO: 199812
  chr5:42423573-42423809
  hyper

SEQ ID NO: 282884 - DNA, 119 bp, Homo sapiens; identical to SEQ ID NO: 199813
  chr5:42423971-42424090
  hyper

SEQ ID NO: 282885 - DNA, 278 bp, Homo sapiens; identical to SEQ ID NO: 199814
  chr5:42424337-42424615
  hyper

SEQ ID NO: 282886 - DNA, 729 bp, Homo sapiens
  chr5:42949351-42950080
  hyper
gaaccaaaacaaaccgtaattccgacggaaaaacagcgagaaaagaaaacgaaatgaaactgacactaagcagaccgtatagagaagtagccctacagaacgcagggattaaagagagcttcagaggccaagaaccacctgtgtccgggaaatgagcattgctgccaccaggaaactgtccgctagggctcggcactactaaggacctcgctaacaataatctggctgcgctgggactcagcaagagcagacacccagcggattgccctggtgttgccaaacaaatgtccatttaggtgccataaatggtgctgctagaaagaaactgcgggctcttagataggagtcctgtctggagaaatgaactgactgtgtttaaatgtgttgtgacagaaaaatgtgttgtggcatcttattgtgttttaagtcgtttaatgtgttttaacccgttgtaatgtgctgtgagagaaaaagccgcagctaacggtgctatggaattactagagagcacagaggctgggtgcagtcaccggtctgcaccgtaaaaaggggttcaggaagttcctacgagatattagcgtttctaggacccagaaagagacagcacagagaatttacgggccccgaaaacatgaaacgtcctgttgggcgctaagaattgtgcaccaattgagaaaacgcccagtgggcgctactggcaaaagtgctgacgcaaaaccgacagctccg

SEQ ID NO: 282887 - DNA, 112 bp, Homo sapiens
  chr5:42950733-42950845
  hyper
aaaaaaaaaaaaaccgcattcgctggtacccagatttctacaggagttaaacgtctcctgagcagctaaagcagagcttactagtaagaaacttgcaatgactaaggaactt

SEQ ID NO: 282888 - DNA, 34 bp, Homo sapiens; identical to SEQ ID NO: 199816
  chr5:42993813-42993847
  hyper

SEQ ID NO: 282889 - DNA, 183 bp, Homo sapiens; identical to SEQ ID NO: 199817
  chr5:42995428-42995611
  hyper

SEQ ID NO: 282890 - DNA, 334 bp, Homo sapiens; identical to SEQ ID NO: 199818
  chr5:43007484-43007818
  hyper

SEQ ID NO: 282891 - DNA, 387 bp, Homo sapiens; identical to SEQ ID NO: 199819
  chr5:43017314-43017701
  hyper

SEQ ID NO: 282892 - DNA, 303 bp, Homo sapiens; identical to SEQ ID NO: 199820
  chr5:43019347-43019650
  hyper

SEQ ID NO: 282893 - DNA, 259 bp, Homo sapiens; identical to SEQ ID NO: 199821
  chr5:43019887-43020146
  hyper

SEQ ID NO: 282894 - DNA, 363 bp, Homo sapiens; identical to SEQ ID NO: 199822
  chr5:43020294-43020657
  hyper

SEQ ID NO: 282895 - DNA, 91 bp, Homo sapiens; identical to SEQ ID NO: 199823
  chr5:43040739-43040830
  hyper

SEQ ID NO: 282896 - DNA, 195 bp, Homo sapiens; identical to SEQ ID NO: 199824
  chr5:43041028-43041223
  hyper

SEQ ID NO: 282897 - DNA, 349 bp, Homo sapiens; identical to SEQ ID NO: 231028
  chr5:43041474-43041823
  hyper

SEQ ID NO: 282898 - DNA, 1169 bp, Homo sapiens; identical to SEQ ID NO: 199825
  chr5:43042087-43043256
  hyper

SEQ ID NO: 282899 - DNA, 253 bp, Homo sapiens; identical to SEQ ID NO: 199826
  chr5:43043288-43043541
  hyper

SEQ ID NO: 282900 - DNA, 444 bp, Homo sapiens; identical to SEQ ID NO: 231030
  chr5:43067119-43067563
  hyper

SEQ ID NO: 282901 - DNA, 36 bp, Homo sapiens; identical to SEQ ID NO: 231031
  chr5:43120913-43120949
  hyper

SEQ ID NO: 282902 - DNA, 32 bp, Homo sapiens; identical to SEQ ID NO: 231032
  chr5:43121558-43121590
  hyper

SEQ ID NO: 282903 - DNA, 35 bp, Homo sapiens; identical to SEQ ID NO: 199827
  chr5:43193140-43193175
  hyper

SEQ ID NO: 282904 - DNA, 200 bp, Homo sapiens; identical to SEQ ID NO: 231034
  chr5:43313630-43313830
  hyper

SEQ ID NO: 282905 - DNA, 284 bp, Homo sapiens; identical to SEQ ID NO: 231036
  chr5:43484116-43484400
  hyper

SEQ ID NO: 282906 - DNA, 266 bp, Homo sapiens; identical to SEQ ID NO: 231037
  chr5:43514901-43515167
  hyper

SEQ ID NO: 282907 - DNA, 344 bp, Homo sapiens; identical to SEQ ID NO: 199828
  chr5:43557421-43557765
  hyper

SEQ ID NO: 282908 - DNA, 222 bp, Homo sapiens
  chr5:43603563-43603785
  hyper
ggggtgtccgcaggccgcaggcttaggtggggaagaagcaccgtgcctcttggtgtccctttctcgtctcctgctggggcgatgtcgaagggagtgggctggtggatttgggaactgggtccccgaagagggcagggaatgaggcggcagctgtgcaggtgcagatatttgcagctttgggggacagcgagagtcgtacggggtcatttcggccctcaagat

SEQ ID NO: 282909 - DNA, 274 bp, Homo sapiens; identical to SEQ ID NO: 199829
  chr5:44389052-44389326
  hyper

SEQ ID NO: 282910 - DNA, 41 bp, Homo sapiens
  chr5:44390394-44390435
  hyper
aaacgcactttatggcgatcgcaaagattttaccatataat

SEQ ID NO: 282911 - DNA, 348 bp, Homo sapiens; identical to SEQ ID NO: 231041
  chr5:44808978-44809326
  hyper

SEQ ID NO: 282912 - DNA, 220 bp, Homo sapiens
  chr5:45695686-45695906
  hyper
cgggacgccccccacccaagggcggggaagcgcgtttcagggcgcgcctgaagggagggtggggcggcgaccgggagccctcacctgaaatcactgtaagggtggataatccagaagcctgcagttttaaccctttcctgctccttttccaccgccttctggctcccaaacatgcggagggagaatttgttgaccccgggctgcagcatggaggtgaact

SEQ ID NO: 282913 - DNA, 162 bp, Homo sapiens
  chr5:45696137-45696299
  hyper
cgctgttgccatcgtcccggctgttagacgaagagttgggcttgccgcctccttccatgcccggaggacgcggccggcgacggcgcgggctccagactcgccggccgcccggcgccggagacacgtagccgagagggtaggggcccgagccggctgccggcg

SEQ ID NO: 282914 - DNA, 166 bp, Homo sapiens; identical to SEQ ID NO: 199830
  chr5:45696558-45696724
  hyper

SEQ ID NO: 282915 - DNA, 51 bp, Homo sapiens; identical to SEQ ID NO: 199831
  chr5:49737299-49737350
  hyper

SEQ ID NO: 282916 - DNA, 64 bp, Homo sapiens; identical to SEQ ID NO: 231043
  chr5:50259395-50259459
  hyper

SEQ ID NO: 282917 - DNA, 118 bp, Homo sapiens; identical to SEQ ID NO: 199832
  chr5:50263366-50263484
  hyper

SEQ ID NO: 282918 - DNA, 97 bp, Homo sapiens; identical to SEQ ID NO: 231047
  chr5:50673162-50673259
  hyper

SEQ ID NO: 282919 - DNA, 413 bp, Homo sapiens
  chr5:50673739-50674152
  hyper
ctgagaagagaaggcgttgttgacctttcggggagcaagttaataactcagccgagttgatgaagtgacgttctttctgaaaggggtcgtctcctgggccccttttctcagtcggcatttagcaggtagggaggcagggcaaattcttctctccacgtgaagtcacaaagaattgatgagtttcaacagcatggatctgaagtcgtagataattctaaacacacccgcgccagagttcacactcttgttcatctctgcggagttggagcagacagcgaccttcaaaattgtccctaaaatctctctcgaactgaccgggcatttactgggatttgaggggtttttcttcagcttccaaactactgttacatgcagaatatactggtagatgccaccaatgattgcccacctct

SEQ ID NO: 282920 - DNA, 43 bp, Homo sapiens
  chr5:50674188-50674231
  hyper
acactaaactgtcccgacatgccttagccgtcagtttaattca

SEQ ID NO: 282921 - DNA, 140 bp, Homo sapiens; identical to SEQ ID NO: 199834
  chr5:50674590-50674730
  hyper

SEQ ID NO: 282922 - DNA, 353 bp, Homo sapiens
  chr5:50677760-50678113
  hyper
aatgcggccggccaggatttacagctcttatcaagggttagattttgcgaaagatataaagaaaggagtttcctaacacaccgggtcttctcacagcaacaagacaccgaaattaagccttctatggtttgtgtctgtaggactttttagataaaactggcagccccattagataagaaatggctttttagaagctttgggggaagcgcgggggttcttcgtggccttcctgtgactgtctttgggagaccgtaacagatgatgggaacatgtaagaatgattgaagaaggttaccggcgagttgcacctaacagtcttctctctccaagtagtttctcgagagaaaattata

SEQ ID NO: 282923 - DNA, 905 bp, Homo sapiens
  chr5:50678490-50679395
  hyper
gtcccaacagcaagaagcgcccctttcctcccacccaacgtttttagatatctgaggttgggggagacggagtaatggtgtagcagtcaggaaacagttcctctgggtttaatcatcccattcccgattcttcttcccctagcgcgccgagcgcagccagttctggaggaactagccctccggagcagccaaggcaggccaggccccggggatgtgcaccacggcgtggggaccaaaccaagctgaacggcctgctccaagttccccccttttcctagagcccgggagggacctcgtcaacaggtagacctacccaccagccactcgccaccggcggcagaaagtgagccccgcgcgcaacgcggccagccggactgcggggaccccaggagcgcagggcggaggagcagcgccacaggaggcgagggcgcaggcggcgcggccgggaaggaacgcgggaggggacagaaggaagaggaagaggaggagagggaggccagagccagaacagcccggcagcccgagcttcgggggagaacggcctgagccccgagcaagttgcctcgggagccctaatcctctcccgctggctcgccgagcggtcagtggcgctcagcggcggcgaggctgaaatatgataatcagaacagctgcgccgcgcgccctgcagccaatgggcgcggcgctcgcctgacgtccccgcgcgctgcgtcagaccaatggcgatggagctgagttggagcagagaagtttgagtaagagataaggaagagaggtgcccgagccgcgccgagtctgccgccgccgcagcgcctccgctccgccaactccgccggcttaaattggactcctagatccgcgagggcgcggcgcagccgagcagcggctctttcagcattggcaac

SEQ ID NO: 282924 - DNA, 46 bp, Homo sapiens; identical to SEQ ID NO: 231052
  chr5:50679667-50679713
  hyper

SEQ ID NO: 282925 - DNA, 183 bp, Homo sapiens; identical to SEQ ID NO: 231053
  chr5:50684684-50684867
  hyper

SEQ ID NO: 282926 - DNA, 223 bp, Homo sapiens; identical to SEQ ID NO: 199836
  chr5:50694001-50694224
  hyper

SEQ ID NO: 282927 - DNA, 57 bp, Homo sapiens
  chr5:50694660-50694717
  hyper
atgttatttgtggatttgaccgagttagctacttaattttgcgcgttgtcccattgg

SEQ ID NO: 282928 - DNA, 205 bp, Homo sapiens
  chr5:50695463-50695668
  hyper
taatccagtatctcctcttgctgcttggaaatgacagttttgcgccaaagccatttatggttcgcagggtcagtgggctctgactcaagggcaatcaataaaatatttagttcagtaataagctgagtttttttcccgaatgtaccgagaaggatgtgtcaccatcttggacaaggtgtcactgcgtagccgatcgccctttccc

SEQ ID NO: 282929 - DNA, 382 bp, Homo sapiens
  chr5:52083691-52084073
  hyper
aaggggtgtgaaggcggagccactgggctggcaacaccctcccgaaggtccagcccttacccgccttcctaccaccttaggggatttggcccggagaacgagatcaccctctcaatgaaaggcagatgtccctttaaggtttgcttctacagcccgtggactttagcctaaacacggacccgcgaagctggctttatttgtccatgtctcggacagagcctgggaagctgccagtgagatttcagagaccaagagcgcgaaggggcgggcgatgtggcaatccgtctgggatgtgaaaagcgtggagcgcatttagaggaattcgacgaaaacacaggaaatcactcctctcccgctcctgggcgccgctgccactggggca

SEQ ID NO: 282930 - DNA, 294 bp, Homo sapiens
  chr5:52084134-52084428
  hyper
cggtcctgccctgcgaaccagcgcggccccctggcgctgaggctgctccggccatggcccctcggccccgcgcccgcccaggggtcgctgtcgcctgctgctggctcctcactggtgagcgactcgcttttctctgagcatctcctgctcgcgggcttggggcttggagcggggagggaggtcctcagagccatgggccagataggaagagagagcgcccatccactttcgggcattccaggtactcaggccaggctacggggcaggcaggagtttcgcgttctggttttgata

SEQ ID NO: 282931 - DNA, 745 bp, Homo sapiens
  chr5:52284771-52285516
  hyper
gccaggagccgggcgctgccaagggctgcggaggggccacgttctcccggggactggggcatctcctgcgtgctggcgacaggctgcgggggcggagtggtgccagggcgggcgctcgcccgtcggatatgcccacccgtcccgtccagggcaggaaagcctgccagggcgccatccccatccccaccgcctccaggctgccggggctgggccgctgtacgggagccaaggtgcggtgccccgcgtgtggacgagccgaggtgcagcccgcggggccgcagggccggggtggggcggggcgcggccggagcagatccggtgtttgcggaatcaggaggggcgggctggggcgggccctcggcgctgcaggagctgcccagaaacttttccctgctctcaccgggcgggggagagaagccctctggacagcttctagagtgtgcaggttctcgtatccctcggccaagggtatcctctgcaaacctctgcaaacccagcgcaactacggtcccccggtcagacccaggatggggccagaacggacaggggccgcgccgctgccgctgctgctggtgttagcgctcagtcaaggtaagcggggatttcgctctgcatcggctgcaggagggacccgcgcggcttcctggggctcgctggagggattgggcggaactagggagcgagctccgtgtgttccctcggattccacgtggactcgggctcccagccaccaggacctgcttgg

SEQ ID NO: 282932 - DNA, 39 bp, Homo sapiens; identical to SEQ ID NO: 199839
  chr5:52285808-52285847
  hyper

SEQ ID NO: 282933 - DNA, 53 bp, Homo sapiens; identical to SEQ ID NO: 231059
  chr5:52405480-52405533
  hyper

SEQ ID NO: 282934 - DNA, 119 bp, Homo sapiens; identical to SEQ ID NO: 231060
  chr5:52405741-52405860
  hyper

SEQ ID NO: 282935 - DNA, 107 bp, Homo sapiens; identical to SEQ ID NO: 199840
  chr5:52776321-52776428
  hyper

SEQ ID NO: 282936 - DNA, 329 bp, Homo sapiens; identical to SEQ ID NO: 199841
  chr5:52778273-52778602
  hyper

SEQ ID NO: 282937 - DNA, 149 bp, Homo sapiens; identical to SEQ ID NO: 199842
  chr5:52778741-52778890
  hyper

SEQ ID NO: 282938 - DNA, 257 bp, Homo sapiens
  chr5:53606115-53606372
  hyper
aaggcttaccagccggctgcgggagaaagaaccccagaggcatcctatcccaaagaaagaaagcaaaaaggctgctcctcaaggcagggggccatcgggcacgccgagatccgagaggcgacatgccacccctgccctgcacctaccagataatccatgtacagaaacgcctcagttattcggagatcagacatccggcagcctaaagcatccggaacggctccgaacccggaaaaaaaaagcagcgtctctggctg

SEQ ID NO: 282939 - DNA, 239 bp, Homo sapiens; identical to SEQ ID NO: 41529
  chr5:53606415-53606654
  hyper

SEQ ID NO: 282940 - DNA, 232 bp, Homo sapiens; identical to SEQ ID NO: 199843
  chr5:53813366-53813598
  hyper

SEQ ID NO: 282941 - DNA, 107 bp, Homo sapiens; identical to SEQ ID NO: 199844
  chr5:54469036-54469143
  hyper

SEQ ID NO: 282942 - DNA, 61 bp, Homo sapiens; identical to SEQ ID NO: 231065
  chr5:54469486-54469547
  hyper

SEQ ID NO: 282943 - DNA, 135 bp, Homo sapiens; identical to SEQ ID NO: 199845
  chr5:54472071-54472206
  hyper

SEQ ID NO: 282944 - DNA, 210 bp, Homo sapiens; identical to SEQ ID NO: 199846
  chr5:54472542-54472752
  hyper

SEQ ID NO: 282945 - DNA, 74 bp, Homo sapiens; identical to SEQ ID NO: 199847
  chr5:54518559-54518633
  hyper

SEQ ID NO: 282946 - DNA, 224 bp, Homo sapiens; identical to SEQ ID NO: 231069
  chr5:54523518-54523742
  hyper

SEQ ID NO: 282947 - DNA, 223 bp, Homo sapiens
  chr5:54526944-54527167
  hyper
tcaccttccctccccgcagacagacacttgcaggatttagacaaaccacaactgtttattggtgaaagactcagcttcctcatgtgctcgctgcaaaataaataaaataccagatgctagtatcgtacactatttacaacctgcagctgaccaagcaggtcctgaagccttctctgtggaccagtactgcactcttctgaggctacgggagaggtccagcagc

SEQ ID NO: 282948 - DNA, 257 bp, Homo sapiens; identical to SEQ ID NO: 199849
  chr5:54528085-54528342
  hyper

SEQ ID NO: 282949 - DNA, 197 bp, Homo sapiens; identical to SEQ ID NO: 199850
  chr5:54528383-54528580
  hyper

SEQ ID NO: 282950 - DNA, 238 bp, Homo sapiens; identical to SEQ ID NO: 199851
  chr5:54529891-54530129
  hyper

SEQ ID NO: 282951 - DNA, 108 bp, Homo sapiens; identical to SEQ ID NO: 231073
  chr5:54603781-54603889
  hyper

SEQ ID NO: 282952 - DNA, 78 bp, Homo sapiens; identical to SEQ ID NO: 231074
  chr5:54604144-54604222
  hyper

SEQ ID NO: 282953 - DNA, 91 bp, Homo sapiens
  chr5:54830957-54831048
  hyper
gtcagccaatcagcgccgtcggcctcatccctcccgacctgcggcatccgcccagaagtgcggctctcggcagccgggcggggcgtggggg

SEQ ID NO: 282954 - DNA, 49 bp, Homo sapiens; identical to SEQ ID NO: 111420
  chr5:54831085-54831134
  hyper

SEQ ID NO: 282955 - DNA, 328 bp, Homo sapiens; identical to SEQ ID NO: 199852
  chr5:56110212-56110540
  hyper

SEQ ID NO: 282956 - DNA, 562 bp, Homo sapiens
  chr5:56112631-56113193
  hyper
gttcctgggaatgcgaactgcactgctaagtcacttgagtgacttctgtttggagtttgaatttggcctttgaagtttgcatttggcggagtggtgtaagagccaggaccggatgtgtcagccattcagtttcaaagcagtggtgactgctccccgcagcccctccggcttggcccggggactgcggcgcgggtgcagtgcttcctgctcggtgccctggcgcgggccgcccgctgaattccaggggccgcagtgcggtgggcttcggctcagatgcgtcttctggtgcatatgaagtacagtatgtgtaaggtaatttagaccagcggtttattggcctcgcccatttttggctactggaaatttttatgttaaaggaaattcttttaagtgtgacagctacatccttgtttgtttgttttttaaaaacctgattaacgtatgcaaagtacaaagtcttgatgggtattttgagttgctggaaatgtttttgtgatagtccctcgtggccctgtagaattccctgacctttattatgagaagaaagcgtgtcattttgtga

SEQ ID NO: 282957 - DNA, 206 bp, Homo sapiens; identical to SEQ ID NO: 231078
  chr5:56204903-56205109
  hyper

SEQ ID NO: 282958 - DNA, 71 bp, Homo sapiens; identical to SEQ ID NO: 231079
  chr5:56206157-56206228
  hyper

SEQ ID NO: 282959 - DNA, 138 bp, Homo sapiens
  chr5:56246408-56246546
  hyper
cattacccactgggaaccaccgaagacgtaagaaaataggacaaacctgggctcgaacttccaaaagaagcctaggagagagagaagaaaacgtgaggttagatcgcacagccagggaaagaggcagcgccggcaaca

SEQ ID NO: 282960 - DNA, 481 bp, Homo sapiens
  chr5:56246575-56247056
  hyper
ctccgcagctgccaaaagtgcaagacgtagcttcactcgaatcgctcccggcccctttcgggccccctcttggctgcctcgccttcctccccgagtcccaagtgtacaaactcacagacccgggacgaagcccggagtctgagaggcaactccaagtcgcttcttggagctcagcaagtttccaagcagagaagcaaaacccagagcagtcggctggcaccatcagtcccccatccctggcatctccggagtcctccaaatcccacccggctctccgaagccccaaacaactcgaaacgtaacacccttttctggaacgaactcgcgttctgagcacctagttcgcccctggggcccgggagccccaactccgaagccgatctcttcccctgcagcgtaggccagctcgaatcggacactcgcccccaaaccaaagcgcgagccccccatcctctctctcgagtccagagatgcagctcct

SEQ ID NO: 282961 - DNA, 1274 bp, Homo sapiens
  chr5:57755330-57756604
  hyper
aagccgatccccagcgctgccggcgcacaaaagccagagggcaggtgaggagcccacctcgcgctgggatcggacccccgaaaaacccggaagcggcgggcgagggaccccgcgggcttgcccggcttggggtcgcccggacagacctcccgcccgcccggcagcccggcgccctccgcttgtcacctttcccagcactttgccccggcagtagcgcttcccagtcgtggggtcgacgataatccgcgagatctccggccccgagtgcgaatggtggtgatggtggtgaggggccgccgggggcacttgcgcctgggactgaggtggctgcgattcctcggggggctgcggcggccgcttcttcttcgagtccgctccgcaacccttgcccagcgcctgctcgcacattttggtgctggcggctggctggtaggtgatagtccgcaaaagctccatggtcgccttgccgccccgcactgcccgctgccaccccctaggcgcggtcacacgtccgagccggccgtggtcctcgcacccttgcctctggtgccgactagcacccaacaccccggtccacttgtgcgagtgagagcgctcggcgaagtcttatatacggggaggcgggaagggggcggagactcgatacgcgacatcacgtcacggcctatgccccgccccacggccggccgagcgcgcgtggccgggaagcaagtcttgtcccgccacccgggtctcgcttcccagcggagccgcgcgcctcaaacgccggccgccgagatctcttgcggccgcgggaaggccttcagagccgtccgtgggccccgctgtcccgttcttcgaaggctccgagcctcagcgtacaaaacagaatcgcgagggccgacgcctggcctcacccccgccccagccgcctggtggcagggcagtgccgtgacccgagcgagtcgggcgcgggtgtagacgcagtccctcccccgcacagcccttcccggccgcccggggcctcctgtgtcaaggtatcagggtgcccggagcccgccgcacgggcaggcgaggcctcctccggccgtatgacagggctcgtctgcagctgccccgcagtgcctgcccgcgctgtgacgagctcgctggtgtctagctggggcagtgccgagaggccgtgggggtgaaaggccgggattcgtggagccgggcattcgagcccatcgcgctagggcagacacgggcccgcagccgggatcccgggccgatcggccaaccgtgccaggatccca

SEQ ID NO: 282962 - DNA, 37 bp, Homo sapiens; identical to SEQ ID NO: 199857
  chr5:57878673-57878710
  hyper

SEQ ID NO: 282963 - DNA, 158 bp, Homo sapiens; identical to SEQ ID NO: 199858
  chr5:57878752-57878910
  hyper

SEQ ID NO: 282964 - DNA, 228 bp, Homo sapiens; identical to SEQ ID NO: 199859
  chr5:57879190-57879418
  hyper

SEQ ID NO: 282965 - DNA, 139 bp, Homo sapiens; identical to SEQ ID NO: 199860
  chr5:58334875-58335014
  hyper

SEQ ID NO: 282966 - DNA, 210 bp, Homo sapiens; identical to SEQ ID NO: 199861
  chr5:58335353-58335563
  hyper

SEQ ID NO: 282967 - DNA, 94 bp, Homo sapiens; identical to SEQ ID NO: 199862
  chr5:58335881-58335975
  hyper

SEQ ID NO: 282968 - DNA, 41 bp, Homo sapiens; identical to SEQ ID NO: 111443
  chr5:59105973-59106014
  hyper

SEQ ID NO: 282969 - DNA, 244 bp, Homo sapiens; identical to SEQ ID NO: 199863
  chr5:59187968-59188212
  hyper

SEQ ID NO: 282970 - DNA, 49 bp, Homo sapiens; identical to SEQ ID NO: 199864
  chr5:59188327-59188376
  hyper

SEQ ID NO: 282971 - DNA, 201 bp, Homo sapiens; identical to SEQ ID NO: 199865
  chr5:59189507-59189708
  hyper

SEQ ID NO: 282972 - DNA, 74 bp, Homo sapiens; identical to SEQ ID NO: 199866
  chr5:59190083-59190157
  hyper

SEQ ID NO: 282973 - DNA, 369 bp, Homo sapiens; identical to SEQ ID NO: 231087
  chr5:59996101-59996470
  hyper

SEQ ID NO: 282974 - DNA, 262 bp, Homo sapiens; identical to SEQ ID NO: 231088
  chr5:60458162-60458424
  hyper

SEQ ID NO: 282975 - DNA, 203 bp, Homo sapiens; identical to SEQ ID NO: 199868
  chr5:60626141-60626344
  hyper

SEQ ID NO: 282976 - DNA, 252 bp, Homo sapiens
  chr5:60626723-60626975
  hyper
ctgagagcgcggcgcgcgtcccgagcgcctggactccgcgcagccgggcgccgcgcacccgggtgccggggtgggagccgggccgcagacccaagtgcgcccgaagccgccgtccgccgcctggcacgccgtctgccgcctgctgggcgatgtgtgcgcgagcccgtggggcttgcgcgcgccctgcggcgtgtgtactcacaaaggtgtgtctgctaaccccacagcccgggctgcgttccaccccgagct

SEQ ID NO: 282977 - DNA, 51 bp, Homo sapiens; identical to SEQ ID NO: 231090
  chr5:60627994-60628045
  hyper

SEQ ID NO: 282978 - DNA, 158 bp, Homo sapiens; identical to SEQ ID NO: 231091
  chr5:60704664-60704822
  hyper

SEQ ID NO: 282979 - DNA, 159 bp, Homo sapiens
  chr5:60921445-60921604
  hyper
gttctctgagatgtcgctgctattactgtctcaaatttccttttaaattttgctgtttgagtaaattagtgctggcctttcctgagctccgcagctccgaggtggcccgactgccgggcctccaccccttttccccggtcccgggtcggtttctccggg

SEQ ID NO: 282980 - DNA, 63 bp, Homo sapiens; identical to SEQ ID NO: 111465
  chr5:60921662-60921725
  hyper

SEQ ID NO: 282981 - DNA, 159 bp, Homo sapiens; identical to SEQ ID NO: 231093
  chr5:61699272-61699431
  hyper

SEQ ID NO: 282982 - DNA, 74 bp, Homo sapiens; identical to SEQ ID NO: 231094
  chr5:61708381-61708455
  hyper

SEQ ID NO: 282983 - DNA, 387 bp, Homo sapiens; identical to SEQ ID NO: 41580
  chr5:63255315-63255702
  hyper

SEQ ID NO: 282984 - DNA, 219 bp, Homo sapiens; identical to SEQ ID NO: 199869
  chr5:63257392-63257611
  hyper

SEQ ID NO: 282985 - DNA, 95 bp, Homo sapiens; identical to SEQ ID NO: 199870
  chr5:63257861-63257956
  hyper

SEQ ID NO: 282986 - DNA, 132 bp, Homo sapiens
  chr5:63462119-63462251
  hyper
gggtgccaggggtccagtactgaaccctctccaggtctgaggtggggaactgcgtcttgtttaatttcggagcttgtggggaccacacagccccttccacggccgattccctctgcacggttccactttcct

SEQ ID NO: 282987 - DNA, 404 bp, Homo sapiens
  chr5:63802607-63803011
  hyper
tgcaagatggtgggtgaaaactgcgcctctttttttttttttttaattgagagggggtggggggagtcatgtatgttaatcatttgcctgagtgccagccactcccccaccctcagctcctcaatgccgatcacgtggcacatgcactatttttaaatctgcagtcccccaaattcagggtgacaccctggtcgtaataaccctgcagaaagaagtgtgacagcaagggtcttggggatcagcggctgtaggttgtgcctgtaccccctcgaagaatggtggatgcgaaagacacagtgaactggctcgctcacggaggagggagggatgaggaggtggggatgctgctttctggggacagagtagcaaacaaacccaaatacagcgcacggggcgctgcggag

SEQ ID NO: 282988 - DNA, 58 bp, Homo sapiens; identical to SEQ ID NO: 199872
  chr5:63986116-63986174
  hyper

SEQ ID NO: 282989 - DNA, 49 bp, Homo sapiens; identical to SEQ ID NO: 199873
  chr5:63986984-63987033
  hyper

SEQ ID NO: 282990 - DNA, 532 bp, Homo sapiens; identical to SEQ ID NO: 231101
  chr5:64064488-64065020
  hyper

SEQ ID NO: 282991 - DNA, 511 bp, Homo sapiens; identical to SEQ ID NO: 231102
  chr5:64398788-64399299
  hyper

SEQ ID NO: 282992 - DNA, 189 bp, Homo sapiens; identical to SEQ ID NO: 199875
  chr5:64777664-64777853
  hyper

SEQ ID NO: 282993 - DNA, 46 bp, Homo sapiens; identical to SEQ ID NO: 231104
  chr5:64859099-64859145
  hyper

SEQ ID NO: 282994 - DNA, 162 bp, Homo sapiens; identical to SEQ ID NO: 231105
  chr5:64920140-64920302
  hyper

SEQ ID NO: 282995 - DNA, 162 bp, Homo sapiens; identical to SEQ ID NO: 199876
  chr5:65017234-65017396
  hyper

SEQ ID NO: 282996 - DNA, 41 bp, Homo sapiens; identical to SEQ ID NO: 231107
  chr5:65017860-65017901
  hyper

SEQ ID NO: 282997 - DNA, 33 bp, Homo sapiens
  chr5:65220754-65220787
  hyper
ctctccgcaataaacgcgaaccctgccaggctg

SEQ ID NO: 282998 - DNA, 357 bp, Homo sapiens
  chr5:65220847-65221204
  hyper
cctgcgtcgcatcggagcgtacccatgtttcttctaacaaaggcacgatcttgaggccatttcgcgggcccttttcccactcccagcgccagctttgtctccccgccggtatgaggctgagacttggaggaggctgagctgcgccgctggggaacaagctcgaagggcgggcgtgggaagctgcaccgcgctgccgctgtggtttcctgcgacctgaccgtgccattagaggaagttggagtgctgcagctgcaagagatacctgctgccttcaaatcagggctggactccaacaacccctgtgcaccgattactgtcgtacaaagaaactccatcggccggcgcggcggaggcctg

SEQ ID NO: 282999 - DNA, 149 bp, Homo sapiens; identical to SEQ ID NO: 231109
  chr5:65439856-65440005
  hyper

SEQ ID NO: 283000 - DNA, 47 bp, Homo sapiens; identical to SEQ ID NO: 231110
  chr5:65891728-65891775
  hyper

SEQ ID NO: 283001 - DNA, 708 bp, Homo sapiens
  chr5:65892690-65893398
  hyper
ggaggcaccctgggcgcccgggcgcccgccgcgtgggctccggcaagcgtgctgctggagcgcggagtccttgcgctgccgccgccgcttcccggaggagctgtgccgcccgcgccccggggcagcagcgcgtcccaggaggagcaggacgaggaggtgggcctttccccagcttgcccactctgggttccggcagccgggcgaccgtagtttcccatcctgcgcacaggcagtgggcaggagagcgctgtggcctggagatagggagggaccccaagcgctctgccccgagcacgggacaacgatagttaggagcccccctgtgggttattgacttccctgtggctgttacccccgtgtgtgtgtctcagtgtgctgcctgatggtgtgtttttaaaatgtcagagaagcaaactccttcgtgtttgtatctgacttggttgatctgtgaaaggatgcgatctggacatctggcgtgtccccacaactcacctctgattctccaaagtgggcgttgtttcccaccgaagcgcttgggccgaggggcagggagttgagggggagaaatggtgccttgggggtaagaggcaggagtagggtggggggcagcggtagccgcggagttgcctgcggaggtttcagtggcgccagccccctgggatcgcccgcgggtggttttggcgcgtccccgcagcgtcggtcctctgg

SEQ ID NO: 283002 - DNA, 33 bp, Homo sapiens
  chr5:65893469-65893502
  hyper
ccagcttgtccagatgaacgcttgtcaccaaac

SEQ ID NO: 283003 - DNA, 189 bp, Homo sapiens; identical to SEQ ID NO: 199878
  chr5:66124999-66125188
  hyper

SEQ ID NO: 283004 - DNA, 1079 bp, Homo sapiens; identical to SEQ ID NO: 199879
  chr5:66299576-66300655
  hyper

SEQ ID NO: 283005 - DNA, 111 bp, Homo sapiens
  chr5:66511673-66511784
  hyper
atattcagagagcccgtgcccttgccctgcttcagccccacagccccgcctgggttgctggtctgacccggctgggcagggtggctgtgagctgccggtgtggccccaggc

SEQ ID NO: 283006 - DNA, 41 bp, Homo sapiens; identical to SEQ ID NO: 199880
  chr5:68179341-68179382
  hyper

SEQ ID NO: 283007 - DNA, 185 bp, Homo sapiens
  chr5:71404207-71404392
  hyper
ggctgcagctctcagaaaggacaatgggaccccaagttgcggggtggggctgctgcttttagaagtcccagcctcgggagtggtagcttgaagggggtcggtgagggagacgtcagcgggtagggtcagctcctcgcccggtgctcgcaccagtggcgcgctctgcggaggccgaatagcggtac

SEQ ID NO: 283008 - DNA, 37 bp, Homo sapiens
  chr5:71404881-71404918
  hyper
ctccccaataaaagacgaaagaaaaaccttgttttag

SEQ ID NO: 283009 - DNA, 229 bp, Homo sapiens; identical to SEQ ID NO: 231119
  chr5:71616291-71616520
  hyper

SEQ ID NO: 283010 - DNA, 130 bp, Homo sapiens; identical to SEQ ID NO: 199882
  chr5:72113263-72113393
  hyper

SEQ ID NO: 283011 - DNA, 217 bp, Homo sapiens; identical to SEQ ID NO: 231121
  chr5:72143776-72143993
  hyper

SEQ ID NO: 283012 - DNA, 81 bp, Homo sapiens; identical to SEQ ID NO: 199883
  chr5:72416165-72416246
  hyper

SEQ ID NO: 283013 - DNA, 128 bp, Homo sapiens
  chr5:72497765-72497893
  hyper
ggctggatagtcctcgtctgcagaagttcgccctttgctggcccctgtccaggctctcctctcgctggcccacgtgatcctttcctgccagtctcccctggctccagcttcctccacgcccagggctc

SEQ ID NO: 283014 - DNA, 139 bp, Homo sapiens
  chr5:72511609-72511748
  hyper
aaacacctaagcccggagctgcaaagctgggactacgttactcgtggtgccttaaaccccaagctttatccgccccatctcccaccacctcactgcagacaccctgccctccgtccgtgcataaccacgttctcgttca

SEQ ID NO: 283015 - DNA, 419 bp, Homo sapiens
  chr5:72511765-72512184
  hyper
cggcgctggggagaaggcttcctccttgtccgcacttctgggtcaacagccttagatggggcggggggggggggtgcggagctgccgaaaccttctcgaagatcccagggagtctctgtcccgcagaatcagcaccatcctcctcggagcgcagcttttcctccctgcccaagtgcggtgcacccgcgcaccacccaagcgcccagcatcgagggcgcggcggcggcggccagggcggccagggcccttgagcacccgcgcggttttccccctatggccgcatgggggcaggagagaggagctgtggcgcagagcacgcggagagggacctggagcgcgggagccaggacggcgcaggcagctggggaggccgcggggctgcccagcgagtggagtgcccaagaattggccggggtgga

SEQ ID NO: 283016 - DNA, 64 bp, Homo sapiens
  chr5:72526700-72526764
  hyper
ccaaacaaatgtgccctgaaactcacggagcctgagtttctgggttcctcgcttgcactgcccc

SEQ ID NO: 283017 - DNA, 133 bp, Homo sapiens; identical to SEQ ID NO: 231127
  chr5:72593807-72593940
  hyper

SEQ ID NO: 283018 - DNA, 269 bp, Homo sapiens; identical to SEQ ID NO: 199884
  chr5:72594501-72594770
  hyper

SEQ ID NO: 283019 - DNA, 217 bp, Homo sapiens
  chr5:72597813-72598030
  hyper
tgtttaaattcacccgcaatctggaagatgttttgtccaggaactcagacatgaggtgttgggagaaaggagagaaagtgacactaagaatctttccttgccttcacttgggcctcatgatcgctcccaaccctgcccagtcgccccaccagcacgaggcaaatgactgtcttcagctccgaacattaatattaagacatcagcattgcattagtct

SEQ ID NO: 283020 - DNA, 104 bp, Homo sapiens
  chr5:72598102-72598206
  hyper
tcatcgtgtttattttttgctttgctaagcccaagatataatttactcactgctctcttgcaaacaaaagggccgtgatagcctggcaacgttgaagagcccct

SEQ ID NO: 283021 - DNA, 33 bp, Homo sapiens
  chr5:72598950-72598983
  hyper
ttgtggtgcgccgccggtactcaaggagccacc

SEQ ID NO: 283022 - DNA, 359 bp, Homo sapiens; identical to SEQ ID NO: 231131
  chr5:72607509-72607868
  hyper

SEQ ID NO: 283023 - DNA, 632 bp, Homo sapiens
  chr5:72676273-72676905
  hyper
acccaccaggactgcgtcctgccagctcttcactccgctgacctgaccttccacgcccctagtcctcgagcggacttgacctgtgggggagtaccgaaccgtccccatgaggccctccaagcggccaggtggcctccgccactctctccacccccacctcctccaccccccagcccatcggtccatcttcgatctgcaaaacacgccgggtcagcgacgcatcggtcccaggcttgtgaccacctctttctctgttacttggggagccaggcccaccgctcaggatcacagtgaggagaaaaaagacacaaacgccaggacagggcggctggggaaggaaactgctagggaccgctcattgtcagcctggcgtgtcccacggatcgcaggacccgtcgaggctttgctctctgcgacccgaatactcctgggcctctcgacctcctcctcggactcaggcgtccgcgtctccggtcatcacgggagaccaattggtttacaaatagtgatgataaacctgggaccgaccttggggctgtgtaaaagtctactgacagatgtaatggagggttgttagcagtcacaaagcctgtcggacccgtagcattagttcaagagactattttcgtgtc

SEQ ID NO: 283024 - DNA, 49 bp, Homo sapiens; identical to SEQ ID NO: 111542
  chr5:72678365-72678414
  hyper

SEQ ID NO: 283025 - DNA, 97 bp, Homo sapiens
  chr5:72716180-72716277
  hyper
aaaggaaagccaaagctcagaggttccagtgtaagcacaaacaacaaaactggatgagtccaaaacacctacctcaacacatcgcttcatcgtgcta

SEQ ID NO: 283026 - DNA, 316 bp, Homo sapiens; identical to SEQ ID NO: 199885
  chr5:72733185-72733501
  hyper

SEQ ID NO: 283027 - DNA, 198 bp, Homo sapiens; identical to SEQ ID NO: 199886
  chr5:72733588-72733786
  hyper

SEQ ID NO: 283028 - DNA, 452 bp, Homo sapiens
  chr5:72739651-72740103
  hyper
gtgtggtccttctccgggagctgcctgaaccatcagccccaatatatccctctccctattaactgcaattccctcccgactgagcttcggtcatttgtctcgaggctctacgggggcgtttgatgagcagagaaacaaggagaaggggagaaaagcgtcgggttaatgagttgtagcaaatccacactttgtagttgggaggaggagagctggtggccaatgtttgttcaactggtttatttttcgagacccagcctattgaggaaggcttgttcaagcaggcttcgttcctacaaacacacaaacatccttctgtttgcctacaaagaaaaggggaccagcgctggatttgcatgcgaatgaggagccccaggaggagacgtccttgcccatcaaaggccgcggtagcctggcggccccgcagcctttgttccagcacctgctcgcctgca

SEQ ID NO: 283029 - DNA, 105 bp, Homo sapiens; identical to SEQ ID NO: 199887
  chr5:72742464-72742569
  hyper

SEQ ID NO: 283030 - DNA, 216 bp, Homo sapiens; identical to SEQ ID NO: 199888
  chr5:72744481-72744697
  hyper

SEQ ID NO: 283031 - DNA, 193 bp, Homo sapiens
  chr5:72745196-72745389
  hyper
tctgcgattgaatgccctagagacttgacagttaaactaagccactctaatgagacgatctgacaaatgtcatgggaataaagaacgtaataattgaattcggagaagaaattgaaatttttagtgaaaacccaaatacacgcacaaaaattgcacctagaaactactaaaaagttcgaccagcctggccaac

SEQ ID NO: 283032 - DNA, 45 bp, Homo sapiens; identical to SEQ ID NO: 231141
  chr5:72745569-72745614
  hyper

SEQ ID NO: 283033 - DNA, 300 bp, Homo sapiens; identical to SEQ ID NO: 199889
  chr5:72747520-72747820
  hyper

SEQ ID NO: 283034 - DNA, 133 bp, Homo sapiens; identical to SEQ ID NO: 199890
  chr5:72747850-72747983
  hyper

SEQ ID NO: 283035 - DNA, 1143 bp, Homo sapiens; identical to SEQ ID NO: 199891
  chr5:72921423-72922566
  hyper

SEQ ID NO: 283036 - DNA, 193 bp, Homo sapiens; identical to SEQ ID NO: 199892
  chr5:73843885-73844078
  hyper

SEQ ID NO: 283037 - DNA, 264 bp, Homo sapiens; identical to SEQ ID NO: 199893
  chr5:73935724-73935988
  hyper

SEQ ID NO: 283038 - DNA, 516 bp, Homo sapiens; identical to SEQ ID NO: 41639
  chr5:73936032-73936548
  hyper

SEQ ID NO: 283039 - DNA, 285 bp, Homo sapiens
  chr5:73936774-73937059
  hyper
tgcagagagacaaagcggacgcactgtctcagccgctggcagctgcaaccccgggaaccgagaataaaataagttttcccgggttcgagtgtctgcgcctctttgggccagcctggttaatggacagccccggatctgagggacccaccttaggggagcgcagcccggggctgtgcgcttggtgatgccagagcccgcgagatgctctaaaaagggctgcaaggggcgagctgggtatccgcaggacaggccctgggcacgcatagacagcgccttgggtaggac

SEQ ID NO: 283040 - DNA, 302 bp, Homo sapiens; identical to SEQ ID NO: 199896
  chr5:74161900-74162202
  hyper

SEQ ID NO: 283041 - DNA, 103 bp, Homo sapiens; identical to SEQ ID NO: 199897
  chr5:74162616-74162719
  hyper

SEQ ID NO: 283042 - DNA, 260 bp, Homo sapiens; identical to SEQ ID NO: 199898
  chr5:74348635-74348895
  hyper

SEQ ID NO: 283043 - DNA, 590 bp, Homo sapiens; identical to SEQ ID NO: 199899
  chr5:74348906-74349496
  hyper

SEQ ID NO: 283044 - DNA, 111 bp, Homo sapiens; identical to SEQ ID NO: 231151
  chr5:74632844-74632955
  hyper

SEQ ID NO: 283045 - DNA, 391 bp, Homo sapiens; identical to SEQ ID NO: 231152
  chr5:74807675-74808066
  hyper

SEQ ID NO: 283046 - DNA, 119 bp, Homo sapiens; identical to SEQ ID NO: 231153
  chr5:74965024-74965143
  hyper

SEQ ID NO: 283047 - DNA, 186 bp, Homo sapiens; identical to SEQ ID NO: 231154
  chr5:75013171-75013357
  hyper

SEQ ID NO: 283048 - DNA, 291 bp, Homo sapiens; identical to SEQ ID NO: 199900
  chr5:75378714-75379005
  hyper

SEQ ID NO: 283049 - DNA, 373 bp, Homo sapiens; identical to SEQ ID NO: 199901
  chr5:75379694-75380067
  hyper

SEQ ID NO: 283050 - DNA, 37 bp, Homo sapiens
  chr5:75380974-75381011
  hyper
catggcaagttccgaaaggcctcgtgctcgtgggaag

SEQ ID NO: 283051 - DNA, 50 bp, Homo sapiens
  chr5:75698194-75698244
  hyper
tgagccgccgcgcccggctctaaataatttcttatcgccctccctcagtt

SEQ ID NO: 283052 - DNA, 1185 bp, Homo sapiens; identical to SEQ ID NO: 199902
  chr5:75698274-75699459
  hyper

SEQ ID NO: 283053 - DNA, 40 bp, Homo sapiens; identical to SEQ ID NO: 199903
  chr5:75700173-75700213
  hyper

SEQ ID NO: 283054 - DNA, 98 bp, Homo sapiens; identical to SEQ ID NO: 231159
  chr5:76010895-76010993
  hyper

SEQ ID NO: 283055 - DNA, 121 bp, Homo sapiens; identical to SEQ ID NO: 199904
  chr5:76011053-76011174
  hyper

SEQ ID NO: 283056 - DNA, 410 bp, Homo sapiens
  chr5:76011754-76012164
  hyper
gccagggccccccagtagggcagggcggggcggggcggggcgcacagagccagaggggcttgcgagcggcggctgagggaccgcggggagggggcgccgagcggctccagcgcagagactctcactgcacgccggagggcgcccttcctcgctcgcgcccgcgcgaccgcgcgccccagtcccgccccgccccgctaaccgccccagacacagcgctcgccgagggtcgcttggaccctgatcttacccgtgggcaccctgcgctctgcctgccgcgaagaccggctccccgacccgcagaagtcaggagagagggtgaagcggagcagcccgaggcggggcagcctcccggagcagcgccgcgcagagcccgggacaatggggccgcggcggctgctgctggtggccgc

SEQ ID NO: 283057 - DNA, 377 bp, Homo sapiens
  chr5:76012199-76012576
  hyper
gcacccgggcccgcaggccaggtgagagatgcacgggaatggggtgcgcgggcggagggacgccgaggggagactgcgggggtcactgttgcgccttctcctcacccctgcctcagtttcctccgaaagccaaactggcatttgggctgagatctggagttttttccagtcacgtttaggtggggcgtgccacccccttcgcgggcccagccgatgcccctttggactcgatcttggagggtgcagcccgcctgccacggggtgttggatatggaggaggatggagcggaagccccctgggggagcctgcagtcctgcgttgcacttgtcattgtgtttctcccaggaccacccccaaaaagaaaagctctcacgtt

SEQ ID NO: 283058 - DNA, 188 bp, Homo sapiens
  chr5:76012643-76012831
  hyper
ttgttggaagtttttttcttgcacattttacaggcgagaaaagtgatgtagagaaaagcccaggcagtcccttggcatgtttagcagagaatcagtaccagcagcccccggcccggccttgtgtccaggaggtgcgcagggtgcgagatatatggtgacaatagcagaggctccgcgtggtggcgggg

SEQ ID NO: 283059 - DNA, 407 bp, Homo sapiens; identical to SEQ ID NO: 199907
  chr5:76114443-76114850
  hyper

SEQ ID NO: 283060 - DNA, 282 bp, Homo sapiens; identical to SEQ ID NO: 199908
  chr5:76114880-76115162
  hyper

SEQ ID NO: 283061 - DNA, 218 bp, Homo sapiens; identical to SEQ ID NO: 199909
  chr5:76115225-76115443
  hyper

SEQ ID NO: 283062 - DNA, 81 bp, Homo sapiens
  chr5:76115609-76115690
  hyper
ctaggttgttttttgcgtccctctccaactgctggaagcctttcttcgggttctggcccctgcgttcgagacccacccggg

SEQ ID NO: 283063 - DNA, 202 bp, Homo sapiens
  chr5:76250150-76250352
  hyper
cggagaggcgcgttcgaggacccccacacggcgagaatctcgcccttacccgaagacctcgacccacacacatccagtggggctggggccggtgcctctggacgctgccatggtttaaattcccttctgggcgctttcgaggccctaggaacttctaaagacttgaactcgcagcgcggaactctgacgcaatccagggccg

SEQ ID NO: 283064 - DNA, 254 bp, Homo sapiens; identical to SEQ ID NO: 231163
  chr5:76326226-76326480
  hyper

SEQ ID NO: 283065 - DNA, 182 bp, Homo sapiens; identical to SEQ ID NO: 199911
  chr5:76383033-76383215
  hyper

SEQ ID NO: 283066 - DNA, 177 bp, Homo sapiens
  chr5:76476058-76476235
  hyper
aggacccaggcacccgccggcccggggacgcgtctggaaagtgaaggcgcggaggctcaggctcgctgccagagtcccacggagcaaccagagccttcacgtgggcacgaggcccggggagtggggtgcagggtgcgccaggccggtgccctctgtgcggggctaaggcgccaggca

SEQ ID NO: 283067 - DNA, 115 bp, Homo sapiens
  chr5:76506030-76506145
  hyper
gctgggggcggcgtcgggatgagtgcagaagagacgaggcctctggacagcggaggaggaggggagggcgccgaggcgcggtgccagctgccgcgcacaggggccccgcggcgga

SEQ ID NO: 283068 - DNA, 111 bp, Homo sapiens
  chr5:76507202-76507313
  hyper
ggttgtcactaaggaggagtttacttttcatttgtggagatgatgggagcccaggaaatgtggtcagaaaaaggcccctggaggggtcctggaagcgtccttagctggtcc

SEQ ID NO: 283069 - DNA, 32 bp, Homo sapiens; identical to SEQ ID NO: 199913
  chr5:76924480-76924512
  hyper

SEQ ID NO: 283070 - DNA, 366 bp, Homo sapiens
  chr5:76926856-76927222
  hyper
gtgccccgaagagtttacgcactgtgcaaacacaccaaatgtgtgcagtcttcaccacgcccctgcacattctgtgcactgcacagattcacaggtctgcagtcaggcatgtgtcaaagttcgacccacaggtgtacaaatgaagataaacgtgtacccatgtagcttaatagcatgccttataacactgatgtgctatagaattttcagaaacgctggaaatttggaaattgatgacaggctgtggatgacatagtttcaaaatcgaaagacaaaggaaaacccctaacgctacggttgacagagcggagaggttaatacagtgatctgcgtgggaaagtgaacgccactgagctacagtgttgt

SEQ ID NO: 283071 - DNA, 220 bp, Homo sapiens
  chr5:76936815-76937035
  hyper
cacacgctgtctggagggagggagaaggggccgcgacctggggagacaaggataagggcgcggggccgcgcgtctccacgtgcgtgcacacaagcgctagtgtccccatcccacagtcgcccccggaacggcgccggctgtgcagcgatctcccacacgcactcgctcgtatattctgttttgttgtatctttcaggtcgataaatgaatgtgtaatagt

SEQ ID NO: 283072 - DNA, 64 bp, Homo sapiens
  chr5:76937333-76937397
  hyper
tggagccaggtgcccgccgccagcaggcagagcgagaaaaacgacaatagcctggatgtaaaaa

SEQ ID NO: 283073 - DNA, 46 bp, Homo sapiens; identical to SEQ ID NO: 231177
  chr5:76937948-76937994
  hyper

SEQ ID NO: 283074 - DNA, 106 bp, Homo sapiens; identical to SEQ ID NO: 231178
  chr5:76938270-76938376
  hyper

SEQ ID NO: 283075 - DNA, 103 bp, Homo sapiens
  chr5:76939813-76939916
  hyper
ctttcccttctaactactggcgctcacggccctccacacagaaagctcgacacaaaacaatgacggattagtatccgccccctgactgcgtatcttgcttctc

SEQ ID NO: 283076 - DNA, 191 bp, Homo sapiens; identical to SEQ ID NO: 199915
  chr5:77148195-77148386
  hyper

SEQ ID NO: 283077 - DNA, 57 bp, Homo sapiens; identical to SEQ ID NO: 199916
  chr5:77268310-77268367
  hyper

SEQ ID NO: 283078 - DNA, 387 bp, Homo sapiens; identical to SEQ ID NO: 231185
  chr5:77591340-77591727
  hyper

SEQ ID NO: 283079 - DNA, 68 bp, Homo sapiens; identical to SEQ ID NO: 231186
  chr5:77656465-77656533
  hyper

SEQ ID NO: 283080 - DNA, 50 bp, Homo sapiens
  chr5:77805996-77806046
  hyper
tccagagcatcgagcgacaggtgacaatgacatgacacatattgatgttc

SEQ ID NO: 283081 - DNA, 76 bp, Homo sapiens
  chr5:77806320-77806396
  hyper
ctgccagcaagccccgggcctggctagcatgccaggcggttgttgcactggctgcgtttgtttcaagttcttcctg

SEQ ID NO: 283082 - DNA, 122 bp, Homo sapiens; identical to SEQ ID NO: 199917
  chr5:78281720-78281842
  hyper

SEQ ID NO: 283083 - DNA, 210 bp, Homo sapiens; identical to SEQ ID NO: 199918
  chr5:78531492-78531702
  hyper

SEQ ID NO: 283084 - DNA, 1561 bp, Homo sapiens; identical to SEQ ID NO: 231191
  chr5:78531954-78533515
  hyper

SEQ ID NO: 283085 - DNA, 35 bp, Homo sapiens; identical to SEQ ID NO: 231192
  chr5:78908116-78908151
  hyper

SEQ ID NO: 283086 - DNA, 291 bp, Homo sapiens
  chr5:79551152-79551443
  hyper
gctgagttttcccttcgcccagacctgcgcccggtagtttggaagtcaggcttcgagacattctcaaaggtacagagcccacgctcgactacgagatgccaagcgcaacctgcctgggttgtttgacccgagttttattcagggcatagcaaaggagacggtgcctaaacccacttttcttcctggattcatccgacaagcagagtggagagggctacggagctcagcgctattcaccagtgctcggcgcaagaggcgacacgcccctggagcagtcgggatcctccgccc

SEQ ID NO: 283087 - DNA, 428 bp, Homo sapiens; identical to SEQ ID NO: 231195
  chr5:79551988-79552416
  hyper

SEQ ID NO: 283088 - DNA, 111 bp, Homo sapiens; identical to SEQ ID NO: 231196
  chr5:79703638-79703749
  hyper

SEQ ID NO: 283089 - DNA, 86 bp, Homo sapiens; identical to SEQ ID NO: 231197
  chr5:79704429-79704515
  hyper

SEQ ID NO: 283090 - DNA, 329 bp, Homo sapiens; identical to SEQ ID NO: 199921
  chr5:79783875-79784204
  hyper

SEQ ID NO: 283091 - DNA, 41 bp, Homo sapiens; identical to SEQ ID NO: 199922
  chr5:79865662-79865703
  hyper

SEQ ID NO: 283092 - DNA, 90 bp, Homo sapiens; identical to SEQ ID NO: 199923
  chr5:79865744-79865834
  hyper

SEQ ID NO: 283093 - DNA, 224 bp, Homo sapiens; identical to SEQ ID NO: 199924
  chr5:80256566-80256790
  hyper

SEQ ID NO: 283094 - DNA, 265 bp, Homo sapiens; identical to SEQ ID NO: 231201
  chr5:80597468-80597733
  hyper

SEQ ID NO: 283095 - DNA, 110 bp, Homo sapiens; identical to SEQ ID NO: 199925
  chr5:82372772-82372882
  hyper

SEQ ID NO: 283096 - DNA, 235 bp, Homo sapiens; identical to SEQ ID NO: 231204
  chr5:82373208-82373443
  hyper

SEQ ID NO: 283097 - DNA, 173 bp, Homo sapiens; identical to SEQ ID NO: 199926
  chr5:82767810-82767983
  hyper

SEQ ID NO: 283098 - DNA, 541 bp, Homo sapiens
  chr5:82769369-82769910
  hyper
agctgacaaatgaatggctagtgtgaaatccctgcctttcccgtgctccaaggcagcagggagggaggagcgagggaggcggtgcgctccttcggatctgcccccagttcagctcacaagacttgcagaacctagatgtctaggaattgggagttttgcggcgggtgtgggcgccccctgatggagaagtcccgcacaggcggagaaaaacaagccccccagaccaagcgagcatctttcacaaccttgtgttcaaggatggaaggccctagttttcccttaagtcattcattttgcactccacaatctgcggcgtacatctaggagtttggaggaccctgaaaaaaggtcttggtctgtgcaaagtgcagagatgccttctcgcgagtcggctggaacgcacgcggcgccctgggtccagttcgccgcttagtggacgaacgcacatggccagggtggagccaggtttcggaggtctagacgcgccaccctgggcgtctttaagaaagataatacacataccgtgctctcaaaacccatg

SEQ ID NO: 283099 - DNA, 245 bp, Homo sapiens
  chr5:82770318-82770563
  hyper
ggtctggggcccgcccccactcgctcacctcgcgccaagggaggacccgcaacgggcgctccccgcagcggctgggttagccagccgccacgtgggttggcgcttcggctcccagccgagacgggtgtgacttcctgggctcagagactgcagtacagccgcacaggcggccggcgcagccgaggcccccacccaccgaggccaatgggggcggggcggggaaggcagggcccagcttaaccgag

SEQ ID NO: 283100 - DNA, 171 bp, Homo sapiens; identical to SEQ ID NO: 231207
  chr5:83018266-83018437
  hyper

SEQ ID NO: 283101 - DNA, 90 bp, Homo sapiens
  chr5:83678127-83678217
  hyper
gctgtgccctcggcgcgggtatcttcaggagacagagctcctggctgcagcgagccgggacttgccgcgccccggggctccctcaatcag

SEQ ID NO: 283102 - DNA, 678 bp, Homo sapiens
  chr5:83678311-83678989
  hyper
agcggggacgtacggtggtggcggtgacacaatgcgagtgagtgggtgagtgtgttttcgtgtttggggtggaaacgtaggcggggaagagaaggaggagaggggagtgcctgcagtccttcccccttcccttcctgctaagagatcaaagtgcagaggaaatccagacgggaaatgagagaaaggaaaaacagcagccgtggaagcactctcttttttatatcgctggagactcggccgagcaactactggaaccattaccatttcttaacctttagtggagtggctgcctttgcctattaactggaagggcactttgtaaacgcaggcgaggcacacacctacacacacgcctacacgctgggggaaaataaccacattctgggggacggagggaggcccaggcaaggcgcggccatggatctctactgccagagctgcgagggcatctggccagcaacacccggcttcttgggcgaacagtcgcccaagagtccacaattttcttgtgactcaaatagatggataggtgcatggatggatggtgcagaatattcatactctgtctaatctcaagtggactggagtcaacgcatttttaaatccatctaccttttttagaggcacagcatttaaaaccctgtagttcactcagctttccacttgaagctgcctgca

SEQ ID NO: 283103 - DNA, 315 bp, Homo sapiens
  chr5:83679254-83679569
  hyper
tcttttaaatgcttttttctttttaatttaatttgatttttatttttctgtttttattttttcgtgcaattcacagaaggcatcaccctacaagctctcacaacttttccgctcctgtgcggggacgcgaggggtggcttgccccgcactattccccattaccaagagttaacactggtactcggagggggtgcgcagctaagctccaggcccctggggtcagactaggagaggcgggttcctggggtttgctgtaatcgatgctgctcctctgggatggggaggcaggagaaagctgaagtgacctgtgagact

SEQ ID NO: 283104 - DNA, 246 bp, Homo sapiens
  chr5:83680369-83680615
  hyper
aagagaggagcctttcctccccttttgcctgcgctccggcgcgcggaggtgggtgagctccggggagccgccggcgggctcagccctccgctgcgggtgggtcccggcagaggcgcggcgggcggggcgcgggctcccgcggccgccccgggtctgctgcgcgggcaggcagacccaccggcagacaggcggaccgggcgctcggctgtcgctgttctccgcgcggcggctgcggggcttctgact

SEQ ID NO: 283105 - DNA, 148 bp, Homo sapiens; identical to SEQ ID NO: 231209
  chr5:86564357-86564505
  hyper

SEQ ID NO: 283106 - DNA, 393 bp, Homo sapiens; identical to SEQ ID NO: 231210
  chr5:86708645-86709038
  hyper

SEQ ID NO: 283107 - DNA, 65 bp, Homo sapiens
  chr5:87436529-87436594
  hyper
taacagtaacaaactattcccggatcttgttttttcttttcttttcatgggtccccgtttgcgct

SEQ ID NO: 283108 - DNA, 756 bp, Homo sapiens
  chr5:87436769-87437525
  hyper
gccttgatatacaagacaaatgcacactttactctgggcttaaaaaaccatctatcatcatcctttgggcatgacaaatacattgtgtgtttcagagaaattaatctggtatttagggggagaaaggcatttccaaccagtctccgtgcagaaccttcccgcaaaccctgtagcggcatttttcgacacttttctcctcctttcggcaagcctcaaacttgaccttcgagaggattttaagggtagagccttcctccctttccctcgtctgctccaagagctcacgtaggccttcttctgggaaacagcggctcaggaccagagctcggagaactgcgcgtccaggagcgcgggcgcggccggggaaaagggaggaggcggcaggagggggcaggaggtggagggaggaggaggatcggtctgaatatgcatgaggcacccagcactgccctcttccccggcagctgctcgggcgggggcgaaggagggaaggggaggggaggggaggaaatgaggctggggcggggtggccagagcagccgcagaggctgacgcgggtttggagaacggaagagatgatttgcatggcgcctggtgattggctgatggccgggggctgggtctgagaggcggcccctgaatggtttaacggaggaaattacaagattcattcgactaaagaaagccggggcgggcctggtcggcgcaatatgcagcctgtccgcaagggggcgcgatggcctatctttgttctgg

SEQ ID NO: 283109 - DNA, 44 bp, Homo sapiens; identical to SEQ ID NO: 199932
  chr5:87437944-87437988
  hyper

SEQ ID NO: 283110 - DNA, 175 bp, Homo sapiens; identical to SEQ ID NO: 231214
  chr5:87438273-87438448
  hyper

SEQ ID NO: 283111 - DNA, 79 bp, Homo sapiens; identical to SEQ ID NO: 231215
  chr5:87439124-87439203
  hyper

SEQ ID NO: 283112 - DNA, 263 bp, Homo sapiens; identical to SEQ ID NO: 231216
  chr5:87564866-87565129
  hyper

SEQ ID NO: 283113 - DNA, 80 bp, Homo sapiens
  chr5:87955380-87955460
  hyper
aagcctatgacaggaagttgttaataatatccttcgaaatttacctgtgaaatacagagcttgactacttttgtaaaagt

SEQ ID NO: 283114 - DNA, 94 bp, Homo sapiens; identical to SEQ ID NO: 199933
  chr5:87957200-87957294
  hyper

SEQ ID NO: 283115 - DNA, 49 bp, Homo sapiens; identical to SEQ ID NO: 199934
  chr5:87962917-87962966
  hyper

SEQ ID NO: 283116 - DNA, 388 bp, Homo sapiens
  chr5:87963002-87963390
  hyper
catctattaatatcagaaaataaaaccagctattaaggtgcagcaagctgttacgagtgagcagcagcatccgtcccttcacaggcctctatttgcattgtaaattgcttctttctcacgcaagactctttagcctctctctatagagatgtataaagccaacggcaatttccagcgcaggttaaggaggaaggaaaaaaaaatcccattctatagaagtgacagctgattcaaggatctgttcctgatcctttttggttaggcaccatggctttttaccaagcggtggcagcttgattgcacatatcttgtgtgtatgtgttttagggggaagatcctcgatttcacagggcttctaggctgggaaggagaagatgccgtcttgctg

SEQ ID NO: 283117 - DNA, 203 bp, Homo sapiens
  chr5:87963511-87963714
  hyper
atgatgatgtcatgagaaatctcaagtacatggttattgatatgcatcagtgatcagccaactgccccacgcctgctgcccgagcagcggcagcgacagcagcagtagcggcagcattgcaacaatccctattttctcaatcaacatctcttccgctagcactaccgactgctcctggaaaagcaacccgcggccttttacct

SEQ ID NO: 283118 - DNA, 169 bp, Homo sapiens; identical to SEQ ID NO: 199936
  chr5:87969872-87970041
  hyper

SEQ ID NO: 283119 - DNA, 599 bp, Homo sapiens; identical to SEQ ID NO: 199937
  chr5:87970918-87971517
  hyper

SEQ ID NO: 283120 - DNA, 57 bp, Homo sapiens; identical to SEQ ID NO: 199938
  chr5:87975971-87976028
  hyper

SEQ ID NO: 283121 - DNA, 254 bp, Homo sapiens; identical to SEQ ID NO: 199939
  chr5:87976663-87976917
  hyper

SEQ ID NO: 283122 - DNA, 339 bp, Homo sapiens; identical to SEQ ID NO: 199940
  chr5:87979353-87979692
  hyper

SEQ ID NO: 283123 - DNA, 157 bp, Homo sapiens
  chr5:87979985-87980142
  hyper
ttttaaagaaaaatggaaaactattaattttctgcgcaagtctagggttcccagtttaggttccagagaacagcagatctgcgcagcccccgccttaccaaactttccttttctagggtttgaaagaggctcacattctcacttcatgacagagcag

SEQ ID NO: 283124 - DNA, 147 bp, Homo sapiens
  chr5:87980250-87980397
  hyper
aggcacaaggtgcccaggggcaagagcccggggtccaagcttccaggcgcacatcatcctctgggccccgggccctccggctggagcactccctcacccgcatcccatccccgttccattttgatcattatttgaatagcccaggta

SEQ ID NO: 283125 - DNA, 217 bp, Homo sapiens; identical to SEQ ID NO: 231228
  chr5:87982594-87982811
  hyper

SEQ ID NO: 283126 - DNA, 240 bp, Homo sapiens
  chr5:87983395-87983635
  hyper
tgctttaaggttatcagtcttataagcaccacgtgattagacaggaaaggtaacttgaaaacacaacctgattctgagcgaaatcattttgtcctgttggcatgaaaatgtagttacacctccaagttctgctcaggaacagacggctgcgtgtgggggctggtccctacccagatcagtacaggatcttcagctggcagacgagatccagcaaatggaattcacgaagaaactcatgtg

SEQ ID NO: 283127 - DNA, 127 bp, Homo sapiens; identical to SEQ ID NO: 231231
  chr5:87984847-87984974
  hyper

SEQ ID NO: 283128 - DNA, 39 bp, Homo sapiens; identical to SEQ ID NO: 231232
  chr5:87986628-87986667
  hyper

SEQ ID NO: 283129 - DNA, 262 bp, Homo sapiens
  chr5:87986873-87987135
  hyper
cgggtgttaattaacgcgctaatttgagcttcaggagcgggaggcggccggtagcaccgcgagccgcgaggggccagtgacctctagtggacatgaggagatatgcagcgcgagtgagcgtgtagcagagaaaactctttcctgagcagctgctcgcgtgtctcctctgaatccaatgcaagggagggacacaagtccccaatttaagggagaaagagccgtcagcaagtggtgtcgaccaaagaccttagctcttctgatg

SEQ ID NO: 283130 - DNA, 153 bp, Homo sapiens
  chr5:87987165-87987318
  hyper
cgtgcacacacacattgttacttatcagtttttccagcgagagaagaacatatggaaagggtttgagaagtgagcgtgaataactttggtttctgaacctagagaaaagcagggctttcaaagctccggaggcaccagcgattcaggggaagg

SEQ ID NO: 283131 - DNA, 365 bp, Homo sapiens
  chr5:87987787-87988152
  hyper
ccagtagaatcccgcgaccccacagcctcagcgctcagggttccacggtccagtacaggctaaactgacctcgccgacggccgcgcccacttgggcacttctcccgggtcttgttctacgggcgtttgaggatttcttagtctctttcttccctggcactcttcctccgaggccagaagtctgaattactagcagctaccagccgcttggagcgggaacgtggaggtgatcccctccccgggagtagcctgtccgtcccagctctcctcccttctgtgcctggcggttttgcggtacccgaatctgtcctcaagggttgggggaggggtggatatggggggatcagagacattaccttttcccaa

SEQ ID NO: 283132 - DNA, 67 bp, Homo sapiens
  chr5:87988651-87988718
  hyper
gtcagtggtggctatactcggaataaggctgacagttcgcagtgagggaaaacgtgtaacctggcag

SEQ ID NO: 283133 - DNA, 231 bp, Homo sapiens; identical to SEQ ID NO: 231235
  chr5:87988974-87989205
  hyper

SEQ ID NO: 283134 - DNA, 353 bp, Homo sapiens
  chr5:87989955-87990308
  hyper
accccccaccagcccccacccgctgggaacaggaccgacaatctttcccactttcttgtggaaaattttcacacgtacacacaaaatctggagtccgagataataggtgatgagccgtcctgggaacggtgtcgcaggctgaggatgtccaagacctggcgagtctcgggtcagaggagccggagggggcgacccgaggccccgcgccccggctctgcgctggggggtggtgctggctatttctctctgctcccaactattacatttcttttttccttcatcttggctagagttatacgttttatgtgtggggcgatttagaaaataaaattggactatataagctattctat

SEQ ID NO: 283135 - DNA, 466 bp, Homo sapiens
  chr5:88178386-88178852
  hyper
ctaaatcttaaggcgtctacttcaaggtcacagaacatgctgtgaaatattaaaatccaccaggctccacacgctccaccatatcaaacatgctaatgacgtgaactaacttcatgaaactttaaatacactggtgtgacaggaacgagtcaggagtgatttcaatagctgatggcaaacggatacgactatctaaaaagttacttttagcaacaaacaaggaaatcatggaatctaacgaaaaagaatgcacaacgagcctcaacttcagccttcaaaaaaggcacagggatagatagacacagtgccgtggaatatattgatgcagattttagagacaatacccgggttttctatttcctcgagaaatatcaggggtacttacatgaaggaagacccgatcagattagtccttgggatattttcctttcttaagagagagagagagagaaaaaaaaaataacaa

SEQ ID NO: 283136 - DNA, 422 bp, Homo sapiens
  chr5:88179429-88179851
  hyper
tgcctccttttttccccctttatttaattttgtccttgcctttgcttcgcgctgcctttttctctccgtctctctctcccccacaatcccaaaccgttgactctttcctcgcgagctggagaaatcatcagtttcactcttgcaaaaggggggcgggactagacctcggagcattttaataaaacaaacatacagcagctccctcctcacccctccagtctcaactagattgataaattactccactacactactttaattatgtatatggtatgcagaataaatcactgaacatcagtacctcaatcaagcacttttaaatgataattgcatcttggtgaatcaatctttccattcctgacattttgctaattttagttttacggtggggtaatagcacatgccatacgcaaacctaatga

SEQ ID NO: 283137 - DNA, 63 bp, Homo sapiens; identical to SEQ ID NO: 199941
  chr5:88180346-88180409
  hyper

SEQ ID NO: 283138 - DNA, 73 bp, Homo sapiens; identical to SEQ ID NO: 231240
  chr5:89705880-89705953
  hyper

SEQ ID NO: 283139 - DNA, 43 bp, Homo sapiens; identical to SEQ ID NO: 199942
  chr5:89770671-89770714
  hyper

SEQ ID NO: 283140 - DNA, 306 bp, Homo sapiens; identical to SEQ ID NO: 199943
  chr5:89854217-89854523
  hyper

SEQ ID NO: 283141 - DNA, 31 bp, Homo sapiens; identical to SEQ ID NO: 199944
  chr5:89854969-89855000
  hyper

SEQ ID NO: 283142 - DNA, 121 bp, Homo sapiens; identical to SEQ ID NO: 199945
  chr5:90676143-90676264
  hyper

SEQ ID NO: 283143 - DNA, 49 bp, Homo sapiens; identical to SEQ ID NO: 199946
  chr5:90678446-90678495
  hyper

SEQ ID NO: 283144 - DNA, 283 bp, Homo sapiens; identical to SEQ ID NO: 231245
  chr5:90679120-90679403
  hyper

SEQ ID NO: 283145 - DNA, 105 bp, Homo sapiens; identical to SEQ ID NO: 41777
  chr5:92908770-92908875
  hyper

SEQ ID NO: 283146 - DNA, 100 bp, Homo sapiens
  chr5:92914942-92915042
  hyper
cctccgaaaagccgcgggcttccgctgctccgggcatcaccaccaacagcttcccactcccacccctgggactaggacaggggacttcaccctcctcctt

SEQ ID NO: 283147 - DNA, 317 bp, Homo sapiens
  chr5:92915128-92915445
  hyper
tctttcaagtttgaaagctctgtgggggcacggagagcccacagtaaggatgggtgggcgcctctgctcccgggcaggctcagctgtcatcccgtctcgccttggccctcacctacagggcctgaccccgggccagcccagctaggcaaggcctcctcgcttccgagaccccccagcccccgggtgcagtccccagcatcggctgcccccgccccccgcgcgccctctgacgcaaacgcacgcccctgccccgcacggaggaaagcgctcttgttggttttaattgagcctcttcctttcaacacaccccctctgtc

SEQ ID NO: 283148 - DNA, 242 bp, Homo sapiens
  chr5:92915595-92915837
  hyper
tccgctgacactatcgcccacatcagacaggcagccatcgatcgcgttacattaggggatggcgttacaaacggcgtccgcaggtgggcggctgcagccaagctcgccaggttcaggccgtaaccaggcaaggcgcgggcacaagggccagccgggccggactctgcagccggctccaccgcgggtcgcgctcggcaccagcaggaacagccgggccggtgttaaacgtgcgggtccccgtc

SEQ ID NO: 283149 - DNA, 443 bp, Homo sapiens
  chr5:92916165-92916608
  hyper
tacttgcctggtgaggcaggatttggccgagtctcgtttctggtgcccacgacgcacggtccagggtccgagggcggctgggccggcggactgggcatccagtgtgcctgcggtgccctggcgctcgctgtcgctggtctcccactcccttcgtctctctccgcgttctccttccctcgccctatctccctctctccgcctgctgcctctgccctcgactccctgcctctgactgtatggggagtacgatttagaatctgtacatagaaaggttttcttttctttcttttcttttggtctattttaatcgtgttcgtttcaccttttaactgaccagaagacgggagcgcgtttgcgcgtttatttgggcatagggacgagggcaaggagcccctgctacccccagtcgcctcctcgccatcagctgcgtacaatgggccacc

SEQ ID NO: 283150 - DNA, 102 bp, Homo sapiens; identical to SEQ ID NO: 231249
  chr5:92916848-92916950
  hyper

SEQ ID NO: 283151 - DNA, 62 bp, Homo sapiens; identical to SEQ ID NO: 199949
  chr5:92918896-92918958
  hyper

SEQ ID NO: 283152 - DNA, 89 bp, Homo sapiens; identical to SEQ ID NO: 231251
  chr5:92935166-92935255
  hyper

SEQ ID NO: 283153 - DNA, 62 bp, Homo sapiens; identical to SEQ ID NO: 231254
  chr5:92943194-92943256
  hyper

SEQ ID NO: 283154 - DNA, 557 bp, Homo sapiens; identical to SEQ ID NO: 231255
  chr5:92943286-92943843
  hyper

SEQ ID NO: 283155 - DNA, 44 bp, Homo sapiens; identical to SEQ ID NO: 4111
  chr5:92946750-92946794
  hyper

SEQ ID NO: 283156 - DNA, 269 bp, Homo sapiens; identical to SEQ ID NO: 231257
  chr5:92947618-92947887
  hyper

SEQ ID NO: 283157 - DNA, 134 bp, Homo sapiens; identical to SEQ ID NO: 199951
  chr5:92957179-92957313
  hyper

SEQ ID NO: 283158 - DNA, 382 bp, Homo sapiens; identical to SEQ ID NO: 231259
  chr5:93954161-93954543
  hyper

SEQ ID NO: 283159 - DNA, 941 bp, Homo sapiens
  chr5:94619388-94620329
  hyper
tttgctaaaccagagcgagatgttttctttcgactgtttcatctacttagaattaatagcatttctcctcccgcctcccggcccccgccccccgctccccgggtggtgaacgcctgaagagggaggcgtggtcccgcgcaccttgtctccggccgcgccaccggcactcacctggctgctgccgtgctcctcgcccgtctccggggcccgagactccgcgggactccgcgccggctctgcgggaggaggcggcggctccagcagctgctccaggcaggcggtgcccggcagagaggagctcttctggtggcacaagtgcgccccggggccctgacgccgtgcaccctcatctcgggcgcggtcccccctcgggggaggctggggcgaggaggacagggaggatgaggcggaggaagaggaaggagctgagtcgggggagcgtccgccaggaggcgtccctcccgctgctcccgaggccgccgcgggcccctttacggcggggagcaaatgctcgcggatccggcggcgtagcgtggacccctgctcggctctgccggcgccgccgggctccaggggctccggcgacgagcagcacaggttgggctgcgaggaggagaagactcggtccagcacttgcttccgcttcttgaagccgctccacctgctgcctgcaccactccccctggccggtgcattccctgtgcccaccgggggtggcggggagggcgacggggtgtccgcagtgcggcgctctggacccccagcgcgcccgcccccgccgcccttgctcctgcccacccccagctgcaggttcttccagagccgggcctggaaggaggaggacgccgccggcggctctggctcgcccgccgcggcagcccggggctccatcctccaccccctgctcctcctctcccctcctcctcctcctcctcctcctg

SEQ ID NO: 283160 - DNA, 129 bp, Homo sapiens
  chr5:94621134-94621263
  hyper
agacgagagtttaatttcttctgtcttgacttcatccccatccacccctcccttttctttatttgcctctgcactggtctcttatgatcaggttctagcatttccggagtctgacgataaagccagccc

SEQ ID NO: 283161 - DNA, 152 bp, Homo sapiens; identical to SEQ ID NO: 231261
  chr5:94890673-94890825
  hyper

SEQ ID NO: 283162 - DNA, 277 bp, Homo sapiens; identical to SEQ ID NO: 222646
  chr5:95066554-95066831
  hyper

SEQ ID NO: 283163 - DNA, 65 bp, Homo sapiens; identical to SEQ ID NO: 231264
  chr5:95157378-95157443
  hyper

SEQ ID NO: 283164 - DNA, 505 bp, Homo sapiens; identical to SEQ ID NO: 231265
  chr5:95157904-95158409
  hyper

SEQ ID NO: 283165 - DNA, 39 bp, Homo sapiens; identical to SEQ ID NO: 231266
  chr5:95170784-95170823
  hyper

SEQ ID NO: 283166 - DNA, 108 bp, Homo sapiens; identical to SEQ ID NO: 199955
  chr5:95194595-95194703
  hyper

SEQ ID NO: 283167 - DNA, 433 bp, Homo sapiens
  chr5:95767461-95767894
  hyper
gccgattactcatccgtgactccagcggcgtctcaaccaccacctccagaaaaaacgcgccaaaatgttttacaactgcctcctcccacgcttcaatgcagaccaacttcccaagcagggggcgagggcttgattccgagccaaggaaaggaaagctctagactagaagtcacactccctagggtcccctcggaatcgctcagctataagcagtctcccacttaatgtcttgacgcccacccacctccaaccagctacctatcgaccaagccttcacttggacaggcaacaataagctgaaattcccgggaaaacgattacgtacttggctgaagaacaagaaagaaatagatcccttccccatagtcagttcggcatctcgaccctgcagtgggactggccgggcaaagttatgaagcttggactttataag

SEQ ID NO: 283168 - DNA, 236 bp, Homo sapiens
  chr5:95768384-95768620
  hyper
gtaaataatgcaagctttctctctctccaagcgcgacaggggcgagggctggagcagctccttgctctttgctactctgggctctggagagtgcaacctggggctcccacttggaagaccgcgctccagtcccgccagtcccctggggccccagaaagtttcttgaaagtggaaactcttacctgacccaaaaggtcatagcccagctcctcggcgatggccgaggctgcttccgg

SEQ ID NO: 283169 - DNA, 147 bp, Homo sapiens
  chr5:96038225-96038372
  hyper
cgaagtgcacccaccgtcgttgccttattctggtagtcacagggtgacagccgagggagcggtaacctgtaatcagccggcggtgcgcagcccacacagcacgtggtccgcatcacaggctgcgttattgagtgagccagtctccag

SEQ ID NO: 283170 - DNA, 375 bp, Homo sapiens
  chr5:96038415-96038790
  hyper
cacgcatcccgggctcccggggcggggccgccgggcaggggggcggggagcatcctgcgtcgccttcccgggaccgccccgccccgtcgcactcagagagctgggctggagctccaagcggaaaccgcgggagccgagcccagctaggaatgcagacctcctgaaaaccaagccgaggactgcggggtccggtgtccacgcagagtgagtactgtcttccgccgctttgctccaggccgcgcgtgctcccgggtctagggcctgtgcccccggctacctgccctgcgtgtccggggcctggtccctgcagcggactccccaggctcgggacgtgcgcttttcctactatcgcgaccctggcgataccgtgcgttc

SEQ ID NO: 283171 - DNA, 242 bp, Homo sapiens; identical to SEQ ID NO: 231273
  chr5:98104049-98104291
  hyper

SEQ ID NO: 283172 - DNA, 242 bp, Homo sapiens
  chr5:98104604-98104846
  hyper
gtggcggggggcagcgcatctggcgccttggccggggcgcggagtgggaacagcccgcacgcgtccgctgccgccctgcctggcgacgagtggcacaatcgcccaccaggaatcggctggtgccgcgggtgggcgaaggcagcgccgccggcccggagggcggcgcggagggtggcgctggcggcgtgaaaggcgtctttgtgcaagattgagtgtggtggggggaaggcgaagagagaact

SEQ ID NO: 283173 - DNA, 524 bp, Homo sapiens
  chr5:98104891-98105415
  hyper
acgcccccagccgtccgcagtgccggaatgagccggatagcgccggcagggggcagtgtggcgatataggggttgccggggggagaggagggtctctgttcacctctatttgaggctgactggggagaaagctgcctggaggaagctgctggggtgcggggggctgagggatttggctccccgccctctcccctagatggcggagaaatcgggctagctggaagggcgcagctcctctcccagagctcattctggagtcggagaactgggagagcggcccccgaggcggagcctccctcccgccccgagtcgcgctgccccccacctgggggagaggggcgggcgccgcgctgccttccctccgcgcctcggccgcgtggcttgcggcttattttcccagctggcaagcgtcgcgctgcagacaagggaatgcctgtggtgagttgtttattttgttgaagtttgcggtgggcccgggggacgtggggggcgagcggcaggcagcggccgggactgttttgttt

SEQ ID NO: 283174 - DNA, 95 bp, Homo sapiens; identical to SEQ ID NO: 199956
  chr5:98107032-98107127
  hyper

SEQ ID NO: 283175 - DNA, 208 bp, Homo sapiens; identical to SEQ ID NO: 199957
  chr5:98108684-98108892
  hyper

SEQ ID NO: 283176 - DNA, 447 bp, Homo sapiens; identical to SEQ ID NO: 199958
  chr5:98109213-98109660
  hyper

SEQ ID NO: 283177 - DNA, 695 bp, Homo sapiens
  chr5:98109927-98110622
  hyper
gaggggagccagccccggggcctagggctttgttcccaaatagccccaggtctcgaaggcgctcgccggggcggaagggcggcgtggcgcaacgggaaaggcctcccgagcccctgacacgcacctctgtcgggctccgggccacagtaacgcagccacccaccgggcggccgccgggcgcagagacgagccttctctccaccctccccgccttcggctcggaccgctgacaaatctcccctccgacagccgcttatcaaacatttagcgggcgggggccgcgcgcccgagacaaatgttccggatgctttattgctctctgcgctggtgtttactgaaagtcaggctcggatcaggtttccgccgtcgcagccgcctcggagggagacaaggagccttgtgctgcttttctggagttgggggtggcggcgaggcgaaggaagtacaccagatggaaagatttttaccagattttgcaaacctgggagttaatctcgaagtaacgtcaacttttttgagcagggatttctttcgttttggcaaaagctgcgtttgttcagcgatcagcctcccgggaaaagctcgtgttttgtgactagccgggtgtcttcgggctccgtgaggggttgacagataaccatgctgccttctggaggtcggcgcttccccagccttgaggcgtatgttccaaggga

SEQ ID NO: 283178 - DNA, 115 bp, Homo sapiens; identical to SEQ ID NO: 199960
  chr5:100236035-100236150
  hyper

SEQ ID NO: 283179 - DNA, 100 bp, Homo sapiens; identical to SEQ ID NO: 199961
  chr5:100238183-100238283
  hyper

SEQ ID NO: 283180 - DNA, 344 bp, Homo sapiens; identical to SEQ ID NO: 199962
  chr5:100239724-100240068
  hyper

SEQ ID NO: 283181 - DNA, 224 bp, Homo sapiens; identical to SEQ ID NO: 199963
  chr5:100240289-100240513
  hyper

SEQ ID NO: 283182 - DNA, 399 bp, Homo sapiens; identical to SEQ ID NO: 199964
  chr5:101631635-101632034
  hyper

SEQ ID NO: 283183 - DNA, 221 bp, Homo sapiens; identical to SEQ ID NO: 199965
  chr5:101632074-101632295
  hyper

SEQ ID NO: 283184 - DNA, 49 bp, Homo sapiens; identical to SEQ ID NO: 199966
  chr5:102090424-102090473
  hyper

SEQ ID NO: 283185 - DNA, 102 bp, Homo sapiens; identical to SEQ ID NO: 231286
  chr5:102091104-102091206
  hyper

SEQ ID NO: 283186 - DNA, 518 bp, Homo sapiens; identical to SEQ ID NO: 222651
  chr5:102201407-102201925
  hyper

SEQ ID NO: 283187 - DNA, 125 bp, Homo sapiens; identical to SEQ ID NO: 199968
  chr5:107005046-107005171
  hyper

SEQ ID NO: 283188 - DNA, 298 bp, Homo sapiens; identical to SEQ ID NO: 199969
  chr5:107005685-107005983
  hyper

SEQ ID NO: 283189 - DNA, 449 bp, Homo sapiens; identical to SEQ ID NO: 199970
  chr5:107006260-107006709
  hyper

SEQ ID NO: 283190 - DNA, 227 bp, Homo sapiens
  chr5:107007427-107007654
  hyper
tcactttcaaatggatccctccaactcctggatgggccgatgtcagtctccgatcgccttccgagagggagactgagcccccacacgcggtgccaagagcccggggtgagctctcagaagtgtccctgcgactccagcgggtccaagcctagcaacttgtagagatgcatcaatcagtttgaaatgggaaaagaggaaaaaaaaaaagcgcacgagcgagtggcacc

SEQ ID NO: 283191 - DNA, 102 bp, Homo sapiens; identical to SEQ ID NO: 199971
  chr5:107007963-107008065
  hyper

SEQ ID NO: 283192 - DNA, 145 bp, Homo sapiens; identical to SEQ ID NO: 199972
  chr5:107008360-107008505
  hyper

SEQ ID NO: 283193 - DNA, 206 bp, Homo sapiens; identical to SEQ ID NO: 199973
  chr5:107359033-107359239
  hyper

SEQ ID NO: 283194 - DNA, 173 bp, Homo sapiens; identical to SEQ ID NO: 231291
  chr5:108064027-108064200
  hyper

SEQ ID NO: 283195 - DNA, 332 bp, Homo sapiens
  chr5:109024677-109025009
  hyper
ctcctttcccccaggttttaacaggctgtcaccaaaggaggaaatagtgagcccgaagagaatgtgcaagccctcttctcttgcatttcctccagcccgtcaccaagtactcttccaggcacgccaggcccgagtgtcctaggataggaaacctgagcaacaaagggaagtggggtgtaagctcaacccctgttggacgtgggggtgctggcgcctgaacgcccccgaaggcctcaactcccagaaagctgcctgccaggtcacaagagccctgtgaggtcttcctatcgccgggacactgggaggcaggcgcggggcgggtccgccgggcg

SEQ ID NO: 283196 - DNA, 1028 bp, Homo sapiens; identical to SEQ ID NO: 111805
  chr5:110074272-110075300
  hyper

SEQ ID NO: 283197 - DNA, 214 bp, Homo sapiens; identical to SEQ ID NO: 231295
  chr5:110428255-110428469
  hyper

SEQ ID NO: 283198 - DNA, 1030 bp, Homo sapiens; identical to SEQ ID NO: 199976
  chr5:110847625-110848655
  hyper

SEQ ID NO: 283199 - DNA, 38 bp, Homo sapiens; identical to SEQ ID NO: 231299
  chr5:111093185-111093223
  hyper

SEQ ID NO: 283200 - DNA, 78 bp, Homo sapiens
  chr5:111093930-111094008
  hyper
cacacagtcacacgcgcacaaccagccagagctgcggcctggcgtgatcggcccaagacatactcccctggtgcttcc

SEQ ID NO: 283201 - DNA, 99 bp, Homo sapiens; identical to SEQ ID NO: 111818
  chr5:111496549-111496648
  hyper

SEQ ID NO: 283202 - DNA, 192 bp, Homo sapiens
  chr5:111754513-111754705
  hyper
tctcctccccaccgcgcagagtcgcggccgccgccctcgacccaccggtgacagccctcaaagcgatggacccccgcacccgccctgccgccaacccccggaacgcgctccgggccgcacccaccttgatgccctgctgctgggtggtaagggttaacttggattcatccaggagcaaaacttcgcagtaaa

SEQ ID NO: 283203 - DNA, 314 bp, Homo sapiens
  chr5:111755081-111755395
  hyper
ggcactgggggcaagagaccagaaaaaggagtgatgggaattcgaggctctccccggccttggaaaaccctggaagcgctgcacctccctcctgccgcacggatttgagcgcggccccgacgtcctggcgtccgatcggcctgcggagtcccccgcgggcgcgcacttccagccgcgaccccgccccgcagccccgggtcagatccgccgagtatgaagcgctcggcttttcttttgtgtgaggagcacccacgacgccccgaccatgggcgcaggggcagaggcgaaggtcgtcgctccgtccgctaccccgt

SEQ ID NO: 283204 - DNA, 192 bp, Homo sapiens; identical to SEQ ID NO: 199979
  chr5:112257954-112258146
  hyper

SEQ ID NO: 283205 - DNA, 120 bp, Homo sapiens; identical to SEQ ID NO: 231304
  chr5:112312392-112312512
  hyper

SEQ ID NO: 283206 - DNA, 36 bp, Homo sapiens; identical to SEQ ID NO: 199980
  chr5:112629391-112629427
  hyper

SEQ ID NO: 283207 - DNA, 469 bp, Homo sapiens; identical to SEQ ID NO: 199981
  chr5:112629778-112630247
  hyper

SEQ ID NO: 283208 - DNA, 128 bp, Homo sapiens; identical to SEQ ID NO: 199982
  chr5:112630698-112630826
  hyper

SEQ ID NO: 283209 - DNA, 252 bp, Homo sapiens
  chr5:112823814-112824066
  hyper
ggccaacttttcccgcgagcttctgagcaacttgccgcaagttggggcgagggggcagagcaggggtcaagggcgcgcggagggactgatctcgctcctgtcggtttcctcgtacctccccgcgtacctgctgatgtatccgtccccgtcgccgtcgcacgtctggaagaggcgccgcatcctctcctcctcgccggtgctggacgtgtcgctgctgctgctgctgctgccgctgccgccgccgccgccgcc

SEQ ID NO: 283210 - DNA, 232 bp, Homo sapiens; identical to SEQ ID NO: 231307
  chr5:113028782-113029014
  hyper

SEQ ID NO: 283211 - DNA, 126 bp, Homo sapiens; identical to SEQ ID NO: 199984
  chr5:113391139-113391265
  hyper

SEQ ID NO: 283212 - DNA, 218 bp, Homo sapiens; identical to SEQ ID NO: 199985
  chr5:113696733-113696951
  hyper

SEQ ID NO: 283213 - DNA, 97 bp, Homo sapiens; identical to SEQ ID NO: 199986
  chr5:113698167-113698264
  hyper

SEQ ID NO: 283214 - DNA, 56 bp, Homo sapiens; identical to SEQ ID NO: 199987
  chr5:113698330-113698386
  hyper

SEQ ID NO: 283215 - DNA, 251 bp, Homo sapiens; identical to SEQ ID NO: 199988
  chr5:113699119-113699370
  hyper

SEQ ID NO: 283216 - DNA, 35 bp, Homo sapiens; identical to SEQ ID NO: 199989
  chr5:113699663-113699698
  hyper

SEQ ID NO: 283217 - DNA, 226 bp, Homo sapiens
  chr5:114506295-114506521
  hyper
cctgactgggcaccgagcagtcatatcccgctttctgcttctatacccccaagtcgcgatgtcaccgcacgttcttgcccagtagcgcggggaccgcctgcagggtggagattcctctcccggatgctggccagggactgaagttaaaaggccgcggcaagggagagaccccccgccacccgggcctacgctttccttcctgagggccaggacagagggtcctgag

SEQ ID NO: 283218 - DNA, 35 bp, Homo sapiens
  chr5:114506551-114506586
  hyper
agtgctgctgaacgttaaggcgcgcgccagctcaa

SEQ ID NO: 283219 - DNA, 57 bp, Homo sapiens; identical to SEQ ID NO: 199990
  chr5:114515671-114515728
  hyper

SEQ ID NO: 283220 - DNA, 131 bp, Homo sapiens; identical to SEQ ID NO: 199991
  chr5:114515769-114515900
  hyper

SEQ ID NO: 283221 - DNA, 65 bp, Homo sapiens; identical to SEQ ID NO: 199992
  chr5:114516274-114516339
  hyper

SEQ ID NO: 283222 - DNA, 34 bp, Homo sapiens; identical to SEQ ID NO: 231311
  chr5:114598419-114598453
  hyper

SEQ ID NO: 283223 - DNA, 289 bp, Homo sapiens; identical to SEQ ID NO: 199993
  chr5:114632026-114632315
  hyper

SEQ ID NO: 283224 - DNA, 180 bp, Homo sapiens
  chr5:114938164-114938344
  hyper
aggggttaatgtggcgggataactctctgcagagggaaggagctcgcaaagaagggtggaggaggggaaaccgcaatggggaactgtcaccgaggctagtggactctccctgcgcttttttttttttttttttttttggcatgtaccccaaaagccagaggtcgaggcccagaaaaatct

SEQ ID NO: 283225 - DNA, 107 bp, Homo sapiens; identical to SEQ ID NO: 231314
  chr5:115177406-115177513
  hyper

SEQ ID NO: 283226 - DNA, 67 bp, Homo sapiens; identical to SEQ ID NO: 231316
  chr5:115420530-115420597
  hyper

SEQ ID NO: 283227 - DNA, 146 bp, Homo sapiens; identical to SEQ ID NO: 199994
  chr5:115421021-115421167
  hyper

SEQ ID NO: 283228 - DNA, 378 bp, Homo sapiens
  chr5:115909339-115909717
  hyper
tgacaacaaaagattctctccgcttccacaccgtctccgcggaaccccttctcccacctggcactggacgaaaacagcgctgttatacccaaccccctccagccctcgagggcagaaccccttcccctgccttcgacacaccgggccagggagcttccgagaatcccaccatttagggcccgctctgctccctgctgggcacgcgggaggatgagccttgggtctcgcacacacacccccaggaggaacagccatacgcgccgtcgcggcccggggcggcgccgggcgtgtgcgcaacgcgggtgggaaagctctcgacgtggagccggacgcactctggggcgcagggcagagaggaaaggcaggcagggctcacgg

SEQ ID NO: 283229 - DNA, 62 bp, Homo sapiens; identical to SEQ ID NO: 199995
  chr5:115911175-115911237
  hyper

SEQ ID NO: 283230 - DNA, 119 bp, Homo sapiens; identical to SEQ ID NO: 199996
  chr5:115911590-115911709
  hyper

SEQ ID NO: 283231 - DNA, 351 bp, Homo sapiens; identical to SEQ ID NO: 231322
  chr5:118406922-118407273
  hyper

SEQ ID NO: 283232 - DNA, 285 bp, Homo sapiens; identical to SEQ ID NO: 231323
  chr5:118604723-118605008
  hyper

SEQ ID NO: 283233 - DNA, 90 bp, Homo sapiens; identical to SEQ ID NO: 231324
  chr5:118788277-118788367
  hyper

SEQ ID NO: 283234 - DNA, 55 bp, Homo sapiens; identical to SEQ ID NO: 199999
  chr5:119799801-119799856
  hyper

SEQ ID NO: 283235 - DNA, 42 bp, Homo sapiens; identical to SEQ ID NO: 200000
  chr5:119801506-119801548
  hyper

SEQ ID NO: 283236 - DNA, 40 bp, Homo sapiens
  chr5:121412480-121412520
  hyper
cacttcctaacacttgtctgcgcgaagcagtagcagtcag

SEQ ID NO: 283237 - DNA, 223 bp, Homo sapiens; identical to SEQ ID NO: 200001
  chr5:121413811-121414034
  hyper

SEQ ID NO: 283238 - DNA, 136 bp, Homo sapiens; identical to SEQ ID NO: 200002
  chr5:121414090-121414226
  hyper

SEQ ID NO: 283239 - DNA, 76 bp, Homo sapiens
  chr5:121648493-121648569
  hyper
gcccgggctccgccagcctccctctagtgctgttctgcgtcccaggctggtccgcgtggatttcagaggggaatgt

SEQ ID NO: 283240 - DNA, 887 bp, Homo sapiens; identical to SEQ ID NO: 231332
  chr5:122110539-122111426
  hyper

SEQ ID NO: 283241 - DNA, 59 bp, Homo sapiens; identical to SEQ ID NO: 231333
  chr5:122180920-122180979
  hyper

SEQ ID NO: 283242 - DNA, 117 bp, Homo sapiens
  chr5:122371100-122371217
  hyper
agatcagagcttctcgaaaccatcaggctgtttatcagccccgcccacaacgtggcacggcctttctgcgacatcagatgctgagctggacctcctcctccccaccccctagtcctc

SEQ ID NO: 283243 - DNA, 193 bp, Homo sapiens
  chr5:122371257-122371450
  hyper
tctactcgttgattagtatcgtttccattgacaaaccccagactgatgaagaccactttcagctgcagcccgccccctccagcttcagcttcgaagacactattgccagtgggttttctagaagtggtgatcatgggcaccaaattatcccctccctctccctgcattctcccattatcgtctacccttggtt

SEQ ID NO: 283244 - DNA, 134 bp, Homo sapiens; identical to SEQ ID NO: 200003
  chr5:122371731-122371865
  hyper

SEQ ID NO: 283245 - DNA, 479 bp, Homo sapiens
  chr5:122372079-122372558
  hyper
tccagtccccctgcgcccgggaagcctccacctcgcccgccctgacaccgaggtcccagtatccaaagcgcccccagggccccgcccgcaacaggggaagttgcagcccgccgctctcggtcaccttggccgtcaccgaggggcctcgcttgcggaagccctcggcccccgaagaaaacacaagtgcgccgagccccacgcaaagcacgagaggtagcagcagccgaggacccgggcccatggtgagcggtggcagcggcgctaccggcacgggcgctaccggcacgggcgcgacacaggctctgggacagctgacgggactgccggccggctgcgcctgcgcgctcccggttgcgggggatggggatcgggcagtccgggaagggcggggacccggggcgcgttcctcccaagttcagactcgcgacccgaacttgggattcggaggagcgcgcccacagggcgcagccagggctcga

SEQ ID NO: 283246 - DNA, 369 bp, Homo sapiens
  chr5:122372588-122372957
  hyper
ccagggacgggagggagcccgggttgcccaggcgcggagccgggcgcagcgggctaggctgggagcacctccaggaatttaccgcgtaggcgcggattaaacttggacgggaagaccaggactctcgggcttccgcgtccgcccggcagctagcgctccgcgggactgggaactctgcagccggtcccggtgtgattgctgccgccttgggagcagcctccgccgcggccgccgagttccaatggcccattggaaccttttgctaggttttggacgcttagcagaactttgacatcgctggaggcgtggagccctgttgcactcgaataatggcctctctttgagatgattcacgtctagggaacactg

SEQ ID NO: 283247 - DNA, 97 bp, Homo sapiens
  chr5:122422064-122422161
  hyper
tggtcttctcagtattgaagggggtgggggaagcggatttgagggggtgcatgtccttgccgtcggtgggctcactttctaaaaactattgagatgc

SEQ ID NO: 283248 - DNA, 53 bp, Homo sapiens
  chr5:122422184-122422237
  hyper
ggcccagggtcaactgtgtgagggggaagcgcccctcagagcgcgcgcagcgt

SEQ ID NO: 283249 - DNA, 56 bp, Homo sapiens
  chr5:122423376-122423432
  hyper
atcctctcctcccgatggagttgctggaggtctgcggacactgcctggttagcctc

SEQ ID NO: 283250 - DNA, 109 bp, Homo sapiens
  chr5:122423765-122423874
  hyper
tatggccagaaccccggcgatgggaaagtacctcctgagtcggtcaatttcacacaccctgcctgtgccctctaccatctactaccgaaaatgccaggaagagctgggg

SEQ ID NO: 283251 - DNA, 331 bp, Homo sapiens
  chr5:122424105-122424436
  hyper
ttgtctccgggccccaagaaggagagggaaagagccctccagaagacaacccgagaaggggtcagcagagcgctgggtggagtgcagactccattgcagccgcctcccagccccacggccaagcttgagtccctccaggaccagctgctctcggtctcaggaccctcggtcctacgcctccctgcaccgacaagcctccctcctgggctgcagacagagggtttcactgcagcgcgcaacccgtcccgctccgcccccaacttttctccccggaggatttatgttagaggttgcgtggcgggcgagtggactctggcacccagaagcactt

SEQ ID NO: 283252 - DNA, 55 bp, Homo sapiens; identical to SEQ ID NO: 231341
  chr5:122430020-122430075
  hyper

SEQ ID NO: 283253 - DNA, 166 bp, Homo sapiens
  chr5:122434262-122434428
  hyper
cgcccactaccgcccggcccggagggtgggggtccctctcgcgcaggctgctttggagagtgtcggagagagacagctttatctacagcttcacccattgtatagcacaacagaatcgcatttagcctggagaacagccgtcggggcaggagttggtgccttctct

SEQ ID NO: 283254 - DNA, 433 bp, Homo sapiens; identical to SEQ ID NO: 200007
  chr5:122434730-122435163
  hyper

SEQ ID NO: 283255 - DNA, 102 bp, Homo sapiens; identical to SEQ ID NO: 200008
  chr5:122435201-122435303
  hyper

SEQ ID NO: 283256 - DNA, 122 bp, Homo sapiens
  chr5:122435413-122435535
  hyper
cgccggcttgtgggcaccagcagcgctgcggccgccgcgcccccgccggagctgccggagtggctgcgggacctgcctcgcgaggtgtgcctctgcaccagtactgtgcccggcctggccta

SEQ ID NO: 283257 - DNA, 77 bp, Homo sapiens; identical to SEQ ID NO: 231345
  chr5:122621428-122621505
  hyper

SEQ ID NO: 283258 - DNA, 52 bp, Homo sapiens; identical to SEQ ID NO: 231346
  chr5:122759250-122759302
  hyper

SEQ ID NO: 283259 - DNA, 113 bp, Homo sapiens; identical to SEQ ID NO: 231347
  chr5:122759572-122759685
  hyper

SEQ ID NO: 283260 - DNA, 41 bp, Homo sapiens; identical to SEQ ID NO: 231348
  chr5:122847730-122847771
  hyper

SEQ ID NO: 283261 - DNA, 298 bp, Homo sapiens; identical to SEQ ID NO: 222668
  chr5:123987437-123987735
  hyper

SEQ ID NO: 283262 - DNA, 95 bp, Homo sapiens
  chr5:124082317-124082412
  hyper
gcgtccgctagtaacgagacagaatgtgctaacatcgggataaattagtgaaagggaagaaagaataagaagaaaggactgaaaatctgggctgg

SEQ ID NO: 283263 - DNA, 924 bp, Homo sapiens
  chr5:124082442-124083366
  hyper
ttccgcccgtcctgacagatttgatttcttgaactaacttaagagaaaaggagggggggagtagagggaggaggaggagaagaaagggtgggatgagaaactgggcaagaggagaaaaagaaaggtgtggaggaggagacagcagatgattcagtgagctgataaaccagttataacagcattcgctcggggcggggggcggggggcttggggcggtggggtggggaaaataacggcgtttaaaatgggctcagtcttcgaaacctaaaggatgtgatgttttcctgtcttatgttgttttaagaaaaaggaactgagttcctagtatagctcccgaggggagtggaatcctctgtcgctcaggtcagccagtcatgtggtaattcgataattagagtcaaaataaggtttttgttttctttttttttttttttaaggcgacccttttcgggagtttttccctcttatactcgcagcaaacggtgtgtctcccttttatttattttttctctcctctcccttcgcccagcccctcctgtgtttagtcagatggccccggagcttggcttagtatttttaattagctggcgtttggaagctaaaagcagtaatgaattgttgatggattggaagtggagagtcgctttgctggaaatgtcggggctgggagagggggatgggcgagttagtaacaaccaaccatctaaaaggagcgattttgttacagtgcaagcctttcacatcacgtgaggatcaagggctcaattggttgtcgtgagaacaaaaatggtgacaagcgtatcaagaaaatactgatctggtctttaaaaaaaaaaaagctgaaagtctctcccctccccctgcacacactcccccaacctcctccccccgcccccccgcagtgggcgaagctacaagttatga

SEQ ID NO: 283264 - DNA, 57 bp, Homo sapiens; identical to SEQ ID NO: 200011
  chr5:124084138-124084195
  hyper

SEQ ID NO: 283265 - DNA, 74 bp, Homo sapiens; identical to SEQ ID NO: 200012
  chr5:124084302-124084376
  hyper

SEQ ID NO: 283266 - DNA, 125 bp, Homo sapiens; identical to SEQ ID NO: 200013
  chr5:124084646-124084771
  hyper

SEQ ID NO: 283267 - DNA, 85 bp, Homo sapiens; identical to SEQ ID NO: 200014
  chr5:124084977-124085062
  hyper

SEQ ID NO: 283268 - DNA, 108 bp, Homo sapiens; identical to SEQ ID NO: 200015
  chr5:125930478-125930586
  hyper

SEQ ID NO: 283269 - DNA, 181 bp, Homo sapiens; identical to SEQ ID NO: 200016
  chr5:125931062-125931243
  hyper

SEQ ID NO: 283270 - DNA, 56 bp, Homo sapiens
  chr5:126626227-126626283
  hyper
atttgctaacttcgcgaccaggcctttggcggggtcacccaccaggcggtggaagc

SEQ ID NO: 283271 - DNA, 77 bp, Homo sapiens
  chr5:126626738-126626815
  hyper
ctggacctgggtaagagttgggcaaactcaactccggcggctcctggaccttggccggacgccggaaggcttctcat

SEQ ID NO: 283272 - DNA, 233 bp, Homo sapiens; identical to SEQ ID NO: 231355
  chr5:127420001-127420234
  hyper

SEQ ID NO: 283273 - DNA, 102 bp, Homo sapiens; identical to SEQ ID NO: 200018
  chr5:127536982-127537084
  hyper

SEQ ID NO: 283274 - DNA, 86 bp, Homo sapiens; identical to SEQ ID NO: 200019
  chr5:127537230-127537316
  hyper

SEQ ID NO: 283275 - DNA, 179 bp, Homo sapiens
  chr5:129239558-129239737
  hyper
agagagagaaggcgcggagtggcagcggtaagaacaacgtggaaaggacggaaaacgcgaagagtggcgccctggcggacctggggcggggcagagtggtaagggtcacgccaggacgtacccggctgtgggccgggggaggagagcacggtgggacagcaacgaacttgctgggggct

SEQ ID NO: 283276 - DNA, 242 bp, Homo sapiens
  chr5:129239782-129240024
  hyper
gggaggaggccagtagagcccccagacacgagtgtcgggaggccagcggaggggcgggacgggacgggaaatgggacgaagagcaagagctgggggaggagggaagagggggcgtcggcgctgcaagccggaggcggcccgacagggatcgtttccttccggagaggaggccggctctggactgaggcgcggacggggggcgtccaagggcgggtgacggggaaataccgcggcccgcgctt

SEQ ID NO: 283277 - DNA, 34 bp, Homo sapiens; identical to SEQ ID NO: 200020
  chr5:129240901-129240935
  hyper

SEQ ID NO: 283278 - DNA, 143 bp, Homo sapiens; identical to SEQ ID NO: 200021
  chr5:129240962-129241105
  hyper

SEQ ID NO: 283279 - DNA, 273 bp, Homo sapiens; identical to SEQ ID NO: 200022
  chr5:129241140-129241413
  hyper

SEQ ID NO: 283280 - DNA, 55 bp, Homo sapiens; identical to SEQ ID NO: 200023
  chr5:130970375-130970430
  hyper

SEQ ID NO: 283281 - DNA, 115 bp, Homo sapiens; identical to SEQ ID NO: 200024
  chr5:130970643-130970758
  hyper

SEQ ID NO: 283282 - DNA, 79 bp, Homo sapiens; identical to SEQ ID NO: 231367
  chr5:130971007-130971086
  hyper

SEQ ID NO: 283283 - DNA, 66 bp, Homo sapiens
  chr5:131131878-131131944
  hyper
tttggtcttccttcggcagtaaccctaaactcaagtttcacatttctccttcgataacattaaggt

SEQ ID NO: 283284 - DNA, 197 bp, Homo sapiens; identical to SEQ ID NO: 200025
  chr5:131133198-131133395
  hyper

SEQ ID NO: 283285 - DNA, 390 bp, Homo sapiens
  chr5:131347237-131347627
  hyper
ggtcagcatggcggtcagcggggcccggcccggcccggcccggcctccccgacccgcagccccgcagccccgcagcccagcagccccagcagtagccgcgccgccgccgccgctgccgggtatttttagcccccgccctccggccccgcagctcccgcctccccgcgccgctgcggagacggctcaagggggagggcgcggcgcgcactcgcaaccgagccttactccctgccctgcagcctggccggccgggtctggggcttgccccgcactgaccgcggtgtcggaaccgccaagctcccgggcgggggaggggcccggccgcagagcgaaccagccctctccggccccgctctccaacgtcagtacctggcattctgcggaaaccgg

SEQ ID NO: 283286 - DNA, 490 bp, Homo sapiens; identical to SEQ ID NO: 200026
  chr5:131563041-131563531
  hyper

SEQ ID NO: 283287 - DNA, 278 bp, Homo sapiens; identical to SEQ ID NO: 41939
  chr5:131563558-131563836
  hyper

SEQ ID NO: 283288 - DNA, 286 bp, Homo sapiens; identical to SEQ ID NO: 231373
  chr5:131705174-131705460
  hyper

SEQ ID NO: 283289 - DNA, 250 bp, Homo sapiens; identical to SEQ ID NO: 231375
  chr5:131825630-131825880
  hyper

SEQ ID NO: 283290 - DNA, 238 bp, Homo sapiens; identical to SEQ ID NO: 200029
  chr5:131831522-131831760
  hyper

SEQ ID NO: 283291 - DNA, 374 bp, Homo sapiens; identical to SEQ ID NO: 231377
  chr5:131892942-131893316
  hyper

SEQ ID NO: 283292 - DNA, 182 bp, Homo sapiens; identical to SEQ ID NO: 200030
  chr5:132072698-132072880
  hyper

SEQ ID NO: 283293 - DNA, 168 bp, Homo sapiens; identical to SEQ ID NO: 231380
  chr5:132073294-132073462
  hyper

SEQ ID NO: 283294 - DNA, 231 bp, Homo sapiens
  chr5:132082786-132083017
  hyper
ccagggtctgtgtccgggagtcctggcccaaggcgggcgcagtctccagccgccccacccctggctgggggctctgctcagggagcacggccggcaggggggaggaggcgtgcgctaggcagcagcggggatggagggaagggagggggtccgccacccgcctgtgcgcgcccagtcctgccgcatcctgggtgcgcgccgcccacccgcggggcgagtgcccaggaggcg

SEQ ID NO: 283295 - DNA, 82 bp, Homo sapiens
  chr5:132148851-132148933
  hyper
tggcggaccgcggcgtccctagggaacacacccacctagcaaccgagaccagagctggagcgctgcgcctttaattctgggg

SEQ ID NO: 283296 - DNA, 83 bp, Homo sapiens; identical to SEQ ID NO: 111981
  chr5:132148947-132149030
  hyper

SEQ ID NO: 283297 - DNA, 829 bp, Homo sapiens
  chr5:132386958-132387787
  hyper
tttcaggccaggcagcgtgtcacttgcctgtgttccttgttagggcctaccaccgggtaggtgcttggaatgtgctgtggattaaaggcttaaatcctgcgggcccctcaatctgatctaaggacatgagtggcttagagaacggcgcaacaaggctaagcgaaagaaaacaaagcggtgtggctgggagtgggctccttccctccgctggtgagggtgcgatcttagactcttgagagaacccgacataaaggccgcgttccaatggcggccttctcccctaccggccaacctgccccgaaaagagcagaaggcaccctgcgggatctgcagatcagcttgcgtctcattctggggcaccgacacggtggaatgcaagacaccccactaccggaagtttctttgatgttaagaaaaacggcggaagtaggccgcagcgcttcctcagtatagtgcctcgagctggctcgcctactttctacggtaaagggaggtgctccacatctctatgcagctgtgcagcgccgcaggttccatgcgcaggctcggttggctaaatgcgctttccagccatctttcagccacccagtcctttcccaggttctcgagccaggacgtgacgtattcagacgtactgggggcggggcctcaaggggaaaagcgcctgagccgggatatcgcgagaacatcccgttctttcgtagctctggtgctgcggctccgctctcgtcgcaacgagatctttcgagatcttctccgcccccgctaccggcgcctcctctgcggccactgagccggagccggcctgagcagcgctctcggttgcagt

SEQ ID NO: 283298 - DNA, 63 bp, Homo sapiens
  chr5:133449610-133449673
  hyper
aagttccgagtctccgggctgcaggttctagtcacggaaccgagttgggagagtcataggggc

SEQ ID NO: 283299 - DNA, 329 bp, Homo sapiens
  chr5:133449924-133450253
  hyper
gccggttccctggggtacgagcacagcctcaagcagcctcaagccctaggaagcccccagttcaaagcacagggcgcattggagcctgggcacgatacagttcacaccacggctgcgatggtaagccacgcccaagtcccaagggcctaggggacccccgccctccacagccggaggagaaacctgggcgcagaaagcagggggaatatctggttgtaggtgagtaagcggggtcaggagttcccgttagagtctctgcgtttcgggagaagggtgatcattcccaggcttgtccgacgtctctctcagggtgcgctccggaagagcga

SEQ ID NO: 283300 - DNA, 549 bp, Homo sapiens
  chr5:133450702-133451251
  hyper
aagagccgcgacagcgccgccggtcccgagcgcgacctggccgagctcaagtcgtcgctcgtgaacgagtccgagggcgcggccggcggcgcagggatcccgggggtcccgggggccggcgccggggcccgcggcgaggccgaggtgagcccccgccggcgccggctcctcccccgcggtcgccgcgccgcgccgccccagttgcgcgcggccctcggggtctccagcgcgcagagcgtccctgccccggcgtcggccccgacccccgcggtcccaccgcccctcactcccctccggttctccctccaggctctcgggcgggaacacgctgcgcagagactcttcccggacaaacttccagagcccctggaggacggtgagtttctgcccggcccggcttcccttcgtcgcgctcaggccctggcctcggtgggacggggacgccaaggaccgcggggagccgggtgcctcccccaccgcagctcaggaggcggcagaacccaggggtggagagtggggggcgggcttcccgggcgccgccgggtcgag

SEQ ID NO: 283301 - DNA, 129 bp, Homo sapiens; identical to SEQ ID NO: 231388
  chr5:133706907-133707036
  hyper

SEQ ID NO: 283302 - DNA, 902 bp, Homo sapiens; identical to SEQ ID NO: 200032
  chr5:133862723-133863625
  hyper

SEQ ID NO: 283303 - DNA, 154 bp, Homo sapiens; identical to SEQ ID NO: 231391
  chr5:133968282-133968436
  hyper

SEQ ID NO: 283304 - DNA, 35 bp, Homo sapiens; identical to SEQ ID NO: 231392
  chr5:133984158-133984193
  hyper

SEQ ID NO: 283305 - DNA, 97 bp, Homo sapiens; identical to SEQ ID NO: 231393
  chr5:134074104-134074201
  hyper

SEQ ID NO: 283306 - DNA, 356 bp, Homo sapiens; identical to SEQ ID NO: 231394
  chr5:134094187-134094543
  hyper

SEQ ID NO: 283307 - DNA, 74 bp, Homo sapiens; identical to SEQ ID NO: 231395
  chr5:134210444-134210518
  hyper

SEQ ID NO: 283308 - DNA, 118 bp, Homo sapiens; identical to SEQ ID NO: 231396
  chr5:134240152-134240270
  hyper

SEQ ID NO: 283309 - DNA, 33 bp, Homo sapiens; identical to SEQ ID NO: 200033
  chr5:134364994-134365027
  hyper

SEQ ID NO: 283310 - DNA, 169 bp, Homo sapiens; identical to SEQ ID NO: 200034
  chr5:134365094-134365263
  hyper

SEQ ID NO: 283311 - DNA, 205 bp, Homo sapiens; identical to SEQ ID NO: 200035
  chr5:134366513-134366718
  hyper

SEQ ID NO: 283312 - DNA, 124 bp, Homo sapiens; identical to SEQ ID NO: 200036
  chr5:134367305-134367429
  hyper

SEQ ID NO: 283313 - DNA, 185 bp, Homo sapiens; identical to SEQ ID NO: 200037
  chr5:134370268-134370453
  hyper

SEQ ID NO: 283314 - DNA, 36 bp, Homo sapiens; identical to SEQ ID NO: 112022
  chr5:134370508-134370544
  hyper

SEQ ID NO: 283315 - DNA, 70 bp, Homo sapiens; identical to SEQ ID NO: 200038
  chr5:134374377-134374447
  hyper

SEQ ID NO: 283316 - DNA, 98 bp, Homo sapiens
  chr5:134375851-134375949
  hyper
gagattggacctttcttctttctgctcagcctgcgggagggagctggtcttgcgtgttggcagggagagtccgctgcccagagcgtggcagccaggga

SEQ ID NO: 283317 - DNA, 49 bp, Homo sapiens
  chr5:134376163-134376212
  hyper
tgcgggcctgcgaacggtgacgcctccacccctgtggccccgcaggccg

SEQ ID NO: 283318 - DNA, 182 bp, Homo sapiens
  chr5:134376375-134376557
  hyper
taccccgaagtgcccagcctgagcctgcttgctgttgggattatgggatgggaccacagggcaggtcgggctgtggcctgcctttctcagggactggagcggctaagcctgcccgccgacggccacgggctccagagcgaccgtttccggcgcaaggtgccgggagatggcagcgcggcagc

SEQ ID NO: 283319 - DNA, 219 bp, Homo sapiens; identical to SEQ ID NO: 200039
  chr5:134463605-134463824
  hyper

SEQ ID NO: 283320 - DNA, 213 bp, Homo sapiens; identical to SEQ ID NO: 200040
  chr5:134527188-134527401
  hyper

SEQ ID NO: 283321 - DNA, 77 bp, Homo sapiens
  chr5:134802366-134802443
  hyper
gtggtgctcaagaaatgaatgggagtagatgagggcattctggagactgcatggagagccagggcctgccgtagcag

SEQ ID NO: 283322 - DNA, 236 bp, Homo sapiens; identical to SEQ ID NO: 200041
  chr5:134824589-134824825
  hyper

SEQ ID NO: 283323 - DNA, 204 bp, Homo sapiens
  chr5:134825179-134825383
  hyper
cggtccagcccctgtccggccggagggaggccggggcacctgccggtctttccacctctgcatgcatttcacactttctatcctgttaggcgtccgcacttctatgccaatgaggactccccttcccacccctgtttttttatgtcatgtggatttaatctagttagacgattttatgcttaaaattgcattgttaacagcaat

SEQ ID NO: 283324 - DNA, 65 bp, Homo sapiens; identical to SEQ ID NO: 200043
  chr5:134827197-134827262
  hyper

SEQ ID NO: 283325 - DNA, 209 bp, Homo sapiens; identical to SEQ ID NO: 231411
  chr5:134844204-134844413
  hyper

SEQ ID NO: 283326 - DNA, 179 bp, Homo sapiens
  chr5:134870244-134870423
  hyper
cagccggctcaaaccgaattttcatgctcgtttttcttcattagagttctacaaattgtaaaattgacttttcacctcgtcttcaggggctgatctgtcccttttctaaatcacactgaagtggtggctggggtcagttctgagccagtcacaaaggaggttttgtggagttcagaaag

SEQ ID NO: 283327 - DNA, 109 bp, Homo sapiens; identical to SEQ ID NO: 200045
  chr5:134879162-134879271
  hyper

SEQ ID NO: 283328 - DNA, 74 bp, Homo sapiens
  chr5:134880614-134880688
  hyper
ttaccgctgcctggcctggaaggataggaggggcaaggagagaaatgcgaagtaagattcgattttaaaagtcg

SEQ ID NO: 283329 - DNA, 251 bp, Homo sapiens
  chr5:135170546-135170797
  hyper
tccagctggaagactttgcggcgggctggatcggaggtgagtgtgcttaccggggacccccggtcagagagagcgagcctggcggagtttgcctctatgctctgaggaaactttgcctctgtgcgctgccatcccgctccccgttgtgcgcgcagcctgctttggggagtgcccggccccgagatccccctggtggtcttgcagttgccagggctaaattctgagagcttcacagcgtttcgggctgagct

SEQ ID NO: 283330 - DNA, 230 bp, Homo sapiens; identical to SEQ ID NO: 200047
  chr5:135468336-135468566
  hyper

SEQ ID NO: 283331 - DNA, 350 bp, Homo sapiens
  chr5:135528891-135529241
  hyper
ggggcgggactggcggcggctgcccgggggagcggctgcgaaccaatgagggcaagagaggacgcggctgcgactgcccccagcccggcctcacatcactcagggacagagggacagagacagggacagagagagagagagaaagagagaaaagcacagggtcacaggaagactgacgggcaaagacacagttacagacctatgaacagagccacacgccaaacagggacaaaccgttgaggtaagcaaaccaactcagagacaaagctcagctgagcgtgcacacctgcgttcattatcctccttgacaggctccctccaggcatggcctggtttgttccgagtgccca

SEQ ID NO: 283332 - DNA, 239 bp, Homo sapiens; identical to SEQ ID NO: 231420
  chr5:135700986-135701225
  hyper

SEQ ID NO: 283333 - DNA, 33 bp, Homo sapiens; identical to SEQ ID NO: 200049
  chr5:136833978-136834011
  hyper

SEQ ID NO: 283334 - DNA, 152 bp, Homo sapiens; identical to SEQ ID NO: 112064
  chr5:137090063-137090215
  hyper

SEQ ID NO: 283335 - DNA, 225 bp, Homo sapiens; identical to SEQ ID NO: 231424
  chr5:137369084-137369309
  hyper

SEQ ID NO: 283336 - DNA, 73 bp, Homo sapiens; identical to SEQ ID NO: 200050
  chr5:137474816-137474889
  hyper

SEQ ID NO: 283337 - DNA, 164 bp, Homo sapiens
  chr5:137474919-137475083
  hyper
gcctctgtgaagcgaccctgtcccgcagggacctctctgtgcatagggtcaggctaattgaaaagcagggcctctaggtccgcggggactttccgggttgcacctgcaaattctgaatttgaccctctctaagtactcacctcagcggccgtcctcatatggta

SEQ ID NO: 283338 - DNA, 238 bp, Homo sapiens; identical to SEQ ID NO: 231426
  chr5:137514786-137515024
  hyper

SEQ ID NO: 283339 - DNA, 266 bp, Homo sapiens; identical to SEQ ID NO: 231428
  chr5:137667421-137667687
  hyper

SEQ ID NO: 283340 - DNA, 131 bp, Homo sapiens; identical to SEQ ID NO: 231429
  chr5:137673655-137673786
  hyper

SEQ ID NO: 283341 - DNA, 161 bp, Homo sapiens
  chr5:137774493-137774654
  hyper
ggtgggcaggggtcgatttcaggatgtaaccatggagacctccacgacaacagcctagggcttgaaacccaagaaagatgaacaagcgattcgaggaaggcagggcactgagggtcggaggcgcatgcccggccacagcaggtgccggggcgggggcgcgc

SEQ ID NO: 283342 - DNA, 192 bp, Homo sapiens; identical to SEQ ID NO: 222693
  chr5:137774864-137775056
  hyper

SEQ ID NO: 283343 - DNA, 95 bp, Homo sapiens; identical to SEQ ID NO: 222694
  chr5:137801267-137801362
  hyper

SEQ ID NO: 283344 - DNA, 106 bp, Homo sapiens; identical to SEQ ID NO: 231430
  chr5:137879232-137879338
  hyper

SEQ ID NO: 283345 - DNA, 60 bp, Homo sapiens; identical to SEQ ID NO: 231431
  chr5:137910697-137910757
  hyper

SEQ ID NO: 283346 - DNA, 113 bp, Homo sapiens; identical to SEQ ID NO: 200053
  chr5:137911538-137911651
  hyper

SEQ ID NO: 283347 - DNA, 81 bp, Homo sapiens; identical to SEQ ID NO: 200054
  chr5:138088596-138088677
  hyper

SEQ ID NO: 283348 - DNA, 302 bp, Homo sapiens
  chr5:138089642-138089944
  hyper
gggaagtgattgtcgtccggctccgaggcgttcctgccccctcccccttcccggccgctgagacttcccgatggggcggcggggacgcgggctcggcgaaccgggaggctggagcccgggcttctcccatacagcttcgccgtaggtgggccacacccgtgtggacttttggcgtgaccgtccacttggactcggggattactcagctttcctgggtttcttgtcggttggacgcacttagctttcagccctagttttcaggagtggcattagagaggtttttttttttttttaattgttgt

SEQ ID NO: 283349 - DNA, 376 bp, Homo sapiens; identical to SEQ ID NO: 231433
  chr5:138609205-138609581
  hyper

SEQ ID NO: 283350 - DNA, 124 bp, Homo sapiens; identical to SEQ ID NO: 231434
  chr5:138677832-138677956
  hyper

SEQ ID NO: 283351 - DNA, 36 bp, Homo sapiens; identical to SEQ ID NO: 231435
  chr5:138775186-138775222
  hyper

SEQ ID NO: 283352 - DNA, 240 bp, Homo sapiens; identical to SEQ ID NO: 231436
  chr5:138923041-138923281
  hyper

SEQ ID NO: 283353 - DNA, 273 bp, Homo sapiens; identical to SEQ ID NO: 231437
  chr5:138940460-138940733
  hyper

SEQ ID NO: 283354 - DNA, 1166 bp, Homo sapiens
  chr5:139016856-139018022
  hyper
tccgtgtggtgagcgtgcctcctttgtggtgtgggtggcctatggtggtgcttcctttcacaaattgtgtgtccgtgtgacacccccccccccctcagccgctgtgcccctttgcgggtcagtgtgttgtttgacctcggccgcgggtgcccccacccctgccggccccgccgcccctcccccgcaccgtccgcccgcgccgcgcggcgatcgatcgccattgattgtccctgacgagctgctccactttccagccaatgtcaggaggggggatctccgccgccctggcggtgtcatttccacacactccctgggctgccgccagcgcgggcgcctcgaagagccggcctggatcgcccggagctcgggctggaccgcccacaccgcgcgaggaagcccccgatggcgtggcccgaccccagtctgccggcctgcccgccctaggcctctgcacccaagcccccttcccagcgctggtggatgttgtcaccacaggagtttaagctgggccgggtatggggagggacgctgtgtcgggtgcgccctgcgcttgccctggtgggggcgcggggctgtttccggcgggcggaggcgccagcaggccaactttgccgcggcccaaacagatgctaatgattttccgggaggcgccggttatctctggccccagccggccggtgtgctgggactgggctcccggcacagacaccacctcgccccccaccctcaccctcctgagccccacctaataaccacttgtccccgagtggacgggttgggggggcgtcggggggagtccgcaggctgccccgggtgtcctggaactgttgctgtgtgggattatttgcgcctcctccacccaggatgctaccgtctttctgagcacttcgcaaagccaaacacacacccgagcacgggaaactgaggttcatagaagctcggcccaaggtcatgccgacccattccctgctcagctgagtgggtcaccctctgaaaaccatcccgtcggaggacccgcagccccctgtccccttctcgctcaggggcctgagccagtttccagactccccggttggaagtgctgacgtggctctgggcagctgtctggggccgggaagcggggcagatgtcacgcagcccaggggaggaggcggctccgcggggag

SEQ ID NO: 283355 - DNA, 64 bp, Homo sapiens; identical to SEQ ID NO: 200058
  chr5:139039951-139040015
  hyper

SEQ ID NO: 283356 - DNA, 214 bp, Homo sapiens
  chr5:139047725-139047939
  hyper
ctgccactccctccgcctcccagacctctggggccatgaatcatttatgaggcaaaaatgaaaccaattaaggacaaactttgaaagcctctaattgctgcgcctggtggcaccgtggaatgaggggaggccagccttctcggtgcggaatctccttggcccaggccttcccaggctgcccgtcccgccgcggctcagggcgcctcccggctcc

SEQ ID NO: 283357 - DNA, 75 bp, Homo sapiens; identical to SEQ ID NO: 231441
  chr5:139051074-139051149
  hyper

SEQ ID NO: 283358 - DNA, 498 bp, Homo sapiens; identical to SEQ ID NO: 222699
  chr5:139088832-139089330
  hyper

SEQ ID NO: 283359 - DNA, 144 bp, Homo sapiens
  chr5:139089534-139089678
  hyper
cagaagccgccatccggtgggtcaggtgcggcctcagcctaggagggcgggcgggcaggcctgttgctaatggtgctgggacgggcgtgggggggcggggggatggtagcgggggagcctctgggagccccgtttccagggttc

SEQ ID NO: 283360 - DNA, 61 bp, Homo sapiens; identical to SEQ ID NO: 200061
  chr5:139091111-139091172
  hyper

SEQ ID NO: 283361 - DNA, 934 bp, Homo sapiens; identical to SEQ ID NO: 231443
  chr5:139126893-139127827
  hyper

SEQ ID NO: 283362 - DNA, 346 bp, Homo sapiens; identical to SEQ ID NO: 231444
  chr5:139135575-139135921
  hyper

SEQ ID NO: 283363 - DNA, 235 bp, Homo sapiens
  chr5:139143822-139144057
  hyper
cccgtgtgacttgtcgccgccacaaccgcagtggccagctcgcgcctggcactgagaccgtaagcaaatgtttgctgaattaatgagtgggggctgcagggagggcttgggctgcagttccgcctgggctgctgcagctggggcgcgtacgtacatccgtgtgcccctgggagtgtgagtgaggggcgcctgtgggtgggggagccatatccgtgtcccgggggtctggcggcgc

SEQ ID NO: 283364 - DNA, 36 bp, Homo sapiens; identical to SEQ ID NO: 200062
  chr5:139175356-139175392
  hyper

SEQ ID NO: 283365 - DNA, 322 bp, Homo sapiens; identical to SEQ ID NO: 200063
  chr5:139175997-139176319
  hyper

SEQ ID NO: 283366 - DNA, 63 bp, Homo sapiens; identical to SEQ ID NO: 200064
  chr5:139227938-139228001
  hyper

SEQ ID NO: 283367 - DNA, 91 bp, Homo sapiens
  chr5:139283459-139283550
  hyper
aagcccgagggctccgatctctccgaggaagggaaggcagtgacagctcccggagcgctcggcggccaggccgggcccagcgtctgatcag

SEQ ID NO: 283368 - DNA, 122 bp, Homo sapiens; identical to SEQ ID NO: 200065
  chr5:139284463-139284585
  hyper

SEQ ID NO: 283369 - DNA, 91 bp, Homo sapiens; identical to SEQ ID NO: 231450
  chr5:139423001-139423092
  hyper

SEQ ID NO: 283370 - DNA, 636 bp, Homo sapiens; identical to SEQ ID NO: 200066
  chr5:139487907-139488543
  hyper

SEQ ID NO: 283371 - DNA, 57 bp, Homo sapiens
  chr5:139525366-139525423
  hyper
tcatagttgctttgttctatcgtctctccccatgccttcaaaggcggcctgccttcc

SEQ ID NO: 283372 - DNA, 134 bp, Homo sapiens
  chr5:139525814-139525948
  hyper
ccaggggttcacccagctcccctccctcccctccgctgccctcctggcagctccagctctgctctcgcggctttccaggttttggggtgggtgattgagtaggccgcacctgggacactgtgactggaggacgc

SEQ ID NO: 283373 - DNA, 291 bp, Homo sapiens
  chr5:139554293-139554584
  hyper
ctcagccccattccgctcaggtacagctcgggaagtaagcccccaaccctagttgggtctggaccaacaagacacgaggaggcagcagcccacagccgacccctcatgccacgcactgagcagggttccgcatggacgctggtcttgcctcccaggcgcctgaactagcggagttggggtatcgggtggagtctcggagaaccaatccaatctgagggggacgcctgtgggagtcctaagtatccagcgcagctgggaggcccacgttgggaagtcggagaccgaccccgc

SEQ ID NO: 283374 - DNA, 111 bp, Homo sapiens; identical to SEQ ID NO: 231453
  chr5:139682661-139682772
  hyper

SEQ ID NO: 283375 - DNA, 63 bp, Homo sapiens; identical to SEQ ID NO: 222706
  chr5:139725675-139725738
  hyper

SEQ ID NO: 283376 - DNA, 151 bp, Homo sapiens; identical to SEQ ID NO: 200068
  chr5:139725997-139726148
  hyper

SEQ ID NO: 283377 - DNA, 274 bp, Homo sapiens
  chr5:139726430-139726704
  hyper
caggtggcggagagcggttcctacctttccccaaacgcctgtcactctgcagccttgtgactgactgctgagctgagttctgttccgggcctggcctcttgcttcatctaagccccataccaggggtctccatccctgtcaccctctaagtttcagaagcccaccttttggcctaccaacacggcaagtatcaaataataattaattcatctatcatttaaaaattagacacgtgaatgccagccgttctcataaacccgagataaccagagtt

SEQ ID NO: 283378 - DNA, 258 bp, Homo sapiens; identical to SEQ ID NO: 231455
  chr5:139742886-139743144
  hyper

SEQ ID NO: 283379 - DNA, 422 bp, Homo sapiens; identical to SEQ ID NO: 200069
  chr5:139927089-139927511
  hyper

SEQ ID NO: 283380 - DNA, 98 bp, Homo sapiens; identical to SEQ ID NO: 231457
  chr5:139944032-139944130
  hyper

SEQ ID NO: 283381 - DNA, 206 bp, Homo sapiens; identical to SEQ ID NO: 200070
  chr5:140011816-140012022
  hyper

SEQ ID NO: 283382 - DNA, 125 bp, Homo sapiens; identical to SEQ ID NO: 200071
  chr5:140012520-140012645
  hyper

SEQ ID NO: 283383 - DNA, 132 bp, Homo sapiens; identical to SEQ ID NO: 200072
  chr5:140027367-140027499
  hyper

SEQ ID NO: 283384 - DNA, 34 bp, Homo sapiens; identical to SEQ ID NO: 231460
  chr5:140044228-140044262
  hyper

SEQ ID NO: 283385 - DNA, 272 bp, Homo sapiens; identical to SEQ ID NO: 231461
  chr5:140071090-140071362
  hyper

SEQ ID NO: 283386 - DNA, 52 bp, Homo sapiens
  chr5:140187031-140187083
  hyper
attctcggatcgaccgggaggagctgtgccggcggagcgcggagtgcagcat

SEQ ID NO: 283387 - DNA, 274 bp, Homo sapiens; identical to SEQ ID NO: 200073
  chr5:140346034-140346308
  hyper

SEQ ID NO: 283388 - DNA, 271 bp, Homo sapiens; identical to SEQ ID NO: 231465
  chr5:140381529-140381800
  hyper

SEQ ID NO: 283389 - DNA, 352 bp, Homo sapiens; identical to SEQ ID NO: 231466
  chr5:140419804-140420156
  hyper

SEQ ID NO: 283390 - DNA, 209 bp, Homo sapiens; identical to SEQ ID NO: 231467
  chr5:140431053-140431262
  hyper

SEQ ID NO: 283391 - DNA, 80 bp, Homo sapiens
  chr5:140613724-140613804
  hyper
cacaaaaatgcaactcggaaaataggcatatagaaggagcatataatttaaatttatagacaaacacacaagaaaaatta

SEQ ID NO: 283392 - DNA, 533 bp, Homo sapiens; identical to SEQ ID NO: 231470
  chr5:140700004-140700537
  hyper

SEQ ID NO: 283393 - DNA, 232 bp, Homo sapiens; identical to SEQ ID NO: 200074
  chr5:140855366-140855598
  hyper

SEQ ID NO: 283394 - DNA, 193 bp, Homo sapiens; identical to SEQ ID NO: 231476
  chr5:140892330-140892523
  hyper

SEQ ID NO: 283395 - DNA, 102 bp, Homo sapiens; identical to SEQ ID NO: 200075
  chr5:140904508-140904610
  hyper

SEQ ID NO: 283396 - DNA, 60 bp, Homo sapiens; identical to SEQ ID NO: 200076
  chr5:141030747-141030807
  hyper

SEQ ID NO: 283397 - DNA, 216 bp, Homo sapiens; identical to SEQ ID NO: 200077
  chr5:141030884-141031100
  hyper

SEQ ID NO: 283398 - DNA, 80 bp, Homo sapiens; identical to SEQ ID NO: 200078
  chr5:141031150-141031230
  hyper

SEQ ID NO: 283399 - DNA, 68 bp, Homo sapiens; identical to SEQ ID NO: 231478
  chr5:141061849-141061917
  hyper

SEQ ID NO: 283400 - DNA, 224 bp, Homo sapiens; identical to SEQ ID NO: 200079
  chr5:141255434-141255658
  hyper

SEQ ID NO: 283401 - DNA, 990 bp, Homo sapiens; identical to SEQ ID NO: 200080
  chr5:141255691-141256681
  hyper

SEQ ID NO: 283402 - DNA, 881 bp, Homo sapiens
  chr5:141257149-141258030
  hyper
gctctgtaaagccacgggttgtgtgtcggtgctgctgatcgtgcagacactgaagcggattctgagctggcgacggtgccccagtgggcgctggtgtgcgggaggtatgtctgtgtgcacatatgcagggatgtatgtatgtgtgtatatatgtccacggtctggccctctgggtgcccgcgagaagctggaagcggctgagtgagccgaggtagttgcccaacaagtgtgtatgtatgtgttgtggacaacggtccttgcttgctccgtcctccgggagacccccaccaaactgggggccgcgcgcttccccaaacccatcctccacgccgcgcgctcctggagtctccttatccccgtctctccgagcgcgcccaggtttgggacgcggggactagggttctgctcagcaccccctcccctccctcggcttctcgccgcggacctgggaggacggaatccctcagccgcatcccctgctatgggctcccagcagcccccacctcagccccctcgcgccgagctcgtgttgggcccccgcggcctcgctccgccgagcgcccctccctcagctcccgccggccatgaccgcttcgggccccaagccgctgctgcctccaccgccgccggatccttacccgcctccgggcagcgccggccgcccgccccgctgtccatgagccgccgccggccccggcctgggctgcggctccgcacggctggggctggagctgcagttcgggctccggctccggctccggctggctctgggcgcagcagcccggcggctttgcgtccgcgccgcgctcccgctccccgagtgtgtgaggcggcggcggcggcggcggcggcggcggcggcggcggcggagccagcagaga

SEQ ID NO: 283403 - DNA, 175 bp, Homo sapiens; identical to SEQ ID NO: 231481
  chr5:141258623-141258798
  hyper

SEQ ID NO: 283404 - DNA, 54 bp, Homo sapiens; identical to SEQ ID NO: 231483
  chr5:141348500-141348554
  hyper

SEQ ID NO: 283405 - DNA, 61 bp, Homo sapiens
  chr5:141703944-141704005
  hyper
acggcaaagctggcaccgtgggcaccgagctgggaggtgggcgagccgcccagagcgaggg

SEQ ID NO: 283406 - DNA, 265 bp, Homo sapiens; identical to SEQ ID NO: 200082
  chr5:141704448-141704713
  hyper

SEQ ID NO: 283407 - DNA, 84 bp, Homo sapiens; identical to SEQ ID NO: 200083
  chr5:141705342-141705426
  hyper

SEQ ID NO: 283408 - DNA, 341 bp, Homo sapiens; identical to SEQ ID NO: 200084
  chr5:141736299-141736640
  hyper

SEQ ID NO: 283409 - DNA, 175 bp, Homo sapiens
  chr5:141931131-141931306
  hyper
ccccaaatataatttcctcccgcagctcattgcagccccgaggaaatcaccgggggagggctcgggagtgcggcgcggcagccccataatttccagggcccttctcctacactgacacgtaattgtcagattgttttatgagagcagcttcctgcccgcttcctgcctggcttcc

SEQ ID NO: 283410 - DNA, 32 bp, Homo sapiens; identical to SEQ ID NO: 200086
  chr5:141931539-141931571
  hyper

SEQ ID NO: 283411 - DNA, 624 bp, Homo sapiens
  chr5:142781875-142782499
  hyper
gtttaagttgcaaataacccagccacattaattggccctaatgaaccatgccagagggtcttaagtggtattacaaggttgcaattatcaagtctgcaaccccaaacgtcaaactagcacttgtaaaaatcgcagcacaaaaccattacggttacagggggtctttttctaaaaggggccacttagaaacctcaggcgcgaattaacaacaaacgctaaagagcaagcccttgcggggcgggggtggagaagagaaaaaagtgcgaggttaaaagagaagtacgtccagacctgttgagttctctctccgacacgcccacttctaacagataacgccggccccggccgcagtctccaagttgcgggctgtcagccccccgcgtgtgcaccctcacgcgccccgcacgccctcctcaagccaggcgccgccggggcctccccggagcccgggctcgcgctcgggcgcgccggggtggcgtgcaaatattcgggcgagtaaaattcagacgcggcttagcgttcaccacgaaaacgggtgtcgggcgacccccttggagggaaaggggacactagggggagaaaagaggccaggattcccgcgaggaatgagaggctcgaagcccc

SEQ ID NO: 283412 - DNA, 124 bp, Homo sapiens
  chr5:142782625-142782749
  hyper
cgtcgcccggcccttgccagccccccacccccactccccgaggctaataaaagtttgtaggctcccgcggcggcccccgagttgtctccggtcccagcggcacctcgggggagcgagcgcgccc

SEQ ID NO: 283413 - DNA, 409 bp, Homo sapiens; identical to SEQ ID NO: 112222
  chr5:142782794-142783203
  hyper

SEQ ID NO: 283414 - DNA, 1068 bp, Homo sapiens
  chr5:142783607-142784675
  hyper
gctacctccttcccgcccccgcccagctccgcggctccagacccactcgggagctcgctctgccccttggcggcaagcgccgccagtgcccctgcgggtgacagcgggcgggccacaagagccggggcgcctcccgcggctgagctgcgtgagtggcccgcgccgccgccgccgggccgagttgcgtgaagtgtgtcacttcgaaaggggctacggggttgcacggaaacggtgccgcagcgtctcggccgcgctcggggccgggcggcctgacacgccctctggggaggcttcagggaagggacgggatagcgggggtcggcgcatacgtactttgggcccggggggagtcgcgtgccggcaggtcccccaccaccgcatcatctgggcggccgggtcttcagctgccgccgccgcgctctcgcactgggagagaagttgcaaagcagaacccaccctcccccgcgccccgaccgtcccccaccctcttccccgagtctgcgaggcggcggcggcggcagaaggaggcgccgcctgccaagttcaacccccacccctcccgcccaatgtgctcacactcgaaggaagttgcacgccaaatgcaaaacctccagcgagctggatttctttgcactttttttttattattatgattaaggaaagcagggggcggcaggcttaaaagcaagttgcaggcgaaatagtaagttgctggcgaaatatagccccccttccgaaactcctgacctcttcttccaccccggccagggcccgcgtccaagttcccggtgcaggccccacccccgaatcttgacatttgctgccctcgactctgtgcgttgctcaccctatcacgttcataggacccctgcccctacaaataaaacaaaatacaggcagctttaaaatgccagcgttcaactccctacagatgttcctgttaggagcttccccctcagtccaaggggaagggaactcgtggtccgtcctgagaaaggagagggccgtggggcgaggggtgcccgtgcgggaagcccccgccccagctcccttccccagctcgccgcg

SEQ ID NO: 283415 - DNA, 46 bp, Homo sapiens; identical to SEQ ID NO: 200089
  chr5:142785272-142785318
  hyper

SEQ ID NO: 283416 - DNA, 255 bp, Homo sapiens; identical to SEQ ID NO: 231491
  chr5:143550289-143550544
  hyper

SEQ ID NO: 283417 - DNA, 75 bp, Homo sapiens
  chr5:143584759-143584834
  hyper
cgccccaagccccgcgcgcctggcaatcgcgtgcccaccgccggagcgcggcgtccccgtgcagtcctggcaacc

SEQ ID NO: 283418 - DNA, 437 bp, Homo sapiens; identical to SEQ ID NO: 200091
  chr5:145214426-145214863
  hyper

SEQ ID NO: 283419 - DNA, 248 bp, Homo sapiens
  chr5:145215152-145215400
  hyper
tgcctgggagccatcacgccccgccccaggaaacctggaccttgggcttatgcgtttatggtatcaccgcctggagtcacagaataagccgtggttggcagcacgggaaaaaagtattaataaggaaggcctggtgtgacaaaggccagcattactcatgccaccaggcagctgcctctgaggcttgggtttgggcctcgtgtaaggtaaagattgcctcgggaataagaaccgcgttttagtgcacc

SEQ ID NO: 283420 - DNA, 292 bp, Homo sapiens; identical to SEQ ID NO: 231495
  chr5:145583394-145583686
  hyper

SEQ ID NO: 283421 - DNA, 350 bp, Homo sapiens
  chr5:145718045-145718395
  hyper
agcttgggcgtgaggccaggagcgccctggaaatgggcagtttggcggcagccgggccgacggagtgtgtgtgtgtgtgtgtgtgtgtgtgtgtgtgtgtgtgtgtggtggagaggggaagttggagtagggtcaacttcctgccccagctcagcccagggctacccttttatccaggcagttcgagctgggacaggacggagaggttgggacttttggggtggcatgggggaagggaagtccacgaagaagaaagaatcggaaaggtctggcgggttggagccagcggggcggggcggactgggagaggccaggccaggcccgggtataaaggctgtggagggggcggc

SEQ ID NO: 283422 - DNA, 301 bp, Homo sapiens
  chr5:145718501-145718802
  hyper
ttcctggcaggctgcttgtaagatgagtgaagaagcaggtgggggagaggggaggcagcgagcgagagggcgaggggagcgcgggcgctgagcagcgctcacttggagagcggcaagcaagctagacaagcctgattccatgtcacccgctgccaccctgccaggagcgcgaagatgatggccatgaactccaagcagcctttcggcatgcacccggtgctgcaagaacccaaattctccagtctgcactctggctccgaggccatgcgccgagtctgtctcccagccccgcaggtacgta

SEQ ID NO: 283423 - DNA, 165 bp, Homo sapiens; identical to SEQ ID NO: 200096
  chr5:146256762-146256927
  hyper

SEQ ID NO: 283424 - DNA, 148 bp, Homo sapiens; identical to SEQ ID NO: 200097
  chr5:146258482-146258630
  hyper

SEQ ID NO: 283425 - DNA, 66 bp, Homo sapiens
  chr5:146614040-146614106
  hyper
attacgatccacatcgcaggggagtgaggcttcccccgcgatatgaggagtaatagcaccgccctc

SEQ ID NO: 283426 - DNA, 158 bp, Homo sapiens
  chr5:146614481-146614639
  hyper
cccgcctccttccctggccaaggagccgcccctccggggtagctgtgcgctgggcggcgctcggaccccttggcagccgcaggtgcctccccagcccagcccagctcagtccagcgcagcccagcccagcccagcccggcgctcgcagcctccgccgc

SEQ ID NO: 283427 - DNA, 150 bp, Homo sapiens
  chr5:146832504-146832654
  hyper
cccactgcagccacgttagctgtccagtcccataaacgatacattgaaacatgagtcggactgaacgcaggcaagaaggggacacggcgaggacaggtggtccagacaccctgccaccctcgcggcgcaggggtcagagccgtggggctg

SEQ ID NO: 283428 - DNA, 322 bp, Homo sapiens
  chr5:146832690-146833012
  hyper
ccctggggaaaggtgtcatctctccaaacccagcacggccaaaaggatccttagacaaaaagcacacctcaacctggggcggcaaaaaccgacactccaggcggagcagtggtcctgggagagccgcgagccccgcgctcctggggaactaccggcggtgggaagggaggataaataatccaaagttctccgtgccactgtttgggtttcctctttgttttgttttccccaaaccccagggtcgctcagtctgtgtggcgccggctggactgaccgccgcgctccgccacccggaccccgggtctccgtccctccccgggga

SEQ ID NO: 283429 - DNA, 48 bp, Homo sapiens; identical to SEQ ID NO: 231509
  chr5:147763270-147763318
  hyper

SEQ ID NO: 283430 - DNA, 185 bp, Homo sapiens
  chr5:148033537-148033722
  hyper
ccgtcgtgctgccccgcccccgccgcgtccccaccggcacccgtgggctcctggggtcccgacccccggcgcacttgccgcacatacccgctgccagaggcgagggagcgaggtgccctggcagattcgagcggccacccccagccgctgagccgagcttctgctgccgccgctgccgctgcgct

SEQ ID NO: 283431 - DNA, 114 bp, Homo sapiens
  chr5:148206071-148206185
  hyper
gcctcgccccttcgcggctgccggcgtgccattggccgaaagttcccgtacgtcacggcgagggcagttcccctaaagtcctgtgcacataacgggcagaacgcactgcgaagc

SEQ ID NO: 283432 - DNA, 42 bp, Homo sapiens
  chr5:148206432-148206474
  hyper
acccaatggaagccatgcgccggaccacgacgtcacgcagga

SEQ ID NO: 283433 - DNA, 140 bp, Homo sapiens; identical to SEQ ID NO: 200101
  chr5:148520919-148521059
  hyper

SEQ ID NO: 283434 - DNA, 44 bp, Homo sapiens; identical to SEQ ID NO: 200102
  chr5:148521331-148521375
  hyper

SEQ ID NO: 283435 - DNA, 272 bp, Homo sapiens; identical to SEQ ID NO: 200103
  chr5:148650951-148651223
  hyper

SEQ ID NO: 283436 - DNA, 106 bp, Homo sapiens; identical to SEQ ID NO: 200104
  chr5:148724797-148724903
  hyper

SEQ ID NO: 283437 - DNA, 61 bp, Homo sapiens; identical to SEQ ID NO: 231513
  chr5:148931073-148931134
  hyper

SEQ ID NO: 283438 - DNA, 87 bp, Homo sapiens
  chr5:149109659-149109746
  hyper
tgcgtgagctggtcgcggcgccagacacggcgcaggaaagtgggtgagcgacccccggctcccgcgggcgccgcgcggccccgcccc

SEQ ID NO: 283439 - DNA, 192 bp, Homo sapiens; identical to SEQ ID NO: 112268
  chr5:149109802-149109994
  hyper

SEQ ID NO: 283440 - DNA, 476 bp, Homo sapiens; identical to SEQ ID NO: 231515
  chr5:149111288-149111764
  hyper

SEQ ID NO: 283441 - DNA, 254 bp, Homo sapiens; identical to SEQ ID NO: 231516
  chr5:149340038-149340292
  hyper

SEQ ID NO: 283442 - DNA, 148 bp, Homo sapiens; identical to SEQ ID NO: 200105
  chr5:149379996-149380144
  hyper

SEQ ID NO: 283443 - DNA, 317 bp, Homo sapiens; identical to SEQ ID NO: 231518
  chr5:149381200-149381517
  hyper

SEQ ID NO: 283444 - DNA, 124 bp, Homo sapiens
  chr5:149569886-149570010
  hyper
caagatgaagaagctccagggagctcacctccgcaaggtagggcacgagggcgggggcgctgggggtgcacctggaggagggttggagagacccgcccccaacgaggcccctggggaaggtctg

SEQ ID NO: 283445 - DNA, 184 bp, Homo sapiens; identical to SEQ ID NO: 200106
  chr5:149681825-149682009
  hyper

SEQ ID NO: 283446 - DNA, 101 bp, Homo sapiens
  chr5:149682691-149682792
  hyper
agcctctctgagtgccagccctggaaggaaagcccatcatttcctagtccaaccgggtcattctacagatggagaaactgaggcccggagatgagcctcaa

SEQ ID NO: 283447 - DNA, 103 bp, Homo sapiens; identical to SEQ ID NO: 231521
  chr5:149682902-149683005
  hyper

SEQ ID NO: 283448 - DNA, 107 bp, Homo sapiens; identical to SEQ ID NO: 200108
  chr5:149829576-149829683
  hyper

SEQ ID NO: 283449 - DNA, 443 bp, Homo sapiens; identical to SEQ ID NO: 231523
  chr5:150004274-150004717
  hyper

SEQ ID NO: 283450 - DNA, 129 bp, Homo sapiens; identical to SEQ ID NO: 231525
  chr5:150051900-150052029
  hyper

SEQ ID NO: 283451 - DNA, 44 bp, Homo sapiens; identical to SEQ ID NO: 231526
  chr5:150080673-150080717
  hyper

SEQ ID NO: 283452 - DNA, 70 bp, Homo sapiens
  chr5:150158135-150158205
  hyper
ccacggctacgcggcgagtgtgtggcaacgtggaaggggagcccgagacgccctggtctctcccttctct

SEQ ID NO: 283453 - DNA, 330 bp, Homo sapiens
  chr5:150158451-150158781
  hyper
gatcccgtgcagtcctggggaccctgagaagcaccgagccatccctgacccaggaactttccgcagactcgccgccatctggggtgagtggggccaccgggggattgtttgtggggctctggcagagcggagctcttcggattcgcgacctacctctagtgcggcccctttccccgggctcccaacgttcttctttatgtccggtctctcctccccatttctcccttttcatcacttttgtatttcttgccctcaccccctcctttttctcctgctgtcagctcttaagttcgagcctcctagtgcacagaattttgggcctgggggagg

SEQ ID NO: 283454 - DNA, 32 bp, Homo sapiens; identical to SEQ ID NO: 200109
  chr5:150400618-150400650
  hyper

SEQ ID NO: 283455 - DNA, 315 bp, Homo sapiens; identical to SEQ ID NO: 112296
  chr5:150536746-150537061
  hyper

SEQ ID NO: 283456 - DNA, 514 bp, Homo sapiens; identical to SEQ ID NO: 200111
  chr5:150603038-150603552
  hyper

SEQ ID NO: 283457 - DNA, 184 bp, Homo sapiens; identical to SEQ ID NO: 4325
  chr5:150603589-150603773
  hyper

SEQ ID NO: 283458 - DNA, 41 bp, Homo sapiens; identical to SEQ ID NO: 231531
  chr5:150826986-150827027
  hyper

SEQ ID NO: 283459 - DNA, 119 bp, Homo sapiens; identical to SEQ ID NO: 200113
  chr5:151066500-151066619
  hyper

SEQ ID NO: 283460 - DNA, 293 bp, Homo sapiens; identical to SEQ ID NO: 200114
  chr5:151150270-151150563
  hyper

SEQ ID NO: 283461 - DNA, 237 bp, Homo sapiens
  chr5:151150681-151150918
  hyper
tcaggccttccaccggcgaccttccggcgggagcctgcgggcggcgcaggaacgaccctccttcctctgccccgcagcagtgctgagtaatggtgagagcagcaaggcccttggccgccgcacgtaagaaaaaagttgtaataaaaagaaaacaacccgggaaactttactagttggttcgccaggtacaaacctatgcggaaaaggcggggtacaggcctcggaggccggacccaa

SEQ ID NO: 283462 - DNA, 227 bp, Homo sapiens; identical to SEQ ID NO: 231534
  chr5:151152045-151152272
  hyper

SEQ ID NO: 283463 - DNA, 187 bp, Homo sapiens
  chr5:152870319-152870506
  hyper
aagcaagcaaggaaggaactgcaggaggaaaagaacaggcagaacagcgagaagaataaagggaaagggggggaaacaccaaatctatgattggacctgggcttctttttcgccaatgcaaaaaggaatatgcagcacatttttgccttcttctgcaccggtttcctaggcgcggtagtaggtgcca

SEQ ID NO: 283464 - DNA, 36 bp, Homo sapiens
  chr5:153853519-153853555
  hyper
agaccctcaggcgctgcagagcgtgcgctccgtggg

SEQ ID NO: 283465 - DNA, 41 bp, Homo sapiens; identical to SEQ ID NO: 200116
  chr5:153854289-153854330
  hyper

SEQ ID NO: 283466 - DNA, 55 bp, Homo sapiens; identical to SEQ ID NO: 200117
  chr5:153854360-153854415
  hyper

SEQ ID NO: 283467 - DNA, 240 bp, Homo sapiens; identical to SEQ ID NO: 200118
  chr5:153854935-153855175
  hyper

SEQ ID NO: 283468 - DNA, 52 bp, Homo sapiens; identical to SEQ ID NO: 200119
  chr5:153857881-153857933
  hyper

SEQ ID NO: 283469 - DNA, 193 bp, Homo sapiens
  chr5:153859808-153860001
  hyper
attacgctgtggagagaaggacctcaacacacaatcctcaacacacgcccagtctttgtcctaatccaagtacaatctgcaacagtgcctctcagagcggcacactaggccctcagattatacattcacaggtacatgcacaagggctcacaaaaccttgccgccgtacacaaaagcccgtatcttcataaga

SEQ ID NO: 283470 - DNA, 92 bp, Homo sapiens; identical to SEQ ID NO: 200120
  chr5:153862577-153862669
  hyper

SEQ ID NO: 283471 - DNA, 322 bp, Homo sapiens
  chr5:153863650-153863972
  hyper
ctcccttctcccatccctcgcagtggttagttgcacactagcaggcaggtggattttactccggtttcttttacccagtcccgttgctttcagggcaatttcattctggtcagcttcacagcactcagctccaggccgcctgttaacgaagttttgctgtgcaccaggctgttttcggcatattgggagattttttttgttcctcacatgctggttagtttcctggtgctcggttgctccccgggtcgggtcgggccacttgtagccaatccctagaccactgatcattgcctgccgagctgtttcatgccaagaggcttat

SEQ ID NO: 283472 - DNA, 156 bp, Homo sapiens
  chr5:153900644-153900800
  hyper
gggcgctgagctcccggtatcctctaggtggcgcacaattctctggggaaaaggagaattccaggtgaactaattccacgggaagaagggttggtttgggaggggctaagccctgcctacgggctcctgtaggggaatcagctccccatccccctg

SEQ ID NO: 283473 - DNA, 315 bp, Homo sapiens; identical to SEQ ID NO: 231548
  chr5:154026798-154027113
  hyper

SEQ ID NO: 283474 - DNA, 147 bp, Homo sapiens; identical to SEQ ID NO: 231549
  chr5:154136122-154136269
  hyper

SEQ ID NO: 283475 - DNA, 86 bp, Homo sapiens; identical to SEQ ID NO: 231550
  chr5:154237359-154237445
  hyper

SEQ ID NO: 283476 - DNA, 389 bp, Homo sapiens; identical to SEQ ID NO: 231551
  chr5:154317541-154317930
  hyper

SEQ ID NO: 283477 - DNA, 57 bp, Homo sapiens
  chr5:155107331-155107388
  hyper
cttgggagtctgttggttaacgggaaaagtgctttctctgagaggaaggcggggcaa

SEQ ID NO: 283478 - DNA, 176 bp, Homo sapiens
  chr5:155107908-155108084
  hyper
cgccctccatgctgcgggagctgcggccgccttccgctcagcctctggtcccaggcgagcctggcgagccggcgaagcaccggcggggaggaggactagaacaggaggaggggcacggcggattgaagcgagctgggctgtgagcaagggacacccacagcctggagaaacagccc

SEQ ID NO: 283479 - DNA, 255 bp, Homo sapiens; identical to SEQ ID NO: 200123
  chr5:155108849-155109104
  hyper

SEQ ID NO: 283480 - DNA, 33 bp, Homo sapiens
  chr5:156887016-156887049
  hyper
tcttgcccctagcacggggcggtgactccagag

SEQ ID NO: 283481 - DNA, 240 bp, Homo sapiens; identical to SEQ ID NO: 200124
  chr5:157001858-157002098
  hyper

SEQ ID NO: 283482 - DNA, 243 bp, Homo sapiens; identical to SEQ ID NO: 200125
  chr5:157002204-157002447
  hyper

SEQ ID NO: 283483 - DNA, 287 bp, Homo sapiens; identical to SEQ ID NO: 200126
  chr5:157002817-157003104
  hyper

SEQ ID NO: 283484 - DNA, 239 bp, Homo sapiens
  chr5:157098032-157098271
  hyper
cggtgtcaagaccccgcaggagatggcggattcattcaggaagcagccgctccgggaagccttagccaagggtcttccggaaagacaccagtcttgatcctggagcctcaatccccgctgacccagcactttggtttccatagcaattgtctcgtcgcagaaaggaatcgcctgtgctgggtcttcagacctcagctccatgccgctgagcagccccaccctggctcaacccgttaccc

SEQ ID NO: 283485 - DNA, 207 bp, Homo sapiens; identical to SEQ ID NO: 231556
  chr5:157158249-157158456
  hyper

SEQ ID NO: 283486 - DNA, 217 bp, Homo sapiens; identical to SEQ ID NO: 231557
  chr5:157170399-157170616
  hyper

SEQ ID NO: 283487 - DNA, 64 bp, Homo sapiens; identical to SEQ ID NO: 200127
  chr5:157285888-157285952
  hyper

SEQ ID NO: 283488 - DNA, 108 bp, Homo sapiens; identical to SEQ ID NO: 200128
  chr5:158526600-158526708
  hyper

SEQ ID NO: 283489 - DNA, 83 bp, Homo sapiens
  chr5:158533459-158533542
  hyper
agcctgaactcacacgtggttttgtgtgcacgtgtgcgtatgaaattcagcaaaaaaaaaaaaaaaaaatccaaaaaaatcta

SEQ ID NO: 283490 - DNA, 105 bp, Homo sapiens
  chr5:158533788-158533893
  hyper
gatgcttgccgtgtgtcctaaaagggaccgcttccggtttatttgcttatgtatttattatctttatcaacgttattttttggcagctgccgtgaagatgccaaa

SEQ ID NO: 283491 - DNA, 1211 bp, Homo sapiens; identical to SEQ ID NO: 200129
  chr5:158634801-158636012
  hyper

SEQ ID NO: 283492 - DNA, 345 bp, Homo sapiens; identical to SEQ ID NO: 231564
  chr5:158689916-158690261
  hyper

SEQ ID NO: 283493 - DNA, 166 bp, Homo sapiens; identical to SEQ ID NO: 231565
  chr5:158758339-158758505
  hyper

SEQ ID NO: 283494 - DNA, 219 bp, Homo sapiens
  chr5:159200452-159200671
  hyper
ctgggtgaattatgatgcacatccaccgcggctgctaaaaaaagggcagtgactcaccaccggccgcggaaacttccacgagcgccggccgcaaaaaggcgggggcgccaggccaagggcggctgcgcccggggcgcgcggcagcagccaggtgtgtctcgaaagcaaaacggcgaggaccgtggcgcggggtcgggcgggaaccggagagacctgggg

SEQ ID NO: 283495 - DNA, 171 bp, Homo sapiens
  chr5:159343216-159343387
  hyper
ggaagagtgactagcggggaaaataaccccagcgggccgcctaggggtgggtgacccgcgatctccacgcccaggtcccgccctcgcggcccctgcccccgccccgccccccgcagagggcgcgccctgggagcggcgggggacgcggctggcttcccggcttgcggggtg

SEQ ID NO: 283496 - DNA, 166 bp, Homo sapiens
  chr5:159343648-159343814
  hyper
gcgcctgacgtggaccattaaacttggagctgccgcctcgtcccctctcctcctcctcctccctctgacaggcgagcgagcgactcggtgcaggcaggagacgtgctgccgggctgggctgcccgggggagatgactcctcgccaggagggcgcctctgggaagaa

SEQ ID NO: 283497 - DNA, 43 bp, Homo sapiens
  chr5:159399023-159399066
  hyper
tcgggtgccagtgccgcggccgcggccgccgccgacgccgccg

SEQ ID NO: 283498 - DNA, 234 bp, Homo sapiens; identical to SEQ ID NO: 231569
  chr5:159414352-159414586
  hyper

SEQ ID NO: 283499 - DNA, 78 bp, Homo sapiens; identical to SEQ ID NO: 231570
  chr5:159545792-159545870
  hyper

SEQ ID NO: 283500 - DNA, 142 bp, Homo sapiens; identical to SEQ ID NO: 200131
  chr5:159546857-159546999
  hyper

SEQ ID NO: 283501 - DNA, 73 bp, Homo sapiens
  chr5:159615598-159615671
  hyper
acggaggagaccccaggcccggaggtgtcgcccctgggctgcgacccccgactttggccggcttctccctgcg

SEQ ID NO: 283502 - DNA, 143 bp, Homo sapiens
  chr5:159738773-159738916
  hyper
agttcccacgcaggcgacctgagaacacgaagtcgagaccgaaggagactgtacccagtcttgagagtgacaagggcagggagggactgaccttctcgcgcagggtgcagtggacgtccgaggcgacgcgcccttcccaccac

SEQ ID NO: 283503 - DNA, 132 bp, Homo sapiens
  chr5:159738917-159739049
  hyper
gctcatccatcatcgcgtacgcagcgccgctatccgaggctacccggctctcagggcgcaccctgcgtggacacgggcaacttcagcggccagagcgtaccccgggctccgacccccggtgtccctatcctc

SEQ ID NO: 283504 - DNA, 247 bp, Homo sapiens; identical to SEQ ID NO: 200133
  chr5:159739186-159739433
  hyper

SEQ ID NO: 283505 - DNA, 154 bp, Homo sapiens; identical to SEQ ID NO: 231574
  chr5:159797261-159797415
  hyper

SEQ ID NO: 283506 - DNA, 173 bp, Homo sapiens; identical to SEQ ID NO: 200134
  chr5:159826416-159826589
  hyper

SEQ ID NO: 283507 - DNA, 540 bp, Homo sapiens; identical to SEQ ID NO: 231575
  chr5:159826808-159827348
  hyper

SEQ ID NO: 283508 - DNA, 349 bp, Homo sapiens
  chr5:160973804-160974153
  hyper
gtttaaaaaaaaaaaaaaaaattaaaagggaaaaaggaaaaacatgtatatgtataatacatacatatttgaataatatagaaaagtcaccccacagcagcatccagaataaaatttttgttgttatcctttcgttaagacaaaataactacagcgtctggtaagtttcggtagttgcaagaggcagttttgcaccgagcgggttgtgggtttttggtgtgtgtgtgtgtccttttaaatatgcaaaaccagattagaaaattagaggagagcaggtgtggcgtgccagcggaagataggtgccggtaagcccacttctggtctcagccggacacggggcaaggagttt

SEQ ID NO: 283509 - DNA, 72 bp, Homo sapiens
  chr5:160974540-160974612
  hyper
cgttcctgacccgctagtccgggttatttatagcaggaggggaggggggcgaggggagcagaaaggcaatgc

SEQ ID NO: 283510 - DNA, 210 bp, Homo sapiens
  chr5:160974861-160975071
  hyper
gcgcactccccacccgccgccatccctccttacctcgcaggcccgcgctcgccgcccactcccgcggcgtgcggagctggcgcccccggcccctcgtccgggacaggggacggggactcccggctgttcaggggctgtacctctggatacaagaagccggagcggtccctagaaggcaggcaaaatgaggaagagcccctcacctccgga

SEQ ID NO: 283511 - DNA, 360 bp, Homo sapiens
  chr5:160975998-160976358
  hyper
ctcctcagggtcctgttccgtgctgcactcttgacccacttaccttctgataacctttcccctcccccaccttggtcagagggtcatctgggggtagtttgtggggatgactccgggggaagtgtggaggcgggagggctttaaaaggggggaatccgacagctcctctgggatggatgataaacaggaaaagaaagccgagttccttcaccgaccaagggagtttctaggttaggaacaggtaaagcccagcaccatgaacatactgctgatctaccgcgcggcgctctatagactcccaggctcataggagcccatccaaagacgcgcgcttactcacacacacgcacacacacatac

SEQ ID NO: 283512 - DNA, 34 bp, Homo sapiens
  chr5:161274276-161274310
  hyper
ccattttcctaatccgagaatgatggagctcgag

SEQ ID NO: 283513 - DNA, 51 bp, Homo sapiens
  chr5:161274554-161274605
  hyper
aaagtgcgaaagactctctaaatccagtagccaatttcctacctgccagaa

SEQ ID NO: 283514 - DNA, 43 bp, Homo sapiens
  chr5:161275109-161275152
  hyper
ggcatgaagtcaccgcctatttcacatccggtttgccctggga

SEQ ID NO: 283515 - DNA, 223 bp, Homo sapiens
  chr5:161275590-161275813
  hyper
gcaggacaggagcctgatcccacagcaggtagaaacaacgaaatgtttttctttcagggtgaaaccgcagcaatataagagcattattattatttttttcccgctgtctttcttcttttcttctcctctttcttaggcatatttgaatgtattccgcagggtgggtggtggcatgttgttttggtcttttatttatttatttatttgcaagggggagctgggg

SEQ ID NO: 283516 - DNA, 357 bp, Homo sapiens; identical to SEQ ID NO: 231583
  chr5:162887185-162887542
  hyper

SEQ ID NO: 283517 - DNA, 118 bp, Homo sapiens; identical to SEQ ID NO: 200138
  chr5:162930156-162930274
  hyper

SEQ ID NO: 283518 - DNA, 63 bp, Homo sapiens; identical to SEQ ID NO: 200139
  chr5:162930320-162930383
  hyper

SEQ ID NO: 283519 - DNA, 48 bp, Homo sapiens; identical to SEQ ID NO: 200140
  chr5:162931957-162932005
  hyper

SEQ ID NO: 283520 - DNA, 46 bp, Homo sapiens; identical to SEQ ID NO: 231586
  chr5:162932441-162932487
  hyper

SEQ ID NO: 283521 - DNA, 384 bp, Homo sapiens
  chr5:166406476-166406860
  hyper
aagttatctatgtagatggtgtcagggagcgaagctactgaccgagctgctggtaaatgtttttcacttcttactctttaatgcttaaggcttttttccccttttctttctttcttgtttcctttctgttgctcctcattctgcaatcgctcctgaatcagctgcagttctctttctctccttgcgtttgtgcagtttacaacttgtttcatggttttctatgtatttttttttcctccttcatcctcagatgaatgctggaacatttaaattcggcacttcgggaggtcatcattagttgcatgagtttcagggggggaggggaaagattgctagagcagactgttatttccctgcagaaggactgccggtttctctctaatg

SEQ ID NO: 283522 - DNA, 152 bp, Homo sapiens; identical to SEQ ID NO: 200142
  chr5:167000608-167000760
  hyper

SEQ ID NO: 283523 - DNA, 223 bp, Homo sapiens; identical to SEQ ID NO: 200143
  chr5:167718508-167718731
  hyper

SEQ ID NO: 283524 - DNA, 377 bp, Homo sapiens; identical to SEQ ID NO: 200144
  chr5:167718952-167719329
  hyper

SEQ ID NO: 283525 - DNA, 247 bp, Homo sapiens; identical to SEQ ID NO: 231591
  chr5:167913520-167913767
  hyper

SEQ ID NO: 283526 - DNA, 88 bp, Homo sapiens; identical to SEQ ID NO: 231594
  chr5:168006688-168006776
  hyper

SEQ ID NO: 283527 - DNA, 101 bp, Homo sapiens; identical to SEQ ID NO: 200145
  chr5:168727254-168727355
  hyper

SEQ ID NO: 283528 - DNA, 44 bp, Homo sapiens; identical to SEQ ID NO: 231596
  chr5:168728508-168728552
  hyper

SEQ ID NO: 283529 - DNA, 134 bp, Homo sapiens; identical to SEQ ID NO: 231597
  chr5:169010586-169010720
  hyper

SEQ ID NO: 283530 - DNA, 226 bp, Homo sapiens
  chr5:169930945-169931171
  hyper
ccgtgcagccctcgcccccgccccgcccctccgtagttgcccgcccgccgccccctccgccgccccctccgccgctccgactctcgccccgagcgctggcagcaggcagcaggcagcaggcgggcgcgctgtggctccgcgccgcgcggtccgggctctgttcattcatgattggtactcggccctccgagacccagcccgagcgcagggaggggagccgagtgtg

SEQ ID NO: 283531 - DNA, 36 bp, Homo sapiens; identical to SEQ ID NO: 200147
  chr5:169931484-169931520
  hyper

SEQ ID NO: 283532 - DNA, 243 bp, Homo sapiens
  chr5:170171140-170171383
  hyper
aagtctcgctcaggggagtggtgtgcatggggcagaggctgccagggacgctgaaggctgatagccgggttggcgcggaaatgggacgccgcagggtgggacaggcgggagggatgggatgggcagggtgtgatgccggacgaaggaaacgggcctgcccggcaggtggcagagagccacagaagagctccgagggggtggtgcgtgagatggcgctgcaggctggaaaggggctgcaggcag

SEQ ID NO: 283533 - DNA, 402 bp, Homo sapiens
  chr5:170171413-170171815
  hyper
tgcgagggaccgtgggaacttcaaggaaccgcaccgccctcctggaccacccgagaaaacaggggaagtgggcgaatgagtagaccaaagtactcatgacagggcaggagcaagtgagagaccctggaggaccatggagagaacgtggtaaccgatggagagggatgaaaaccgagccgcgggtgtgagtctgaggcgcccccaggcccaccagcgtgtgagcggcaggtgctgttcgccatcagccgctagatggagccggcgcctcgccgaatgcgccgggatccgtcgcgtggatgtcaggtccgggccagggagccaaagcggcggctccgcggggaccctccacagttccggactccagcccagcgccggcttcagggcgtgcgaccctgagcttgg

SEQ ID NO: 283534 - DNA, 64 bp, Homo sapiens; identical to SEQ ID NO: 200148
  chr5:170289638-170289702
  hyper

SEQ ID NO: 283535 - DNA, 42 bp, Homo sapiens; identical to SEQ ID NO: 200149
  chr5:170289734-170289776
  hyper

SEQ ID NO: 283536 - DNA, 53 bp, Homo sapiens; identical to SEQ ID NO: 200150
  chr5:170737718-170737771
  hyper

SEQ ID NO: 283537 - DNA, 31 bp, Homo sapiens
  chr5:170741050-170741081
  hyper
tggcgtttggttacatgaataagttctttag

SEQ ID NO: 283538 - DNA, 105 bp, Homo sapiens; identical to SEQ ID NO: 231609
  chr5:170744958-170745063
  hyper

SEQ ID NO: 283539 - DNA, 80 bp, Homo sapiens
  chr5:170745480-170745560
  hyper
ctgggccggggtgaactttattaatgcctgccgtttccagctcgtttgttggagggggcgggcagggctcctctgggcag

SEQ ID NO: 283540 - DNA, 115 bp, Homo sapiens; identical to SEQ ID NO: 231611
  chr5:170814440-170814555
  hyper

SEQ ID NO: 283541 - DNA, 1106 bp, Homo sapiens; identical to SEQ ID NO: 231612
  chr5:170845701-170846807
  hyper

SEQ ID NO: 283542 - DNA, 146 bp, Homo sapiens; identical to SEQ ID NO: 200152
  chr5:170847120-170847266
  hyper

SEQ ID NO: 283543 - DNA, 113 bp, Homo sapiens; identical to SEQ ID NO: 200153
  chr5:170847375-170847488
  hyper

SEQ ID NO: 283544 - DNA, 85 bp, Homo sapiens; identical to SEQ ID NO: 200154
  chr5:171541758-171541843
  hyper

SEQ ID NO: 283545 - DNA, 93 bp, Homo sapiens
  chr5:172068057-172068150
  hyper
cttcccggcccgggcgcgggagcggcgagggcgggaggcttggctgtgcttctcccgccgcctggtgcaaactttcaaaagatgcggcggccg

SEQ ID NO: 283546 - DNA, 445 bp, Homo sapiens; identical to SEQ ID NO: 231615
  chr5:172068385-172068830
  hyper

SEQ ID NO: 283547 - DNA, 161 bp, Homo sapiens; identical to SEQ ID NO: 200156
  chr5:172197154-172197315
  hyper

SEQ ID NO: 283548 - DNA, 795 bp, Homo sapiens; identical to SEQ ID NO: 231617
  chr5:172198699-172199494
  hyper

SEQ ID NO: 283549 - DNA, 275 bp, Homo sapiens; identical to SEQ ID NO: 200157
  chr5:172234232-172234507
  hyper

SEQ ID NO: 283550 - DNA, 446 bp, Homo sapiens; identical to SEQ ID NO: 200158
  chr5:172385502-172385948
  hyper

SEQ ID NO: 283551 - DNA, 249 bp, Homo sapiens
  chr5:172386283-172386532
  hyper
tgtactcactggcatcgccctcccggggccgccaggaatgaggcactgagatcccaccccaagccgctgggggcgccattcgacttcgctcctacggaaatggggcttcgatgtctttctgcgcttgcgcggcacggaaactcacttccggccctgcgcactcagggtctgaggcagctagtagccgggtgagtggaggctggagttttctcggacagtgaactctaccgccccgtgagaccctgccct

SEQ ID NO: 283552 - DNA, 232 bp, Homo sapiens; identical to SEQ ID NO: 231620
  chr5:172410475-172410707
  hyper

SEQ ID NO: 283553 - DNA, 102 bp, Homo sapiens
  chr5:172444179-172444281
  hyper
gaaatttaaagtcctgaaagcgtgaaaggagactgctgtagtgatatatccacttacccttagaaagtgattccctgctgggcgtggtggctcacccctgta

SEQ ID NO: 283554 - DNA, 274 bp, Homo sapiens; identical to SEQ ID NO: 231621
  chr5:172483102-172483376
  hyper

SEQ ID NO: 283555 - DNA, 297 bp, Homo sapiens; identical to SEQ ID NO: 231622
  chr5:172571552-172571849
  hyper

SEQ ID NO: 283556 - DNA, 173 bp, Homo sapiens; identical to SEQ ID NO: 200162
  chr5:172656561-172656734
  hyper

SEQ ID NO: 283557 - DNA, 180 bp, Homo sapiens
  chr5:172660254-172660434
  hyper
gcttgacctacggagcgcggccgcacagtaatggtaagggatcctcgtggaggccactgtgtcctgcctggagcgcccagctggctgcggctcactctgccaagtgcactgggagccaccgacacgtctcactcagcatttgtagaaagtcaggctggctcaaggcgctggagaacaaaa

SEQ ID NO: 283558 - DNA, 259 bp, Homo sapiens
  chr5:172663579-172663838
  hyper
gcgttggcttctcacggccctagctggtacagggaaccgcgggcgggaagctgggcgggacgcgtggacttgctgagaatggggatgtggagggcttggctctttgcggagtgcgggttggcaagaggcgcttggagtagaataaaggcggcgcagggccaaaaactacctaaagacacagctcccgcaggcgcgcccaaggtgcggaggaaacgctccatgtatggggacaaaatagtgtctgtccagaacgtacatc

SEQ ID NO: 283559 - DNA, 342 bp, Homo sapiens
  chr5:172663868-172664210
  hyper
tgagacgccgacgcaagtgaagtcaagcattggcctgatgttgggacttttcctgtccctcatcaaagccacactcccaggacctggggcctccatgctggggagagaggtgagccccgcagggcagcccaggaggcgcgcaacgccctgaccccggcttctaggcgccagccgtcagtaacaggcctgggctgccacgccgaaatcacgcctcgagtttctgagccagggactactgggggtctggaattgttagtctagtctgtggaggatgccttttcttaaatgtggggcgttcaaggcccaggaaacctcgtccccccacctcttcacctcccaacc

SEQ ID NO: 283560 - DNA, 162 bp, Homo sapiens; identical to SEQ ID NO: 200164
  chr5:172665286-172665448
  hyper

SEQ ID NO: 283561 - DNA, 301 bp, Homo sapiens
  chr5:172665949-172666250
  hyper
cggatttttcctgcctcgggactcgcctcattcaggtggctcagctggcaccaaatccttctcatttccacgcttgttcagtgcccacggggtgtgccaggcgctctcacggatctcgtcacggatcctcttattccgactgcaggcctgaggagaatgaggttcagagacgtggagtaagttgctcagggtcacacagatgggaaaggacagtgtcagggtgttaggattcgaacacacagctgactgcacagctgagactgttttcttttattacacgtcgctgcgcccaagaccgtac

SEQ ID NO: 283562 - DNA, 151 bp, Homo sapiens; identical to SEQ ID NO: 200166
  chr5:172672326-172672477
  hyper

SEQ ID NO: 283563 - DNA, 55 bp, Homo sapiens
  chr5:172710794-172710849
  hyper
gtttgaaggtgccccatgggcgggcgcggacgtgtggttgctccagtgtttccta

SEQ ID NO: 283564 - DNA, 157 bp, Homo sapiens
  chr5:172710958-172711115
  hyper
ccagccctgcccgccggctgtgcgcggatgcctgcagacgccgagctgctgcccccgtgtggcctggtgcgggggctcctcctgctcactgggggcgcgtcccggtaaaccagaacctcagcccatcaactcactcgtggggttactgaggaggaga

SEQ ID NO: 283565 - DNA, 133 bp, Homo sapiens; identical to SEQ ID NO: 200167
  chr5:172721006-172721139
  hyper

SEQ ID NO: 283566 - DNA, 214 bp, Homo sapiens; identical to SEQ ID NO: 200168
  chr5:172755663-172755877
  hyper

SEQ ID NO: 283567 - DNA, 182 bp, Homo sapiens
  chr5:172756195-172756377
  hyper
aaggcagccctgagtcagcccgccgcggagcatcgcgtgcccggaggccagagcttgaaaggcaactttacgcgtctccaaacacactcctgcattttctcaaagcgctgctcgccaccccgctccgggttcccttttactctccagtcatccgatggaagtggtgagaacaaaaacaaaga

SEQ ID NO: 283568 - DNA, 72 bp, Homo sapiens; identical to SEQ ID NO: 200169
  chr5:173043700-173043772
  hyper

SEQ ID NO: 283569 - DNA, 360 bp, Homo sapiens; identical to SEQ ID NO: 231638
  chr5:173314918-173315278
  hyper

SEQ ID NO: 283570 - DNA, 192 bp, Homo sapiens; identical to SEQ ID NO: 200170
  chr5:173345561-173345753
  hyper

SEQ ID NO: 283571 - DNA, 471 bp, Homo sapiens; identical to SEQ ID NO: 200171
  chr5:174119516-174119987
  hyper

SEQ ID NO: 283572 - DNA, 233 bp, Homo sapiens; identical to SEQ ID NO: 200172
  chr5:174120134-174120367
  hyper

SEQ ID NO: 283573 - DNA, 189 bp, Homo sapiens
  chr5:174120406-174120595
  hyper
ctctgacttaaaggggggtgtcgggggctggggcagggaatggggaggggttcggtttatttactcaagcacctactgtgtgctgctgatggggaacttcctaggcaagtcattgtcgcatttcatccctacaaacagtcccaggaggtaaatattatttatccctgtgatgtgcgtgaggaaatggca

SEQ ID NO: 283574 - DNA, 32 bp, Homo sapiens; identical to SEQ ID NO: 231643
  chr5:174147150-174147182
  hyper

SEQ ID NO: 283575 - DNA, 317 bp, Homo sapiens
  chr5:174148214-174148531
  hyper
cgaagcccaggcccgtctacagcccccttcgctgcccctcccccgcccccttctagccgctggggttacaaactagccttcggccctcggggttacaaacgctgcgttctgcgcgcagtgctccacagtttgcaaggagtgttttctccttgggactcgcagcgcgcgtacgcggttgcttcaagaaggggcctggcgggtgtaacgcgccccggggagcgcgggaaggtgcagggttgaggatctacgctcagaggcctcagccgcgcgggagggattcctgtgtctcccacttctacctgcgcgaccttgggcag

SEQ ID NO: 283576 - DNA, 217 bp, Homo sapiens; identical to SEQ ID NO: 231645
  chr5:174149051-174149268
  hyper

SEQ ID NO: 283577 - DNA, 427 bp, Homo sapiens
  chr5:174150698-174151125
  hyper
ccccattaccctccgaggcaaacactggcattcaaacacgcacgacaaacacaggctcaaacaaactcatgaatgcacacttgcactgtcttgagaaaaaggtcggatccggatcgcgctcagaaaggaggttcaggagacaagtacagagatttcaactttctaaaagtgcgctggatttgctttctagtgagagagatggggacaactgatttaaattcttcactccgaaccatttgggagagaggcactcctgaccacttctcgggctccttccggcccctcttttccaggggaaagagttgtaataataacagtgggcgcttttgagcgctggctagtggcgagttactcttctaagtgcatacatttctttcacagggatactggcctgtgagtttcagcaccgactttctggaactgtaaa

SEQ ID NO: 283578 - DNA, 246 bp, Homo sapiens
  chr5:174151197-174151443
  hyper
ttctggcggtagagggagagtgggatgggcgcagggtcccttttaaagaagggtcaaaagagagaagaaatgggactcggcgaacttccgctttaaataatcgctcttaattaggtctcgggcttttcagtttcggcgtgattataacccttcagggatcgcctaataacaactctgctgactgctcctgtaattaactcctaatttatttcaaacaggaaaaaaaaaaaaaaaaaaaaaaaggag

SEQ ID NO: 283579 - DNA, 1020 bp, Homo sapiens
  chr5:174151769-174152789
  hyper
ggagcgccgcgtcaaggtctccagcctgcccttcagcgtggaggcgctcatgtccgacaagaagccgcccaaggaggcgtccccgctgccggccgaaagcgcctcggccggggccaccctgcggccactgctgctgtcggggcacggcgctcgggaagcgcacagccccgggccgctggtgaagcccttcgagaccgcctcggtcaagtcggaaaattcagaagatggagcggcgtggatgcaggaacccggccgatattcgccgccgccaagtgagtgcgcgccggggcaggagtaggaggtagcgcggggtactggagggagcggggggcgggtgttccagggctgagggtaccgagacccttctgcgtgcgctacactcccgggaaagcaagcccagggcctctggactcctgggtgcccggggcgttcggcgcgcccagtgcgccgtccgcatccaagacaccctctgggtaataaccgcgctgtgtgtgtctgagactccctcgacatacagattgttttttcaagagcgaaccccagctgggtttacggggtcgctcggtggtccgtttctacagccctcggccctgcgctctggccacttggcttgtttttgtttcactgttccccggagtctctgcctggggagtgaaggagttggatccatgttcagtgagcacttggatgtaccaggaacgagacaggttcaaaactcaaccctgagagttgtgcccccattttaaagatgagctaactgggcttagccagacattgaggagaaaccattttctttcgtgagtcccgcgggtgtcgaagccggatcccacgaagggatggtggcaccagggatggtggcatcagagtctggtgcggggaggaaatgtctctctgtggtctccgcagccagcacctccccggcaaggttctgagcttcgccgggagcgggctggggccagaagcgcacgggctcttcttggctcacagtaataattaaccgcattccagcagggcttgaga

SEQ ID NO: 283580 - DNA, 44 bp, Homo sapiens; identical to SEQ ID NO: 231647
  chr5:174158416-174158460
  hyper

SEQ ID NO: 283581 - DNA, 208 bp, Homo sapiens
  chr5:174159593-174159801
  hyper
cttggtcgggcacacagggcgtttcagaggccagattgacaacctgtggcggcaaaaggactctccctcaccagggacccgcgaaggcgcgcattgcaagatgttagcgtgcgggctttagatatccttgcgtccgatgccagaagcctggcacgcaaatttacccacccttccatactttcagtgctttgttcgaaacttttcaaga

SEQ ID NO: 283582 - DNA, 92 bp, Homo sapiens; identical to SEQ ID NO: 200177
  chr5:174162402-174162494
  hyper

SEQ ID NO: 283583 - DNA, 101 bp, Homo sapiens; identical to SEQ ID NO: 200178
  chr5:174162904-174163005
  hyper

SEQ ID NO: 283584 - DNA, 78 bp, Homo sapiens
  chr5:174178090-174178168
  hyper
tcctgcccccttccgaatcacagactccccgcagtcagagatggcgaagcctccaccgggtcacctcggccggccccc

SEQ ID NO: 283585 - DNA, 383 bp, Homo sapiens
  chr5:174178248-174178631
  hyper
acacttgcgggggccgcggcgcaccctgacagcccggcagctccgcgccaaaatggatgggtctcgggcggcgagggcacggatacaaatgcgccgccgcgttctcaggtacacaaatgcggcctcgggcgggcgctggttcccaggcgcacggaggcggcggccccttcaactcggggcgcgggcgggagcggaacccgcgttaattactgtacgtttccactgtaaagagtgtcagccggggagcggggccgccgcgcctgcccggccccggcgcacaaaagcttcatatattctgaatgaaggcgaatcgcagcctcggcctccttgaaaagagccgtgagggagacttaattctctccctttcagctgtgctcagactg

SEQ ID NO: 283586 - DNA, 89 bp, Homo sapiens
  chr5:174220728-174220817
  hyper
ttgaagtggggcggcggctcctcctcgcagaaaccctccgcagtcccctaccccagaaaggtttcccttccctccccttcccgcaggcc

SEQ ID NO: 283587 - DNA, 60 bp, Homo sapiens
  chr5:174221001-174221061
  hyper
ctataaaagagaagtttgaggctcgtggggtgggggacgggggcacgtggaggcagataa

SEQ ID NO: 283588 - DNA, 47 bp, Homo sapiens; identical to SEQ ID NO: 200180
  chr5:175084696-175084743
  hyper

SEQ ID NO: 283589 - DNA, 75 bp, Homo sapiens; identical to SEQ ID NO: 200181
  chr5:175084744-175084819
  hyper

SEQ ID NO: 283590 - DNA, 228 bp, Homo sapiens; identical to SEQ ID NO: 200182
  chr5:175200304-175200532
  hyper

SEQ ID NO: 283591 - DNA, 32 bp, Homo sapiens; identical to SEQ ID NO: 231661
  chr5:175788708-175788740
  hyper

SEQ ID NO: 283592 - DNA, 378 bp, Homo sapiens; identical to SEQ ID NO: 231663
  chr5:175875017-175875395
  hyper

SEQ ID NO: 283593 - DNA, 246 bp, Homo sapiens; identical to SEQ ID NO: 200184
  chr5:175969792-175970038
  hyper

SEQ ID NO: 283594 - DNA, 62 bp, Homo sapiens; identical to SEQ ID NO: 200185
  chr5:176038451-176038513
  hyper

SEQ ID NO: 283595 - DNA, 82 bp, Homo sapiens
  chr5:176046196-176046278
  hyper
gggtcttgcgcaggcgagtttgggggcctctgcggcatagccacgccaagagccagtccgggtgggggcggggcctctgcgg

SEQ ID NO: 283596 - DNA, 209 bp, Homo sapiens; identical to SEQ ID NO: 200186
  chr5:176057164-176057373
  hyper

SEQ ID NO: 283597 - DNA, 47 bp, Homo sapiens; identical to SEQ ID NO: 231668
  chr5:176074452-176074499
  hyper

SEQ ID NO: 283598 - DNA, 44 bp, Homo sapiens; identical to SEQ ID NO: 200187
  chr5:176074862-176074906
  hyper

SEQ ID NO: 283599 - DNA, 135 bp, Homo sapiens
  chr5:176237259-176237394
  hyper
tgcccctgtccctggagaccccgcggggcggtgggaggcctccacgcccaccaccccaagcccctccctgggggagcctcaggcatcgcccagagggattcccggtgctgggggtggcccgcgcgcgctgcgcgg

SEQ ID NO: 283600 - DNA, 187 bp, Homo sapiens; identical to SEQ ID NO: 231673
  chr5:176239885-176240072
  hyper

SEQ ID NO: 283601 - DNA, 91 bp, Homo sapiens; identical to SEQ ID NO: 231674
  chr5:176245002-176245093
  hyper

SEQ ID NO: 283602 - DNA, 45 bp, Homo sapiens; identical to SEQ ID NO: 231676
  chr5:176433877-176433922
  hyper

SEQ ID NO: 283603 - DNA, 330 bp, Homo sapiens; identical to SEQ ID NO: 231677
  chr5:176449527-176449857
  hyper

SEQ ID NO: 283604 - DNA, 248 bp, Homo sapiens
  chr5:176560001-176560249
  hyper
gagctgctgcctccattttgtttcctgctcagcttggtctgtggtggtggtggtggtggtggtgtgggtttggggtgcggccgggtagggggttcgcctgcggccgcgtctgctcggggcctgaggcctcgaagaccccagcccaagcccccaggtgagccctgcggcaggaggggggttgccttggcctcgggccgaacccagcgggctgagggcaggtgcccagtggatggggagcctgggctgta

SEQ ID NO: 283605 - DNA, 287 bp, Homo sapiens
  chr5:176560318-176560605
  hyper
cgcgccaggtgccgcctgggttggggttcgagacgcgtagggtgcgggagccgtgtgcggcccgaggccagcgccgtgccccgaggtaggtgaggggatcggaatgccacccacgacgcccgcaggccccgacactccaaggaggcgcgcgaggcccctggggagcccgcctcaggccccgcccgggcagccgggccggcccgtaggccccggccgcgagcgggcgcgcagggggaggggagggggcggcagcggcagctccgctgattgggcggcgctctcacaag

SEQ ID NO: 283606 - DNA, 294 bp, Homo sapiens; identical to SEQ ID NO: 200189
  chr5:176738658-176738952
  hyper

SEQ ID NO: 283607 - DNA, 394 bp, Homo sapiens; identical to SEQ ID NO: 231680
  chr5:176739158-176739552
  hyper

SEQ ID NO: 283608 - DNA, 90 bp, Homo sapiens; identical to SEQ ID NO: 222761
  chr5:176827093-176827183
  hyper

SEQ ID NO: 283609 - DNA, 288 bp, Homo sapiens; identical to SEQ ID NO: 222762
  chr5:176830417-176830705
  hyper

SEQ ID NO: 283610 - DNA, 147 bp, Homo sapiens; identical to SEQ ID NO: 222763
  chr5:176830933-176831080
  hyper

SEQ ID NO: 283611 - DNA, 210 bp, Homo sapiens; identical to SEQ ID NO: 231682
  chr5:176853271-176853481
  hyper

SEQ ID NO: 283612 - DNA, 191 bp, Homo sapiens; identical to SEQ ID NO: 231683
  chr5:176873632-176873823
  hyper

SEQ ID NO: 283613 - DNA, 124 bp, Homo sapiens; identical to SEQ ID NO: 231684
  chr5:176882534-176882658
  hyper

SEQ ID NO: 283614 - DNA, 267 bp, Homo sapiens; identical to SEQ ID NO: 231685
  chr5:176943952-176944219
  hyper

SEQ ID NO: 283615 - DNA, 126 bp, Homo sapiens; identical to SEQ ID NO: 231686
  chr5:176944482-176944608
  hyper

SEQ ID NO: 283616 - DNA, 50 bp, Homo sapiens; identical to SEQ ID NO: 200191
  chr5:177019030-177019080
  hyper

SEQ ID NO: 283617 - DNA, 257 bp, Homo sapiens
  chr5:177540465-177540722
  hyper
cccgccccccacatccgggggccggggccgggctgtgggcttgccgcgcgccggtgagtcaggccgggttttccctccgcctttggggcaggcgatcgagcgccgcggagcgcgtccctccctcgccaatccggctccggcgccggcgcccgcccgcgttttcccggcgcctgccgctccgccgctccgacccggcacgcagtcccggcccgagccgacgccttgcaggagggttcaaatccgcgcgggggagctgc

SEQ ID NO: 283618 - DNA, 243 bp, Homo sapiens; identical to SEQ ID NO: 42413
  chr5:177540787-177541030
  hyper

SEQ ID NO: 283619 - DNA, 99 bp, Homo sapiens; identical to SEQ ID NO: 231690
  chr5:177543581-177543680
  hyper

SEQ ID NO: 283620 - DNA, 59 bp, Homo sapiens; identical to SEQ ID NO: 231691
  chr5:177558239-177558298
  hyper

SEQ ID NO: 283621 - DNA, 257 bp, Homo sapiens; identical to SEQ ID NO: 231692
  chr5:177580326-177580583
  hyper

SEQ ID NO: 283622 - DNA, 195 bp, Homo sapiens; identical to SEQ ID NO: 231693
  chr5:177591086-177591281
  hyper

SEQ ID NO: 283623 - DNA, 130 bp, Homo sapiens; identical to SEQ ID NO: 231694
  chr5:177631399-177631529
  hyper

SEQ ID NO: 283624 - DNA, 311 bp, Homo sapiens; identical to SEQ ID NO: 231695
  chr5:177706982-177707293
  hyper

SEQ ID NO: 283625 - DNA, 130 bp, Homo sapiens; identical to SEQ ID NO: 200194
  chr5:178016441-178016571
  hyper

SEQ ID NO: 283626 - DNA, 34 bp, Homo sapiens; identical to SEQ ID NO: 200195
  chr5:178017936-178017970
  hyper

SEQ ID NO: 283627 - DNA, 64 bp, Homo sapiens
  chr5:178054094-178054158
  hyper
gcgaacgcgcctgcgtgacagaaccttgcgcgctcccgccgctccacctaagggcggggctcca

SEQ ID NO: 283628 - DNA, 149 bp, Homo sapiens; identical to SEQ ID NO: 112631
  chr5:178054178-178054327
  hyper

SEQ ID NO: 283629 - DNA, 564 bp, Homo sapiens; identical to SEQ ID NO: 200196
  chr5:178287036-178287600
  hyper

SEQ ID NO: 283630 - DNA, 295 bp, Homo sapiens
  chr5:178322844-178323139
  hyper
ctcgcacacgccgacggcctggccgcactgcagccccgcagccttgtgggaaatgtagtctggcgctccgggctgtaagcgccggtcgcggctgtgtcggtcgccgctgctcccgctcctgctgggagagggtgagtgcggggccggtggcgggggcgcgcgccatccgtgagtcttgtaggcccccgcaggaggagctccggattgcggggcgaggccccagcttcctgagggttgaggggcgggcccgcagcagatgggccgggggtgcggcctcactgcgcctgtggagcgc

SEQ ID NO: 283631 - DNA, 271 bp, Homo sapiens
  chr5:178323249-178323520
  hyper
acagccccggagcagcggggatgggggctcgaacaagggccacgccggccaccacgggtcagggaggggcccaaggttccaagagtcgctcggacccgggttcctccctggctttccccagccgcgcgcagctttgtcccgggacacgctgcgaccgtggagcgaacctaacccgcggacatcccggggattctgggccagaggctgggtctccctgtgcagcatctgccctttgtgtaaaccgggtctccggacccgccctctggatctc

SEQ ID NO: 283632 - DNA, 245 bp, Homo sapiens
  chr5:178367636-178367881
  hyper
ccgcaccgcacacgcgttagtggctgtggcgtcgccaccccagcacacgctggcccgcccgcagtgccaggctggaagtgtcgggcgcttgccaggccaaggggcaattctgttgccttccaggccttttcggcgcggtcccagtcaggaacgcgccctgtcgcctcccactccgtcttccggaccctcccgatcctctctcgtcagcgatcgggcgtcgctcccctggactaacctcccttgcc

SEQ ID NO: 283633 - DNA, 214 bp, Homo sapiens; identical to SEQ ID NO: 200197
  chr5:178423619-178423833
  hyper

SEQ ID NO: 283634 - DNA, 88 bp, Homo sapiens
  chr5:178450491-178450579
  hyper
cgaataatcagcagcggctagtcttccagatttaaaaattcatactcacttttccgtcttactatttttgtcattctaattacgaata

SEQ ID NO: 283635 - DNA, 38 bp, Homo sapiens
  chr5:178487776-178487814
  hyper
caatagctgatgcccgccgagagcgctcgggtgccagg

SEQ ID NO: 283636 - DNA, 198 bp, Homo sapiens
  chr5:178594471-178594669
  hyper
ttgctctggaaggagctgaattatctatgctcttccctccttcagtcaaggagacgtgggaggaaaccgggatggggatcagcagcctggaggccgcctccgctggaaccgcgcccgccccgccaggaggctctgcctgctgggcaaggcgcactcagccagccccgcaggccgccacgcgaccgaggctcaccaagt

SEQ ID NO: 283637 - DNA, 302 bp, Homo sapiens
  chr5:178770441-178770743
  hyper
tacacacacatacacggacccacccccggatgcaagccagagacctgttcaggcaggcaaaagagagaggcgcacgctcctgcctgctgagccttttggagacccgggcgctccccatgcataaatggccccctgctcagaccagtcaaaacaacctgctttccagccaagcccttcagttggagcacgaggctcactaaagcacgggaagggcgcggaaagtcctcagcgcaggccttgccctcccaagggactcccaggtaacccttttccaaaacccaggcgagagcagcggagagaaa

SEQ ID NO: 283638 - DNA, 168 bp, Homo sapiens; identical to SEQ ID NO: 231706
  chr5:178977222-178977390
  hyper

SEQ ID NO: 283639 - DNA, 166 bp, Homo sapiens; identical to SEQ ID NO: 231707
  chr5:179050812-179050978
  hyper

SEQ ID NO: 283640 - DNA, 283 bp, Homo sapiens
  chr5:179223440-179223723
  hyper
cctccagctgccccggggaggggcgctcgcttccgcatcctagtctctatcattaaagttctagtgaccgagacccgggctgcgttctctgggtccgcgggggtggcgcaccgcgggctacggagcctggaggggcccagcccgagtccgggcagcccggggcgggcttcctagtggcggcgtgagagtggctgcgaaggaacgagccctccccctggggcgggactggatccggtcttcacctcctaccccactccctactcagcctcggggtcacaaggcc

SEQ ID NO: 283641 - DNA, 48 bp, Homo sapiens; identical to SEQ ID NO: 231708
  chr5:179233842-179233890
  hyper

SEQ ID NO: 283642 - DNA, 149 bp, Homo sapiens; identical to SEQ ID NO: 200200
  chr5:179234473-179234622
  hyper

SEQ ID NO: 283643 - DNA, 80 bp, Homo sapiens
  chr5:179244342-179244422
  hyper
cccccttttccccactccgcggttgacgagggccgcccccaagtggccatgtcccccggcatggacgacccctcagtgcc

SEQ ID NO: 283644 - DNA, 752 bp, Homo sapiens; identical to SEQ ID NO: 200201
  chr5:179245837-179246589
  hyper

SEQ ID NO: 283645 - DNA, 252 bp, Homo sapiens; identical to SEQ ID NO: 200202
  chr5:179498002-179498254
  hyper

SEQ ID NO: 283646 - DNA, 504 bp, Homo sapiens; identical to SEQ ID NO: 200203
  chr5:179498363-179498867
  hyper

SEQ ID NO: 283647 - DNA, 329 bp, Homo sapiens; identical to SEQ ID NO: 200204
  chr5:179498897-179499226
  hyper

SEQ ID NO: 283648 - DNA, 96 bp, Homo sapiens; identical to SEQ ID NO: 200205
  chr5:179499256-179499352
  hyper

SEQ ID NO: 283649 - DNA, 205 bp, Homo sapiens
  chr5:179779443-179779648
  hyper
gcagatgtgcgctccgggccgcggccgccctccccacggtcccgcagccacgcgggacagcgcgggagcgccgcgggaatcggacgcccggccccgctccccgccccggactccctctcgtggcttcgggccgaggttcgggcagtgactgcctcttccccgcgcaaagaggcggtaacgcggcagcgacccttctagggaccag

SEQ ID NO: 283650 - DNA, 136 bp, Homo sapiens; identical to SEQ ID NO: 200207
  chr5:179781292-179781428
  hyper

SEQ ID NO: 283651 - DNA, 50 bp, Homo sapiens
  chr5:179867621-179867671
  hyper
gagaattaagaagcacaacacccagatacgtgtggcctgtgtttggattc

SEQ ID NO: 283652 - DNA, 39 bp, Homo sapiens
  chr5:180017079-180017118
  hyper
ggatgagaaaataccaggctcgagctgctcttaaccacg

SEQ ID NO: 283653 - DNA, 141 bp, Homo sapiens; identical to SEQ ID NO: 200208
  chr5:180018679-180018820
  hyper

SEQ ID NO: 283654 - DNA, 379 bp, Homo sapiens
  chr5:180046947-180047326
  hyper
aggtgtgacagatacaccctgctcagggtggcagcaggtgacctcagggagcctgggaactggggaccctggctgaggttctaggtacccacgcccacagggacaggtcaggccaggcggaacttcctggtgcaagttttgaaaatggagggattcaggcactccggcctgcagcaggtgggtcgggcaggaggtgtgggttgggcaggctggtgctggcctcacccaggtgcagccgctctcgggggaattcccactggctggcatcgtaggacaggtattcgcattgctcctccagaggcacctccccggggtccatgatgatggacaggtagcccgtcttgatgtctgcgtgggccggctgcggggaggggacagg

SEQ ID NO: 283655 - DNA, 62 bp, Homo sapiens; identical to SEQ ID NO: 200210
  chr5:180230099-180230161
  hyper

SEQ ID NO: 283656 - DNA, 53 bp, Homo sapiens; identical to SEQ ID NO: 231720
  chr5:180234903-180234956
  hyper

SEQ ID NO: 283657 - DNA, 576 bp, Homo sapiens; identical to SEQ ID NO: 231721
  chr5:180257865-180258441
  hyper

SEQ ID NO: 283658 - DNA, 480 bp, Homo sapiens; identical to SEQ ID NO: 231722
  chr5:180258501-180258981
  hyper

SEQ ID NO: 283659 - DNA, 596 bp, Homo sapiens; identical to SEQ ID NO: 200211
  chr5:180479642-180480238
  hyper

SEQ ID NO: 283660 - DNA, 828 bp, Homo sapiens; identical to SEQ ID NO: 200212
  chr5:180480302-180481130
  hyper

SEQ ID NO: 283661 - DNA, 61 bp, Homo sapiens; identical to SEQ ID NO: 200213
  chr5:180595002-180595063
  hyper

SEQ ID NO: 283662 - DNA, 164 bp, Homo sapiens; identical to SEQ ID NO: 231728
  chr5:180600256-180600420
  hyper

SEQ ID NO: 283663 - DNA, 180 bp, Homo sapiens; identical to SEQ ID NO: 231729
  chr5:180600480-180600660
  hyper

SEQ ID NO: 283664 - DNA, 272 bp, Homo sapiens; identical to SEQ ID NO: 231730
  chr5:180614836-180615108
  hyper

SEQ ID NO: 283665 - DNA, 627 bp, Homo sapiens
  chr5:180630961-180631588
  hyper
aaggagagactggggactgccgcccgagcctccccgccccgccctcacccctgcacacaccctcgctgaggctcagcgagaaaatagcaaagaaagggcccccagaatcgacagcgttggcacagtcagacggctctaggtgcgcggcttaacccgggagccccctccctggacatcttggcgaggtcctctcactcagttccacgaggtggggactttgagcagagcccgcttcggggaaagagataagagtgggggcagcggctgcgtggctgtgccggagacttcccgcgggcagagagctgcggagacgcagaccaggctagaggctccgaacagacaggaagaacatcgccaagtccgtgggggacgtcgcgcaggcggcccagtatctggcccagagggaaacgcagtgggggtggggtgggggtattggtgatgttgggggtgacagagaaccgcgctcagcccgggaaccagcgctgggcttcctggaatggagaaagaagggaggggctcacccgggcctcctgatcgacaggctgttctctgcaccccgtgcgcgggagcgcgggaccaagtcagggggtcccggggacccacggggtgggtgggggctgcgctcac

SEQ ID NO: 283666 - DNA, 83 bp, Homo sapiens; identical to SEQ ID NO: 200214
  chr5:180632776-180632859
  hyper

SEQ ID NO: 283667 - DNA, 258 bp, Homo sapiens
  chr5:180633225-180633483
  hyper
gtcgtctcttagcgcgctcccttctcagggccggctctgtgcccgcactctatctcctctggaatgtcagctttcagatggactgtactaggtttgttcacggctgaatcctgtttttagagcagttcttggcaagctcagtaaggttttcttggattaaacttggttcgaaattcaaaagaggagccgcagttcacggtggaaagtaggcccatcgcctgtgtcccagtcctttcttcctcccgagcaatcaacttt

SEQ ID NO: 283668 - DNA, 604 bp, Homo sapiens
  chr5:180644000-180644604
  hyper
tcgacctagggtagtaactggaactgcaggtatgcaccaccacgctcggctaattaaaaaaatatatatattttttcctagagatggggcggggggcgggggcgggggcggaggggacagtctcactatgttgcctaggctggtctcgaactcttaagcccggtttccgagtcgctggggctacagtagcgcgctgacacgcccgacccttgctttgccacttagatgttgcatttattcgactttcacgtcgggcagaggtgctgggaaagaggcggctggcccctgcgtaagtgtgcgggtgcggtgtgagaaagctggaagcctgttttctaggcggggaagcagcctgcgctgccggggccgcatcatggcacgtgggtttccccgggcttactctcctgccagtagcgctgtcctagggatcccgcccacccctccggcttcttctctgaagcctttgcagcattttccctgagattgctgaagaggcccctggggatcgggctcccaactcacccgccgcgtcccacggcccgaagccgacgagctgcaagtgaggatgggtgcagagggaggccgacggtcacgccttggagaggct

SEQ ID NO: 283669 - DNA, 50 bp, Homo sapiens
  chr5:180644634-180644684
  hyper
ctgcgaacccaaaagccgtgtcagtgctgcaggcccgcccgaagtggcgc

SEQ ID NO: 283670 - DNA, 512 bp, Homo sapiens; identical to SEQ ID NO: 231734
  chr5:180670801-180671313
  hyper

SEQ ID NO: 283671 - DNA, 338 bp, Homo sapiens; identical to SEQ ID NO: 200216
  chr5:180673932-180674270
  hyper

SEQ ID NO: 283672 - DNA, 75 bp, Homo sapiens; identical to SEQ ID NO: 200217
  chr6:391098-391173
  hyper

SEQ ID NO: 283673 - DNA, 76 bp, Homo sapiens; identical to SEQ ID NO: 4514
  chr6:393764-393840
  hyper

SEQ ID NO: 283674 - DNA, 399 bp, Homo sapiens
  chr6:710654-711053
  hyper
tgtttgcgtgctgacggggactggcttttcttcttcttcttgtagtttgaaatggaaacgctgcactgctgagaaaataccacggaaatagaacccactgcattccaggaaaataaataagcaaggccacccaaattttcaatgagtgctcctgcagaatgcaggaaatggcaggagatccgtccgaggcaccccaggccgggtcgtgggtagagagcagggacgagggctgggaggggacgcaggcacagggtgagggtggcccgtctccagggagaactgcgcgctcacaggcggggccggcttcccgcatcagcccggccgggctgcaggttctgagcgagggggcggccgtgcctcactctgggcgggacgcggcctggtgcagggacgctcact

SEQ ID NO: 283675 - DNA, 162 bp, Homo sapiens
  chr6:711310-711472
  hyper
cccagagtgagtgtcagggaggaagccaggtcttccagggcgctgacaaggcagggccgggctccttccctccgttgtgtttctctgaaatgttcgaatcactggtgtgacgggagcacttaaagccgaaaaaggaaagacgaaagcaaaggattcttcagg

SEQ ID NO: 283676 - DNA, 294 bp, Homo sapiens; identical to SEQ ID NO: 200221
  chr6:1311048-1311342
  hyper

SEQ ID NO: 283677 - DNA, 428 bp, Homo sapiens; identical to SEQ ID NO: 200222
  chr6:1311343-1311771
  hyper

SEQ ID NO: 283678 - DNA, 223 bp, Homo sapiens; identical to SEQ ID NO: 200223
  chr6:1312096-1312319
  hyper

SEQ ID NO: 283679 - DNA, 46 bp, Homo sapiens; identical to SEQ ID NO: 200224
  chr6:1312708-1312754
  hyper

SEQ ID NO: 283680 - DNA, 483 bp, Homo sapiens; identical to SEQ ID NO: 200225
  chr6:1312784-1313267
  hyper

SEQ ID NO: 283681 - DNA, 602 bp, Homo sapiens; identical to SEQ ID NO: 200226
  chr6:1313302-1313904
  hyper

SEQ ID NO: 283682 - DNA, 67 bp, Homo sapiens
  chr6:1316703-1316770
  hyper
tcacactgggcgggcggggcgggggcattggagggtcctgggctgtcgcctcctccctgtccctcct

SEQ ID NO: 283683 - DNA, 352 bp, Homo sapiens
  chr6:1316810-1317162
  hyper
gggtcggaggcagcccaggaggaaaggcgacggcacagctcccgttttctcaatgaaggcagaaagctgcacagctgcttttagttcaggcgaagctggaattccgcggagccgcacctggcggcaggcacgccggccttcggaggggccgctcggtgcggctgcaggaccctgcactcaggcagcagcctcgcggtggcggtgggacctctcgagcccaacagctccttccagcatctgcccagaaaactgccttcctcgcaggcgcgggaggagggttcggggctcactgtgcccaggcccccaggcctggccgcgcccaagtggccccccgcgccgagggcagggctcg

SEQ ID NO: 283684 - DNA, 113 bp, Homo sapiens; identical to SEQ ID NO: 200228
  chr6:1379978-1380091
  hyper

SEQ ID NO: 283685 - DNA, 95 bp, Homo sapiens
  chr6:1381771-1381866
  hyper
tctccaagggcgggcgggtgggatgatttgttgatttgcttgttttccaccaaaccgcagggcacctccaggagctccgggacaacttacaaatg

SEQ ID NO: 283686 - DNA, 342 bp, Homo sapiens
  chr6:1382651-1382993
  hyper
agagggcgagggggcccccgtaaatcatcctgagggatttttggcccaagtccctgtttccgaaaggttgcgggacggctttgacgttgattatgtagctgttctcttttcaagtgcgcgcccctccccaccgcagcccgtctggtgtgcgaggattgtgtttgaaagggaggaagcatccttgaagtggtgggtgatggattgtctaaacccttctgggacgttctgggtgggggttttcgaggcagctcatcaataaagacccccctggagagaaggggcggctggagaccagcccccgccgcgcagccccgaggccccaggcctggaacacagtcctcg

SEQ ID NO: 283687 - DNA, 227 bp, Homo sapiens; identical to SEQ ID NO: 200229
  chr6:1383450-1383677
  hyper

SEQ ID NO: 283688 - DNA, 222 bp, Homo sapiens; identical to SEQ ID NO: 231748
  chr6:1388651-1388873
  hyper

SEQ ID NO: 283689 - DNA, 87 bp, Homo sapiens; identical to SEQ ID NO: 200230
  chr6:1439168-1439255
  hyper

SEQ ID NO: 283690 - DNA, 75 bp, Homo sapiens
  chr6:1524429-1524504
  hyper
gcgggccgagggggcggagtcatggaaacacgtgccacggcctggatgaacctgcagggccgaacgctcagtgaa

SEQ ID NO: 283691 - DNA, 93 bp, Homo sapiens
  chr6:1605543-1605636
  hyper
cgacggccggctcccgccgcaccgcgcaccctggctccggcagactctggggcctggggactcgcccaccctgcgcggcgcgccccccacatg

SEQ ID NO: 283692 - DNA, 633 bp, Homo sapiens
  chr6:1610183-1610816
  hyper
taagcggctggcgcgcgagagaccgagaaaaggtgacgcggggcccgggcaggcggccggcgcgcggccccccccccccccgccctggttatttggccgccttcgccggcagctcagggcagagtctcctggaaggcgcaggcagtgtggcgagaagggcgcctgcttgttctttctttttgtctgctttcccccgtttgcgcctggaagctgcgccgcgagttcctgcaaggcggtctgccgcggccgggcccggccttctcccctcgcagcgaccccgcctcgcggccgcgcgggccccgaggtagcccgaggcgccggaggagccagccccagcgagcgccgggagaggcggcagcgcagccggacgcacagcgcagcgggccggcaccagctcggccgggcccggactcggactcggcggccggcgcggcgcggcccggcccgagcgagggtggggggcggcgggcggcgcggggcggcggcgagcgggggccatgcaggcgcgctactccgtgtccagccccaactccctgggagtggtgccctacctcggcggcgagcagagctactaccgcgcggcggccgcggcggccgggggcggctacaccgccatgccggcccccatgagcg

SEQ ID NO: 283693 - DNA, 334 bp, Homo sapiens; identical to SEQ ID NO: 200232
  chr6:1610864-1611198
  hyper

SEQ ID NO: 283694 - DNA, 65 bp, Homo sapiens
  chr6:1612131-1612196
  hyper
cttggcgagcgcggcggcggcggcggcggccgcaggctacccgggccagcagcagaacttccact

SEQ ID NO: 283695 - DNA, 186 bp, Homo sapiens; identical to SEQ ID NO: 112753
  chr6:1612300-1612486
  hyper

SEQ ID NO: 283696 - DNA, 42 bp, Homo sapiens; identical to SEQ ID NO: 200235
  chr6:1614120-1614162
  hyper

SEQ ID NO: 283697 - DNA, 134 bp, Homo sapiens
  chr6:1619970-1620104
  hyper
cccagtcggcttcctcgccataaaaagccagactccagccgaggtcctgaccccttccaaatatacgttcccttgcccgcggcccgccactcccgcccgggcctcgggctgtgcagcttcctcctaggcctgcc

SEQ ID NO: 283698 - DNA, 165 bp, Homo sapiens; identical to SEQ ID NO: 200236
  chr6:1624812-1624977
  hyper

SEQ ID NO: 283699 - DNA, 51 bp, Homo sapiens; identical to SEQ ID NO: 200237
  chr6:1625068-1625119
  hyper

SEQ ID NO: 283700 - DNA, 44 bp, Homo sapiens; identical to SEQ ID NO: 231760
  chr6:2246048-2246092
  hyper

SEQ ID NO: 283701 - DNA, 168 bp, Homo sapiens; identical to SEQ ID NO: 231761
  chr6:2764960-2765128
  hyper

SEQ ID NO: 283702 - DNA, 137 bp, Homo sapiens; identical to SEQ ID NO: 200238
  chr6:2841489-2841626
  hyper

SEQ ID NO: 283703 - DNA, 747 bp, Homo sapiens; identical to SEQ ID NO: 200239
  chr6:2841627-2842374
  hyper

SEQ ID NO: 283704 - DNA, 156 bp, Homo sapiens; identical to SEQ ID NO: 200240
  chr6:2903557-2903713
  hyper

SEQ ID NO: 283705 - DNA, 208 bp, Homo sapiens
  chr6:2999193-2999401
  hyper
tggaaaaagtcggcccaaactgttcaccagcaccgccccccataactccccaccggctctggtttcaagactttccgttttctaggtatttccttggccttaaaccattttcctttaaacgaactttttctgtgaagccatccggtttcccccgatagtggcatctcacaaaggacaatccagtatcccaacagcgtgttgcgttccg

SEQ ID NO: 283706 - DNA, 205 bp, Homo sapiens; identical to SEQ ID NO: 231764
  chr6:3118559-3118764
  hyper

SEQ ID NO: 283707 - DNA, 254 bp, Homo sapiens; identical to SEQ ID NO: 200241
  chr6:3162842-3163096
  hyper

SEQ ID NO: 283708 - DNA, 560 bp, Homo sapiens; identical to SEQ ID NO: 231765
  chr6:3227011-3227571
  hyper

SEQ ID NO: 283709 - DNA, 75 bp, Homo sapiens
  chr6:3228111-3228186
  hyper
atggtgggggcgtgcgcattgtctggggctgtggtgggggtctgggtatggggatatgggggaacagtgaagaaa

SEQ ID NO: 283710 - DNA, 241 bp, Homo sapiens; identical to SEQ ID NO: 200242
  chr6:3228680-3228921
  hyper

SEQ ID NO: 283711 - DNA, 573 bp, Homo sapiens; identical to SEQ ID NO: 200243
  chr6:3229632-3230205
  hyper

SEQ ID NO: 283712 - DNA, 72 bp, Homo sapiens; identical to SEQ ID NO: 200244
  chr6:3231938-3232010
  hyper

SEQ ID NO: 283713 - DNA, 72 bp, Homo sapiens; identical to SEQ ID NO: 200245
  chr6:3232260-3232332
  hyper

SEQ ID NO: 283714 - DNA, 1366 bp, Homo sapiens
  chr6:3455898-3457264
  hyper
cgctttccatccgcgtactgggacaggagtttgggtgcaaactagtaaaggctatggtgctccctttacacccaagtaaaggcatgtggtttgggggacggaaggagattaagccaatgcggaatgccctacacacactctagcaccaccactttggggacttcggttctcccgctggctcgggcttggacctcggtctgcagggagagggttggagggactgggcggctgcggcccttaccttgctgaccacgttctggacgaggccggcgcggatgccgtagtcccatgcgcggcagtcacagttggaggcgttgtcccccttgtccggaggggatggcaggggtggtgtgtcgcctccgtccgcgccgctgctgttgctccggttgcccgcagcctcccagggggcagtggcgaagggggtggtggggaggctggtccagttgcccatgtccccgccccggcctgtggtggtgacccctgccagctcggtgcctttgccggccccgcggcaccagaagttgggctggtccaggaggaacgagtccgagaactggctgaagccgatgaacagcgccgggatccaggtgagcagcacgagggtcttctgatagcccccgcccaggcccccgaggaagggcagcaccgacccgtcatagtccagcaacaagaggctcggggccgcagccgcggagcagcagctcgggtgcgggccgcctccaggatgcagtgggggcagcggctggatctccgcgccgccgccggggcccgcgcgtcccccgaggggcgccgaggccgccgcgtccccgggcggcagggagccgttctcctcggccggggccggctgccgcccaggcccgccgcccgccgcctcgcgccgccggtctatggccatggcccgggcccgcggctcccgcagaggcgcatagagcgcggcggaggctccgcgggcgccccgggcacagcgcgccgggccaggcgcctgcagccgctgccgccgaggagggcccgcggctcgagagagagcgctcggcggctccgggtgcgtcaggccgcccccatgtcacccgccggaccccgcgccccgggcgctgcggccccgctcgggcgccgggcagaggcgggcagaggccggccgggccctcagccgccgcggctcatcagttccgcggcccgggcgccggctgccgagcccgccgctctccgctgctccgcgccggacgcggcaggaggaggagccggcgccgcgcccggcccgcgcccttgccggcggttcagggccctgcgggcggcggtgcgggcaaaggctgctgctcccggggtggccgcgctgtatttctccgacttcgggcgcctcccggaagcc

SEQ ID NO: 283715 - DNA, 706 bp, Homo sapiens; identical to SEQ ID NO: 200247
  chr6:3457537-3458243
  hyper

SEQ ID NO: 283716 - DNA, 715 bp, Homo sapiens; identical to SEQ ID NO: 222803
  chr6:3750700-3751415
  hyper

SEQ ID NO: 283717 - DNA, 478 bp, Homo sapiens
  chr6:4135305-4135783
  hyper
gcagagtgttaagtccacacgagtgataacggcttgcgtttacctcgcttttagcaagcgacgctttgcaccccagaagcagcccggctgggaagtgcaggcccgggtgctcagctggggcggctcacccgcccggagtccggccccaggaggatgggagcgtgcgcggaggcaggcggagaccttggggactgctgacagggaaccatagccctgacctcccgacgcgcccatcctgaccactccgggcccagcggtgcaggagggcgcgcgtgaggtcgtcactttttagcactacctcaccggaaaaccagcaaagcaaaatcctgttgccacctagacaatagggaaggagggtcttccaacggcggcgaccttcgcctggacagcggtatcctgcgggcgaccatgggccgaacggccgggactccaagcttacctcggacacgaacgccgcgccagtctccaagccaagtac

SEQ ID NO: 283718 - DNA, 95 bp, Homo sapiens; identical to SEQ ID NO: 200248
  chr6:4775543-4775638
  hyper

SEQ ID NO: 283719 - DNA, 358 bp, Homo sapiens; identical to SEQ ID NO: 200249
  chr6:4775639-4775997
  hyper

SEQ ID NO: 283720 - DNA, 83 bp, Homo sapiens; identical to SEQ ID NO: 112795
  chr6:4776187-4776270
  hyper

SEQ ID NO: 283721 - DNA, 506 bp, Homo sapiens; identical to SEQ ID NO: 200251
  chr6:4948976-4949482
  hyper

SEQ ID NO: 283722 - DNA, 122 bp, Homo sapiens; identical to SEQ ID NO: 231773
  chr6:5004398-5004520
  hyper

SEQ ID NO: 283723 - DNA, 236 bp, Homo sapiens
  chr6:5084676-5084912
  hyper
ggtggtgcgtgccgcgtgggcgccggccccacggggccccctctccgccctccctgcgggatcccggggcgcggactcgcgggcgcgtcgggcgggacagggggaggggcgggacgtgctcccgggcctggcgcgaatggcctccggccgctctcggctgcgggccatggccgctccccggcgcgtccccacacggtccccgccccagtctggccgcagcccaccccgcgccgcca

SEQ ID NO: 283724 - DNA, 695 bp, Homo sapiens
  chr6:5084942-5085637
  hyper
cccggctttcggaagagcagagcggagcgcgcctgaccgagtcaggcttccgagtgggattggaacccggggcgccctgaagtttggggaaagcaggagcagaagggaagggatgcgctccccgctctccggcggcgcggaatgggcctccttccagcctctgcgtaggcaagatttccccagttgcgcgctgcaccggggactccccagcccgtgaggcagccaagaggagagcgctcagtgaccctctgggggcagagccgtcaggccaagttcatgggcaggaagactttgtgcacgtgggggtctctgaaggttgagcgcgagctctgcacccccacttcgaggcactcaagaagcggaacagacgcgagccccgccgggggtgcgggtgagggctgcagggagcccgcgaacgacagaaagtcgccccccgcattccaccggagcactcgggaacacggcttccaggtgtcccagcggccgcgcctccccgcccccggccctcccccgtcgcgggcaggttcaaccgggaggcggcgtggccccggagccggccccaggcccgcatcctcctcccacttcgccctgggcagccgcagctaaaagccggaggctccaaagtggaactacgttgtcttgtcgagcctggggcgactcgcctcggggagggcgagcctgaactgcagccctgc

SEQ ID NO: 283725 - DNA, 143 bp, Homo sapiens; identical to SEQ ID NO: 200253
  chr6:5851316-5851459
  hyper

SEQ ID NO: 283726 - DNA, 90 bp, Homo sapiens
  chr6:5851836-5851926
  hyper
gagcgagcctgcctccagggcagcctcaccgcctggatcctgggcaggagacctcccaggtaataaccgtgatcacggtgttgatgctca

SEQ ID NO: 283727 - DNA, 115 bp, Homo sapiens; identical to SEQ ID NO: 200254
  chr6:5997274-5997389
  hyper

SEQ ID NO: 283728 - DNA, 112 bp, Homo sapiens; identical to SEQ ID NO: 200255
  chr6:5997401-5997513
  hyper

SEQ ID NO: 283729 - DNA, 176 bp, Homo sapiens; identical to SEQ ID NO: 200256
  chr6:5997899-5998075
  hyper

SEQ ID NO: 283730 - DNA, 399 bp, Homo sapiens
  chr6:5999609-6000008
  hyper
cgggacctccgcctaccccagaagcggctgtctaaagcgggggtgggggggcgccccctcctgtctggttttcccttccagttgccgggagaggactaggcagccgggagccgggccgtgcacccgctgtggcgcgctggcacctcggcctccgcaaacagattgctcgccctcctcggggaaagctaggaaaacagtgctaagcctcgcaagctgccgcccattaatgcctcttagcttgcaagatgggttactagctctgagcacggccctcccctcggggcttcttacattctcctccccctcgccccttctgtctccctccttctccacgccgcggtactctcgccttcgccctcattctctccctccacctactacctcttccttttgttttcc

SEQ ID NO: 283731 - DNA, 93 bp, Homo sapiens
  chr6:6000046-6000139
  hyper
tctgctttcctctcttctgttccccacttcctcttcctccttcccacaacctgcctggatcctccttgctctccacagttcccggctcagatt

SEQ ID NO: 283732 - DNA, 101 bp, Homo sapiens
  chr6:6009552-6009653
  hyper
ggacgtggctgcgcctcaccgccctaccccgggagggaacccccgctgactttttcctctcttcattttcctccccaggcgtcccaacctccctcataggc

SEQ ID NO: 283733 - DNA, 133 bp, Homo sapiens
  chr6:6546387-6546520
  hyper
gcccctggcacagtcgggtccttaacagctcccgccccagaagctgccttcggatgaacagccgggtgaatcgccatgaaaaattaatcagcctccgcctgtccgcggcctagatgggcgcaaagcagatgac

SEQ ID NO: 283734 - DNA, 97 bp, Homo sapiens
  chr6:6547222-6547319
  hyper
cagcgccggctccccagtttctctgcattgtgaagtcattttcttaaactcgggctttaaataaccaccgatgacttgcctacgggccacgcagatg

SEQ ID NO: 283735 - DNA, 739 bp, Homo sapiens
  chr6:7051921-7052660
  hyper
tgtggggctgcggggtgcgtgcgcggcgcggggcccgggcgtatttttcaagcctcggggcgcgtgggtgcgccccccaactcctgtcccccgagaggctgtgccacttccgcagccccagcccagtcccttccccactgggccgcacctccagtctgcccgcaaggcgccgcgcagcccccggcccggcccggtggcgcgggggaggggcgcgccgggcaggcaaagttgctgagttgctctgcacgctcagaagttgcagctgcgacggcagcttccctcccccttcctgcactgggctacccggaacgcacacccacccgtcaccacccgctacctgccctcgcccctgcggccccggccgggactccacagcatccccaccctgcgcccgcgaggagcccaggtttccagcggagttgggctgggggcgggcgcaccccatctccccgctccgcctcgggggaggcgggtgatgcgtggagggggtggttaggatcccctctaccgagtcgccgcttgcctgcggcgcttttgcactttcctaagctgagcagctgtgcaggcgtcgcccgccggcccctgcgccctcctagcaaagcggggtttgcagaacgggaactgggcggtcttcccattccctcccgcaaggaattttgctgtgagggtggagagggggcggcggggggctcggcttggggctgaggttgccaacaggtgctcgcgggtccatgtgacc

SEQ ID NO: 283736 - DNA, 111 bp, Homo sapiens; identical to SEQ ID NO: 200258
  chr6:7389807-7389918
  hyper

SEQ ID NO: 283737 - DNA, 206 bp, Homo sapiens; identical to SEQ ID NO: 231784
  chr6:7390149-7390355
  hyper

SEQ ID NO: 283738 - DNA, 1835 bp, Homo sapiens; identical to SEQ ID NO: 200259
  chr6:7541428-7543263
  hyper

SEQ ID NO: 283739 - DNA, 113 bp, Homo sapiens
  chr6:7543350-7543463
  hyper
agatgcccacgtgagccgtgcgcgttttgcagcccgccccacctccccgccccctgctagttgttcccacgtcgggcttttgggaaagaggccctgagcgccgggacgttatt

SEQ ID NO: 283740 - DNA, 238 bp, Homo sapiens; identical to SEQ ID NO: 231787
  chr6:7590298-7590536
  hyper

SEQ ID NO: 283741 - DNA, 209 bp, Homo sapiens; identical to SEQ ID NO: 200260
  chr6:7726046-7726255
  hyper

SEQ ID NO: 283742 - DNA, 86 bp, Homo sapiens; identical to SEQ ID NO: 231790
  chr6:8064729-8064815
  hyper

SEQ ID NO: 283743 - DNA, 87 bp, Homo sapiens
  chr6:10383111-10383198
  hyper
aagggggcgccgggggtgccctggcggataacaggcggtcacgcctgatccccgcataacagatccactctccgtgtggctacgagc

SEQ ID NO: 283744 - DNA, 157 bp, Homo sapiens; identical to SEQ ID NO: 200262
  chr6:10383570-10383727
  hyper

SEQ ID NO: 283745 - DNA, 106 bp, Homo sapiens; identical to SEQ ID NO: 200263
  chr6:10384074-10384180
  hyper

SEQ ID NO: 283746 - DNA, 192 bp, Homo sapiens; identical to SEQ ID NO: 200264
  chr6:10391456-10391648
  hyper

SEQ ID NO: 283747 - DNA, 160 bp, Homo sapiens; identical to SEQ ID NO: 231797
  chr6:10392115-10392275
  hyper

SEQ ID NO: 283748 - DNA, 146 bp, Homo sapiens; identical to SEQ ID NO: 231798
  chr6:10395822-10395968
  hyper

SEQ ID NO: 283749 - DNA, 199 bp, Homo sapiens; identical to SEQ ID NO: 200265
  chr6:10409934-10410133
  hyper

SEQ ID NO: 283750 - DNA, 202 bp, Homo sapiens; identical to SEQ ID NO: 200266
  chr6:10410242-10410444
  hyper

SEQ ID NO: 283751 - DNA, 305 bp, Homo sapiens; identical to SEQ ID NO: 200267
  chr6:10410948-10411253
  hyper

SEQ ID NO: 283752 - DNA, 979 bp, Homo sapiens
  chr6:10412036-10413015
  hyper
cttcagctggtcgaacccacggtctctatcctgccgcgactggttatgattcaaagttctttaaaaatgaaaaaccccaaaaaaggaaaaaggaaaaagtatgtgtgagtgtgtgggtgcgtgcgtgttccttaatccgtgtctccccctcttttcttagcggcggcttcgcttgagcttctaataaccgcgctgggcagcgttcctggagcctcctaatagcagatattcatgactattaatattacacgaatacttaataagggaagaatgcctggaaatcgagcgtgaagcggagaggcaactcgcgccggagccggctctcaatgcagtccattgacgggagtctcagtgtagcaaatcggagtggggagagggagcgcgagagacaaaaagcgagcgagagagggagcgggcgagcgcgcggggggccgcggcgcggcgtctggcgaatcacagggaaggggcaacattttaaaaggttgcagggcatgcaaaagtgaaagagaaagaggcagagagggagaccgaaggagagagcgcagagagggagaatgtgtctgcgtgcgtgtgtgagaaagaaagtgtgggcgagggagaggagccccgggtggggagaggggagggagggaaggagggagagcccgagaggaggaagggagggaaagagggagggaggaagggagggagggagggggagggggcccagccggagcgcacggagggggaggccgcgggggagggggaaggggagaggaagcgagcgaggacaatcagacctaaaaggctggggcagacctcgggatgcagcgggggtcgtgcgtagcgggtaggagctgcttgggaccgcgtccgggcgctcgtggggctctcggcgcggcaggcgcttcccggccctgtctggccgcgggctccgccgcttcgcagccgagtctgggactcgggactcggctgcccgctgctgcgcggctcctccatg

SEQ ID NO: 283753 - DNA, 515 bp, Homo sapiens
  chr6:10413314-10413829
  hyper
gcgtgctgcctttgccagtctacccgccaggttgtcagaacaagcggcacctcgcctcctgcgtgtccctacagagccccggcacaatcagactgccccaagccagctccgaaacccgaaatccccgctccggcgcttgcccaccacggccaaagttgtggaaacagctttgactttattctcctctctctctcatctttttttgcctcgcttacacacgcattcacacttgcccccacaggatccctctaggggtgcaagttcatcccccacctagccacccaccccatccagtcggcacctagagccgcacggaggttcggaccccgcccgccgagggcgcccacacctggagctgggtttcggcctctgcgaaagtgaaatgcccaagcctccggccaaagcccagaccagtacagtatgaattgtcctatgagactgaggggttcggcttcattcctacctgcccgcaaagctcgcccccagcctcgaaaacaaagcgactggtctgacgt

SEQ ID NO: 283754 - DNA, 31 bp, Homo sapiens; identical to SEQ ID NO: 200270
  chr6:10414549-10414580
  hyper

SEQ ID NO: 283755 - DNA, 60 bp, Homo sapiens; identical to SEQ ID NO: 200271
  chr6:10415329-10415389
  hyper

SEQ ID NO: 283756 - DNA, 282 bp, Homo sapiens
  chr6:10415836-10416118
  hyper
ccagcttctagcacttctcccttaaccctgctaccacgatccgagctgcccttttggccccgtgcaattttattagaaatcattatccctttcgcaattaaacataaccaccaaaccaagaccggcgaagtcactccaggattttttcccaacaagggatcgcctccgctcgaggcagccaccccctcgggccgcagcgccttgggagttttattggctttgagctttcccccaggttggagattctgccaagcggctccggtggctctgctggggtttgca

SEQ ID NO: 283757 - DNA, 38 bp, Homo sapiens; identical to SEQ ID NO: 112856
  chr6:10416507-10416545
  hyper

SEQ ID NO: 283758 - DNA, 224 bp, Homo sapiens; identical to SEQ ID NO: 200273
  chr6:10417842-10418066
  hyper

SEQ ID NO: 283759 - DNA, 169 bp, Homo sapiens; identical to SEQ ID NO: 231803
  chr6:10418727-10418896
  hyper

SEQ ID NO: 283760 - DNA, 151 bp, Homo sapiens
  chr6:10418926-10419077
  hyper
ccaagttccacaggcgttggttttggcaaattcaccacccccctgcctcctcacccaccattctcacactccctcatccgtagcccaggcggcaaaaacccatttcaggaagtggagtgagttgctagctaaacttcgggcaaactttgta

SEQ ID NO: 283761 - DNA, 115 bp, Homo sapiens; identical to SEQ ID NO: 200275
  chr6:10420268-10420383
  hyper

SEQ ID NO: 283762 - DNA, 36 bp, Homo sapiens; identical to SEQ ID NO: 200276
  chr6:10420682-10420718
  hyper

SEQ ID NO: 283763 - DNA, 162 bp, Homo sapiens; identical to SEQ ID NO: 200277
  chr6:10423451-10423613
  hyper

SEQ ID NO: 283764 - DNA, 214 bp, Homo sapiens; identical to SEQ ID NO: 200278
  chr6:10423704-10423918
  hyper

SEQ ID NO: 283765 - DNA, 332 bp, Homo sapiens; identical to SEQ ID NO: 200279
  chr6:10424087-10424419
  hyper

SEQ ID NO: 283766 - DNA, 180 bp, Homo sapiens; identical to SEQ ID NO: 231809
  chr6:10529013-10529193
  hyper

SEQ ID NO: 283767 - DNA, 362 bp, Homo sapiens; identical to SEQ ID NO: 231810
  chr6:10694859-10695221
  hyper

SEQ ID NO: 283768 - DNA, 110 bp, Homo sapiens; identical to SEQ ID NO: 200281
  chr6:10723051-10723161
  hyper

SEQ ID NO: 283769 - DNA, 85 bp, Homo sapiens; identical to SEQ ID NO: 200282
  chr6:11043616-11043701
  hyper

SEQ ID NO: 283770 - DNA, 221 bp, Homo sapiens; identical to SEQ ID NO: 231814
  chr6:11232919-11233140
  hyper

SEQ ID NO: 283771 - DNA, 116 bp, Homo sapiens; identical to SEQ ID NO: 200283
  chr6:11537480-11537596
  hyper

SEQ ID NO: 283772 - DNA, 352 bp, Homo sapiens
  chr6:11537920-11538272
  hyper
gaggcgcgcgcgtgcgcgtgcacgagtggcccgccggcggctgcgggtggagggggcggttcctcgagtgtcggcgacccgagggcgggcaggcgggcggcaggtgccgccgcagcctctggctggtcccgcgtctccgtcctccggcggcgatgagctgggccctgtcgggggctgcacctgccggctgcccatcagcaccggcctcctggcgtgacctcggcctcctcgcgtgtccagtccccgcggcgcggcgctgcccctgagagggagcggcggcggcctcctccgccccgagtcctcgctcgggggccgcgcgaggacggcgcccggccccctcccctccttcctc

SEQ ID NO: 283773 - DNA, 608 bp, Homo sapiens; identical to SEQ ID NO: 112888
  chr6:11538299-11538907
  hyper

SEQ ID NO: 283774 - DNA, 75 bp, Homo sapiens
  chr6:13013495-13013570
  hyper
aatctccttcgggtcggagaatttctatgggaggtgaaaacatcaattatgttgtaacaggttgtctgctccagt

SEQ ID NO: 283775 - DNA, 395 bp, Homo sapiens
  chr6:13014076-13014471
  hyper
gggggccggagcagcgcccggccccgggcgcccgggggccggatggcggagcccacgcgctcagcgaagccggggaggtttgcgctccgttcgccgcgctgcagggagggcgcggtgccaggcgcgagcgccgagaaacccaaaaagaaagctttttatttgctgaggatgaagcccctgaaggagcccgcccccaacaacaacaacaacgtgtcctttgtgatccactgtcaactaggcaaggagatcaaacacatttgcagcaactgcagtcggggggaggacgcccgggacggtgagtgccggggcccgtcggggcggcggcggcgagcgcgggaggcggggaggtggctcgggctgtctcagtttgggggcaccgccggcgtctgtcgcct

SEQ ID NO: 283776 - DNA, 149 bp, Homo sapiens; identical to SEQ ID NO: 231819
  chr6:13328435-13328584
  hyper

SEQ ID NO: 283777 - DNA, 146 bp, Homo sapiens
  chr6:13488242-13488388
  hyper
gataataataacctcggctcccggagcgtttcttgcgtgctgagcatcatactaacgcctttccaggtattgtcccttttagtcctcgcagcaacctaaggttattgtaaacccattttaccagtgatgtgaatgagccgcaatga

SEQ ID NO: 283778 - DNA, 83 bp, Homo sapiens
  chr6:13488595-13488678
  hyper
ctcccacctcccccgcccctaggcccatgcccgcccccgcgtagacgctgtggtgtgtacggccgcagcggggcagggggtct

SEQ ID NO: 283779 - DNA, 146 bp, Homo sapiens; identical to SEQ ID NO: 200285
  chr6:13574018-13574164
  hyper

SEQ ID NO: 283780 - DNA, 90 bp, Homo sapiens; identical to SEQ ID NO: 231822
  chr6:13614827-13614917
  hyper

SEQ ID NO: 283781 - DNA, 66 bp, Homo sapiens; identical to SEQ ID NO: 200286
  chr6:13615519-13615585
  hyper

SEQ ID NO: 283782 - DNA, 292 bp, Homo sapiens
  chr6:14117386-14117678
  hyper
ataatttaaacaggacggtactgactgataacctcccggggaaggcagggagccaagtactacagacttgtatgtttccatggaaatctaacgcgcctttgattatcacagattctggagaagagtgaggacttgggttcaccagtgcgttcccaaggacaggctgggcttctgaggaagttgcccaccctctcggaatctggtttggcctccgtaaaatgggcagatcccgctcggatggcccggttcccggcttccttttgcgggtcaacggcagcgtcacgcgcgcgag

SEQ ID NO: 283783 - DNA, 128 bp, Homo sapiens; identical to SEQ ID NO: 200288
  chr6:14211103-14211231
  hyper

SEQ ID NO: 283784 - DNA, 343 bp, Homo sapiens; identical to SEQ ID NO: 231826
  chr6:15663120-15663463
  hyper

SEQ ID NO: 283785 - DNA, 227 bp, Homo sapiens; identical to SEQ ID NO: 231827
  chr6:16129890-16130117
  hyper

SEQ ID NO: 283786 - DNA, 153 bp, Homo sapiens; identical to SEQ ID NO: 231828
  chr6:16238456-16238609
  hyper

SEQ ID NO: 283787 - DNA, 378 bp, Homo sapiens; identical to SEQ ID NO: 112922
  chr6:16238860-16239238
  hyper

SEQ ID NO: 283788 - DNA, 252 bp, Homo sapiens; identical to SEQ ID NO: 231830
  chr6:16761654-16761906
  hyper

SEQ ID NO: 283789 - DNA, 152 bp, Homo sapiens; identical to SEQ ID NO: 200291
  chr6:16763513-16763665
  hyper

SEQ ID NO: 283790 - DNA, 444 bp, Homo sapiens; identical to SEQ ID NO: 200292
  chr6:17101829-17102273
  hyper

SEQ ID NO: 283791 - DNA, 204 bp, Homo sapiens
  chr6:17102346-17102550
  hyper
gcgggtggcgcccgagcgcagtagcaggggcgtagggcgcagggcgcaggagcgcgggaccaccggcgccggagcgcggcagggagcgctcgcgggggcgcacagcagccaagcccgcggaggaggagcgcgcgcgcgcagcatgggctgtggaccttcccaacctgctgaagaccggagacgtgtacgcgcgcccaagaaggg

SEQ ID NO: 283792 - DNA, 65 bp, Homo sapiens; identical to SEQ ID NO: 200293
  chr6:17281262-17281327
  hyper

SEQ ID NO: 283793 - DNA, 89 bp, Homo sapiens; identical to SEQ ID NO: 200294
  chr6:17281328-17281417
  hyper

SEQ ID NO: 283794 - DNA, 564 bp, Homo sapiens; identical to SEQ ID NO: 200295
  chr6:17281534-17282098
  hyper

SEQ ID NO: 283795 - DNA, 195 bp, Homo sapiens; identical to SEQ ID NO: 200296
  chr6:17282217-17282412
  hyper

SEQ ID NO: 283796 - DNA, 48 bp, Homo sapiens; identical to SEQ ID NO: 200297
  chr6:17393745-17393793
  hyper

SEQ ID NO: 283797 - DNA, 759 bp, Homo sapiens; identical to SEQ ID NO: 112932
  chr6:17393824-17394583
  hyper

SEQ ID NO: 283798 - DNA, 100 bp, Homo sapiens; identical to SEQ ID NO: 231835
  chr6:17706854-17706954
  hyper

SEQ ID NO: 283799 - DNA, 201 bp, Homo sapiens; identical to SEQ ID NO: 200299
  chr6:17987165-17987366
  hyper

SEQ ID NO: 283800 - DNA, 190 bp, Homo sapiens; identical to SEQ ID NO: 231837
  chr6:17988449-17988639
  hyper

SEQ ID NO: 283801 - DNA, 1474 bp, Homo sapiens; identical to SEQ ID NO: 200300
  chr6:18263766-18265240
  hyper

SEQ ID NO: 283802 - DNA, 55 bp, Homo sapiens; identical to SEQ ID NO: 200301
  chr6:18277378-18277433
  hyper

SEQ ID NO: 283803 - DNA, 39 bp, Homo sapiens; identical to SEQ ID NO: 200302
  chr6:18278043-18278082
  hyper

SEQ ID NO: 283804 - DNA, 187 bp, Homo sapiens; identical to SEQ ID NO: 231841
  chr6:18387299-18387486
  hyper

SEQ ID NO: 283805 - DNA, 62 bp, Homo sapiens; identical to SEQ ID NO: 200303
  chr6:19691576-19691638
  hyper

SEQ ID NO: 283806 - DNA, 114 bp, Homo sapiens
  chr6:19692318-19692432
  hyper
atccatcttttataagtgctgtggcccacttttaactggatctcgtggagtactcagatacagccggtatagtgaaggctaatagcatcagcacactttcgcgcattaatcttg

SEQ ID NO: 283807 - DNA, 621 bp, Homo sapiens; identical to SEQ ID NO: 231843
  chr6:19804681-19805302
  hyper

SEQ ID NO: 283808 - DNA, 1153 bp, Homo sapiens
  chr6:20211953-20213106
  hyper
gtctacagattcatcgcgcttgttttttaagtagggtcatctaaattaaaaacaataacgacttgaggacactgatgaaagaaacactggtttcatgtatcagactacttcagaacttgattacaggaaacgaggcaatcccaaacttaaagaaaaaaaagttcagtagaacttgccgcgcaggctgtaccaatattttttcacacttacaaggagaaaaacactaacaccaactcaagaagggaaaacacacacacacacacacacacacacacacacacaaaaaccaactgtctagtgtgtggctgtaaaatacgccatggaggcggagggacggtggctaacactttcgcccgccccgtgcacgcgatcgctggggagctggggtcgctgcgctcccggcctgcagttacctggtccagcgggatgcccaggagctcgctgagcgggtgcaggtaggtggagcccgtggtgcggtaggaaaggctggacggctgcggctctgctgccatcctgcatcttcgggaggtggctgcccctgtcccagcccgcaacaccccctgctcggcgtcctcccgcccgggtgctcttgggtggttgccccgagaggcgcacggccgcctggttcgcgggggagcgaacgggaggccggggaatgcgaaccggcgcaaactctcgaggcgcaaactctcgaggcgcaaacttggctttggcgctggcgctgcagccacgggcgccgtaggagggccgggcccaaggcgccccgcttcccgctcccttcctctccgcgcccattggcccggccgctcgggacggccccgagaggagggaaggagggaggaaaagtggggactccgagcccggcccccaagcgccgcccggcccgcccagcctggcctgcaccgaggccgaccgggagagggaaagcgacgccagcgggcgccgccgcctggccctgcagctggaggcgggacgcgcctttcctcctcccgggctgaccgtcctagccccccgccagacaaaacgacctcacccagcgggcgccttccactagagagcaccacccaccccgccccaccctgttttggtttcgccgccgcagtcgaagcggctgagtggctgcgtttccctttcaagccgtagagggttcctc

SEQ ID NO: 283809 - DNA, 324 bp, Homo sapiens; identical to SEQ ID NO: 200307
  chr6:20401055-20401379
  hyper

SEQ ID NO: 283810 - DNA, 459 bp, Homo sapiens; identical to SEQ ID NO: 231848
  chr6:20401709-20402168
  hyper

SEQ ID NO: 283811 - DNA, 188 bp, Homo sapiens; identical to SEQ ID NO: 231849
  chr6:20534532-20534720
  hyper

SEQ ID NO: 283812 - DNA, 1131 bp, Homo sapiens; identical to SEQ ID NO: 200308
  chr6:21594475-21595606
  hyper

SEQ ID NO: 283813 - DNA, 482 bp, Homo sapiens; identical to SEQ ID NO: 231850
  chr6:21595891-21596373
  hyper

SEQ ID NO: 283814 - DNA, 93 bp, Homo sapiens; identical to SEQ ID NO: 200309
  chr6:21664626-21664719
  hyper

SEQ ID NO: 283815 - DNA, 174 bp, Homo sapiens; identical to SEQ ID NO: 200310
  chr6:21664749-21664923
  hyper

SEQ ID NO: 283816 - DNA, 431 bp, Homo sapiens; identical to SEQ ID NO: 200311
  chr6:21665191-21665622
  hyper

SEQ ID NO: 283817 - DNA, 268 bp, Homo sapiens; identical to SEQ ID NO: 200312
  chr6:21666189-21666457
  hyper

SEQ ID NO: 283818 - DNA, 351 bp, Homo sapiens; identical to SEQ ID NO: 200313
  chr6:21666588-21666939
  hyper

SEQ ID NO: 283819 - DNA, 263 bp, Homo sapiens; identical to SEQ ID NO: 200314
  chr6:22146853-22147116
  hyper

SEQ ID NO: 283820 - DNA, 201 bp, Homo sapiens; identical to SEQ ID NO: 200315
  chr6:24360170-24360371
  hyper

SEQ ID NO: 283821 - DNA, 97 bp, Homo sapiens; identical to SEQ ID NO: 231853
  chr6:24403048-24403145
  hyper

SEQ ID NO: 283822 - DNA, 262 bp, Homo sapiens; identical to SEQ ID NO: 231854
  chr6:24403465-24403727
  hyper

SEQ ID NO: 283823 - DNA, 203 bp, Homo sapiens; identical to SEQ ID NO: 231856
  chr6:24667302-24667505
  hyper

SEQ ID NO: 283824 - DNA, 265 bp, Homo sapiens; identical to SEQ ID NO: 231857
  chr6:24721642-24721907
  hyper

SEQ ID NO: 283825 - DNA, 890 bp, Homo sapiens; identical to SEQ ID NO: 231858
  chr6:24910934-24911824
  hyper

SEQ ID NO: 283826 - DNA, 213 bp, Homo sapiens; identical to SEQ ID NO: 231859
  chr6:25278942-25279155
  hyper

SEQ ID NO: 283827 - DNA, 167 bp, Homo sapiens; identical to SEQ ID NO: 231860
  chr6:25280013-25280180
  hyper

SEQ ID NO: 283828 - DNA, 153 bp, Homo sapiens
  chr6:25652226-25652379
  hyper
agtttggaaagtgagtcaaacgtaagagggatgtcttctccgagtctgagaagcaagttaaagggcaaaagcagtgagccgtggacgcctggagacagtttctttcttcctgaattccccaaagcgcagagacagacaggatctgccaggaca

SEQ ID NO: 283829 - DNA, 224 bp, Homo sapiens
  chr6:25652505-25652729
  hyper
cagttactcaaagctaatcagatagcgaaagaagcaggagagcaagtcaagaaatacggtgaaggagtccttcccaaagttgtctaggtccttccgcgccggtgcctggtcttcgtcgtcaacaccatggacagctcccgggaaccgactctggggcgcttggacgccgctggcttctggcaggtctggcagcgctttgatgcggatggtgagtagaacaagcc

SEQ ID NO: 283830 - DNA, 125 bp, Homo sapiens
  chr6:26020588-26020713
  hyper
atcagagtgtgtaacgtcatatttagcgtcttctatcatccaatcactgcactttacacactataaatagagcagctcatgggcgtatttgcgctagtgttgggtgttccgctgtgctgtttttc

SEQ ID NO: 283831 - DNA, 128 bp, Homo sapiens
  chr6:26020763-26020891
  hyper
cgccacgcaaacagttggccactaaggcagcccgcaaaagcgctccggccaccggcggcgtgaaaaagccccaccgctaccggccgggcaccgtggctctgcgcgagatccgccgttatcagaagtcc

SEQ ID NO: 283832 - DNA, 178 bp, Homo sapiens
  chr6:26021528-26021706
  hyper
ctaatgtactccagtctgggcgacagagagattcggttaaaaaaaaagttcgacttaaaataattctggagtcagaatgggtttacatttaattcttaacccagttcctcaaagcctgtagctctgttaagaaaataaaggccattggtcaagcctgcttggtcccaccctcatctcc

SEQ ID NO: 283833 - DNA, 110 bp, Homo sapiens
  chr6:26022178-26022288
  hyper
taagcgccagggacgcaccctttatggctttggcggttaaggttgctgatttctccacagcttgcatttctgaaccaaaggcccttttcagggccgcccaactaaacaaa

SEQ ID NO: 283834 - DNA, 505 bp, Homo sapiens; identical to SEQ ID NO: 200317
  chr6:26027158-26027663
  hyper

SEQ ID NO: 283835 - DNA, 936 bp, Homo sapiens; identical to SEQ ID NO: 200318
  chr6:26031787-26032723
  hyper

SEQ ID NO: 283836 - DNA, 35 bp, Homo sapiens; identical to SEQ ID NO: 200319
  chr6:26032843-26032878
  hyper

SEQ ID NO: 283837 - DNA, 310 bp, Homo sapiens; identical to SEQ ID NO: 200320
  chr6:26033434-26033744
  hyper

SEQ ID NO: 283838 - DNA, 51 bp, Homo sapiens
  chr6:26034208-26034259
  hyper
aggtccttcaaatcgggcgcagtggctcatgcccgtaataccagcactttg

SEQ ID NO: 283839 - DNA, 795 bp, Homo sapiens; identical to SEQ ID NO: 231868
  chr6:26045208-26046003
  hyper

SEQ ID NO: 283840 - DNA, 231 bp, Homo sapiens; identical to SEQ ID NO: 231869
  chr6:26056526-26056757
  hyper

SEQ ID NO: 283841 - DNA, 201 bp, Homo sapiens; identical to SEQ ID NO: 200321
  chr6:26087985-26088186
  hyper

SEQ ID NO: 283842 - DNA, 247 bp, Homo sapiens; identical to SEQ ID NO: 231871
  chr6:26104171-26104418
  hyper

SEQ ID NO: 283843 - DNA, 44 bp, Homo sapiens; identical to SEQ ID NO: 231872
  chr6:26123722-26123766
  hyper

SEQ ID NO: 283844 - DNA, 44 bp, Homo sapiens; identical to SEQ ID NO: 231873
  chr6:26123886-26123930
  hyper

SEQ ID NO: 283845 - DNA, 180 bp, Homo sapiens; identical to SEQ ID NO: 200322
  chr6:26125817-26125997
  hyper

SEQ ID NO: 283846 - DNA, 328 bp, Homo sapiens; identical to SEQ ID NO: 200323
  chr6:26126237-26126565
  hyper

SEQ ID NO: 283847 - DNA, 154 bp, Homo sapiens; identical to SEQ ID NO: 200324
  chr6:26156348-26156502
  hyper

SEQ ID NO: 283848 - DNA, 132 bp, Homo sapiens; identical to SEQ ID NO: 200325
  chr6:26171886-26172018
  hyper

SEQ ID NO: 283849 - DNA, 36 bp, Homo sapiens; identical to SEQ ID NO: 200326
  chr6:26172371-26172407
  hyper

SEQ ID NO: 283850 - DNA, 401 bp, Homo sapiens; identical to SEQ ID NO: 231878
  chr6:26172707-26173108
  hyper

SEQ ID NO: 283851 - DNA, 137 bp, Homo sapiens
  chr6:26183884-26184021
  hyper
gcatgcagacttcacgacaaaataacgaatcagagttggagaaactaaatcttcatttacataacattgtctacaaattccgaggatcaggagatgtagatttcattttctttcctaactgcagaacagcaaagata

SEQ ID NO: 283852 - DNA, 348 bp, Homo sapiens
  chr6:26197520-26197868
  hyper
ctagcctttcgtacccgtatatataaagacacccctgttctgattggacaaggcagcctttcccctgcagctcgattggtggagacgcccactccctgacagaacatctcctgcatgtagaccaaatattaaaactttcctccgtccatctttaactgctggtgttttcaaccctttcccctctgtgccatgtttctagcttttatttaaaacgtactttggttttccttggcaaaattgtgtctagctactaggatgacgtgtcttaatttttttttaaatgttggcgctgaaactggctttgatcaacgttttaaaaagacgcgcgctagttgtgattggccaagt

SEQ ID NO: 283853 - DNA, 106 bp, Homo sapiens; identical to SEQ ID NO: 200329
  chr6:26198468-26198574
  hyper

SEQ ID NO: 283854 - DNA, 213 bp, Homo sapiens; identical to SEQ ID NO: 200330
  chr6:26198924-26199137
  hyper

SEQ ID NO: 283855 - DNA, 367 bp, Homo sapiens
  chr6:26204318-26204685
  hyper
cgtgtttttctcttcgggaggaaaatccttttggtcagatttcccttggcttggtggtggagagggtgagatcttgcagttttcaaacacttcctaagggggttccgtccccaagagagcaagcagcagaaatgccagaggaaccgtgcctatggggacaaagctgaactcctcatggaaggagattactgcagttccggtcttgtgagccaaagctcctgttcaatcgtcctagagcatcccaagcagcaaatgattttaaacatgttaatgtatttaatctcatttagttgttaaaatatgcctaaatttcctctttgggaacgcaagacttgcagagatgactccatggagagcggactctgcc

SEQ ID NO: 283856 - DNA, 204 bp, Homo sapiens; identical to SEQ ID NO: 200332
  chr6:26205298-26205502
  hyper

SEQ ID NO: 283857 - DNA, 76 bp, Homo sapiens; identical to SEQ ID NO: 200333
  chr6:26205712-26205788
  hyper

SEQ ID NO: 283858 - DNA, 70 bp, Homo sapiens; identical to SEQ ID NO: 200334
  chr6:26205992-26206062
  hyper

SEQ ID NO: 283859 - DNA, 191 bp, Homo sapiens
  chr6:26215856-26216047
  hyper
ccaggctggaattgcactagcgtattcacatgttcctgcagtctctagcccgagagtttaagctatcctaccacctcagcctaccgagtaaatgatagtacagacgcaagccgtcacacctggttagcttcatttttttgcagagacgagttctatgttgcccaggcaaatctgttaactcctgagctgaa

SEQ ID NO: 283860 - DNA, 223 bp, Homo sapiens; identical to SEQ ID NO: 200335
  chr6:26216853-26217076
  hyper

SEQ ID NO: 283861 - DNA, 209 bp, Homo sapiens; identical to SEQ ID NO: 200336
  chr6:26217156-26217365
  hyper

SEQ ID NO: 283862 - DNA, 327 bp, Homo sapiens; identical to SEQ ID NO: 200337
  chr6:26217578-26217905
  hyper

SEQ ID NO: 283863 - DNA, 506 bp, Homo sapiens; identical to SEQ ID NO: 231889
  chr6:26223780-26224286
  hyper

SEQ ID NO: 283864 - DNA, 163 bp, Homo sapiens; identical to SEQ ID NO: 231890
  chr6:26224588-26224751
  hyper

SEQ ID NO: 283865 - DNA, 123 bp, Homo sapiens; identical to SEQ ID NO: 200338
  chr6:26233855-26233978
  hyper

SEQ ID NO: 283866 - DNA, 125 bp, Homo sapiens
  chr6:26241269-26241394
  hyper
ttattcccacgtttctgaaatttactcctatgttaggtggctgggacttaactacactagcattacatgtttagtttttgagatggagttgctcttgtccaggctgtagtgcaatgacgcaatct

SEQ ID NO: 283867 - DNA, 33 bp, Homo sapiens; identical to SEQ ID NO: 200339
  chr6:26249927-26249960
  hyper

SEQ ID NO: 283868 - DNA, 137 bp, Homo sapiens; identical to SEQ ID NO: 200340
  chr6:26250001-26250138
  hyper

SEQ ID NO: 283869 - DNA, 39 bp, Homo sapiens; identical to SEQ ID NO: 200341
  chr6:26251501-26251540
  hyper

SEQ ID NO: 283870 - DNA, 134 bp, Homo sapiens; identical to SEQ ID NO: 200342
  chr6:26271212-26271346
  hyper

SEQ ID NO: 283871 - DNA, 326 bp, Homo sapiens
  chr6:26272105-26272431
  hyper
agcaacaaatgttaactgaattctattttgtcccaaatggtgttttgcttcggttgagaatttttaaggcacaggctaattttaggttttccaacgactcttatcatttacttttcgttgggtcctattgatgatattccaggataccacccccactagcctcttctgcaggataacttgaacactgcagtggccctgtccatctaaactttacaaggttttgtaaacgttactgaacttgcttcttcccgactacattaaagcacttacttgagatattaaacattttctcattagtcctgtttgcctagtcagtcacttgtata

SEQ ID NO: 283872 - DNA, 227 bp, Homo sapiens; identical to SEQ ID NO: 200345
  chr6:26272853-26273080
  hyper

SEQ ID NO: 283873 - DNA, 225 bp, Homo sapiens; identical to SEQ ID NO: 231901
  chr6:26286645-26286870
  hyper

SEQ ID NO: 283874 - DNA, 366 bp, Homo sapiens
  chr6:26313149-26313515
  hyper
ggtctccaaacctacgaaactggctgaaagctctccacacctaattagtaggattacagatattgaagcctacaaatgcgcatttccaccaggataccttgtggattcttacacgggtcaggtccgctgacgtttagcacgcctactttaaaacctcttttctgtagggtcctagtcttcaagtaaaatatatgcggccatatagcagaggatggtttcgatccatcgacctctgggttatgggcccagcacgcttccgctgcgccactctgctgtctcgacagtccgctccgccactctgctgtttcaacattactcttgtcaagtatgtattagaggctacaattttcggcatcttcctaattt

SEQ ID NO: 283875 - DNA, 357 bp, Homo sapiens
  chr6:26313545-26313902
  hyper
cctggagaatgagaagtgcacactggccatccatatggggctgcacgccacttccaaacaccagcggtttagaattcttcctcgataaattcgaatcagctgaggttgaagttctctaaaacggaagcatgtttcgagttatgggaaaacaaagtgcaggctaattggcataatttataaaggtgaaattataaatgcttgggcaaatttcagccattcctggataccggagggagtcgttattacttccaaacattttttacttgagattttcatcgaaaatgttcacaggaaaaaaaaaattacagttgcagcgaggaggcaacagaacctagaactccgcgcggcaggtgagaa

SEQ ID NO: 283876 - DNA, 120 bp, Homo sapiens; identical to SEQ ID NO: 231903
  chr6:26322183-26322303
  hyper

SEQ ID NO: 283877 - DNA, 205 bp, Homo sapiens; identical to SEQ ID NO: 200346
  chr6:26322363-26322568
  hyper

SEQ ID NO: 283878 - DNA, 78 bp, Homo sapiens; identical to SEQ ID NO: 200347
  chr6:26322843-26322921
  hyper

SEQ ID NO: 283879 - DNA, 165 bp, Homo sapiens; identical to SEQ ID NO: 231908
  chr6:26330501-26330666
  hyper

SEQ ID NO: 283880 - DNA, 90 bp, Homo sapiens; identical to SEQ ID NO: 200348
  chr6:26331613-26331703
  hyper

SEQ ID NO: 283881 - DNA, 323 bp, Homo sapiens; identical to SEQ ID NO: 200349
  chr6:26331811-26332134
  hyper

SEQ ID NO: 283882 - DNA, 264 bp, Homo sapiens; identical to SEQ ID NO: 200350
  chr6:26332283-26332547
  hyper

SEQ ID NO: 283883 - DNA, 118 bp, Homo sapiens; identical to SEQ ID NO: 200351
  chr6:26383468-26383586
  hyper

SEQ ID NO: 283884 - DNA, 141 bp, Homo sapiens; identical to SEQ ID NO: 200352
  chr6:26458199-26458340
  hyper

SEQ ID NO: 283885 - DNA, 31 bp, Homo sapiens; identical to SEQ ID NO: 200353
  chr6:26502209-26502240
  hyper

SEQ ID NO: 283886 - DNA, 142 bp, Homo sapiens; identical to SEQ ID NO: 231913
  chr6:26521258-26521400
  hyper

SEQ ID NO: 283887 - DNA, 80 bp, Homo sapiens; identical to SEQ ID NO: 200354
  chr6:26521682-26521762
  hyper

SEQ ID NO: 283888 - DNA, 284 bp, Homo sapiens; identical to SEQ ID NO: 231915
  chr6:26522005-26522289
  hyper

SEQ ID NO: 283889 - DNA, 78 bp, Homo sapiens; identical to SEQ ID NO: 231918
  chr6:26555482-26555560
  hyper

SEQ ID NO: 283890 - DNA, 247 bp, Homo sapiens; identical to SEQ ID NO: 200355
  chr6:26577475-26577722
  hyper

SEQ ID NO: 283891 - DNA, 185 bp, Homo sapiens
  chr6:26987782-26987967
  hyper
aaccagcgcagcagcgggacgctagcccgcccacacggcggccacttgaaggtcctccagggaacacctgaggcagtgggagcgtctgccctttcctaagtctccttggaaagaagtattcgctttcgtttccgcaaacaaagcatgctccgcgctttcaggaccggtggctcccgtggagaccg

SEQ ID NO: 283892 - DNA, 153 bp, Homo sapiens; identical to SEQ ID NO: 200357
  chr6:27059533-27059686
  hyper

SEQ ID NO: 283893 - DNA, 57 bp, Homo sapiens; identical to SEQ ID NO: 200358
  chr6:27059899-27059956
  hyper

SEQ ID NO: 283894 - DNA, 41 bp, Homo sapiens; identical to SEQ ID NO: 200359
  chr6:27064587-27064628
  hyper

SEQ ID NO: 283895 - DNA, 239 bp, Homo sapiens; identical to SEQ ID NO: 200360
  chr6:27099525-27099764
  hyper

SEQ ID NO: 283896 - DNA, 47 bp, Homo sapiens; identical to SEQ ID NO: 200361
  chr6:27099874-27099921
  hyper

SEQ ID NO: 283897 - DNA, 43 bp, Homo sapiens; identical to SEQ ID NO: 200362
  chr6:27100142-27100185
  hyper

SEQ ID NO: 283898 - DNA, 60 bp, Homo sapiens; identical to SEQ ID NO: 200363
  chr6:27100389-27100449
  hyper

SEQ ID NO: 283899 - DNA, 60 bp, Homo sapiens; identical to SEQ ID NO: 200364
  chr6:27101049-27101109
  hyper

SEQ ID NO: 283900 - DNA, 101 bp, Homo sapiens; identical to SEQ ID NO: 200365
  chr6:27101206-27101307
  hyper

SEQ ID NO: 283901 - DNA, 118 bp, Homo sapiens; identical to SEQ ID NO: 231927
  chr6:27101539-27101657
  hyper

SEQ ID NO: 283902 - DNA, 146 bp, Homo sapiens; identical to SEQ ID NO: 200366
  chr6:27125326-27125472
  hyper

SEQ ID NO: 283903 - DNA, 98 bp, Homo sapiens; identical to SEQ ID NO: 200367
  chr6:27125473-27125571
  hyper

SEQ ID NO: 283904 - DNA, 245 bp, Homo sapiens; identical to SEQ ID NO: 200368
  chr6:27125798-27126043
  hyper

SEQ ID NO: 283905 - DNA, 51 bp, Homo sapiens; identical to SEQ ID NO: 200369
  chr6:27173864-27173915
  hyper

SEQ ID NO: 283906 - DNA, 365 bp, Homo sapiens; identical to SEQ ID NO: 200370
  chr6:27218586-27218951
  hyper

SEQ ID NO: 283907 - DNA, 615 bp, Homo sapiens; identical to SEQ ID NO: 200371
  chr6:27218980-27219595
  hyper

SEQ ID NO: 283908 - DNA, 171 bp, Homo sapiens; identical to SEQ ID NO: 200372
  chr6:27219656-27219827
  hyper

SEQ ID NO: 283909 - DNA, 38 bp, Homo sapiens
  chr6:27248068-27248106
  hyper
ccggggacctttcgcgtgtgaggcgaacgtgataacca

SEQ ID NO: 283910 - DNA, 54 bp, Homo sapiens
  chr6:27256447-27256501
  hyper
gaggagccctactccccccggaatcagaactgtgcatagcgggctctggatttg

SEQ ID NO: 283911 - DNA, 267 bp, Homo sapiens
  chr6:27264051-27264318
  hyper
aagctcctgaagaaggggtttcagagctcggaccctcttagacagattgtagaagttcagtcacccggaaattgctggggcggtttggttttggagagaggcggggacgaaagaagaaagctgtgagcgaggagagaaggcagggaatgtgaacaggaaaaagctcttgcgctaaggaatgtcagagaagccagcgcccggtgcagccgagaagcttagcgacagggttgctgggccggagaccacgagatcctagaggctacaaag

SEQ ID NO: 283912 - DNA, 227 bp, Homo sapiens
  chr6:27300804-27301031
  hyper
gcccagcacgcttccgctgcgccactctgctaagcggtttctgaagaccactgatcttaatttcaatcatcaaaatcacctttcagtaccgacaaaattttcattgtctaattatttcattttgtatctgatcgtttacactgtccctatctctgccaagcaagtcgaagattcgctacccgataatcagatggcctcaggtcataacctccagatctgtgcttttc

SEQ ID NO: 283913 - DNA, 89 bp, Homo sapiens
  chr6:27342362-27342451
  hyper
ttccctgcactaccgctggttatgtttccttagtgaccctaggcctcttgcaggagagtccctggtcccagccagcgggagcggcttct

SEQ ID NO: 283914 - DNA, 167 bp, Homo sapiens
  chr6:27343029-27343196
  hyper
cgcagactacatttcccagggttgtctgcggctggagagatttagggtttggggcgtggctagcacaggcctgaggtcctaattgggaggtgtaggcatggcggctggagagtctgatctatgtgacacctccactgtgactagggtataacgtgaataatttgtat

SEQ ID NO: 283915 - DNA, 154 bp, Homo sapiens
  chr6:27356279-27356433
  hyper
gatttatttgtgtacgctatttaaaactctgtgaaccaccggtctaggctatactttgcagtgtattaaggtggtcttcggcacctctcgcagacccccttcctcttgcctctagcgccaacctctcagcctctcgcataccaggggaggggct

SEQ ID NO: 283916 - DNA, 222 bp, Homo sapiens
  chr6:27356463-27356685
  hyper
gcacagccctgctgtagctggctctcaggcgcaagcgcagagctgcgaccgctgctgatacgttgctcagtctcagtgtggtctctgttttgcaactggtcgtccgcgtcaggagacttaggtccaggcgactgcccagacaatgactggtcccgcataccgagcagagcatgatcagcagcagtctgagtggaagagtgcctgtgatcttagggaacctga

SEQ ID NO: 283917 - DNA, 533 bp, Homo sapiens
  chr6:27440466-27440999
  hyper
tgactcacacccctgcgagctcggataacacgaagacacacctgttgcagagcgttaaagctggaaggtggacaaacagggcggggcccggcacccgacttccccttaggccagaacaaaagaacaaagccctccaagggatcagggcgggaccgccccgcacagaaggaggcgaggtgcgcccccttcgaggactccccagctttctcctgcagaggcctctaagcgcgaaatcagaagggtgacgtcacgagtccggagggctggctgttgccatggtgatacctgagctcccctccccctatagcgatccacacactctgatcccgggtccggaagcgcattgaccgccaccagacctaacgcagggagccgaagcaactggacttccagcgcgccaacctctttccacgcctacaaccggcttcaacggtcacttccggtcgttacgagcgagccccgccccgcacgccggcgccgggcgggcacactggaccagcgttcccagaacactccgcgaaggtgttcctgaa

SEQ ID NO: 283918 - DNA, 216 bp, Homo sapiens; identical to SEQ ID NO: 200375
  chr6:27447357-27447573
  hyper

SEQ ID NO: 283919 - DNA, 835 bp, Homo sapiens
  chr6:27470527-27471362
  hyper
ttccgggcgccgacgggagctcgctcactgtttactaacgtgaagtttgtattctttgtttggaacgctgatgatgctcatcctcacgcgggagtactctcattccagtgctcttgtccaggtggcacaggaggttggctttttttgcttttttttttttaaccaaactctcgttgtacctgaaagtttgcgttcaactcacaaagcccattttcttgtacctagatagtaattatcctgatttgcattttctcatgtctataccgtgaaaaaaaacgttgtgattctgtgtagtcgtggccgagtggttaaggcgatggactagaaatccattggggtctccccgcgcaggttcgaatcctgccgactacgagttcgaggttttagataattaacaacagaaaatttagaagaaagaaatttaagccaactcacgtgttgcgaactgaatttgtttggtacttccccgatcctgaaaccccacaacaatggagggtggaagttactgaatacctactattttcataagattatgggtaccttaattagcagatacctagtcattttcccgttagcggtacctttgtacggttcttggggacgcctctcgtttccctgccttccaaaccctcctgaagcctatacctgttacaagtcttgatagtgctttcctcttcatggaaatttagtcctagtcagaggtccaagtctttggtcaattatcagtttctgtggaatcaatggttcaactgctttggtcacccggtctcgctggttgcaaatgactagaaacactgtcagagatctcgacaccaccacaatcgaaagaccaggc

SEQ ID NO: 283920 - DNA, 134 bp, Homo sapiens; identical to SEQ ID NO: 231952
  chr6:27486949-27487083
  hyper

SEQ ID NO: 283921 - DNA, 217 bp, Homo sapiens
  chr6:27560493-27560710
  hyper
gagtttactccctcggtcactgtaggtcttcagtcattcatgagaggtgttaaagcacctctaacaagtgcaagatgcagtgttttggaggaaaaaaacaggcacctagcagaggatggtttcgatccatcgacctctgggttatgggcccagcacgcttccgctgcgccactctgctgtccccttcagctgttgtgccttatctccaagtaactta

SEQ ID NO: 283922 - DNA, 31 bp, Homo sapiens; identical to SEQ ID NO: 231958
  chr6:27561177-27561208
  hyper

SEQ ID NO: 283923 - DNA, 33 bp, Homo sapiens; identical to SEQ ID NO: 200376
  chr6:27598639-27598672
  hyper

SEQ ID NO: 283924 - DNA, 70 bp, Homo sapiens
  chr6:27635788-27635858
  hyper
tgaatatcttcgccgattacatcagtgcttatgtttgtgacttcagagacactgagaaggcgcggctctt

SEQ ID NO: 283925 - DNA, 38 bp, Homo sapiens; identical to SEQ ID NO: 200377
  chr6:27636297-27636335
  hyper

SEQ ID NO: 283926 - DNA, 90 bp, Homo sapiens; identical to SEQ ID NO: 200378
  chr6:27636531-27636621
  hyper

SEQ ID NO: 283927 - DNA, 108 bp, Homo sapiens; identical to SEQ ID NO: 200379
  chr6:27640312-27640420
  hyper

SEQ ID NO: 283928 - DNA, 79 bp, Homo sapiens; identical to SEQ ID NO: 231967
  chr6:27648346-27648425
  hyper

SEQ ID NO: 283929 - DNA, 1107 bp, Homo sapiens; identical to SEQ ID NO: 231968
  chr6:27655156-27656263
  hyper

SEQ ID NO: 283930 - DNA, 103 bp, Homo sapiens; identical to SEQ ID NO: 200381
  chr6:27661581-27661684
  hyper

SEQ ID NO: 283931 - DNA, 157 bp, Homo sapiens; identical to SEQ ID NO: 200382
  chr6:27662125-27662282
  hyper

SEQ ID NO: 283932 - DNA, 106 bp, Homo sapiens; identical to SEQ ID NO: 200383
  chr6:27775598-27775704
  hyper

SEQ ID NO: 283933 - DNA, 33 bp, Homo sapiens; identical to SEQ ID NO: 200384
  chr6:27776011-27776044
  hyper

SEQ ID NO: 283934 - DNA, 113 bp, Homo sapiens; identical to SEQ ID NO: 231972
  chr6:27776275-27776388
  hyper

SEQ ID NO: 283935 - DNA, 80 bp, Homo sapiens
  chr6:27777635-27777715
  hyper
aacaactgtatagcgaaaatagaaaataaaatatggagaccatgaactgctaagtctgtcagaggaataggtgaacaaca

SEQ ID NO: 283936 - DNA, 423 bp, Homo sapiens
  chr6:27778156-27778579
  hyper
ggggctctttgaggacaccaacctgtgcgccatccacgccaagcgggtgactatcatgcccaaggacatccagctcgcacgtcgtatccgcggcgagagggcttgagtctcaaggactcactgattacatacccaaaggctcttttcagagccacccacatgcgcgctgaaaagatctgtttctctcaggaattcttcctggtacttgttttgcctgtagtagatagggcccatttccagacgttatacaatctgtttcgtaagactcagcctatccctttttgaatgctaattttgggagtcttaacatctaataatgtccggcatttttccgtaagcattgagtgtagccaaaagttccttcgtgtattgctctcccatctccgcagcccggttttgaccggatggtgcttctaattttct

SEQ ID NO: 283937 - DNA, 124 bp, Homo sapiens; identical to SEQ ID NO: 200387
  chr6:27782099-27782223
  hyper

SEQ ID NO: 283938 - DNA, 85 bp, Homo sapiens; identical to SEQ ID NO: 200388
  chr6:27782642-27782727
  hyper

SEQ ID NO: 283939 - DNA, 438 bp, Homo sapiens; identical to SEQ ID NO: 231976
  chr6:27792190-27792628
  hyper

SEQ ID NO: 283940 - DNA, 354 bp, Homo sapiens; identical to SEQ ID NO: 42814
  chr6:27798705-27799059
  hyper

SEQ ID NO: 283941 - DNA, 267 bp, Homo sapiens; identical to SEQ ID NO: 200391
  chr6:27804768-27805035
  hyper

SEQ ID NO: 283942 - DNA, 271 bp, Homo sapiens; identical to SEQ ID NO: 231980
  chr6:27805258-27805529
  hyper

SEQ ID NO: 283943 - DNA, 153 bp, Homo sapiens; identical to SEQ ID NO: 200392
  chr6:27805754-27805907
  hyper

SEQ ID NO: 283944 - DNA, 575 bp, Homo sapiens; identical to SEQ ID NO: 42819
  chr6:27805936-27806511
  hyper

SEQ ID NO: 283945 - DNA, 240 bp, Homo sapiens; identical to SEQ ID NO: 200394
  chr6:27806811-27807051
  hyper

SEQ ID NO: 283946 - DNA, 78 bp, Homo sapiens
  chr6:27833292-27833370
  hyper
cggtgctggagtacctgactgccgagatcctggagctggcgggcaacgccgcccgcgacaacaagaagacccgcatta

SEQ ID NO: 283947 - DNA, 79 bp, Homo sapiens; identical to SEQ ID NO: 231984
  chr6:27833430-27833509
  hyper

SEQ ID NO: 283948 - DNA, 487 bp, Homo sapiens; identical to SEQ ID NO: 200395
  chr6:27840617-27841104
  hyper

SEQ ID NO: 283949 - DNA, 149 bp, Homo sapiens; identical to SEQ ID NO: 200396
  chr6:27841257-27841406
  hyper

SEQ ID NO: 283950 - DNA, 48 bp, Homo sapiens; identical to SEQ ID NO: 200397
  chr6:27858740-27858788
  hyper

SEQ ID NO: 283951 - DNA, 71 bp, Homo sapiens; identical to SEQ ID NO: 231989
  chr6:27860879-27860950
  hyper

SEQ ID NO: 283952 - DNA, 65 bp, Homo sapiens; identical to SEQ ID NO: 200398
  chr6:28109924-28109989
  hyper

SEQ ID NO: 283953 - DNA, 34 bp, Homo sapiens; identical to SEQ ID NO: 231992
  chr6:28186864-28186898
  hyper

SEQ ID NO: 283954 - DNA, 93 bp, Homo sapiens; identical to SEQ ID NO: 200399
  chr6:28219718-28219811
  hyper

SEQ ID NO: 283955 - DNA, 191 bp, Homo sapiens; identical to SEQ ID NO: 200400
  chr6:28220077-28220268
  hyper

SEQ ID NO: 283956 - DNA, 324 bp, Homo sapiens; identical to SEQ ID NO: 200401
  chr6:28249085-28249409
  hyper

SEQ ID NO: 283957 - DNA, 146 bp, Homo sapiens; identical to SEQ ID NO: 200402
  chr6:28249579-28249725
  hyper

SEQ ID NO: 283958 - DNA, 204 bp, Homo sapiens; identical to SEQ ID NO: 200403
  chr6:28303247-28303451
  hyper

SEQ ID NO: 283959 - DNA, 73 bp, Homo sapiens; identical to SEQ ID NO: 200404
  chr6:28303489-28303562
  hyper

SEQ ID NO: 283960 - DNA, 208 bp, Homo sapiens; identical to SEQ ID NO: 200405
  chr6:28303607-28303815
  hyper

SEQ ID NO: 283961 - DNA, 165 bp, Homo sapiens; identical to SEQ ID NO: 200406
  chr6:28304301-28304466
  hyper

SEQ ID NO: 283962 - DNA, 188 bp, Homo sapiens; identical to SEQ ID NO: 200407
  chr6:28414754-28414942
  hyper

SEQ ID NO: 283963 - DNA, 320 bp, Homo sapiens
  chr6:28456972-28457292
  hyper
gacatacgaatacacggggaaacgtattcggcagtctacagtgtcaaaggatttttctattaatccaagaaagagcattacagaaagctatacaatacgtgaagacgattaaaaggaatatatctatacataattttaaaaaacctttgaatcttgaaagtcactcacttagggtacgtgaagctgccaaatttatcagagaaggaacaggcatctctcgcatggagccgtgggcctcggcgttaaggcactcttcagctacaggtggcagcccgtttagctcttcttaaggtcttgtgatgtcattttcaagaggccag

SEQ ID NO: 283964 - DNA, 208 bp, Homo sapiens
  chr6:28457345-28457553
  hyper
ggcggggagcaggactccactgctttggcctcaaggagtttggtcgacacttgaagactgaccaagaaaaagtaatttgtcccagttttctcccaccctttgttttcttctgctcctcttgggcttgttttttttttgggggggggggttctttcttttttcttttcttttttttttttttttcccgcagtaagttctgaaaatcgcc

SEQ ID NO: 283965 - DNA, 150 bp, Homo sapiens; identical to SEQ ID NO: 200409
  chr6:28458192-28458342
  hyper

SEQ ID NO: 283966 - DNA, 251 bp, Homo sapiens; identical to SEQ ID NO: 232001
  chr6:33538965-33539216
  hyper

SEQ ID NO: 283967 - DNA, 176 bp, Homo sapiens; identical to SEQ ID NO: 232002
  chr6:33547966-33548142
  hyper

SEQ ID NO: 283968 - DNA, 43 bp, Homo sapiens; identical to SEQ ID NO: 200410
  chr6:34113557-34113600
  hyper

SEQ ID NO: 283969 - DNA, 41 bp, Homo sapiens
  chr6:34119317-34119358
  hyper
cttcggcagagtggcagggctccgggcgccagggggagcag

SEQ ID NO: 283970 - DNA, 344 bp, Homo sapiens; identical to SEQ ID NO: 232007
  chr6:34191991-34192335
  hyper

SEQ ID NO: 283971 - DNA, 249 bp, Homo sapiens; identical to SEQ ID NO: 200412
  chr6:34359487-34359736
  hyper

SEQ ID NO: 283972 - DNA, 76 bp, Homo sapiens; identical to SEQ ID NO: 200413
  chr6:34405060-34405136
  hyper

SEQ ID NO: 283973 - DNA, 39 bp, Homo sapiens; identical to SEQ ID NO: 200414
  chr6:34405256-34405295
  hyper

SEQ ID NO: 283974 - DNA, 59 bp, Homo sapiens; identical to SEQ ID NO: 200415
  chr6:34856883-34856942
  hyper

SEQ ID NO: 283975 - DNA, 418 bp, Homo sapiens
  chr6:35181443-35181861
  hyper
catggagaccaggcccgctcccccatcgccggattgtaaattcctgcaggcagcggcccggcagcctggggagggggccaccgcgcccgggcgcgcagggggagcggccaccgcgccgaggccccatttgaaagaaaaaagggcacgaaaaaggaggtggtggagaaggaggaggaggaggaggaggaggagggggaggaggaagaaaacgaaaaggagcgaggagaggaggagaaagaggaggaggaggagaaaggcgaagaaaaagagcctgagagacggagaaagagcgagagaggaagaaagagaggcagaaagggcgtgtttctggcgctgcgtttcccctcccctttctcaggtccttcgctcgggctctgcgcgctctccggctgcagctctctcccggcgaagctgggaa

SEQ ID NO: 283976 - DNA, 217 bp, Homo sapiens
  chr6:35181983-35182200
  hyper
gctctccccgacgtccggccaggaggagccggtagcatcgggagcctcgcgccgagggcgccgcggtccgcgccccgcgactgcagcccccggcctggccccggcggggcgccccctcccctccccctcctgcgagctgggatccggccggcttccgccctcccctggccgcgagaccggccccggcggctgggccgccagtagctccagccatggg

SEQ ID NO: 283977 - DNA, 307 bp, Homo sapiens; identical to SEQ ID NO: 232012
  chr6:35227367-35227674
  hyper

SEQ ID NO: 283978 - DNA, 1084 bp, Homo sapiens; identical to SEQ ID NO: 232013
  chr6:35435672-35436756
  hyper

SEQ ID NO: 283979 - DNA, 313 bp, Homo sapiens; identical to SEQ ID NO: 232014
  chr6:35464273-35464586
  hyper

SEQ ID NO: 283980 - DNA, 1265 bp, Homo sapiens
  chr6:35655508-35656773
  hyper
aatttactgaacggcggccaaacgctgaacacactgtcctgaaccacactgaagggtatctacaattctgcatctccgcttacaacttgaaacttactacgctttcgccaccactgcagaacccgattttagagactacgatggtcctgccggttcgttaatcgaagaaagccactctgcaccctgacgctcgtagtgtctttttggtaatactggtttttgactcttatactgtgaccggtgcacctttttggacgaccaataaggcggaagacgttttcacgtcccagaacagaagagcataaggagccctggcacagcgttcagccgcttcggtatggcctgggagtgacgcggatcacctgttagacggcgctgcgcggactcctccacaagcggccgacagcggcgatgcggttccccaacgcttgtcccgaggcggcaggtgaaggcggggaccgcccgtccacacccggagcgcggccaccccgccaccatccccttcacagccccgccaggtgggcgaatccgccccgcgcccgcggcgtcccggcgctcggctcgccctggggtccggttgtcccggcgcccggacccgaaagcgaagtttggctcccgcccgcagcggtgccggctgagggtccggccgcctgtccggggagagccgggggccagagaccggaggcggagcgggacctgtcatcccgggcgggaaacaaaagcccagtgaggacgggcgggcgcgacccgcctcgcctctgccgggagaggccggcgggggcggagagcggcgcccgcggtcactagtctccgcgcctcccgcggggagcaccggccccgcggcccctggggcgcggcgaggggcgccgcagtggggccgaggcctcccgcgcgctcccctcgaggcttccggaccccgctcccccgcgacacgcggctcctgggctgcgaagccgcgtgggggtgggagctgaggcagcgagtgcgaccgcggcgggacctggaaggagggcgttcggctcccggggcgccgcggccggccgccccatctccgtggccatggcgccggtacctgtcgccgcgggggctcgccgactccgtcactctccgccttgcccgtgctccgctaacccttcagcccgcccagcaggccgcccgcgcgccggacaccgccgcccgagactggcagcgcccgcgagccggcccgaatccccggggcagcgcccggcgccgtcccgccccagccggccgcaggacccgccttc

SEQ ID NO: 283981 - DNA, 67 bp, Homo sapiens
  chr6:35744105-35744172
  hyper
taaatacaataaaatagagttttatcttacaataaaaatagagttttatcttacagtttcaagcttc

SEQ ID NO: 283982 - DNA, 462 bp, Homo sapiens
  chr6:35744202-35744664
  hyper
agggcccctacagtctggaatcccgcccgtgcgagcctgagcgcctttcctccctccttcccttccgcaggcgtcctcgccctccacgtccctcctccgccggggtggcctggggcgccgggtcacgtggccggggaagaggttttatcccgcggcccctcggaaccccgccgctgctctgccgcccaggcccatggccgcagccctggcgctcgtggcgggggtcctgtcgggggcggtgctgcccctctggagcgcgcttccgcaatataaaaaggtgagccggggagcgcgcccagccggccgcgaccgcaggagagggtggccccgccgccggggcactggagcccgaaggcgccgggcagcctgaaagggagaggtgggtccggaaccacacccaggcgggtagcctggggcatcctcagacggacttcaaaagccgcttcactttcccctggtggc

SEQ ID NO: 283983 - DNA, 90 bp, Homo sapiens; identical to SEQ ID NO: 200417
  chr6:35995284-35995374
  hyper

SEQ ID NO: 283984 - DNA, 469 bp, Homo sapiens
  chr6:36098064-36098533
  hyper
aggcaccggggtcccgctgggcagccccgaccccgtgcctgggccgcacctgccgcagtggctccgtcgggccgggcggaagcgcgggagcgcagggctggacaggcccgggcgtggcggccccggcgcacctgggcgagccggcaggtgggagcgtagcagcccggggcccccgccctcgcgcgggggaggagcgggcggcgcggggcgggcgcagcgggggtcggggcgctgggagcccgttgggccgcgaacgcagccgccacgctggggccgccgagatcgggtgcccgggatgagcctcatccggaaaaagggcttctacaagcaggacgtcaacaagacagcctgggagctgcccaagacctacgtgtccccgacgcacgtcggcagcggggcctatggctccgtgtggtgagacccctgggccgctggggggcggggggcgggcgccaggctctcccctttc

SEQ ID NO: 283985 - DNA, 113 bp, Homo sapiens; identical to SEQ ID NO: 232022
  chr6:36354418-36354531
  hyper
